United States Patent Application Publication US 2017/0114356 A1 - sequence listing, part 95

SEQ ID NO: 157093 - protein, 602 aa, Zea Mays
MLIPPPFAAFQLSNLQEGSMLHGFLMALFSLWGWDHVFPKYNNMVRVILNSMSWVTVLTIVVSLAITSAGQRSCELAIIIFVVATCLIACFTAMLVLEYAKAPLEAKAHAPRAKVLRDGNWRDVHAANLVPGDIIFLKVGDIVPANARILRFQKIDTMTCWAKRSVDCAHGFLLYYAWTVSCGQGTAVVIATGRGIPRSTLRLYPQRYARPGQLKEGAMLTGCFCASLVLVGTFAEIVLRFLFQKQNYRGMPLDAHFMPLIGGIPMAMPTFFYLALALGSVRLCFLGIASRGTVALEDLASVDVILFNMTGTLTCNQPCFVRDKIEMFADSVNKDHAIVLAARASRSQHELYIEPIDAAILSLLDDPEQARLGVQVLEHHASFFVALKLMFQTTYIDEGNRFKCCVFKGDPAKVAHHCGSSKEVKEKISMIMDELALDGYQAIAVGHQVDSCWDFIALLPYTDDLRSDSADVVDSLIDLGLDIRVLTESPLSTTKQTEDKSDIVRRLRNFGCHCAMVGYEFLDHDAIGESHIGISVADATDYTKSESDLVLTQPALMPVSSAVQISRKICQMLRSYTVGHSDAFRGLISDKMFYIWIIINGY

SEQ ID NO: 157094 - protein, 545 aa, Zea Mays
MAALDDKAMTDLETLEEEEVLRRLGTAEEAGLTDNEAARRLRLHGPNVVVLSHHEGSMLHGFLMALFSLWGWDHVFPKYNNMVRVILNSMSWVTVLTIVVSLAITSAGQRSCELAIIIFVVATCLIACFTAMLVLEYAKAPLEAKAHAPRAKVLRDGNWRDVHAANLVPGDIIFLKVGDIVPANARILRFQKIDTMTCWAKRSVDCAHGFLLYYAWTVSCGQGTAVVIATGRGIPRSTLRLYPQRYARPGQLKEGAMLTGCFCASLVLVGTFAEIVLRFLFQKQNYRGMPLDAHFMPLIGGIPMAMPTFFYLALALGSVRLCFLGIASRGTVALEDLASVDVILFNMTGTLTCNQPCFVRDKIEMFADSVNKDHAIVLAARASRSQHELYIEPIDAAILSLLDDPEQVAHHCGSSKEVKEKISMIMDELALDGYQAIAVGHQVDSCWDFIALLPYTDDLRSDSADVVDSLIDLGLDIRVLTESPLSTTKQVCGKLGKLGTNVVPAHIVFELARNNREVHSNINGISDLFPDIHHFINCPSCEFNL

SEQ ID NO: 157095 - protein, 408 aa, Zea Mays
MAALDDKAMTDLETLEEEEVLRRLGTAEEAGLTDNEAARRLRLHGPNVVVLSHHEGSMLHGFLMALFSLWGWDHVFPKYNNMVRVILNSMSWVTVLTIVVSLAITSAGQRSCELAIIIFVVATCLIACFTAMLVLEYAKAPLEAKAHAPRAKVLRDGNWRDVHAANLVPGDIIFLKVGDIVPANARILRFQKIDTMTCWAKRSVDCAHGFLLYYAWTVSCGQGTAVVIATGRGIPRSTLRLYPQRYARPGQLKEGAMLTGCFCASLVLVGTFAEIVLRFLFQKQNYRGMPLDAHFMPLIGGIPMAMPTFFYLALALGSVRLCFLGIASRGTVALEDLASVDVILFNMTGTLTCNQPCFVRDKIEMFADSVNKDHAIVLAARASRSQHELYIEPIDAAILSLLDDPEQS

SEQ ID NO: 157096 - protein, 1440 aa, Zea Mays
MCCCCLTESASPTAAPPPDPSPNLGGGGGGEGHFQDSDEALPPSAASHATTTDHHQQQQQQQQEEEGRMFKLHRHRSSDRVGERFDFRFSNFRAVQVPAVSDRLFLSIVSVDSGRTIAKSSKVASRSGICQWPDTILEPIWFSKDEVSKEFEDCQYKIIVSLGSTKSGILGEIFLNLSNFLNIVDPTAISLPLKRCNAGTVLQLKVQCLGTKSKLSGVRSLRDMAPRLDDRSPTPTNDEMDNKSDCSDGMFNRSVRSSSENHLVGTYQDESGNRETSFSAPGSHRSSNSGDSTADRTNFSPRDNSSGGLYVGRQDSASSYASYVSAGRGDDGLRSNNSSFSSRASGPNLLQGNTPKIFSNGLSQLSMGASDSSKDLLEAAEETIEELRDEAKMWERHSRKLKADLEMLKKECSEKSKQHAELAGELSAAQAERDSYRHEIEELKSSLQDVNTRQTITGTPKRSDWIDLQKELEGEVKFLRESNADLTIQLNRTQESNIELLSILQELEETIEEQRVEISKISKVKQTADPENGLLVKEDKEWAKKLSMKDDEITVLREKLDRALNIGNAGGAGSNAIYLELEKENEILRAKIQELEKDCSELTDENLELIYKLKENGLTKGQVPRISNNNELQFEKLTSRIRQLEEELRNKEMLRDDSFSESSTSNADELQRKCADLELKLLNFRSQTCELEEKFQKSQEELEQRNLELSELRRKLNGLHSTELEVFESGATWKYQSRTADLEDTEPETDTLKARFELQLQENDDLRSSKVEMENFISEIQAEKSQLEERLSVSLKESSITSKCLDEVRKDILVLSSSIDSHVSANKVLERNIIELESCKAELELHVSELEQENIELSERISGLEAQLTYLTNEKESSELQIHDSRSLIINLKDKVERQQSEMETQRLEFKQKQQESQRRLSETQDDSEVLRRSNSKLQSTVESLIEECSSLQNLTADLKRQKLEMHGHLTQKEQELDESKKRNFEFSKTVEFLEAKLSSLHKDVSSKEQSLLSELESIFQEHMEQEERINRAHFMLNKIEKEKTLEVENLKREVVSLTAQVSSTHEERESATLDAIREVSVLRADKAKLEANLQDVSTQLRHYESQLEDLRKESKNKIKGLVDSLNASKQSEEMLTSDAEHMKKLMEAARSNEDTLRKTSNELELKLKSSDYEKQQMLEEISGLKLQVQKIMNLQDEVFKLQSSLDEAKFGKGKLEEILRSVTEECEELKAQKAMLTDKVSDMQETLRNGEEEKRNRIAMQAKLVRLESDLSASEASHVHEAELKNELSRIKRSNSEYQRKIQSLEQENEDLTRRVQTMEKGFEQMSHVKENLGKQELGGDNQAAIQSKIELLETKLAEALEENKMYRAQQKSPMPEGQPSAGAGDGKEGNTDRILQLEGELRDMKERLLNMSLQYAEVEAQRERLVMELKAMKKGRWF

SEQ ID NO: 157097 - protein, 321 aa, Zea Mays
MEVEDLEDLYNIDASYDQDDPDDARGSSADEEEDEEDDEEEEEEEPEGARLVAGDCGPSPRARVSEFAAAAGAAVERAHTANCPVCMDPWTSQGPHRISCIPCGHVYGRSCLEKWLTQRGNRSATCPQCGKRFKHKDIINLYAQEVAVPNSELEKEISYLRREICSLKKMVVHHDKMFEEMIKRQNDGVRSKRQKVAEHSYEAANLVASTPATISFSLQNELPVAGARVISIDTSNKIILVSGRANAIGAEYVVTKISMLSNREVRKIHLPPETKAVRDMCILPGGSAIFTSLGRRLSLFSMATDSIVLNWDLPVMISAGL

SEQ ID NO: 157098 - protein, 217 aa, Zea Mays
MFHRLLRRAMPLPPPQSPLPAPRMPGVTGGRLFASLPSPPPLQSRREVHVWYLLPDELKDASQLKMYTELLSPSERKTALSMNGEKLQKGAVLSRALLRTTLSRYTDCKVDPRSFEFKKNKFGKPEVLWRSDDSRMEWPLHFNISHTSSLIVCGITMDTPIGIDVEEKTRKTAKNILSLARRYFTPSEIDYLAKIPDPDAQQKEFVKLWTLKVSELS

SEQ ID NO: 157099 - protein, 105 aa, Zea Mays
MFHRLLRRAMPLPPPQSPLPAPRMPGVTGGRLFASLPSPPPLQSRREVHVWYLLPDELKDASQLKMYTELLSPSERKTALSMNGEKLQKGAVLSRALLRTTLSRY

SEQ ID NO: 157100 - protein, 222 aa, Zea Mays
MFHRLLRRAMPLPPPQSPLPAPRMPGVTGGRLFASLPSPPPLQSRREVHVWYLLPDELKDASQLKMYTELLSPSERKTALSMNGEKLQKGAVLSRALLRTTLSRYTDCKVDPRSFEFKKNKFGKPEVLWRSDDSRMEWPLHFNISHTSSLIVCGITMDTPIGIDVEEKTRKTAKNILSLARRYFTPSEIDYLAKIPDPDAQQKEFVKLWTLKFPGTKSIERF

SEQ ID NO: 157101 - protein, 270 aa, Zea Mays
MFHRLLRRAMPLPPPQSPLPAPRMPGVTGGRLFASLPSPPPLQSRREVHVWYLLPDELKDASQLKMYTELLSPSERKTALSMNGEKLQKGAVLSRALLRTTLSRYCKVDPRSFEFKKNKFGKPEVLWRSDDSRMEWPLHFNISHTSSLIVCGITMDTPIGIDVEEKTRKTAKNILSLARRYFTPSEIDYLAKIPDPDAQQKEFVKLWTLKEAYVKALGRGFSGAPFNKFSIILAANGRIQISVVYYFPLCAHACQYNSYTTCMNLWNRSV

SEQ ID NO: 157102 - protein, 82 aa, Zea Mays
MEWPLHFNISHTSSLIVCGITMDTPIGIDVEEKTRKTAKNILSLARRYFTPSEIDYLAKIPDPDAQQKEFVKLWTLKVSELS

SEQ ID NO: 157103 - protein, 81 aa, Zea Mays
MESAPKVSNGSDSIHDCLSENWQFALAELNSSHYMAICIEDDSTSSDSGNGRLPLGLKVWKTTPFVEDILVSGTEAVKLVS

SEQ ID NO: 157104 - protein, 254 aa, Zea Mays
MRAASSTVYPVYLSLHRHPNSHQASFRPSRANHDNTHKCTKPPKVLRRSLFSLPASFLLLHTSSSLAVDDANMPSTSTIDTTITDRIFMDFSVCPSYFRSDRPLGAELSSCPDSEPLGRVVFGLYGRLLPVTTANFKATCTAAAYRGTLVHKLLQGQFFAAGRQGPRHDKGMQGLARFRYALDRMTMMTTSSSTPIITILNSWLLQGQDPVLSLMARTSSLGLYWKEWMSSPASQPYLPTNQLKGSASSTALRS

SEQ ID NO: 157105 - protein, 69 aa, Zea Mays
MDVITSIATIPTYKPAERIRLFNGFAQLIGDGRAQTARAMWDRPLKTVYISDCGELTVTKPSLSPPSLP

SEQ ID NO: 157106 - protein, 288 aa, Zea Mays
MRAASSTVYPVYLSLHRHPNSHQASFRPSRANHDNTHKCTKPPKVLRRSLFSLPASFLLLHTSSSLAVDDANMPSTSTIDTTITDRIFMDFSVCPSYFRSDRPLGAELSSCPDSEPLGRVVFGLYGRLLPVTTANFKATCTAAAYRGTLVHKLLQGQFFAAGRQGPRHDKGEVQPPSGLVRNSETVNPKAFELRHARPGTLSLCLGQNDDDDDIKLNPNYHNLEFLVTTGPGPCPELDGQNIVFGTVLEGVSSFMKKPSFLVIGNLCGHKHILCMNNKQTIWIWICIH

SEQ ID NO: 157107 - protein, 788 aa, Zea Mays
MAAAVAMRGGSSDSGGFDKVPGMDSGKYVRYTPEQVEVLERLYIDCPKPSSSRRQQLLRECPILSNIEPKQIKVWFQNRRCRDKQRKESSRLQAVNRKLTAMNKLLMEENERLQKQVSQLVHENAHMRQQLQNTSLANDTSCESNVTAPPNAIRDASNPSGLLAIAEETFTEFLSKATGTAIDWVQMPGMKPGPDSVGIVAISHGCRGVAARACGLVNLEPTKVIEILKDRPSWFRDCRSLEVFTMFPAGNGGTIELIYMQMYAPTTLVPARDFWTLRYTTTMEDGSLVVCERSLTGSGGGPNAASAQQFVRAEMLPSGYLVRPCEGGGSIVHIVDHLDLEAWSVPEVLRPLYESSRVVAQKMTTVALRHLRQIAQETSGEVVYALGRQPAVLRTFSQRLSRGFNDAISGFNDDGWSVMGGDGIEDVVVACNSTKKIRNNSNAGITFGAPGGIICAKASMLLQSVPPAVLVRFLREHRSEWADYNIDAYLASSLKTSACSLPGLRPMRFSGGQMIMPLAHTVENEEILEVVRLEGQPLTHDEALLSRDIHLLQLCTGIDEKSVGSSFQLVFAPIDEHFPDDAPLISSGFRVIPLDMKTDSVATMARQYVRSVVSAVQRVSMAISPSQSGLNAGQRMLSGFPEAATLARWVCQSYHYHLGVELLNQSDEAGEALLKMLWHHPDAVLCCSFKEKPMFTFANKAGLDMLETSLIALQDLTLDKIFDESGRKAIFSDISKLMEQGYAYLPSGVCMSGMGRHVSFDQAVAWKVLGEDSSVHCLAFCFVNWSFV

SEQ ID NO: 157108 - protein, 951 aa, Zea Mays
MAAAVAMRGGSSDSGGFDKVPGMDSGKYVRYTPEQVEVLERLYIDCPKPSSSRRQQLLRECPILSNIEPKQIKVWFQNRRCRDKQRKESSRLQAVNRKLTAMNKLLMEENERLQKQVSQLVHENAHMRQQLQNTSLANDTSCESNVTAPPNAIRDASNPSGLLAIAEETFTEFLSKATGTAIDWVQMPGMKPGPDSVGIVAISHGCRGVAARACGLVNLEPTKVIEILKDRPSWFRDCRSLEVFTMFPAGNGGTIELIYMQMYAPTTLVPARDFWTLRYTTTMEDGSLVVCERSLTGSGGGPNAASAQQFVRAEMLPSGYLVRPCEGGGSIVHIVDHLDLEAWSVPEVLRPLYESSRVVAQKMTTVALRHLRQIAQETSGEVVYALGRQPAVLRTFSQRLSRGFNDAISGFNDDGWSVMGGDGIEDVVVACNSTKKIRNNSNAGITFGAPGGIICAKASMLLQSVPPAVLVRFLREHRSEWADYNIDAYLASSLKTSACSLPGLRPMRFSGGQMIMPLAHTVENEEILEVVRLEGQPLTHDEALLSRDIHLLQLCTGIDEKSVGSSFQLVFAPIDEHFPDDAPLISSGFRVIPLDMKTDGVSSGRTLDLASSLDVGSAAPQASGDAPPDDCNLRSVLTIAFQFPYEMHLQDSVATMARQYVRSVVSAVQRVSMAISPSQSGLNAGQRMLSGFPEAATLARWVCQSYHYHLGVELLNQSDEAGEALLKMLWHHPDAVLCCSFKVPEELYSSPQYSNLLKQRQIPLTRETYVYVCKQGRARHVRNISYCAARPDARQDLRRVRKESNILRYLKTNGTGLRVPAVGRVHVRNGSACLIRPSCSVEGARRGQQRPLPGVLLRQLVLRLTRHPMACVMSRPIFLYGDPNMGKPSAVTEGFMLHALVVRLESSVFMKKLDTAQSLVPLTFDCLPGNRLFVYLTGQPKRCLFHSDVTC

SEQ ID NO: 157109 - protein, 850 aa, Zea Mays
MNKLLMEENERLQKQVSQLVHENAHMRQQLQNTSLANDTSCESNVTAPPNAIRDASNPSGLLAIAEETFTEFLSKATGTAIDWVQMPGMKPGPDSVGIVAISHGCRGVAARACGLVNLEPTKVIEILKDRPSWFRDCRSLEVFTMFPAGNGGTIELIYMQMYAPTTLVPARDFWTLRYTTTMEDGSLVVCERSLTGSGGGPNAASAQQFVRAEMLPSGYLVRPCEGGGSIVHIVDHLDLEAWSVPEVLRPLYESSRVVAQKMTTVALRHLRQIAQETSGEVVYALGRQPAVLRTFSQRLSRGFNDAISGFNDDGWSVMGGDGIEDVVVACNSTKKIRNNSNAGITFGAPGGIICAKASMLLQSVPPAVLVRFLREHRSEWADYNIDAYLASSLKTSACSLPGLRPMRFSGGQMIMPLAHTVENEEILEVVRLEGQPLTHDEALLSRDIHLLQLCTGIDEKSVGSSFQLVFAPIDEHFPDDAPLISSGFRVIPLDMKTDGVSSGRTLDLASSLDVGSAAPQASGDAPPDDCNLRSVLTIAFQFPYEMHLQDSVATMARQYVRSVVSAVQRVSMAISPSQSGLNAGQRMLSGFPEAATLARWVCQSYHYHLGVELLNQSDEAGEALLKMLWHHPDAVLCCSFKVPEELYSSPQYSNLLKQRQIPLTRETYVYVCKQGRARHVRNISYCAARPDARQDLRRVRKESNILRYLKTNGTGLRVPAVGRVHVRNGSACLIRPSCSVEGARRGQQRPLPGVLLRQLVLRLTRHPMACVMSRPIFLYGDPNMGKPSAVTEGFMLHALVVRLESSVFMKKLDTAQSLVPLTFDCLPGNRLFVYLTGQPKRCLFHSDVTC

SEQ ID NO: 157110 - protein, 395 aa, Zea Mays
MGRSPCTAQGVFRSALSRNEPPETFSLQTVQEAIKPQKETVLVLEENQSLENALRTLLQELVSSAVQSDKKIMQYGNSLDSGESNCLITRLLDIVLYLCERGHVEGGMVFQLLEDLTEMSTIKDCKDIFGYIESQQDVLGKQELFGRGKLVMLRTCNQLLRRLSKANDVVFCGRIIMFLAHFFPLSERSALNIKGVFNTSNVTKYEKDAMDGISVDFNFYKTLWSLQEHFSNPALTSTNPAKWQKFSSNLAVVLNTFEAQPLSDDDGKLNNLNEEEDAAFNIKYLTSSKLMGLELKDPSFRRHILVQCLIFFDYLKAPGKNDKEGPTGSMIEEIKSCEEHVKKLLEIIPPKGKEFLKSIEHILEREKNWEAKVETGKQRAQPTLEMGRTKPQCLD

SEQ ID NO: 157111 - protein, 414 aa, Zea Mays
MGRSPCTAQGVFRSALSRNEPPETFSLQTVQEAIKPQKETVLVLEENQSLENALRTLLQELVSSAVQSDKKIMQYGNSLDSGESNCLITRLLDIVLYLCERGHVEGGMVFQLLEDLTEMSTIKDCKDIFGYIESQQDVLGKQELFGRGKLVMLRTCNQLLRRLSKANDVVFCGRIIMFLAHFFPLSERSALNIKGVFNTSNVTKYEKDAMDGISVDFNFYKTLWSLQEHFSNPALTSTNPAKWQKFSSNLAVVLNTFEAQPLSDDDGKLNNLNEEEDAAFNIKYLTSSKLMGLELKDPSFRRHILVQCLIFFDYLKAPGKNDKEGPTGSMIEEIKSCEEHVKKLLEIIPPKGKEFLKSIEHILEREKNWVWWKRDGCLAFEKPPFEKKPGSQGGDWEAKSSANFGNGQNKTPMS

SEQ ID NO: 157112 - protein, 496 aa, Zea Mays
MGRSPCTAQGVFRSALSRNEPPETFSLQTVQEAIKPQKETVLVLEENQSLENALRTLLQELVSSAVQSDKKIMQYGNSLDSGESNCLITRLLDIVLYLCERGHVEGGMVFQLLEDLTEMSTIKDCKDIFGYIESQQDVLGKQELFGRGKLVMLRTCNQLLRRLSKANDVVFCGRIIMFLAHFFPLSERSALNIKGVFNTSNVTKYEKDAMDGISVDFNFYKTLWSLQEHFSNPALTSTNPAKWQKFSSNLAVVLNTFEAQPLSDDDGKLNNLNEEEDAAFNIKYLTSSKLMGLELKDPSFRRHILVQCLIFFDYLKAPGKNDKEGPTGSMIEEIKSCEEHVKKLLEIIPPKGKEFLKSIEHILEREKNWVWWKRDGCLAFEKPPFEKKPGQAGARKRKPRWRLGSKELSQLWKWAEQNPNVLTDPDRVRMPSITEYWKPLAEDMDPSAGIEEEYHHKSNRVYCWKGLRFSARQDLDGFARTTGSKGLYLQNCCHLK

SEQ ID NO: 157113 - protein, 580 aa, Zea Mays
MGRSPCTAQGVFRSALSRNEPPETFSLQTVQEAIKPQKETVLVLEENQSLENALRTLLQELVSSAVQSDKKIMQYGNSLDSGESNCLITRLLDIVLYLCERGHVEGGMVFQLLEDLTEMSTIKDCKDIFGYIESQQDVLGKQELFGRGKLVMLRTCNQLLRRLSKANDVVFCGRIIMFLAHFFPLSERSALNIKGVFNTSNVTKYEKDAMDGISVDFNFYKTLWSLQEHFSNPALTSTNPAKWQKFSSNLAVVLNTFEAQPLSDDDGKLNNLNEEEDAAFNIKYLTSSKLMGLELKDPSFRRHILVQCLIFFDYLKAPGKNDKEGPTGSMIEEIKSCEEHVKKLLEIIPPKGKEFLKSIEHILEREKNWVWWKRDGCLAFEKPPFEKKPGQAGARKRKPRWRLGSKELSQLWKWAEQNPMDPSAGIEEEYHHKSNRVYCWKGLRFSARQDLDGFARFSDYGIEGVVPSELLPPEVNAKFSSKPAEKVKRTRKEDSKSVSAHQPREHQVAATPETDGGVDPEEGEGAAPMDSDNGAVGDSQKRSPGEVSGPESGQCEPEADADDNVRTETTSRDARAGEMK

SEQ ID NO: 157114 - protein, 437 aa, Zea Mays
MMWCSVGALLCFLHIFSHYRSVQLNIKGVFNTSNVTKYEKDAMDGISVDFNFYKTLWSLQEHFSNPALTSTNPAKWQKFSSNLAVVLNTFEAQPLSDDDGKLNNLNEEEDAAFNIKYLTSSKLMGLELKDPSFRRHILVQCLIFFDYLKAPGKNDKEGPTGSMIEEIKSCEEHVKKLLEIIPPKGKEFLKSIEHILEREKNWVWWKRDGCLAFEKPPFEKKPGQAGARKRKPRWRLGSKELSQLWKWAEQNPNVLTDPDRVRMPSITEYWKPLAEDMDPSAGIEEEYHHKSNRVYCWKGLRFSARQDLDGFARFSDYGIEGVVPSELLPPEVNAKFSSKPAEKVKRTRKEDSKSVSAHQPREHQVAATPETDGGVDPEEGEGAAPMDSDNGAVGDSQKRSPGEVSGPESGQCEPEADADDNVRTETTSRDARAGEMK

SEQ ID NO: 157115 - protein, 155 aa, Zea Mays
MSLLLQGCHGLTPAPKGDLNLTDECAQGHHRKAGSLSSTLLPRRAGQGLALRPKSGGRADTNGIQQDLLAAWVPSYGDGLRAVKRSSSAPEFQDSDSVSLASAWLKSKWNLKPDYAFTLALFDGISKPLLDSIPKPLLDNIPNSIVAWRNKAARD

SEQ ID NO: 157116 - protein, 165 aa, Zea Mays
MTAAEVEAAKDIAEEKAVVPLPPSPAKPADDDSKAIVALVVKDAYLAKIVSEKRLSLITAWEESQKARADNRAAKKLAFITSWENAKKAEMEAELRKIEEQLQKKKAAYEEKLKNKLAMLHRTAEERRAQTEARRGEETILAEEMAAKYRAKGEGPTKLFGLLKA

SEQ ID NO: 157117 - protein, 153 aa, Zea Mays
MTAAEVEAAKDIAEEKAVVPLPPSPAKPADDDSKAIVALVVKDAAAGKPSTAIIGGSTERDAYLAKIVSEKRLSLITAWEESQKARADNRSNCRRRRRRTRRSSRTSWRCCTGRRRRGGRRRRPGAARRPSWRRRWPPSTAPRARAPPSSLAS

SEQ ID NO: 157118 - protein, 1092 aa, Zea Mays
MALSGMRGLSVFISDIRNCHNKEQERLRVDKELGNIRTRFKNEKSCVRGMSAMGLRLQSSVSAEPSMETCGASVAELKSETASWTDGRWGELDRKQGLSPYEKKKYVWKMLYIYMLGYDVDFGHMETVSLISAPKYPEKQVGYIVTSCLLNENNDFLRMVINTVRNDIIGRNETFQCLALTMVGNIGGKEFSESLAPDVQKLLISSSCRPVVRKKAALCLLRLYRKNPDVVNIDGWADRMAQLLDERDLGVLTSVTSLFVSLVSNNVEAYWNCLPKCVRILERLARNQDIPQEYTYYGIPSPWLQVKTMRALQYFPTIEDPNARRALFEVLQRILMGTDVVKNVNKNNASHAVLFEALALVMHLDAEKEMMSQCVALLGKFIAVREPNIRYLGLENMTRMLLVTDVQDIIKRHQAQIITSLKDPDISIRRRALDLLYGMCDVTNAKEIVEELLQYLDTAEFAMREELSLKAAILAEKFAPQLLWYVDVILQLIDKAGDFVSDDIWYRVVQFVTNNEDLQSYAATKAREYLDKPALHETMVKVSAYLLGEYGHLLARRPGCSPKELFAIINDKLPTVSASTVAILLSTYAKILMHTQPPDVGLQQQILTIFKKYESYIDVEIQQRAVEYFELSRKGPALADVLAEMPKFPERESALLKKAEDAEIDTAEQSAIKLRSQQQTSSALVVADHPPANGFAPPVNNLTLVKMPSQTVSDTQESGVSYEEAPKPPVEAPKENGTPVEVQNRDTNITEINNEIKAEPPSTSHSTSPGDLLLADLLGPLAIEGPPAVEQNPAQGLNANQSPAGDLALATLDDQSNSVQPIVNVEEKFHILCTKDSGVLYEDPYIQIGLKAEWRAHHGRLVLFLGNKNTSALTSVRALILPPSHLKMELSSVPDTIPPRAQVQVPLEVANLLASRDVAVLDFSYAFGTSLVDAKLRLPVVLNKFLQTITLTPEEFFSQWKALTVHSLKVQEVVKGVKPMPLSEMANLFMSLHLAVAPGLDNNPNNLVACTTFFSEATRAMLCLIRVETDPQDRTQLRLTVASGDQYLTFELKEFIKEHLVDIPRTQVAPPRAAVQPQLPTTAPATYNDPVI

SEQ ID NO: 157119 - protein, 1101 aa, Zea Mays
MALSGMRGLSVFISDIRNCHNKEQERLRVDKELGNIRTRFKNEKSCVRGMSAMGLRLQSSVSAEPSMETCGASVAELKSETASWTDGRWGELDRKQGLSPYEKKKYVWKMLYIYMLGYDVDFGHMETVSLISAPKYPEKQVGYIVTSCLLNENNDFLRMVINTVRNDIIGRNETFQCLALTMVGNIGGKEFSESLAPDVQKLLISSSCRPVVRKKAALCLLRLYRKNPDVVNIDGWADRMAQLLDERDLGVLTSVTSLFVSLVSNNVEAYWNCLPKCVRILERLARNQDIPQEYTYYGIPSPWLQVKTMRALQYFPTIEDPNARRALFEVLQRILMGTDVVKNVNKNNASHAVLFEALALVMHLDAEKEMMSQCVALLGKFIAVREPNIRYLGLENMTRMLLVTDVQDIIKRHQAQIITSLKDPDISIRRRALDLLYGMCDVTNAKEIVEELLQAESSSLTSQYLDTAEFAMREELSLKAAILAEKFAPQLLWYVDVILQLIDKAGDFVSDDIWYRVVQFVTNNEDLQSYAATKAREYLDKPALHETMVKVSAYLLGEYGHLLARRPGCSPKELFAIINDKLPTVSASTVAILLSTYAKILMHTQPPDVGLQQQILTIFKKYESYIDVEIQQRAVEYFELSRKGPALADVLAEMPKFPERESALLKKAEDAEIDTAEQSAIKLRSQQQTSSALVVADHPPANGFAPPVNNLTLVKMPSQTVSDTQESGVSYEEAPKPPVEAPKENGTPVEVQNRDTNITEINNEIKAEPPSTSHSTSPGDLLLADLLGPLAIEGPPAVEQNPAQGLNANQSPAGDLALATLDDQSNSVQPIVNVEEKFHILCTKDSGVLYEDPYIQIGLKAEWRAHHGRLVLFLGNKNTSALTSVRALILPPSHLKMELSSVPDTIPPRAQVQVPLEVANLLASRDVAVLDFSYAFGTSLVDAKLRLPVVLNKFLQTITLTPEEFFSQWKALTVHSLKVQEVVKGVKPMPLSEMANLFMSLHLAVAPGLDNNPNNLVACTTFFSEATRAMLCLIRVETDPQDRTQLRLTVASGDQYLTFELKEFIKEHLVDIPRTQVAPPRAAVQPQLPTTAPATYNDPVI

SEQ ID NO: 157120 - protein, 989 aa, Zea Mays
MLYIYMLGYDVDFGHMETVSLISAPKYPEKQVGYIVTSCLLNENNDFLRMVINTVRNDIIGRNETFQCLALTMVGNIGGKEFSESLAPDVQKLLISSSCRPVVRKKAALCLLRLYRKNPDVVNIDGWADRMAQLLDERDLGVLTSVTSLFVSLVSNNVEAYWNCLPKCVRILERLARNQDIPQEYTYYGIPSPWLQVKTMRALQYFPTIEDPNARRALFEVLQRILMGTDVVKNVNKNNASHAVLFEALALVMHLDAEKEMMSQCVALLGKFIAVREPNIRYLGLENMTRMLLVTDVQDIIKRHQAQIITSLKDPDISIRRRALDLLYGMCDVTNAKEIVEELLQYLDTAEFAMREELSLKAAILAEKFAPQLLWYVDVILQLIDKAGDFVSDDIWYRVVQFVTNNEDLQSYAATKAREYLDKPALHETMVKVSAYLLGEYGHLLARRPGCSPKELFAIINDKLPTVSASTVAILLSTYAKILMHTQPPDVGLQQQILTIFKKYESYIDVEIQQRAVEYFELSRKGPALADVLAEMPKFPERESALLKKAEDAEIDTAEQSAIKLRSQQQTSSALVVADHPPANGFAPPVNNLTLVKMPSQTVSDTQESGVSYEEAPKPPVEAPKENGTPVEVQNRDTNITEINNEIKAEPPSTSHSTSPGDLLLADLLGPLAIEGPPAVEQNPAQGLNANQSPAGDLALATLDDQSNSVQPIVNVEEKFHILCTKDSGVLYEDPYIQIGLKAEWRAHHGRLVLFLGNKNTSALTSVRALILPPSHLKMELSSVPDTIPPRAQVQVPLEVANLLASRDVAVLDFSYAFGTSLVDAKLRLPVVLNKFLQTITLTPEEFFSQWKALTVHSLKVQEVVKGVKPMPLSEMANLFMSLHLAVAPGLDNNPNNLVACTTFFSEATRAMLCLIRVETDPQDRTQLRLTVASGDQYLTFELKEFIKEHLVDIPRTQVAPPRAAVQPQLPTTAPATYNDPGTMLAGLL

SEQ ID NO: 157121 - protein, 868 aa, Zea Mays
MAQLLDERDLGVLTSVTSLFVSLVSNNVEAYWNCLPKCVRILERLARNQDIPQEYTYYGIPSPWLQVKTMRALQYFPTIEDPNARRALFEVLQRILMGTDVVKNVNKNNASHAVLFEALALVMHLDAEKEMMSQCVALLGKFIAVREPNIRYLGLENMTRMLLVTDVQDIIKRHQAQIITSLKDPDISIRRRALDLLYGMCDVTNAKEIVEELLQAESSSLTSQYLDTAEFAMREELSLKAAILAEKFAPQLLWYVDVILQLIDKAGDFVSDDIWYRVVQFVTNNEDLQSYAATKAREYLDKPALHETMVKVSAYLLGEYGHLLARRPGCSPKELFAIINDKLPTVSASTVAILLSTYAKILMHTQPPDVGLQQQILTIFKKYESYIDVEIQQRAVEYFELSRKGPALADVLAEMPKFPERESALLKKAEDAEIDTAEQSAIKLRSQQQTSSALVVADHPPANGFAPPVNNLTLVKMPSQTVSDTQESGVSYEEAPKPPVEAPKENGTPVEVQNRDTNITEINNEIKAEPPSTSHSTSPGDLLLADLLGPLAIEGPPAVEQNPAQGLNANQSPAGDLALATLDDQSNSVQPIVNVEEKFHILCTKDSGVLYEDPYIQIGLKAEWRAHHGRLVLFLGNKNTSALTSVRALILPPSHLKMELSSVPDTIPPRAQVQVPLEVANLLASRDVAVLDFSYAFGTSLVDAKLRLPVVLNKFLQTITLTPEEFFSQWKALTVHSLKVQEVVKGVKPMPLSEMANLFMSLHLAVAPGLDNNPNNLVACTTFFSEATRAMLCLIRVETDPQDRTQLRLTVASGDQYLTFELKEFIKEHLVDIPRTQVAPPRAAVQPQLPTTAPATYNDPGTMLAGLL

SEQ ID NO: 157122 - protein, 119 aa, Zea Mays
MPLSEMANLFMSLHLAVAPGLDNNPNNLVACTTFFSEATRAMLCLIRVETDPQDRTQLRLTVASGDQYLTFELKEFIKEHLVDIPRTQVAPPRAAVQPQLPTTAPATYNDPGTMLAGLL

SEQ ID NO: 157123 - protein, 2485 aa, Zea Mays
MEAAAPDGAAQASPPPAEADRPPEPRPPPLPAAGTHDPHFLSSIIGDAAPPPPPPPLGQKRKRGRPPKRKDGAAVAAGPVVPAPAPALARAARRRQDEEEVVCFICFDGGNLVVCDRRGCPKVYHPACIKRDEAFFQSRSKWNCGWHICSSCEKAVHYMCYTCTYSLCKVCIKQDLKGKLSLTLEELTTAKNRWNVPSTSARKEKEESSDDLYDANNDDDAGSDCSSGKRRRTNSRKKGQKRRKTLLLDYIKKNNLRDPQRKSQIICDSRLHFLFRKARVAHFEMLKLLEMHFLTNETSTVTNSSQVTINLNSAHVDTNGHNDTAAKVSPDKRRRIYRKMERDTQVNLEDYAAIDMHNINLIYMRRSLMEDLVDDVKFSDKIHGGFVRIKISDVCQKQDIYRLVKVIGTHKVPEKYSIGKKMTNVALEILNLNKKEIITMDTISNHDFTEEECKRLRQSMKCDLISRLKVGDILEKAKILQYVRVNDWFENEKQRLGHLRDRASETGRRKELREYVEKLQLLNDSEERTRRIIEILELHVDSHMDPNYESAEETDEKGTVGKSVNQTRPDTTISRRISRYLSTVQNHPKKVSDSSHLPKSLSTESAICGSGARSLENSTANRTMYGAGPLSSSVVTMTNDTEPEKVWHYKDPSGNVQGPFTLLQLSNWTSYFPRDLRVWLTFESEERSLLLTEVLSKQQKDFTQAASHTSSKATLVGTGHTRNNPSVDQTNAFSPVGHSVVSSSGIPVQYNKYSVPERESVYSPDDSLSLSTSSVPPKDAYTVNSQAHCQNKHSVFIQSPGSSYGHTDLNHDGIQGGCSGESNHHHSSRALWSPTVAHVSCGRGNVESHQNQHVSWSESQHESKNGSQGGFVKDLNSRQDLSKNLPAQRIGKDVSSPLFAWSPAESRTASSQQEGSCLSSTTNPSFLDELHSSIASAKPKSCAPATPIEDRGSSSPSDMLSHEERVPICSPQSAPLASASDMCKMEEIMNQQRTLVVDTSNASVNQSPESRAFPVSSPDNQDIDREFPSPVPRSENKDIAVDSSELAPASPENITTNLPVSDTCKMEEVVSQQQVIGAVVSNSSDNHSPQSKVSPVSSNNEDTKHKYPSSTPRPENKNPAVDSLLSTSAAPENLTTTSTHDSDTCKMEVVNQPKTFEADASNAPLHQLPHSHSFLVPSDNQDIECECPGPTPRSDSEEALMNNSATTASASDTSKMEEFVNQQKTLEADSSNAPLNQSPHSHIFSVPSDKQDIERECPGPTQRSDTKEPLMNNSVLTSGPSEIQTTASAASDTCKMEESVDQPKALEADASNAPLNHHPHSHIFRVSSDNQDNQCEHPSPNPKSDSKEPLVDNSVLTSVVPGMLATTSASDKCKMEEFANQQKALEVDASNASFNQPHIFAVSSDNQDMERERPSPTPRSECKESLTENSVLTSLAPEILARSSASASDKCKTEEFVNQQKPIEADASNASLNQPHVFAVPSDNQDIERECPSPTPRSECKESFMENSVLTSAVPEIARSSVSASDTCKMEFVNQQRPIEADASNASLNQPRIFAISSDNKDIERECPNPTPRSECKESIMENSVLTSAAPEILAISSASASDTCKMEFVNQQRPIEADASNASLNQPHIFAISSDNKDIERECPSPTPRSECKESLMENSVLTPATPEILARSSASASDTCKMEEFVKQQRPNEADASNASLNQPHIFTVSSDNKDIERECPSPTPRSECKESLMENSVLTSAAPERSSASASDTCKMEFVNQQRPIEADAPNASLNQCRTFAVSSDTKDIERECPSPTPRSECKESLMENSVLTSAAPEILARSSASASDTCKMEEFVNQQRLIEADASNASLNQPHIFAVSSDNKDIERECPSPTPRSECKESLMENSVLTSAAPEILVRSSASASDTCKMEEFVNQQRPIEVDASNASLNQPPRCHIFTASSNNQDIERECPSSTPRSDSKEPFVDNLVLTSAVPGNLLTSSAVASDTCKMEILNKKITLEADASNAPLNQPPLSSVFASSSGDDQDNVCGRPSPNPRPEGEQPLMGNSGLISTVPRNLTSTSASASDICKMEILNEKRTLEANPSNGLITQSPQPKVFLVPSPDILECEFSSETPRHEFKEPVADSSGLTSAAHENLGTKPHVHSPDAFVPPKSGALTGELGDTKSDFKGEETIQKEQYFGSESIAATRENLLIDPSSGVESIDVSDVLDSLMEERSGTSYMPGSIEDFLAEEEPQYSSPIALSPWGEPSYYQGDAVDSALWGTQDLINDMWSLLSPRPMLQPSSGIGTEGKETFDINEVAVTHVSSDYFQKGSMFGEENVNQANLSAAADWMLPEQVPSIPNGMSTSSVDESTIVLGSQPSTNQSLDWGGTTWSIGQNASVYSNEKAEPSSKSYWEEPRKQETAKSSVSISGQAIGNNKGLDPRDNAANRGSRLSHHHRGRYSQISESWLLSSSHSRSRSDRFGSGGSSRSTSKGQSRG

SEQ ID NO: 157124 - protein, 2551 aa, Zea Mays
MEAAAPDGAAQASPPPAEADRPPEPRPPPLPAAGTHDPHFLSSIIGDAAPPPPPPPLGQKRKRGRPPKRKDGAAVAAGPVVPAPAPALARAARRRQDEEEVVCFICFDGGNLVVCDRRGCPKVYHPACIKRDEAFFQSRSKWNCGWHICSSCEKAVHYMCYTCTYSLCKVCIKQDLKGKLSLTLEELTTAKNRWNVPSTSARKEKEESSDDLYDANNDDDAGSDCSSGKRRRTNSRKKGQKRRKVNRDCSILEKKVELPLRNTESIPVEVPNERVPYPVHTKVPNGRVPMPVDTKVPNEPVSLAANTKWASPELLEFIGHMRNGDQSFISQFDVQTLLLDYIKKNNLRDPQRKSQIICDSRLHFLFRKARVAHFEMLKLLEMHFLTNETSTVTNSSQVTINLNSAHVDTNGHNDTAAKVSPDKRRRIYRKMERDTQVNLEDYAAIDMHNINLIYMRRSLMEDLVDDVKFSDKIHGGFVRIKISDVCQKQDIYRLVKVIGTHKVPEKYSIGKKMTNVALEILNLNKKEIITMDTISNHDFTEGDILEKAKILQYWFENEKQRLGHLRDRASETGRRKELREYVEKLQLLNDSEERTRRIIEILELHVDSHMDPNYESAEETDEKGTVGKSVNQTRPDTTISRRISRYLSTVQNHPKKVSDSSHLPKSLSTESAICGSGARSLENSTANRTMYGAGPLSSSVVTMTNDTEPEKVWHYKDPSGNVQGPFTLLQLSNWTSYFPRDLRVWLTFESEERSLLLTEVLSKQQKDFTQAASHTSSKATLVGTGHTRNNPSVDQTNAFSPVGHSVVSSSGIPVQYNKYSVPERESVYSPDDSLSLSTSSVPPKDAYTVNSQAHCQNKHSVFIQSPGSSYGHTDLNHDGIQGGCSGESNHHHSSRALWSPTVAHVSCGRGNVESHQNQHVSWSESQHESKNGSQGGFVKDLNSRQDLSKNLPAQRIGKDVSSPLFAWSPAESRTASSQQEGSCLSSTTNPSFLDELHSSIASAKPKSCAPATPIEDRGSSSPSDMLSHEERVPICSPQSAPLASASDMCKMEEIMNQQRTLVVDTSNASVNQSPESRAFPVSSPDNQDIDREFPSPVPRSENKDIAVDSSELAPASPENITTNLPVSDTCKMEEVVSQQQVIGAVVSNSSDNHSPQSKVSPVSSNNEDTKHKYPSSTPRPENKNPAVDSLLSTSAAPENLTTTSTHDSDTCKMEVVNQPKTFEADASNAPLHQLPHSHSFLVPSDNQDIECECPGPTPRSDSEEALMNNSATTASASDTSKMEEFVNQQKTLEADSSNAPLNQSPHSHIFSVPSDKQDIERECPGPTQRSDTKEPLMNNSVLTSGPSEIQTTASAASDTCKMEESVDQPKALEADASNAPLNHHPHSHIFRVSSDNQDNQCEHPSPNPKSDSKEPLVDNSVLTSVVPGMLATTSASDKCKMEEFANQQKALEVDASNASFNQPHIFAVSSDNQDMERERPSPTPRSECKESLTENSVLTSLAPEILARSSASASDKCKTEEFVNQQKPIEADASNASLNQPHVFAVPSDNQDIERECPSPTPRSECKESFMENSVLTSAVPEIARSSVSASDTCKMEFVNQQRPIEADASNASLNQPRIFAISSDNKDIERECPNPTPRSECKESIMENSVLTSAAPEILAISSASASDTCKMEFVNQQRPIEADASNASLNQPHIFAISSDNKDIERECPSPTPRSECKESLMENSVLTPATPEILARSSASASDTCKMEEFVKQQRPNEADASNASLNQPHIFTVSSDNKDIERECPSPTPRSECKESLMENSVLTSAAPERSSASASDTCKMEFVNQQRPIEADAPNASLNQCRTFAVSSDTKDIERECPSPTPRSECKESLMENSVLTSAAPEILARSSASASDTCKMEEFVNQQRLIEADASNASLNQPHIFAVSSDNKDIERECPSPTPRSECKESLMENSVLTSAAPEILVRSSASASDTCKMEEFVNQQRPIEVDASNASLNQPPRCHIFTASSNNQDIERECPSSTPRSDSKEPFVDNLVLTSAVPGNLLTSSAVASDTCKMEILNKKITLEADASNAPLNQPPLSSVFASSSGDDQDNVCGRPSPNPRPEGEQPLMGNSGLISTVPRNLTSTSASASDICKMEILNEKRTLEANPSNGLITQSPQPKVFLVPSPDILECEFSSETPRHEFKEPVADSSGLTSAAHENLGTKPHVHSPDAFVPPKSGALTGELGDTKSDFKGEETIQKEQYFGSESIAATRENLLIDPSSGVESIDVSDVLDSLMEERSGTSYMPGSIEDFLAEEEPQYSSPIALSPWGEPSYYQGDAVDSALWGTQDLINDMWSLLSPRPMLQPSSGIGTEGKETFDINEVAVTHVSSDYFQKGSMFGEENVNQANLSAAADWMLPEQVPSIPNGMSTSSVDESTIVLGSQPSTNQSLDWGGTTWSIGQNASVYSNEKAEPSSKSYWEEPRKQETAKSSVSISGQAIGNNKGLDPRDNAANRGSRLSHHHRGRYSQISESWLLSSSHSRSRSDRFGSGGSSRSTSKGQSRG

SEQ ID NO: 157125 - protein, 2626 aa, Zea Mays
MEAAAPDGAAQASPPPAEADRPPEPRPPPLPAAGTHDPHFLSSIIGDAAPPPPPPPLGQKRKRGRPPKRKDGAAVAAGPVVPAPAPALARAARRRQDEEEVVCFICFDGGNLVVCDRRGCPKVYHPACIKRDEAFFQSRSKWNCGWHICSSCEKAVHYMCYTCTYSLCKVCIKQGKFFSVRGTKGFCDTCYGTILLIECKDESATKVDFDDILSWEYLFKLYWLDLKGKLSLTLEELTTAKNRWNVPSTSARKEKEESSDDLYDANNDDDAGSDCSSGKRRRTNSRKKGQKRRKVNRDCSILEKKVELPLRNTESIPVEVPNERVPYPVHTKVPNGRVPMPVDTKVPNEPVSLAANTKWASPELLEFIGHMRNGDQSFISQFDVQTLLLDYIKKNNLRDPQRKSQIICDSRLHFLFRKARVAHFEMLKLLEMHFLTNETSTVTNSSQVTINLNSAHVDTNGHNDTAAKVSPDKRRRIYRKMERDTQVNLEDYAAIDMHNINLIYMRRSLMEDLVDDVKFSDKIHGGFVRIKISDVCQKQDIYRLVKVIGTHKVPEKYSIGKKMTNVALEILNLNKKEIITMDTISNHDFTEEECKRLRQSMKCDLISRLKVGDILEKAKILQYVRVNDWFENEKQRLGHLRDRASETGRRKELREYVEKLQLLNDSEERTRRIIEILELHVDSHMDPNYESAEETDEKGTVGKSVNQTRPDTTISRRISRYLSTVQNHPKKVSDSSHLPKSLSTESAICGSGARSLENSTANRTMYGAGPLSSSVVTMTNDTEPEKVWHYKDPSGNVQGPFTLLQLSNWTSYFPRDLRVWLTFESEERSLLLTEVLSKQQKDFTQAASHTSSKATLVGTGHTRNNPSVDQTNAFSPVGHSVVSSSGIPVQYNKYSVPERESVYSPDDSLSLSTSSVPPKDAYTVNSQAHCQNKHSVFIQSPGSSYGHTDLNHDGIQGGCSGESNHHHSSRALWSPTVAHVSCGRGNVESHQNQHVSWSESQHESKNGSQGGFVKDLNSRQDLSKNLPAQRIGKDVSSPLFAWSPAESRTASSQQEGSCLSSTTNPSFLDELHSSIASAKPKSCAPATPIEDRGSSSPSDMLSHEERVPICSPQSAPLASASDMCKMEEIMNQQRTLVVDTSNASVNQSPESRAFPVSSPDNQDIDREFPSPVPRSENKDIAVDSSELAPASPENITTNLPVSDTCKMEEVVSQQQVIGAVVSNSSDNHSPQSKVSPVSSNNEDTKHKYPSSTPRPENKNPAVDSLLSTSAAPENLTTTSTHDSDTCKMEVVNQPKTFEADASNAPLHQLPHSHSFLVPSDNQDIECECPGPTPRSDSEEALMNNSATTASASDTSKMEEFVNQQKTLEADSSNAPLNQSPHSHIFSVPSDKQDIERECPGPTQRSDTKEPLMNNSVLTSGPSEIQTTASAASDTCKMEESVDQPKALEADASNAPLNHHPHSHIFRVSSDNQDNQCEHPSPNPKSDSKEPLVDNSVLTSVVPGMLATTSASDKCKMEEFANQQKALEVDASNASFNQPHIFAVSSDNQDMERERPSPTPRSECKESLTENSVLTSLAPEILARSSASASDKCKTEEFVNQQKPIEADASNASLNQPHVFAVPSDNQDIERECPSPTPRSECKESFMENSVLTSAVPEIARSSVSASDTCKMEFVNQQRPIEADASNASLNQPRIFAISSDNKDIERECPNPTPRSECKESIMENSVLTSAAPEILAISSASASDTCKMEFVNQQRPIEADASNASLNQPHIFAISSDNKDIERECPSPTPRSECKESLMENSVLTPATPEILARSSASASDTCKMEEFVKQQRPNEADASNASLNQPHIFTVSSDNKDIERECPSPTPRSECKESLMENSVLTSAAPERSSASASDTCKMEFVNQQRPIEADAPNASLNQCRTFAVSSDTKDIERECPSPTPRSECKESLMENSVLTSAAPEILARSSASASDTCKMEEFVNQQRLIEADASNASLNQPHIFAVSSDNKDIERECPSPTPRSECKESLMENSVLTSAAPEILVRSSASASDTCKMEEFVNQQRPIEVDASNASLNQPPRCHIFTASSNNQDIERECPSSTPRSDSKEPFVDNLVLTSAVPGNLLTSSAVASDTCKMEILNKKITLEADASNAPLNQPPLSSVFASSSGDDQDNVCGRPSPNPRPEGEQPLMGNSGLISTVPRNLTSTSASASDICKMEILNEKRTLEANPSNGLITQSPQPKVFLVPSPDILECEFSSETPRHEFKEPVADSSGLTSAAHENLGTKPHVHSPDAFVPPKSGALTGELGDTKSDFKGEETIQKEQYFGSESIAATRENLLIDPSSGVESIDVSDVLDSLMEERSGTSYMPGSIEDFLAEEEPQYSSPIALSPWGEPSYYQGDAVDSALWGTQDLINDMWSLLSPRPMLQPSSGIGTEGKETFDINEVAVTHVSSDYFQKGSMFGEENVNQANLSAAADWMLPEQVPSIPNGMSTSSVDESTIVLGSQPSTNQSLDWGGTTWSIGQNASVYSNEKAEPSSKSYWEEPRKQETAKSSVSISGQAIGNNKGLDPRDNAANRGSRLSHHHRGRYSQISESWLLSSSHSRSRSDRFGSGGSSRSTSKGQSRG

SEQ ID NO: 157126 - protein, 2572 aa, Zea Mays
MEAAAPDGAAQASPPPAEADRPPEPRPPPLPAAGTHDPHFLSSIIGDAAPPPPPPPLGQKRKRGRPPKRKDGAAVAAGPVVPAPAPALARAARRRQDEEEVVCFICFDGGNLVVCDRRGCPKVYHPACIKRDEAFFQSRSKWNCGWHICSSCEKAVHYMCYTCTYSLCKVCIKQGKFFSVRGTKGFCDTCYGTILLIECKDESATKVDFDDILSWEYLFKLYWLDLKGKLSLTLEELTTAKNRWNVPSTSARKEKEESSDDLYDANNDDDAGSDCSSGKRRRTNSRKKGQKRRKVNRDCSILEKKVELPLRNTESIPVEVPNERVPYPVHTKVPNGRVPMPVDTKVPNEPVSLAANTKWASPELLEFIGHMRNGDQSFISQFDVQTLLLDYIKKNNLRDPQRKSQIICDSRLHFLFRKARVAHFEMLKLLEMHFLTNETSTVTNSSQVTINLNSAHVDTNGHNDTAAKVSPDKRRRIYRKMERDTQVNLEDYAAIDMHNINLIYMRRSLMEDLVDDVKFSDKIHGGFVRIKISDVCQKQDIYRLVKVIGTHKVPEKYSIGKKMTNVALEILNLNKKEIITMDTISNHDFTEGDILEKAKILQYVRVNDWFENEKQRLGHLRDRASETGRRKELREYVEKLQLLNDSEERTRRIIEILELHVDSHMDPNYESAEETDEKGTVGKSVNQTRPDTTISRRISRYLSTVQNHPKKVSDSSHLPKSLSTESAICGSGARSLENSTANRTMYGAGPLSSSVVTMTNDTEPEKVWHYKDPSGNVQGPFTLLQLSNWTSYFPRDLRVWLTFESEERSLLLTEVLSKQQKDFTQAASHTSSKATLVGTGHTRNNPSVDQTNAFSPVGHSVVSSSGIPVQYNKYSVPERESVYSPDDSLSLSTSSVPPKDAYTVNSQAHCQNKHSVFIQSPGSSYGHTDLNHDGIQGGCSGESNHHHSSRALWSPTVAHVSCGRGNVESHQNQHVSWSESQHESKNGSQGGFVKDLNSRQDLSKNLPAQRIGKDVSSPLFAWSPAESRTASSQQEGSCLSSTTNPSFLDELHSSIASAKPKSCAPATPIEDRGSSSPSDMLSHEERVPICSPQSAPLASASDMCKMEEIMNQQRTLVVDTSNASVNQSPESRAFPVSSPDNQDIDREFPSPVPRSENKDIAVDSSELAPASPENITTNLPVSDTCKMEEVVSQQQVIGAVVSNSSDNHSPQSKVSPVSSNNEDTKHKYPSSTPRPENKNPAVDSLLSTSAAPENLTTTSTHDSDTCKMEVVNQPKTFEADASNAPLHQLPHSHSFLVPSDNQDIECECPGPTPRSDSEEALMNNSATTASASDTSKMEEFVNQQKTLEADSSNAPLNQSPHSHIFSVPSDKQDIERECPGPTQRSDTKEPLMNNSVLTSGPSEIQTTASAASDTCKMEESVDQPKALEADASNAPLNHHPHSHIFRVSSDNQDNQCEHPSPNPKSDSKEPLVDNSVLTSVVPGMLATTSASDKCKMEEFANQQKALEVDASNASFNQPHIFAVSSDNQDMERERPSPTPRSECKESLTENSVLTSLAPEILARSSASASDKCKTEEFVNQQKPIEADASNASLNQPHVFAVPSDNQDIERECPSPTPRSECKESFMENSVLTSAVPEIARSSVSASDTCKMEFVNQQRPIEADASNASLNQPRIFAISSDNKDIERECPNPTPRSECKESIMENSVLTSAAPEILAISSASASDTCKMEFVNQQRPIEADASNASLNQPHIFAISSDNKDIERECPSPTPRSECKESLMENSVLTPATPEILARSSASASDTCKMEEFVKQQRPNEADASNASLNQPHIFTVSSDNKDIERECPSPTPRSECKESLMENSVLTSAAPERSSASASDTCKMEFVNQQRPIEADAPNASLNQCRTFAVSSDTKDIERECPSPTPRSECKESLMENSVLTSAAPEILARSSASASDTCKMEEFVNQQRLIEADASNASLNQPHIFAVSSDNKDIERECPSPTPRSECKESLMENSVLTSAAPEILVRSSASASDTCKMEEFVNQQRPIEVDASNASLNQPPRCHIFTASSNNQDIERECPSSTPRSDSKEPFVDNLVLTSAVPGNLLTSSAVASDTCKMEILNKKITLEADASNAPLNQPPLSSVFASSSGDDQDNVCGRPSPNPRPEGEQPLMGNSGLISTVPRNLTSTSASASDICKMEILNEKRTLEANPSNGLITQSPQPKVFLVPSPDILECEFSSETPRHEFKEPVADSSGLTSAAHENLGTKPHVHSPDAFVPPKSGALTGELGDTKSDFKDVSDVLDSLMEERSGTSYMPGSIEDFLAEEEPQYSSPIALSPWGEPSYYQGDAVDSALWGTQDLINDMWSLLSPRPMLQPSSGIGTEGKETFDINEVAVTHVSSDYFQKGSMFGEENVNQANLSAAADWMLPEQVPSIPNGMSTSSVDESTIVLGSQPSTNQSLDWGGTTWSIGQNASVYSNEKAEPSSKSYWEEPRKQETAKSSVSISGQAIGNNKGLDPRDNAANRGSRLSHHHRGRYSQISESWLLSSSHSRSRSDRFGSGGSSRSTSKGQSRG

SEQ ID NO: 157127 - protein, 2063 aa, Zea Mays
MEAAAPDGAAQASPPPAEADRPPEPRPPPLPAAGTHDPHFLSSIIGDAAPPPPPPPLGQKRKRGRPPKRKDGAAVAAGPVVPAPAPALARAARRRQDEEEVVCFICFDGGNLVVCDRRGCPKVYHPACIKRDEAFFQSRSKWNCGWHICSSCEKAVHYMCYTCTYSLCKVCIKQGKFFSVRGTKGFCDTCYGTILLIECKDESATKVDFDDILSWEYLFKLYWLDLKGKLSLTLEELTTAKNRWNVPSTSARKEKEESSDDLYDANNDDDAGSDCSSGKRRRTNSRKKGQKRRKVNRDCSILEKKVELPLRNTESIPVEVPNERVPYPVHTKVPNGRVPMPVDTKVPNEPVSLAANTKWASPELLEFIGHMRNGDQSFISQFDVQTLLLDYIKKNNLRDPQRKSQIICDSRLHFLFRKARVAHFEMLKLLEMHFLTNETSTVTNSSQVTINLNSAHVDTNGHNDTAAKVSPDKRRRIYRKMERDTQVNLEDYAAIDMHNINLIYMRRSLMEDLVDDVKFSDKIHGGFVRIKISDVCQKQDIYRLVKVIGTHKVPEKYSIGKKMTNVALEILNLNKKEIITMDTISNHDFTEGDILEKAKILQYWFENEKQRLGHLRDRASETGRRKELREYVEKLQLLNDSEERTRRIIEILELHVDSHMDPNYESAEETDEKGTVGKSVNQTRPDTTISRRISRYLSTVQNHPKKVSDSSHLPKSLSTESAICGSGARSLENSTANRTMYGAGPLSSSVVTMTNDTEPEKVWHYKDPSGNVQGPFTLLQLSNWTSYFPRDLRVWLTFESEERSLLLTEVLSKQQKDFTQAASHTSSKATLVGTGHTRNNPSVDQTNAFSPVGHSVVSSSGIPVQYNKYSVPERESVYSPDDSLSLSTSSVPPKDAYTVNSQAHCQNKHSVFIQSPGSSYGHTDLNHDGIQGGCSGESNHHHSSRALWSPTVAHVSCGRGNVESHQNQHVSWSESQHESKNGSQGGFVKDLNSRQDLSKNLPAQRIGKDVSSPLFAWSPAESRTASSQQEGSCLSSTTNPSFLDELHSSIASAKPKSCAPATPIEDRGSSSPSDMLSHEERVPICSPQSAPLASASDMCKMEEIMNQQRTLVVDTSNASVNQSPESRAFPVSSPDNQDIDREFPSPVPRSENKDIAVDSSELAPASPENITTNLPVSDTCKMEEVVSQQQVIGAVVSNSSDNHSPQSKVSPVSSNNEDTKHKYPSSTPRPENKNPAVDSLLSTSAAPENLTTTSTHDSDTCKMEFVKQQRPNEADASNASLNQPHIFTVSSDNKDIERECPSPTPRSECKESLMENSVLTSAAPERSSASASDTCKMEFVNQQRPIEADAPNASLNQCRTFAVSSDTKDIERECPSPTPRSECKESLMENSVLTSAAPEILARSSASASDTCKMEEFVNQQRLIEADASNASLNQPHIFAVSSDNKDIERECPSPTPRSECKESLMENSVLTSAAPEILVRSSASASDTCKMEEFVNQQRPIEVDASNASLNQPPRCHIFTASSNNQDIERECPSSTPRSDSKEPFVDNLVLTSAVPGNLLTSSAVASDTCKMEILNKKITLEADASNAPLNQPPLSSVFASSSGDDQDNVCGRPSPNPRPEGEQPLMGNSGLISTVPRNLTSTSASASDICKMEILNEKRTLEANPSNGLITQSPQPKVFLVPSPDILECEFSSETPRHEFKEPVADSSGLTSAAHENLGTKPHVHSPDAFVPPKSGALTGELGDTKSDFKGEETIQKEQYFGSESIAATRENLLIDPSSGVESIDVSDVLDSLMEERSGTSYMPGSIEDFLAEEEPQYSSPIALSPWGEPSYYQGDAVDSALWGTQDLINDMWSLLSPRPMLQPSSGIGTEGKETFDINEVAVTHVSSDYFQKGSMFGEENVNQANLSAAADWMLPEQVPSIPNGMSTSSVDESTIVLGSQPSTNQSLDWGGTTWSIGQNASVYSNEKAEPSSKSYWEEPRKQETAKSSVSISGQAIGNNKGLDPRDNAANRGSRLSHHHRGRYSQISESWLLSSSHSRSRSDRFGSGGSSRSTSKGQSRG

SEQ ID NO: 157128 - protein, 2552 aa, Zea Mays
MEAAAPDGAAQASPPPAEADRPPEPRPPPLPAAGTHDPHFLSSIIGDAAPPPPPPPLGQKRKRGRPPKRKDGAAVAAGPVVPAPAPALARAARRRQDEEEVVCFICFDGGNLVVCDRRGCPKVYHPACIKRDEAFFQSRSKWNCGWHICSSCEKAVHYMCYTCTYSLCKVCIKQGKFFSVRGTKGFCDTCYGTILLIECKDESATKVDFDDILSWEYLFKLYWLDLKGKLSLTLEELTTAKNRWNVPSTSARKEKEESSDDLYDANNDDDAGSDCSSGKRRRTNSRKKGQKRRKVNRDCSILEKKVELPLRNTESIPVEVPNERVPYPVHTKVPNGRVPMPVDTKVPNEPVSLAANTKWASPELLEFIGHMRNGDQSFISQFDVQTLLLDYIKKNNLRDPQRKSQIICDSRLHFLFRKARVAHFEMLKLLEMHFLTNETSTVTNSSQVTINLNSAHVDTNGHNDTAAKVSPDKRRRIYRKMERDTQVNLEDYAAIDMHNINLIYMRRSLMEDLVDDVKFSDKIHGGFVRIKISDVCQKQDIYRLVKVIGTHKVPEKYSIGKKMTNVALEILNLNKKEIITMDTISNHDFTEEECKRLRQSMKCDLISRLKVGDILEKAKILQYVRVNDWFENEKQRLGHLRDRASETGRRKELREYVEKLQLLNDSEERTRRIIEILELHVDSHMDPNYESAEETDEKGTVGKSVNQTRPDTTISRRISRYLSTVQNHPKKVSDSSHLPKSLSTESAICGSGARSLENSTANRTMYGAGPLSSSVVTMTNDTEPEKVWHYKDPSGNVQGPFTLLQLSNWTSYFPRDLRVWLTFESEERSLLLTEVLSKQQKDFTQAASHTSSKATLVGTGHTRNNPSVDQTNAFSPVGHSVVSSSGIPVQYNKYSVPERESVYSPDDSLSLSTSSVPPKDAYTVNSQAHCQNKHSVFIQSPGSSYGHTDLNHDGIQGGCSGESNHHHSSRALWSPTVAHVSCGRGNVESHQNQHVSWSESQHESKNGSQGGFVKDLNSRQDLSKNLPAQRIGKDVSSPLFAWSPAESRTASSQQEGSCLSSTTNPSFLDELHSSIASAKPKSCAPATPIEDRGSSSPSDMLSHEERVPICSPQSAPLASASDMCKMEEIMNQQRTLVVDTSNASVNQSPESRAFPVSSPDNQDIDREFPSPVPRSENKDIAVDSSELAPASPENITTNLPVSDTCKMEEVVSQQQVIGAVVSNSSDNHSPQSKVSPVSSNNEDTKHKYPSSTPRPENKNPAVDSLLSTSAAPENLTTTSTHDSDTCKMEVVNQPKTFEADASNAPLHQLPHSHSFLVPSDNQDIECECPGPTPRSDSEEALMNNSATTASASDTSKMEEFVNQQKTLEADSSNAPLNQSPHSHIFSVPSDKQDIERECPGPTQRSDTKEPLMNNSVLTSGPSEIQTTASAASDTCKMEESVDQPKALEADASNAPLNHHPHSHIFRVSSDNQDNQCEHPSPNPKSDSKEPLVDNSVLTSVVPGMLATTSASDKCKMEEFANQQKALEVDASNASFNQPHIFAVSSDNQDMERERPSPTPRSECKESLTENSVLTSLAPEILARSSASASDKCKTEEFVNQQKPIEADASNASLNQPHVFAVPSDNQDIERECPSPTPRSECKESFMENSVLTSAVPEIARSSVSASDTCKMEFVNQQRPIEADASNASLNQPRIFAISSDNKDIERECPNPTPRSECKESIMENSVLTSAAPEILAISSASASDTCKMEFVNQQRPIEADASNASLNQPHIFAISSDNKDIERECPSPTPRSECKESLMENSVLTPATPEILARSSASASDTCKMEEFVKQQRPNEADASNASLNQPHIFTVSSDNKDIERECPSPTPRSECKESLMENSVLTSAAPEILARSSASASDTCKMEEFVNQQRLIEADASNASLNQPHIFAVSSDNKDIERECPSPTPRSECKESLMENSVLTSAAPEILVRSSASASDTCKMEEFVNQQRPIEVDASNASLNQPPRCHIFTASSNNQDIERECPSSTPRSDSKEPFVDNLVLTSAVPGNLLTSSAVASDTCKMEILNKKITLEADASNAPLNQPPLSSVFASSSGDDQDNVCGRPSPNPRPEGEQPLMGNSGLISTVPRNLTSTSASASDICKMEILNEKRTLEANPSNGLITQSPQPKVFLVPSPDILECEFSSETPRHEFKEPVADSSGLTSAAHENLGTKPHVHSPDAFVPPKSGALTGELGDTKSDFKGEETIQKEQYFGSESIAATRENLLIDPSSGVESIDVSDVLDSLMEERSGTSYMPGSIEDFLAEEEPQYSSPIALSPWGEPSYYQGDAVDSALWGTQDLINDMWSLLSPRPMLQPSSGIGTEGKETFDINEVAVTHVSSDYFQKGSMFGEENVNQANLSAAADWMLPEQVPSIPNGMSTSSVDESTIVLGSQPSTNQSLDWGGTTWSIGQNASVYSNEKAEPSSKSYWEEPRKQETAKSSVSISGQAIGNNKGLDPRDNAANRGSRLSHHHRGRYSQISESWLLSSSHSRSRSDRFGSGGSSRSTSKGQSRG

SEQ ID NO: 157129 - protein, 1942 aa, Zea Mays
MDPNYESAEETDEKGTVGKSVNQTRPDTTISRRISRYLSTVQNHPKKVSDSSHLPKSLSTESAICGSGARSLENSTANRTMYGAGPLSSSVVTMTNDTEPEKVWHYKDPSGNVQGPFTLLQLSNWTSYFPRDLRVWLTFESEERSLLLTEVLSKQQKDFTQAASHTSSKATLVGTGHTRNNPSVDQTNAFSPVGHSVVSSSGIPVQYNKYSVPERESVYSPDDSLSLSTSSVPPKDAYTVNSQAHCQNKHSVFIQSPGSSYGHTDLNHDGIQGGCSGESNHHHSSRALWSPTVAHVSCGRGNVESHQNQHVSWSESQHESKNGSQGGFVKDLNSRQDLSKNLPAQRIGKDVSSPLFAWSPAESRTASSQQEGSCLSSTTNPSFLDELHSSIASAKPKSCAPATPIEDRGSSSPSDMLSHEERVPICSPQSAPLASASDMCKMEEIMNQQRTLVVDTSNASVNQSPESRAFPVSSPDNQDIDREFPSPVPRSENKDIAVDSSELAPASPENITTNLPVSDTCKMEEVVSQQQVIGAVVSNSSDNHSPQSKVSPVSSNNEDTKHKYPSSTPRPENKNPAVDSLLSTSAAPENLTTTSTHDSDTCKMEVVNQPKTFEADASNAPLHQLPHSHSFLVPSDNQDIECECPGPTPRSDSEEALMNNSATTASASDTSKMEEFVNQQKTLEADSSNAPLNQSPHSHIFSVPSDKQDIERECPGPTQRSDTKEPLMNNSVLTSGPSEIQTTASAASDTCKMEESVDQPKALEADASNAPLNHHPHSHIFRVSSDNQDNQCEHPSPNPKSDSKEPLVDNSVLTSVVPGMLATTSASDKCKMEEFANQQKALEVDASNASFNQPHIFAVSSDNQDMERERPSPTPRSECKESLTENSVLTSLAPEILARSSASASDKCKTEEFVNQQKPIEADASNASLNQPHVFAVPSDNQDIERECPSPTPRSECKESFMENSVLTSAVPEIARSSVSASDTCKMEFVNQQRPIEADASNASLNQPRIFAISSDNKDIERECPNPTPRSECKESIMENSVLTSAAPEILAISSASASDTCKMEFVNQQRPIEADASNASLNQPHIFAISSDNKDIERECPSPTPRSECKESLMENSVLTPATPEILARSSASASDTCKMEEFVKQQRPNEADASNASLNQPHIFTVSSDNKDIERECPSPTPRSECKESLMENSVLTSAAPERSSASASDTCKMEFVNQQRPIEADAPNASLNQCRTFAVSSDTKDIERECPSPTPRSECKESLMENSVLTSAAPEILARSSASASDTCKMEEFVNQQRLIEADASNASLNQPHIFAVSSDNKDIERECPSPTPRSECKESLMENSVLTSAAPEILVRSSASASDTCKMEEFVNQQRPIEVDASNASLNQPPRCHIFTASSNNQDIERECPSSTPRSDSKEPFVDNLVLTSAVPGNLLTSSAVASDTCKMEILNKKITLEADASNAPLNQPPLSSVFASSSGDDQDNVCGRPSPNPRPEGEQPLMGNSGLISTVPRNLTSTSASASDICKMEILNEKRTLEANPSNGLITQSPQPKVFLVPSPDILECEFSSETPRHEFKEPVADSSGLTSAAHENLGTKPHVHSPDAFVPPKSGALTGELGDTKSDFKGEETIQKEQYFGSESIAATRENLLIDPSSGVESIDVSDVLDSLMEERSGTSYMPGSIEDFLAEEEPQYSSPIALSPWGEPSYYQGDAVDSALWGTQDLINDMWSLLSPRPMLQPSSGIGTEGKETFDINEVAVTHVSSDYFQKGSMFGEENVNQANLSAAADWMLPEQVPSIPNGMSTSSVDESTIVLGSQPSTNQSLDWGGTTWSIGQNASVYSNEKAEPSSKSYWEEPRKQETAKSSVSISGQAIGNNKGLDPRDNAANRGSRLSHHHRGRYSQISESWLLSSSHSRSRSDRFGSGGSSRSTSKGQSRG

SEQ ID NO: 157130 - protein, 1908 aa, Zea Mays
MDPNYESAEETDEKGTVGKSVNQTRPDTTISRRISRYLSTVQNHPKKVSDSSHLPKSLSTESAICGSGARSLENSTANRTMYGAGPLSSSVVTMTNDTEPEKVWHYKDPSGNVQGPFTLLQLSNWTSYFPRDLRVWLTFESEERSLLLTEVLSKQQKDFTQAASHTSSKATLVGTGHTRNNPSVDQTNAFSPVGHSVVSSSGIPVQYNKYSVPERESVYSPDDSLSLSTSSVPPKDAYTVNSQAHCQNKHSVFIQSPGSSYGHTDLNHDGIQGGCSGESNHHHSSRALWSPTVAHVSCGRGNVESHQNQHVSWSESQHESKNGSQGGFVKDLNSRQDLSKNLPAQRIGKDVSSPLFAWSPAESRTASSQQEGSCLSSTTNPSFLDELHSSIASAKPKSCAPATPIEDRGSSSPSDMLSHEERVPICSPQSAPLASASDMCKMEEIMNQQRTLVVDTSNASVNQSPESRAFPVSSPDNQDIDREFPSPVPRSENKDIAVDSSELAPASPENITTNLPVSDTCKMEEVVSQQQVIGAVVSNSSDNHSPQSKVSPVSSNNEDTKHKYPSSTPRPENKNPAVDSLLSTSAAPENLTTTSTHDSDTCKMEVVNQPKTFEADASNAPLHQLPHSHSFLVPSDNQDIECECPGPTPRSDSEEALMNNSATTASASDTSKMEEFVNQQKTLEADSSNAPLNQSPHSHIFSVPSDKQDIERECPGPTQRSDTKEPLMNNSVLTSGPSEIQTTASAASDTCKMEESVDQPKALEADASNAPLNHHPHSHIFRVSSDNQDNQCEHPSPNPKSDSKEPLVDNSVLTSVVPGMLATTSASDKCKMEEFANQQKALEVDASNASFNQPHIFAVSSDNQDMERERPSPTPRSECKESLTENSVLTSLAPEILARSSASASDKCKTEEFVNQQKPIEADASNASLNQPHVFAVPSDNQDIERECPSPTPRSECKESFMENSVLTSAVPEIARSSVSASDTCKMEFVNQQRPIEADASNASLNQPRIFAISSDNKDIERECPNPTPRSECKESIMENSVLTSAAPEILAISSASASDTCKMEFVNQQRPIEADASNASLNQPHIFAISSDNKDIERECPSPTPRSECKESLMENSVLTPATPEILARSSASASDTCKMEEFVKQQRPNEADASNASLNQPHIFTVSSDNKDIERECPSPTPRSECKESLMENSVLTSAAPERSSASASDTCKMEFVNQQRPIEADAPNASLNQCRTFAVSSDTKDIERECPSPTPRSECKESLMENSVLTSAAPEILARSSASASDTCKMEEFVNQQRLIEADASNASLNQPHIFAVSSDNKDIERECPSPTPRSECKESLMENSVLTSAAPEILVRSSASASDTCKMEEFVNQQRPIEVDASNASLNQPPRCHIFTASSNNQDIERECPSSTPRSDSKEPFVDNLVLTSAVPGNLLTSSAVASDTCKMEILNKKITLEADASNAPLNQPPLSSVFASSSGDDQDNVCGRPSPNPRPEGEQPLMGNSGLISTVPRNLTSTSASASDICKMEILNEKRTLEANPSNGLITQSPQPKVFLVPSPDILECEFSSETPRHEFKEPVADSSGLTSAAHENLGTKPHVHSPDAFVPPKSGALTGELGDTKSDFKDVSDVLDSLMEERSGTSYMPGSIEDFLAEEEPQYSSPIALSPWGEPSYYQGDAVDSALWGTQDLINDMWSLLSPRPMLQPSSGIGTEGKETFDINEVAVTHVSSDYFQKGSMFGEENVNQANLSAAADWMLPEQVPSIPNGMSTSSVDESTIVLGSQPSTNQSLDWGGTTWSIGQNASVYSNEKAEPSSKSYWEEPRKQETAKSSVSISGQAIGNNKGLDPRDNAANRGSRLSHHHRGRYSQISESWLLSSSHSRSRSDRFGSGGSSRSTSKGQSRG

SEQ ID NO: 157131 - protein, 1992 aa, Zea Mays
MKCDLISRLKVGDILEKAKILQYVRVNDWFENEKQRLGHLRDRASETGRRKELREYVEKLQLLNDSEERTRRIIEILELHVDSHMDPNYESAEETDEKGTVGKSVNQTRPDTTISRRISRYLSTVQNHPKKVSDSSHLPKSLSTESAICGSGARSLENSTANRTMYGAGPLSSSVVTMTNDTEPEKVWHYKDPSGNVQGPFTLLQLSNWTSYFPRDLRVWLTFESEERSLLLTEVLSKQQKDFTQAASHTSSKATLVGTGHTRNNPSVDQTNAFSPVGHSVVSSSGIPVQYNKYSVPERESVYSPDDSLSLSTSSVPPKDAYTVNSQAHCQNKHSVFIQSPGSSYGHTDLNHDGIQGGCSGESNHHHSSRALWSPTVAHVSCGRGNVESHQNQHVSWSESQHESKNGSQGGFVKDLNSRQDLSKNLPAQRIGKDVSSPLFAWSPAESRTASSQQEGSCLSSTTNPSFLDELHSSIASAKPKSCAPATPIEDRGSSSPSDMLSHEERVPICSPQSAPLASASDMCKMEEIMNQQRTLVVDTSNASVNQSPESRAFPVSSPDNQDIDREFPSPVPRSENKDIAVDSSELAPASPENITTNLPVSDTCKMEEVVSQQQVIGAVVSNSSDNHSPQSKVSPVSSNNEDTKHKYPSSTPRPENKNPAVDSLLSTSAAPENLTTTSTHDSDTCKMEVVNQPKTFEADASNAPLHQLPHSHSFLVPSDNQDIECECPGPTPRSDSEEALMNNSATTASASDTSKMEEFVNQQKTLEADSSNAPLNQSPHSHIFSVPSDKQDIERECPGPTQRSDTKEPLMNNSVLTSGPSEIQTTASAASDTCKMEESVDQPKALEADASNAPLNHHPHSHIFRVSSDNQDNQCEHPSPNPKSDSKEPLVDNSVLTSVVPGMLATTSASDKCKMEEFANQQKALEVDASNASFNQPHIFAVSSDNQDMERERPSPTPRSECKESLTENSVLTSLAPEILARSSASASDKCKTEEFVNQQKPIEADASNASLNQPHVFAVPSDNQDIERECPSPTPRSECKESFMENSVLTSAVPEIARSSVSASDTCKMEFVNQQRPIEADASNASLNQPRIFAISSDNKDIERECPNPTPRSECKESIMENSVLTSAAPEILAISSASASDTCKMEFVNQQRPIEADASNASLNQPHIFAISSDNKDIERECPSPTPRSECKESLMENSVLTPATPEILARSSASASDTCKMEEFVKQQRPNEADASNASLNQPHIFTVSSDNKDIERECPSPTPRSECKESLMENSVLTSAAPERSSASASDTCKMEFVNQQRPIEADAPNASLNQCRTFAVSSDTKDIERECPSPTPRSECKESLMENSVLTSAAPEILARSSASASDTCKMEEFVNQQRLIEADASNASLNQPHIFAVSSDNKDIERECPSPTPRSECKESLMENSVLTSAAPEILVRSSASASDTCKMEEFVNQQRPIEVDASNASLNQPPRCHIFTASSNNQDIERECPSSTPRSDSKEPFVDNLVLTSAVPGNLLTSSAVASDTCKMEILNKKITLEADASNAPLNQPPLSSVFASSSGDDQDNVCGRPSPNPRPEGEQPLMGNSGLISTVPRNLTSTSASASDICKMEILNEKRTLEANPSNGLITQSPQPKVFLVPSPDILECEFSSETPRHEFKEPVADSSGLTSAAHENLGTKPHVHSPDAFVPPKSGALTGELGDTKSDFKDVSDVLDSLMEERSGTSYMPGSIEDFLAEEEPQYSSPIALSPWGEPSYYQGDAVDSALWGTQDLINDMWSLLSPRPMLQPSSGIGTEGKETFDINEVAVTHVSSDYFQKGSMFGEENVNQANLSAAADWMLPEQVPSIPNGMSTSSVDESTIVLGSQPSTNQSLDWGGTTWSIGQNASVYSNEKAEPSSKSYWEEPRKQETAKSSVSISGQAIGNNKGLDPRDNAANRGSRLSHHHRGRYSQISESWLLSSSHSRSRSDRFGSGGSSRSTSKGQSRG

SEQ ID NO: 157132 - protein, 1109 aa, Zea Mays
MEGAEALFPGDGCGGDPMDFSWTADGEKHPDPAACASPGRDDEATSASTPVPSPQEMAESMILVPGPRVVMSGLRLADCRSDDCVLFINAGGGAIESCDPCVKVSGDSFFEGGDVIETNESIAEGGDCPFIYHSARYGSFSYKFDGLAPGAYFLDLHFAEILYTCGPKGISMFDVLILSQLDVYAVVGGNRALQVRDIRVTVEMNGAVMINFKGVRGSPMVCGICIRKAPLLSANSVTNGNVLCKRCSSDIDVSTTQTRTSKLISKYEKQIEELTSQCTMKSNECYMAWSSVDTTNVELGRLKIELHQKGAEMENLVQTLGRESDQLRNVSRKYKNDKKLWVAAISNLERKIKAMKQEQQLLSLEAHDCANAIPDLSKMIGAVKGLVAQCEDLKLKYYEEMDKRKKLHNIVQETKGNIRVFCRCRPLSKDEVSSGQKCVVDFDGSSDGDIVITNGGTKKTFKFDRVFTPKDDQDIVYADASPLVTSVLDGYNVCIFAYGQTGTGKTFTMEGTESNRGVNYRTLEELFNIAEERKESVTYDLSVSVLEVYNEQIRDLLATSPSKKLEIKPNSEGQNHVPGLVEAKIENINEVWKVLQTGSNARAVGSNNVNEHSSRSHCMLCITVRAKNQLNGECTSSKLWLVDLAGSERLAKTDVQGERLKEAQNINRSLSALGDVISALATKNSHIPYRNSKLTHLLQDSLGGDSKALMFVQISPSDNDVSETLSSLNFASRVRRIELGPAKKHVDTAELQKTKQTLERAKQELRLKDDSLRKLEENLQNLESKAKGKEQLCKNLQEKVKELEGQLDSKAQCQITSEKQQRQLSGKLKEKEEMCNVLQQKIADLECKLRQPQQSESEVALLKQTIQELEVKLKEQQHDRSAMELSIKEMELRFKEEEHQRSVAELKIKELELKLKEQEHQRSVAELKAREIGHELLETQRTESMLQIKLRELESKAKEQDTNMTAVVESRVVVATPVNAKVMSEKENHVLRISNSLNKQLAHVENTPEAPEAACNERKRKGEARNASIGGGEQENTNNGGRKRSLPAEREARLKRKSTEPPPQVKNLVRSTASSRAAAKAAAAAAPSSRAGGAKQQPGGGNKTRGWVR

SEQ ID NO: 157133 - protein, 1115 aa, Zea Mays
MEGAEALFPGDGCGGDPMDFSWTADGEKHPDPAACASPGRDDEATSASTPVPSPQEMAESMILVPGPRVVMSGLRLADCRSDDCVLFINAGGGAIESCDPCVKVSGDSFFEGGDVIETNESIAEGGDCPFIYHSARYGSFSYKFDGLAPGAYFLDLHFAEILYTCGPKGISMFDVLVQDEKILSQLDVYAVVGGNRALQVRDIRVTVEMNGAVMINFKGVRGSPMVCGICIRKAPLLSAANSVTNGNVLCKRCSSDIDVSTTQTRTSKLISKYEKQIEELTSQCTMKSNECYMAWSSVDTTNVELGRLKIELHQKGAEMENLVQTLGRESDQLRNVSRKYKNDKKLWVAAISNLERKIKAMKQEQQLLSLEAHDCANAIPDLSKMIGAVKGLVAQCEDLKLKYYEEMDKRKKLHNIVQETKGNIRVFCRCRPLSKDEVSSGQKCVVDFDGSSDGDIVITNGGTKKTFKFDRVFTPKDDQDIVYADASPLVTSVLDGYNVCIFAYGQTGTGKTFTMEGTESNRGVNYRTLEELFNIAEERKESVTYDLSVSVLEVYNEQIRDLLATSPSKKLEIKPNSEGQNHVPGLVEAKIENINEVWKVLQTGSNARAVGSNNVNEHSSRSHCMLCITVRAKNQLNGECTSSKLWLVDLAGSERLAKTDVQGERLKEAQNINRSLSALGDVISALATKNSHIPYRNSKLTHLLQDSLGGDSKALMFVQISPSDNDVSETLSSLNFASRVRRIELGPAKKHVDTAELQKTKQTLERAKQELRLKDDSLRKLEENLQNLESKAKGKEQLCKNLQEKVKELEGQLDSKAQCQITSEKQQRQLSGKLKEKEEMCNVLQQKIADLECKLRQPQQSESEVALLKQTIQELEVKLKEQQHDRSAMELSIKEMELRFKEEEHQRSVAELKIKELELKLKEQEHQRSVAELKAREIGHELLETQRTESMLQIKLRELESKAKEQDTNMTAVVESRVVVATPVNAKVMSEKENHVLRISNSLNKQLAHVENTPEAPEAACNERKRKGEARNASIGGGEQENTNNGGRKRSLPAEREARLKRKSTEPPPQVKNLVRSTASSRAAAKAAAAAAPSSRAGGAKQQPGGGNKTRGWVR

SEQ ID NO: 157134 - protein, 584 aa, Zea Mays
MFDRGDRQRARNTFVGTPCWMAPEVLQPGTGYNFKADIWSFGITALELAHGHAPFSKYPPMKVLLMTLQNAPPGLDYDRDKRFSKSFKEMVAMCLVKDQTKRPTAEKLLKHSFFKNAKPPELTVKNILTDLPPLWDRVKALQLKDAAQLALKRMPSSEQEALSMSEYQRGVSAWNFDIEDLKAQASLICDDDPPEIKEDDDTGRITDIDKDTSSDDYFGKTAPSNGNNCSDRSSVPANPGQNGPEINEILSSNNGNAYSERKPDGRKNPESENDSLPSTSKHDADGKDYRCDFRQKQRTYSGPVLQSGPNNSSMTERGHIIERDAGVQSVSDKQKNGTRRANNLSGPLSLPTRASANSLSRANNLSGPLSLPTRASANSLSAPIRSSAGYVGSLGDKPKRTMVEIKGRFSVTSENVDLAKVQEIPGSSASRKLQEGPSLRKSASVGDWSANDKTTSTNHQRKELCNSSVSTSILIPHLQNLVKQTAFQQDLITNLLSSLQQNERVDAAQSRVQSTTSDTVVEAATAEREHSLLVKIFELQSRMISLTDELIAAKLKHVQLQEELNVLYCQEEILDMREDESEEA

SEQ ID NO: 157135 - protein, 744 aa, Zea Mays
MVRSGSIRRSAVPAPMPAPAFTVSPADYRLLEEVGYGANAVVYRAEFIPTGRTVAVKCLDLDRVNSNLDDVRKETQTMSLIDHPNVIRSYCSFVVGHNLWVVMPFMSEGSCLHLMKVAYPDGFEEPIIASILKETLKALDYLHRQGHIHRDVKAGNILIDNPGVVKLGDFGVSACMFDRGDRQRARNTFVGTPCWMAPEVLQPGTGYNFKADIWSFGITALELAHGHAPFSKYPPMKVLLMTLQNAPPGLDYDRDKRFSKSFKEMVAMCLVKDQTKRPTAEKLLKHSFFKNAKPPELTVKNILTDLPPLWDRVKALQLKDAAQLALKRMPSSEQEALSMSEYQRGVSAWNFDIEDLKAQASLICDDDPPEIKEDDDTGRITDIDKDTSSDDYFGKTAPSNGNNCSDRSSVPANPGQNGPEINEILSSNNGNAYSERKPDGRKNPESENDSLPSTSKHDADGKDYRCDFRQKQRTYSGPVLQSGPNNSSMTERGHIIERDAGVQSVSDKQKNGTRRANNLSGPLSLPTRASANSLSRANNLSGPLSLPTRASANSLSAPIRSSAGYVGSLGDKPKRTMVEIKGRFSVTSENVDLAKVQEIPGSSASRKLQEGPSLRKSASVGDWSANDKTTSTNHQRKELCNSSVSTSILIPHLQNLVKQTAFQQDLITNLLSSLQQNERVDAAQSRVQSTTSDTVVEAATAEREHSLLVKIFELQSRMISLTDELIAAKLKHVQLLLEILFPDQ

SEQ ID NO: 157136 - protein, 743 aa, Zea Mays
MVRSGSIRRSAVPAPMPAPAFTVSPADYRLLEEVGYGANAVVYRAEFIPTGRTVAVKCLDLDRVNSNLDDVRKETQTMSLIDHPNVIRSYCSFVVGHNLWVVMPFMSEGSCLHLMKVAYPDGFEEPIIASILKETLKALDYLHRQGHIHRDVKAGNILIDNPGVVKLGDFGVSACMFDRGDRQRARNTFVGTPCWMAPEVLQPGTGYNFKADIWSFGITALELAHGHAPFSKYPPMKVLLMTLQNAPPGLDYDRDKRFSKSFKEMVAMCLVKDQTKRPTAEKLLKHSFFKNAKPPELTVKNILTDLPPLWDRVKALQLKDAAQLALKRMPSSEQEALSMSEYQRGVSAWNFDIEDLKAQASLICDDDPPEIKEDDDTGRITDIDKDTSSDDYFGKTAPSNGNNCSDRSSVPANPGQNGPEINEILSSNNGNAYSERKPDGRKNPESENDSLPSTSKHDADGKDYRCDFRQKQRTYSGPVLQSGPNNSSMTERGHIIERDAGVQSVSDKQKNGTRRANNLSGPLSLPTRASANSLSRANNLSGPLSLPTRASANSLSAPIRSSAGYVGSLGDKPKRTMVEIKGRFSVTSENVDLAKVQEIPGSSASRKLQEGPSLRKSASVGDWSANDKTTSTNHQRKELCNSSVSTSILIPHLQNLVKQTAFQQDLITNLLSSLQQNERVDAQSRVQSTTSDTVVEAATAEREHSLLVKIFELQSRMISLTDELIAAKLKHVQLLLEILFPDQ

SEQ ID NO: 157137 - protein, 758 aa, Zea Mays
MVRSGSIRRSAVPAPMPAPAFTVSPADYRLLEEVGYGANAVVYRAEFIPTGRTVAVKCLDLDRVNSNLDDVRKETQTMSLIDHPNVIRSYCSFVVGHNLWVVMPFMSEGSCLHLMKVAYPDGFEEPIIASILKETLKALDYLHRQGHIHRDVKAGNILIDNPGVVKLGDFGVSACMFDRGDRQRARNTFVGTPCWMAPEVLQPGTGYNFKADIWSFGITALELAHGHAPFSKYPPMKVLLMTLQNAPPGLDYDRDKRFSKSFKEMVAMCLVKDQTKRPTAEKLLKHSFFKNAKPPELTVKNILTDLPPLWDRVKALQLKDAAQLALKRMPSSEQEALSMSEYQRGVSAWNFDIEDLKAQASLICDDDPPEIKEDDDTGRITDIDKDTSSDDYFGKTAPSNGNNCSDRSSVPANPGQNGPEINEILSSNNGNAYSERKPDGRKNPESENDSLPSTSKHDADGKDYRCDFRQKQRTYSGPVLQSGPNNSSMTERGHIIERDAGVQSVSDKQKNGTRRANNLSGPLSLPTRASANSLSRANNLSGPLSLPTRASANSLSAPIRSSAGYVGSLGDKPKRTMVEIKGRFSVTSENVDLAKVQEIPGSSASRKLQEGPSLRKSASVGDWSANDKTTSTNHQRKELCNSSVSTSILIPHLQNLVKQTAFQQDLITNLLSSLQQNERVDAQSRVQSTTSDTVVEAATAEREHSLLVKIFELQSRMISLTDELIAAKLKHVQLQEELNVLYCQEEILDMREDESEEA

SEQ ID NO: 157138 - protein, 734 aa, Zea Mays
MVRSGSIRRSAVPAPMPAPAFTVSPADYRLLEEVGYGANAVVYRAEFIPTGRTVAVKCLDLDRVNSNLDDVRKETQTMSLIDHPNVIRSYCSFVVGHNLWVVMPFMSEGSCLHLMKVAYPDGFEEPIIASILKETLKALDYLHRQGHIHRDVKAGNILIDNPGVVKLGDFGVSACMFDRGDRQRARNTFVGTPCWMAPEVLQPGTGYNFKADIWSFGITALELAHGHAPFSKYPPMKVLLMTLQNAPPGLDYDRDKRFSKSFKEMVAMCLVKDQTKRPTAEKLLKHSFFKNAKPPELTVKNILTDLPPLWDRVKALQLKDAAQLALKRMPSSEQEALSMSEYQRGVSAWNFDIEDLKAQASLICDDDPPEIKEDDDTGRITDIDKDTSSDDYFGKTAPSNGNNCSDRSSVPANPGQNGPEINEILSSNNGNAYSERKPDGRKNPESENDSLPSTSKHDADGKDYRCDFRQKQRTYSGVQSVSDKQKNGTRRANNLSGPLSLPTRASANSLSRANNLSGPLSLPTRASANSLSAPIRSSAGYVGSLGDKPKRTMVEIKGRFSVTSENVDLAKVQEIPGSSASRKLQEGPSLRKSASVGDWSANDKTTSTNHQRKELCNSSVSTSILIPHLQNLVKQTAFQQDLITNLLSSLQQNERVDAQSRVQSTTSDTVVEAATAEREHSLLVKIFELQSRMISLTDELIAAKLKHVQLQEELNVLYCQEEILDMREDESEEA

SEQ ID NO: 157139 - protein, 583 aa, Zea Mays
MFDRGDRQRARNTFVGTPCWMAPEVLQPGTGYNFKADIWSFGITALELAHGHAPFSKYPPMKVLLMTLQNAPPGLDYDRDKRFSKSFKEMVAMCLVKDQTKRPTAEKLLKHSFFKNAKPPELTVKNILTDLPPLWDRVKALQLKDAAQLALKRMPSSEQEALSMSEYQRGVSAWNFDIEDLKAQASLICDDDPPEIKEDDDTGRITDIDKDTSSDDYFGKTAPSNGNNCSDRSSVPANPGQNGPEINEILSSNNGNAYSERKPDGRKNPESENDSLPSTSKHDADGKDYRCDFRQKQRTYSGPVLQSGPNNSSMTERGHIIERDAGVQSVSDKQKNGTRRANNLSGPLSLPTRASANSLSRANNLSGPLSLPTRASANSLSAPIRSSAGYVGSLGDKPKRTMVEIKGRFSVTSENVDLAKVQEIPGSSASRKLQEGPSLRKSASVGDWSANDKTTSTNHQRKELCNSSVSTSILIPHLQNLVKQTAFQQDLITNLLSSLQQNERVDAQSRVQSTTSDTVVEAATAEREHSLLVKIFELQSRMISLTDELIAAKLKHVQLQEELNVLYCQEEILDMREDESEEA

SEQ ID NO: 157140 - protein, 330 aa, Zea Mays
MIGRILGGIATSLLFSAFESWLVAEHNKRGFDPQWLSITFSKAIFLGNGLIAIVSGLFANLLAENLGFGPVAPFDAAACFLAIGMAVIMSSWSENYGDPSDSKDLMAQFKVAAKAIASDEKIALLGAIQSLFEGSMYTFVFLWTPALSPNEEDIPHGFIFATFMLSSMLGSSVASRLLARKLKVEGYMQIVFSISAVTLVLPVVTNILVPTSSVKGGSISIGGSLQLLGFCTFEACVGIFWPSIMKMRSQYIPEEARSTIMNFFRIPLNLFVCVVLYNVNAFPITVMFGMCSIFLFMAAILQRRLMVVSDLHKSSTKAQEMIGEDEPLNP

SEQ ID NO: 157141 - protein, 154 aa, Zea Mays
MIQEMRPEIEAINEEMRNSTDPRSMEVGKQKLGELFLRHGVTPLTPLKGLFIQGPIFMSFFFAISNMVEKVPSMKGGGVYWFTDLTTPDNLLILPVLTSLTFLATVELNMQDGMEGNHMLKPMKKFSRFFGVLFVPFTIGFPKVRNRETTQVFK

SEQ ID NO: 157142 - protein, 286 aa, Zea Mays
MATRADVEKGGPARKEPGKVPSPLYPQHEGEREWVPWLVPVIFVASITVFVVTMYANNCPARDTNKCVARFLGRFSFQPLRQNPLFGPSSATLTKMGALVWEKVVHRHQGWRLLSSMWLHAGVIHLVANMLCLLFIGMRLEQQFGYVRIGAIYVLSGVGGAVLSSLVVRNRVTVGASGALLGLLGAMLSELLTNWTIYTNKAAAVATLLSVAAVNLVLGVLPHVDNLAHLGGFLAGFLLGFVVLMRPHLGWMERYGLPAGAPCTARKYLAYQWTLLAVAIIILLVG

SEQ ID NO: 157143 - protein, 67 aa, Zea Mays
MVEVEQNGRKRSEFILIYLDSDVGMLIQYLLSSIPVMTSAFDDKAMQIPPSFFSSQNSCSTKQKSTR

SEQ ID NO: 157144 - protein, 230 aa, Zea Mays
MFSTETKCDYVNNNLAECFNSWIKNIKDLPIVDLVDRLRQMTMELWEKRRKIADKLSGNILPAIMSQLKAKTRALGQMSVCKNRHKAEIFGSYQDMTPWRHVVDLHEHTCSCRAWEVTGKPCRHALAFLQTERNVDLDSFVHEYYSVERFKIAYSGTIPTITDKSQWPKLNLGFKLLPPKLKIGPGRKRKNRFKASHEPGARKLDKCKTCDEVGQHDPNCGVPKKKEGTF

SEQ ID NO: 157145 - protein, 248 aa, Zea Mays
MTDPNPIVASKGIEKLQGAGISVRVGVEEALCRKLNEAYIHRMLTGKAFATLRATLSMNGIITNQIGKGADQSGGYYSQLMKEYDGVIISSDLAKMSALPLSREAGTNQPLCIIIAQGESSRLHIPSLSQEHASRAIVLADSPVTVEPAGVEVAVFRQIDLESILQLLAQRGLCSVLVDFREAGESFASLLNDFQEDKLVQKVVVEVLPFWLASDGLSNLAFGGSQSFPLKNLELRDVNGSVLLEGYV

SEQ ID NO: 157146 - protein, 191 aa, Zea Mays
MNGIITNQIGKGADQSGGYYSQLMKEYDGVIISSDLAKMSALPLSREAGTNQPLCIIIAQGESSRLHIPSLSQEHASRAIVLADSPVTVEPAGVEVAVFRQIDLESILQLLAQRGLCSVLVDFREAGESFASLLNDFQEDKLVQKVVVEVLPFWLASDGLSNLAFGGSQSFPLKNLELRDVNGSVLLEGYV

SEQ ID NO: 157147 - protein, 181 aa, Zea Mays
MHKAAKSDKGYGFPVDNTIGSTPQINTWTDDWIEFYSKHRLGYQLELASRRYGDSAILEKGQRLIKNIRPLFDGAVIEPCLLHGDLWSGNISSDSNGDPVILDPACYYGHNEAEFGMSWCAGFGGDFYNAYFQVMPKQPGFEKRRDLYLLYHYLNHYNLFGSGYRSSAMSIIEDYLYVLAI

SEQ ID NO: 157148 - protein, 464 aa, Zea Mays
MAAAVAAPAPSRKTETYTDTKRRDDVRGANIAAARAVADAVRTSLGPRGMDKMIASGDQAQEVIITNDGATILSRMALLQPAARMLAELSRSQDAAAGDGTTTVVVLAGSLLRRAQSLLSAGAHPTAAADALHRLATRAVEILHAMAIPIELSDRESLVKSASTALNSKKLGGTVDDTELIPGLIFDKKASHAAGGPTRMENAKIAVIQFQISPPKTDIEQSVIVSDYAQMDRILREERNYILGMAKILVVKDVERDEMEFITKTLNCLPIANIEHFRTDKFGYADVVEEVSVGEGKVVKITGIKDMGRTATVLVRGSNQLVIDEAERSLHDALCVIRCLVSKRFLIAGGGAPEIEMSMQLAAWAKELRGMESYCIKEFAEALEVIPYTLAENAGLNPISIVTELRNRHARGEKNTGINVRKGQITNILEENVVQPLLVSTSAITLACECVRMILKIDDIVTVR

SEQ ID NO: 157149 - protein, 299 aa, Zea Mays
MAQHSAACSIFFLAAGPEPKPRTGHNMSPSDDGEETLAALIELSRTPEGREGLTDVLIDTLFLLPASPPRLLLLRLRLLRNLLAGDELNHYAFIEHSGPAAVAASVLSFPSLAPDVARAALQALGNAALAGELHRDAVWQALFPEALRVFAGLRDQGVLDPLCMVLDTCCGGEGGRGRLQELCHEELGLPILVQAVTTASQVEHKEEWLEWLLFKVCAEEQKFESLFYALCSANDVGEYNAKHIFLLDTLSRCLNSHPEEVTVSDSFAHDVFNLHKHAAETVNFTYRGWLCKAPSEIPR

SEQ ID NO: 157150 - protein, 469 aa, Zea Mays
MGQQLHHQRRVVELRLGDGLQLGAGDAAPSYLLHAVVPDAQPAEVGDVLAGAEVVHQPRVDGAGRVHVAGAHAVEARPPVLLVLDRHARVVRRARRRHDRRLDRRGGPARVQALDDGRDAAQVRRRHGRPGLHEEGQAHVVRELRVHLAGRPRRQDVHSGPGDVGLQDARARLVRPARREEGEHVDAVLDGGVQAGNDVHDGAPAPRAHLVDGQVRVRRHPGRRAVRVAPHVGVLHEVARRRAGRVRAVARVVHGRRRVVDGRAPERARADDLVAAPAAGDRPELAGALPLLGRRRQPGVAEGRVAGQDAGVEEPNHHAAAEAGAAPEAVLAHVEAEEARRVGGRQRQELLWVQPQTPLLAPQRLRLRVGEAGSEARQHVAVRVDDPRPVVRRRVQRRLRQEGPVPLLQRSGAAAVPRLEMNHVVLALLRVGEQRGGGKQEQGKEASLGPHDSGKQPPWRLVLGSAESI

SEQ ID NO: 157151 - protein, 198 aa, Zea Mays
MHIGIKVLVHITFLLLGEQDHLMKNCFKYTLIQKDRNQNSLMHHWASIQECVNKFCGCMSWIEGRNASRKTFENKLTNAYSLYKAEDKDNKSFQFIHCWNVLRLEPKWNEKMNQLASTKSGCKKQKATFSVIDLTGNLNGDATPEGDAPTRPIGRKKAKQLLRRGGADGYIEALDNLWEKKKQADVDKELKKKDSTNH

SEQ ID NO: 157152 - protein, 439 aa, Zea Mays
MARAEANWERLVRAALRGERLGSAYGQPVTGIAGNVPSSLGNNVHIEEVLRAADEIQDEDPTIARILCEHGYTLAQSLDPNSEGRGVLQFKTGLMSVIRQKLAKRGGAAIDRSQDIAKLQEFYKLYREKHKVDELIEDEMKLRESAVFSGNLGELERKTRKRKKVLATLKVLWSVIEDMTKDISPEDANKLISEEMKRVMQKDAARTEDVVPYNIIPLDSLTSTTNAIVNFPEVRAAISTLQYYTDLPRLPGTFSVPDARNSDILDLLQCVFGFQGDNVKNQREHIIHLLANEQSRVGKLSGNEPKIDEGAVHAVFSKALDNYIKWCNYLPLRPVWDNNDSLTKEKKLLYVCLYYLMWGEAANVRFIPEGLCYIFHHLARELGVILQKQTAEPAESCNSGGGVSFLDNVIYPFYEIIAAVSVPAGELIPVIIFGPIWFS

SEQ ID NO: 157153 - protein, 1173 aa, Zea Mays
MARAEANWERLVRAALRGERLGSAYGQPVTGIAGNVPSSLGNNVHIEEVLRAADEIQDEDPTIARILCEHGYTLAQSLDPNSEGRGVLQFKTGLMSVIRQKLAKRGGAAIDRSQDIAKLQEFYKLYREKHKVDELIEDEMKLRESAVFSGNLGELERKTRKRKKVLATLKVLWSVIEDMTKDISPEDANKLISEEMKRVMQKDAARTEDVVPYNIIPLDSLTSTTNAIVNFPEVRAAISTLQYYTDLPRLPGTFSVPDARNSDILDLLQCVFGFQGDNVKNQREHIIHLLANEQSRVGKLSGNEPKIDEGAVHAVFSKALDNYIKWCNYLPLRPVWDNNDSLTKEKKLLYVCLYYLMWGEAANVRFIPEGLCYIFHHLARELGVILQKQTAEPAESCNSGGGVSFLDNVIYPFYEIIAAEAANNKNGRAPHSEWRNYDDFNEFFWSHKCFHLRWPWNLSDPFFSKPSRKYKGLLSRNHHYGKTSFVEHRTFLHLYHSFHRLWMFLIMMFQGLTIIAFNDGSFDRKTILQLLSLGPTYVVMKFIESLLDILMMYGAYSTSRGSAITRVAWRFCWFTIASVAICYLYIKTLQDGTESATFKIYVFVISAYVGIKIIFSLLMSVPCCHGLAEACYRWSAVRLVKWMHQENNYVGRGMHESPLDYIKYATFWIAILGAKFSFTYFLQIKPLVEPTRTIINFTGLQYAWHDFFSKNNHNALTILSLWAPVLSIYLLDIHVFYTVLSAIYGFLLGARDRLGEISTVEAVHRFFEKFPGAFMHRLHVEVPKRKQLLSSGQEIELNKFDASRFSPFWNEIVRNLREEDYINNFELELLLMPKNDVGVLPIVQWPVFLLASKVFLAKEIAEDCKDSQEELWLRISKDEYMQYAVVESFHSIYHILTSILEKEGRLWVERIYGGIRDSISKRTIQSDLHFKKLLNVIAKLVAVLGILRGTTESSDLKKGLVNAIQDLYDVVHHEAFSVDMSGHIEDWDQINLARAEGRLFNKLKWPNDPKLKDLIKRLYSLLTIKESAATVPKNLEARRRLQFFTNSLFMEMPVARPVSEMVSFSVFTPYYSEIVLYSMAELQKKNEDGITTLFYLQKIYPGWQLQSGVENRHVFTIAPSGTYSVKSAYERLWEEVGAAVNGLTKRGLDSLIILEPGFCGTIEIYASLMLQPN

SEQ ID NO: 157154 - protein, 1195 aa, Zea Mays
MARAEANWERLVRAALRGERLGSAYGQPVTGIAGNVPSSLGNNVHIEEVLRAADEIQDEDPTIARILCEHGYTLAQSLDPNSEGRGVLQFKTGLMSVIRQKLAKRGGAAIDRSQDIAKLQEFYKLYREKHKVDELIEDEMKLRESAVFSGNLGELERKTRKRKKVLATLKVLWSVIEDMTKDISPEDANKLISEEMKRVMQKDAARTEDVVPYNIIPLDSLTSTTNAIVNFPEVRAAISTLQYYTDLPRLPGTFSVPDARNSDILDLLQCVFGFQGDNVKNQREHIIHLLANEQSRVGKLSGNEPKIDEGAVHAVFSKALDNYIKWCNYLPLRPVWDNNDSLTKEKKLLYVCLYYLMWGEAANVRFIPEGLCYIFHHLARELGVILQKQTAEPAESCNSGGGVSFLDNVIYPFYEIIAAEAANNKNGRAPHSEWRNYDDFNEFFWSHKCFHLRWPWNLSDPFFSKPSRKYKGLLSRNHHYGKTSFVEHRTFLHLYHSFHRLWMFLIMMFQGLTIIAFNDGSFDRKTILQLLSLGPTYVVMKFIESLLDILMMYGAYSTSRGSAITRVAWRFCWFTIASVAICYLYIKTLQDGTESATFKIYVFVISAYVGIKIIFSLLMSVPCCHGLAEACYRWSAVRLVKWMHQENNYVGRGMHESPLDYIKYATFWIAILGAKFSFTYFLQIKPLVEPTRTIINFTGLQYAWHDFFSKNNHNALTILSLWAPVLSISTVEAVHRFFEKFPGAFMHRLHVEVPKRKQLLSSGQEIELNKFDASRFSPFWNEIVRNLREEDYINNFELELLLMPKNDVGVLPIVQWPVFLLASKVFLAKEIAEDCKDSQEELWLRISKDEYMQYAVVESFHSIYHILTSILEKEGRLWVERIYGGIRDSISKRTIQSDLHFKKLLNVIAKLVAVLGILRGTTESSDLKKGLVNAIQDLYDVVHHEAFSVDMSGHIEDWDQINLARAEGRLFNKLKWPNDPKLKDLIKRLYSLLTIKESAATVPKNLEARRRLQFFTNSLFMEMPVARPVSEMVSFSVFTPYYSEIVLYSMAELQKKNEDGITTLFYLQKIYPDEWKNFLTRINRDENAADSELFGNPNDILELRLWASYRGQTLARTVRGMMYYRKALMLQSYLERIQSEDLESTLGLAGSADRHFELSPEARAQADLKFTYVVTCQIYGKQKGEGKAELQTYPY

SEQ ID NO: 157155 - protein, 1089 aa, Zea Mays
MARAEANWERLVRAALRGERLGSAYGQPVTGIAGNVPSSLGNNVHIEEVLRAADEIQDEDPTIARILCEHGYTLAQSLDPNSEGRGVLQFKTGLMSVIRQKLAKRGGAAIDRSQDIAKLQEFYKLYREKHKVDELIEDEMKLRESAVFSGNLGELERKTRKRKKVLATLKVLWSVIEDMTKDISPEDANKLISEEMKRVMQKDAARTEDVVPYNIIPLDSLTSTTNAIVNFPEVRAAISTLQYYTDLPRLPGTFSVPDARNSDILDLLQCVFGFQGDNVKNQREHIIHLLANEQSRVGKLSGNEPKIDEGAVHAVFSKALDNYIKWCNYLPLRPVWDNNDSLTKEKKLLYVCLYYLMWGEAANVRFIPEGLCYIFHHLARELGVILQKQTAEPAESCNSGGGVSFLDNVIYPFYEIIAAEAANNKNGRAPHSEWRNYDDFNEFFWSHKCFHLRWPWNLSDPFFSKPSRKYKGLLSRNHHYGKTSFVEHRTFLHLYHSFHRLWMFLIMMFQGLTIIAFNDGSFDRKTILQLLSLGPTYVVMKFIESLLDILMMYGAYSTSRGSAITRVAWRFCWFTIASVAICYLYIKTLQDGTESATFKIYVFVISAYVGIKIIFSLLMSVPCCHGLAEACYRWSAVRLVKWMHQENNYVGRGMHESPLDYIKYATFWIAILGAKFSFTYFLQIKPLVEPTRTIINFTGLQYAWHDFFSKNNHNALTILSLWAPVLSIYLLDIHVFYTVLSAIYGFLLGARDRLGEISTVEAVHRFFEKFPGAFMHRLHVEVPKRKQLLSSGQEIELNKFDASRFSPFWNEIVRNLREEDYINNFELELLLMPKNDVGVLPIVQWPVFLLASKVFLAKEIAEDCKDSQEELWLRISKDEYMQYAVVESFHSIYHILTSILEKEGRLWVERIYGGIRDSISKRTIQSDLHFKKLLNVIAKLVAVLGILRGTTESSDLKKGLVNAIQDLYDVVHHEAFSVDMSGHIEDWDQINLARAEGRLFNKLKWPNDPKLKDLIKRLYSLLTIKESAATVPKNLEARRRLQFFTNSLFMEMPVARPVSEMVSFRCLLHITLRLFSTAWLNFRRKTKTV

SEQ ID NO: 157156 - protein, 1224 aa, Zea Mays
MARAEANWERLVRAALRGERLGSAYGQPVTGIAGNVPSSLGNNVHIEEVLRAADEIQDEDPTIARILCEHGYTLAQSLDPNSEGRGVLQFKTGLMSVIRQKLAKRGGAAIDRSQDIAKLQEFYKLYREKHKVDELIEDEMKLRESAVFSGNLGELERKTRKRKKVLATLKVLWSVIEDMTKDISPEDANKLISEEMKRVMQKDAARTEDVVPYNIIPLDSLTSTTNAIVNFPEVRAAISTLQYYTDLPRLPGTFSVPDARNSDILDLLQCVFGFQGDNVKNQREHIIHLLANEQSRVGKLSGNEPKIDEGAVHAVFSKALDNYIKWCNYLPLRPVWDNNDSLTKEKKLLYVCLYYLMWGEAANVRFIPEGLCYIFHHLARELGVILQKQTAEPAESCNSGGGVSFLDNVIYPFYEIIAAEAANNKNGRAPHSEWRNYDDFNEFFWSHKCFHLRWPWNLSDPFFSKPSRKYKGLLSRNHHYGKTSFVEHRTFLHLYHSFHRLWMFLIMMFQGLTIIAFNDGSFDRKTILQLLSLGPTYVVMKFIESLLDILMMYGAYSTSRGSAITRVAWRFCWFTIASVAICYLYIKTLQDGTESATFKIYVFVISAYVGIKIIFSLLMSVPCCHGLAEACYRWSAVRLVKWMHQENNYVGRGMHESPLDYIKYATFWIAILGAKFSFTYFLQIKPLVEPTRTIINFTGLQYAWHDFFSKNNHNALTILSLWAPVLSIYLLDIHVFYTVLSAIYGFLLGARDRLGEISTVEAVHRFFEKFPGAFMHRLHVEVPKRKQLLSSGQEIELNKFDASRFSPFWNEIVRNLREEDYINNFELELLLMPKNDVGVLPIVQWPVFLLASKVFLAKEIAEDCKDSQEELWLRISKDEYMQYAVVESFHSIYHILTSILEKEGRLWVERIYGGIRDSISKRTIQSDLHFKKLLNVIAKLVAVLGILRGTTESSDLKKGLVNAIQDLYDVVHHEAFSVDMSGHIEDWDQINLARAEGRLFNKLKWPNDPKLKDLIKRLYSLLTIKESAATVPKNLEARRRLQFFTNSLFMEMPVARPVSEMVSFSVFTPYYSEIVLYSMAELQKKNEDGITTLFYLQKIYPDEWKNFLTRINRDENAADSELFGNPNDILELRLWASYRGQTLARTVRGMMYYRKALMLQSYLERIQSEDLESTLGLAGSADRHFELSPEARAQADLKFTYVVTCQIYGKQKGEGKAELQTYPY

SEQ ID NO: 157157 - protein, 600 aa, Zea Mays
MSVPCCHGLAEACYRWSAVRLVKWMHQENNYVGRGMHESPLDYIKYATFWIAILGAKFSFTYFLQIKPLVEPTRTIINFTGLQYAWHDFFSKNNHNALTILSLWAPVLSIYLLDIHVFYTVLSAIYGFLLGARDRLGEISTVEAVHRFFEKFPGAFMHRLHVEVPKRKQLLSSGQEIELNKFDASRFSPFWNEIVRNLREEDYINNFELELLLMPKNDVGVLPIVQWPVFLLASKVFLAKEIAEDCKDSQEELWLRISKDEYMQYAVVESFHSIYHILTSILEKEGRLWVERIYGGIRDSISKRTIQSDLHFKKLLNVIAKLVAVLGILRGTTESSDLKKGLVNAIQDLYDVVHHEAFSVDMSGHIEDWDQINLARAEGRLFNKLKWPNDPKLKDLIKRLYSLLTIKESAATVPKNLEARRRLQFFTNSLFMEMPVARPVSEMVSFSVFTPYYSEIVLYSMAELQKKNEDGITTLFYLQKIYPDEWKNFLTRINRDENAADSELFGNPNDILELRLWASYRGQTLARTVRGMMYYRKALMLQSYLERIQSEGLAGSADRHFELSPEARAQADLKFTYVVTCQIYGKQKGEGKAELQTYPY

SEQ ID NO: 157158 - protein, 539 aa, Zea Mays
MRNLLEEFSLKRGKHYPSILGVREHVFTGSVSSLASFMSNQETSFVTLGQRVLANPLKVRMHYGHPDVFDRIFHITRGGISKASRSINISEDIYAGFNSTLRQGCITHHEYIQVGKGRDVGLNQIALFEGKVAGGNGEQVLSRDIYRLGQLFDFFRMLSFYVTTVGFYFCTMLTVLTVYIFLYGKMYLALSGVGESIQNRADILQNAALNAALNTQFLFQIGVFTAVPMILGFILESGVLTAFVQFITMQFQMCSVFFTFSLGTRTHYFGRAILHGGAKYRATGRGFVVRHIKFAENYRIYSRSHFVKGMEVALLLVIFLAYGFNNGGAVGYILLSISSWIMALSWLFAPYLFNPSGFEWQKIVEDFRDWTNWLFYRGGIGVKGEESWEAWWEEELQHIYSIRGRILETILSLRFFIFQFGVVYHMNASGGSTALLVYWISWAVLGGLFILLLVFGLNPKAMVHFQLFLRLVKSVALLMVLAALVPGNFVYETQCERCFCFHSSICANWVGNHFDCHGMETCREEIGFVENCSCPSSPL

SEQ ID NO: 157159 - protein, 213 aa, Zea Mays
MLFLEKKSPLDLTATPQSPIPAAHLKPTPGKQTHVTSAIRVHPPRTNPTPRIPPGSLPRHESTPLASTQPHPSITDPTRRTPPPTDCTPSLLAPKRTPPPAWRPLQPTSSTQPGSRLPPPTSDSTTTRLLSSSICLLPQTCRAAAREARAWVRAAGHPEAGSQGRREAHLRAHLRGDPRRAQDLSREHRHSHGRRLRAQAPGPHPLRLRRLGR

SEQ ID NO: 157160 - protein, 609 aa, Zea Mays
MAPVSLPPGFRFHPTDEELIIYYLKRKINGRQIELEIIPEVDLYKCEPWDLPEKSFLPSKDLEWYFFSPRDRKYPNGSRTNRATKSGYWKATGKDRKVNSHRRAVGMKKTLVYYRGRAPHGSRTDWVMHEYRLDERECETDTGLQDAYALCRVFKKTAPGPKIIEHYGAVHHPIEHPQWMAEAGSVDRHSPTLDLSSDARGDDFESSSFSFPTEAPSMDSMHGMQMSAPHEDGKWMQFLSEDAFNATNNPFFMNPPSSSSFPCLPSKVDVALECARIQHRLSLPPLEVEDFPQDVSLDTKASVLRSNPNEVDILQEFLSVASASQELINGATSSCYAAELWPSGAGTSSTSTHYVNELSSLVELGVKAKEEADNFYYMDCIVGTSVGFSSKSSVQVDEQAVRLVEIADIEGLKQEEKRQVENLRGVRLHNNDLGEIVVQGDESNPTDCITQYPISDYSADNLGEAGHLADPTDVGGGLATAPIFSQSQPDDFAIGFGDVDVNPNASFDLYERVDVKHGLFVSTAGAPKTFFHHVEPSKKVSVYLSPVASDVVGKATEKFHSPITVTATKASVFSKLKALVTRQGQIPGGEDASIMPPEVLRQQRNSGSE

SEQ ID NO: 157161 - protein, 179 aa, Zea Mays
MLTVLQNTSKMASKTKYCTGRIKSFVIPLASFSVDTTTSPVSFFELLGVLESLKGITSNQVASQCVLQSYTSGNAQLVNRTDVQTLSQFTAHFISDTDEDRGCNFAAYVPLEEGTPLQMAEWIKYLGTFTNSENRANAVYDAVKTNYLCLSKVAANLGTRFKPVVAWIEFTQVTRRAFY

SEQ ID NO: 157162 - protein, 157 aa, Zea Mays
MLTVLQNTSKMASKTKYCTGRIKSFVIPLASFSVDTTTSPVSFFELLGVLESLKGITSNQVASQCVLQSYTSGNAQLVNRTDVQTLSQFTAHFISDTDEDRGCNFAAYVPLEEGTPLQMAEWIKYLGTFTNSENRANAVYDAVKTTKCIFIWIDMNK

SEQ ID NO: 157163 - protein, 217 aa, Zea Mays
MLTVLQNTSKMASKTKYCTGRIKSFVIPLASFSVDTTTSPVSFFELLGVLESLKGITSNQVASQCVLQSYTSGNAQLVNRTDVQTLSQFTAHFISDTDEDRGCNFAAYVPLEEGTPLQMAEWIKYLGTFTNSENRANAVYDAVKTNYLCLSKVAANLGTRFKPVVAWIEFTQYVTDAGAEIVDATITDKRFNSSDPEDMDNFHAILCFCIKSQHMEI

SEQ ID NO: 157164 - protein, 257 aa, Zea Mays
MLTVLQNTSKMASKTKYCTGRIKSFVIPLASFSVDTTTSPVSFFELLGVLESLKGITSNQVASQCVLQSYTSGNAQLVNRTDVQTLSQFTAHFISDTDEDRGCNFAAYVPLEEGTPLQMAEWIKYLGTFTNSENRANAVYDAVKTNYLCLSKVAANLGTRFKPVVAWIEFTQGMWTFVKESYILQYVTDAGAEIVDATITDKRFNSSDPEDMDNFHAILFVSNRSIWRFDKRIGASGTLGNRSNTITSIISFTYVMI

SEQ ID NO: 157165 - protein, 329 aa, Zea Mays
MAAVRRCCLLAAVLLWSALASAATAAPAPVVAGPVSRVEDATMFRIYYGQSFKVIKNSGDGKSYLLMQNTSKMASKTKYCTGRIKSFVIPLASFSVDTTTSPVSFFELLGVLESLKGITSNQVASQCVLQSYTSGNAQLVNRTDVQTLSQFTAHFISDTDEDRGCNFAAYVPLEEGTPLQMAEWIKYLGTFTNSENRANAVYDAVKTNYLCLSKVAANLGTRFKPVVAWIEFTQVCSCKPVKWECGHLLKKVTSYSMSQMQEQKLLMQLLRIRDLIVQIQRIWITSMLFCVFVSNRSIWRFDKRIGASGTLGNRSNTITSIISFTYVMI

SEQ ID NO: 157166 - protein, 139 aa, Zea Mays
MACSACRGRRCSQQERQRPHPPTVTVCAKNSNKKNKNGGGHRRNMCMSRRTRVAKSPCSHACLLPTLPPDERTGHRKADRRQKEAEAEATDDAHLQRQRPAAPAHGPAPGEGALVVVQGAGARRVAAVVVGAAAVVAGG

SEQ ID NO: 157167 - protein, 69 aa, Zea Mays
MIIVFSFLLFFFTRKERKALRYRVHALAGSGSPCWLLGAKLDPLSVAKSQASFPSLPPPPFKPQALINQ

SEQ ID NO: 157168 - protein, 361 aa, Zea Mays
MDEEEREEVGEYKLQGLVGRGSFAEVHRAAHRRTGAPAAVKAIDRRLVDKRVHDGILQEREILRSIDHPNILRLLDTIDTTNMMYLVLEYCDGGDLDAFLHKHGRLPEAVAKDLMRQLAEGLKVLRGRNIVHRDLKPQNLLLSTNGDDIVLKIGDFGFARSLVHENLAATICGSPYYMAPEIWQGKDYDAKSDLWSVGIILFQLVTGKLPFTGSNAFQLHQNVMATDDLNFPSEIEADLCPDCIDLCRRLLHRDPKKRISFEEIFNHKFLATTRKCYESCHAVELRDNCQTITSPVVLKTKSGSIESKNPKVFDSWEWIEREYVLVPENCTSMEMSSLNIKSTKDDMDTRTVSYGVSHCGL

SEQ ID NO: 157169 - protein, 386 aa, Zea Mays
MDEEEREEVGEYKLQGLVGRGSFAEVHRAAHRRTGAPAAVKAIDRRLVDKRVHDGILQEREILRSIDHPNILRLLDTIDTTNMMYLVLEYCDGGDLDAFLHKHGRLPEAVAKDLMRQLAEGLKVLRGRNIVHRDLKPQNLLLSTNGDDIVLKIGDFGFARSLVHENLAATICGSPYYMAPEIWQGKDYDAKSDLWSVGIILFQLVTGKLPFTGSNAFQLHQNVMATDDLNFPSEIEADLCPDCIDLCRRLLHRDPKKRISFEEIFNHKFLATTRKCYESCHAVELRDNCQTITSPVVLKTKSGSIESKNPKVFDSWEWIEREYVLVPENCTSMEMSSLNIKSTKDDMDTRTVSYAMDVLLWSFHRSQPLWIVDEGNHLIILQDFIL

SEQ ID NO: 157170 - protein, 318 aa, Zea Mays
MERMQLQLQGSIASSLWADKQQQAASTNAAAAAAQMPFLALLQGAGVVVEAEQQEEQHHDGRKRQAFARAVSDLDLLESCVTQAVAPAAAASAPVAGRTERRRKRQRPRARAAPPPEKRKKPEEAESQRMTHIAVERNRRRLMNDHLASLRSLIPSSYTPRGDQATVVGGAIDYVKQLEQQLVALQAAAAARRGVAGTGAAAVATVASDGVFVSPQYASYSDSRGAGAGVDVEATAAVGGHVRVRVAGRRWPGRLVRVVAALEDLRLAVLHLAVTSVGHDAVVYCFNLKMEEGCEVATADEVATVVHQIFAYAAGACC

SEQ ID NO: 157171 - protein, 110 aa, Zea Mays
MDRVQQVLPISKRPHIVAQHPSGSVTLESGTTITLLPRGAVSRLKRQIIVSCDLEIIILMGVDDVPLPESCMQKDFSNKSYYWLFTRLGILPWGETPVYLLDHLTETKGF

SEQ ID NO: 157172 - protein, 117 aa, Zea Mays
MDRVQQVLPISKRPHIVAQHPSGSVTLESGTTITLLPRGAVSRLKRQIIVSCDLEIIILMGVDDVPLPESCMQKDFSNKSYYWLFTRLGVSLILLFHNGYRKMACNPLSFLLLLYFL

SEQ ID NO: 157173 - protein, 101 aa, Zea Mays
MCCSCSPSASLMYAPSRPRPSEMATYSLNPSSRTALQYALTVLLYVRVTVSVPPHTHTKLLLVMHACINTCVLHVCVKIRSFKLKNSSTSSVMNLAFCLEI

SEQ ID NO: 157174 - protein, 140 aa, Zea Mays
MQRGGDQAGASLGMEMGVGYAGGGGGGECSSSSAAAAAAAAAEGEERQLLKGEIAVHPLCEQLVAAHVGCLRVATPIDHLPLIDAQLAQSSGLLHSYAAHHRPFLSPHDKHDLDSFLVRPPATTIASYAATRHTYACMSR

SEQ ID NO: 157175 - protein, 142 aa, Zea Mays
MSEDEDEAPMLEVGLDMGSDGHDMMGFGPLMPTDSERSLMERVRQELKMELKQGFKSRIEDVREEILRKRRAGKLPGDTTSILKQWWQEHSKWPYPTEDDKAKLVEETGLQLKQINNWFINQRKRNWHNNSQTSTLKSKRKR

SEQ ID NO: 157176 - protein, 271 aa, Zea Mays
MRALAGGFEAVAGERAAAAYTALASRTISRHFRSLRDGVVAQLQAARRALGEKDVAVPGMTRGDTPRLRVLDQCIRQHKALTQAAGMMESHPWRPQRGLPERAVTILRAWLFEHFLHPYPSDVDKHILARQTGLSRSQVSNWFINARVRLWKPMVEEMYVEEMKAEGQDGGGQQQVGVAVANNPNPSSAGHASEAAEDDGRGDSGGGAVVDRKPTRAQLLHDAGSLASVVNIGGGSRAGFGIMDHLDFDAYGGHHAGAGGGGFHLLRDLAG

SEQ ID NO: 157177 - protein, 229 aa, Zea Mays
MTHQFIGCHVKVSNWFINARVRLWKPMVEEMYVEEMKAEGQDGGGQQQVGVAVANNPNPSSAGHASEAAEDDGRGDSGGGAVVDRKPTRAQLLHDAGSLASVVNIGGGSRAGFGIMDHLDFDAYGGHHAGAVSLTLGLQQHDSHADGGAGGVNIAFGAPPPAHHHGYLFAPTAAAAGHQMGGGVHPGLHHHVQFSGAGAGIDGEAAHGQEHYRGLQGGGGFHLLRDLAG

SEQ ID NO: 157178 - protein, 570 aa, Zea Mays
MAVPTSVNVTWTFPAEPGSNYLVRLHFCDYEVVSAVDGVGIVFNVFVAQAIGTQDFTPKQFETQPNTALYRDYAASAPISRNFTVTVGMSDKSSPGEGGFLNGLEIMKLRPSGSSLAAGSRGSSRRVLIIALSAVLGASVLASAVLCLCFVARRKRRMARPAPLEKESSKPLPWSQESSGWVLEPSSRSGEGTTGAMHRVSTQLHIPLEELRSATDNFHERNLIGVGGFGNVYRGALRDGTRVAVKRATRASKQGLPEFQTEIVVLSRIRHRHLVSLIGYCNEQAEMILVYEYMEKGTLRSHLYGGADPGGGGGGEAAVLSWKQRLEVCIGAARGLHYLHTGYSENIIHRDVKSTNILLGDGFIAKVADFGLSRMGPSFGETHVSTAVKGSFGYLDPEYFKTQQLTDRSDVYSFGVVLFEVLCARPVIDQALEREQINLAEWAVEWQRRGQLERIADPRILGEVNENSLRKFAETAERCLADYGQERPSMADVLWNLEYCLQLQETHVRRDAFEDSGAVGAQFPEDVVVPRWVPSSTSFMTTADPDDSAVTGVGAVDSKVFSQLSGGEGR

SEQ ID NO: 157179 - protein, 219 aa, Zea Mays
MEVGPTQQRLGDSFSRGWLAKRGARAPSLEHLVADADLGHSFGSSRSSFIDMDPAALFSMRWTATAAPPPESDFEFGLIIPGGVGGGSDPPSPALVSASRRVIRDGRLVPGDPLFCSARSAPASPSPSPCCGGRAAAAGRRSSWWKMPLQYLRFLLPLYRKVRALRRLPAPRRRPRVAPASPARASASSLDWCHGNADTAVRDAILYCKKCSAAGQQDA

SEQ ID NO: 157180 - protein, 200 aa, Zea Mays
MAAPEAPACYVGIARQSAAFRLMKQMGWEEGEGLGKDKQGIKGHVRVKNKQDTLGVGVDSPHNKWVYDTTQFDNILKKLKVQSANPVQEEVAAVESDSPDITPKKDKSAKHEVTKVTRPQGRYKKRERGKSVNSYSATDLQGILVRKNEDNSKVDQKLEPTCLDEPDPIICLDAGLPCARRPKYAPAQTTHAQLAGKIAE

SEQ ID NO: 157181 - protein, 377 aa, Zea Mays
MAAPEAPACYVGIARQSAAFRLMKQMGWEEGEGLGKDKQGIKGHVRVKNKQDTLGVGVDSPHNKWVYDTTQFDNILKKLKVQSANPVQEAVESDSPDITPKKDKSAKHEVTKVTRPQGRYKKRERGKSVNSYSATDLQGILVRKNEDNSKVDQKLEPTCLDEPDPIICLDAVSQADDVNWWGHKFGFLSGGFLGAKSRKNKSSQKDLANVRQTFAEEDQENLYNLVQVATSGKQGLGIKGLPMKVAGQRWKGNKTSFVDSDDDNSAQSDEYSEIEENGDEEEHISASESIDTDKNADKELLVDARPKTKVKKLCKRILRQAPSQSMKLKDLKVAVEEHSNVVFSSFSGRREALLFLKKKLQGSRKFNVDGKKVQLVS

SEQ ID NO: 157182 - protein, 150 aa, Zea Mays
MAAPEAPACYVGIARQSAAFRLMKQMGWEEGEGLGKDKQGIKGHVRVKNKQDTLGVGVDSPHNKWVYDTTQFDNILKKLKVQSANPVQEEVAAVESDSPDITPKKDKSAKHEVTKVTRPQGRYKKRERGKSVNSYSATDLQGILYPKLMM

SEQ ID NO: 157183 - protein, 406 aa, Zea Mays
MAAPEAPACYVGIARQSAAFRLMKQMGWEEGEGLGKDKQGIKGHVRVKNKQDTLGVGVDSPHNKWVYDTTQFDNILKKLKVQSANPVQEEVAAVESDSPDITPKKDKSAKHEVTKVTRPQGRYKKRERGKSVNSYSATDLQGILVRKNEDNSKVDQKLEPTCLDEPDPIICLDAVSQADDVNWWGHKFGFLSGGFLGAKSRKNKSSQKDLANVRQTFAEEDQENLYNLVQDKATSGKQGLGIKGLPMKVAGQRWKGNKTSFVDSDDDNSAQSDEYSEIEENGDEEEHISASESIDTDKNADKELLVDARPKTKVKKLCKRILRQAPSQSMKLKDLKVAVEEHSNVVFSSFSGRREALLFLKKKEAGNSMWTARKFSSCHESQANRNSLRCWCPALVFVVARGSKQM

SEQ ID NO: 157184 - protein, 222 aa, Zea Mays
MKNQHLLLCTLLIGNSLAMEALPIFLDTLVPPYVAILISVTLILAFGEIMPQAICTRYGLSVGAKAAPVVRLLLILFFPVAYPISKLLDRLLGKGHFALMRRAELKTLVDMHGNEAGKGGELTRDETTIITGALELTQKIAKDAMTPISETFSLDINAKLDLHTMGMIMTRGHSRVPIYSGIPSNIIGLILVKNLITCRAEDEVPIRNVTIRKIPRLIPFLC

SEQ ID NO: 157185 - protein, 514 aa, Zea Mays
MPSHEACCGTMFWVYLMSCVGLVVFAGLMSGLTLGLMSLSLVDLEVLAKAGTPKDKLNAARILPVMKNQHLLLCTLLIGNSLAMEALPIFLDTLVPPYVAILISVTLILAFGEIMPQAICTRYGLSVGAKAAPVVRLLLILFFPVAYPISKLLDRLLGKGHFALMRRAELKTLVDMHGNEAGKGGELTRDETTIITGALELTQKIAKDAMTPISETFSLDINAKLDLHTMGMIMTRGHSRVPIYSGIPSNIIGLILVKNLITCRAEDEVPIRNVTIRKIPRVADDLPLYDILNEFQKGHSHMAVVVKRTKEAGVSTENQKSTTADYKINPKDAHADGSSPSYANNTAGSRRFNIEKHGDGRSCNKKSEKKRENILDFNTDPLPSYSMDEAAVGIITMEDEEIYDETDEYVDVHNKIRINMLPPGKALSPTISPGGGPLPQGLRKTPMTSPFSPYYHCNSVLRSPASNHCQSPGTLPTILSPGRSPTAQTPGQSSPNGSQVSINSNGQHKKDGEN

SEQ ID NO: 157186 - protein, 220 aa, Zea Mays
MAVVVKRTKEAGVSTENQKSTTADYKINPKDAHADGSSPSYANNTAGSRRFNIEKHGDGRSCNKKSEKKRENILDFNTDPLPSYSMDEAAVGIITMEDVMEELLQEEIYDETDEYVDVHNKIRINMLPPGKALSPTISPGGGPLPQGLRKTPMTSPFSPYYHCNSVLRSPASNHCQSPGTLPTILSPGRSPTAQTPGQSSPNGSQVSINSNGQHKKDGEN

SEQ ID NO: 157187 - protein, 143 aa, Zea Mays
MVACVSVPYRFPTLMTSVRARRAGRQALWVWGPSLLPSSAMCQCQRQPFPVKFVSVRVTRMTPTSPRRAPPRDDSRSLTAAPAAAWVAYCLLLLRRHKHWAIPAINAGHGWMAAVREATDGPGALGSGSVTPLVFCSPSCTIS

SEQ ID NO: 157188 - protein, 406 aa, Zea Mays
MTPKWSACSSNSYRELPSQKKDGNVYKRRKMDKDSNSPITFEDAKEMATQSCTISDDHSSLLLPIISSEALLLNSTAGMAGPILDCEEPADVPLEPNSGTDDRCFISNMSPTSMTPDKKNAAECSSSNIGPTESITEHISPRDLCIAILMKDGLINESRTRMAHKEEFTDNDANPLLACNNCGCLEHSLKMLICDSCEAGFHLSCCIPCIKELPTDEWYCAPCLCKKPKSLYGKLSEGRINPSRNTNTRPHGMSHIEYMLKDAEPYVTGVRLGRDFQAEVPEWSGPSSSSDVYFDEPCAIDSAELTTFNLCKMSNQSHSSIGNWIQCRETLNPGDSDKQVVCGKWRRAPLYVVQSDNWDCFCCLLWDPVHADCAVPQELKTSEVLKQLKFVNMLKNQLVDQNQKPA

SEQ ID NO: 157189 - protein, 337 aa, Zea Mays
MTPKWSACSSNSYRELPSHENGECKSTLTESVPSPTSCFGLHTANTMCSLSSQKKDGNVYKRRKMDKDSNSPITFEDAKEMATQSCTISDDHSSLLLPIISSEALLLNSTAGMAGPILDCEEPADVPLEPNSGTDDRCFISNMSPTSMTPDKKNAAECSSSNIGPTESITEHISPRDLCIAILMKDGLINESRTRMAHKEEFTDNDANPLLACNNCGCLEHSLKMLICDSCEAGFHLSCCIPCIKELPTDEWYCAPCLCKKPKSLYGKLSEGRINPSRNTNTRPHGMSHIEYMLKDAEPYVTGVRLGRDFQAEVPEWSGPSSRDEGIPISHLSHLLD

SEQ ID NO: 157190 - protein, 439 aa, Zea Mays
MTPKWSACSSNSYRELPSHENGECKSTLTESVPSPTSCFGLHTANTMCSLSSQKKDGNVYKRRKMDKDSNSPITFEDAKEMATQSCTISDDHSSLLLPIISSEALLLNSTAGMAGPILDCEEPADVPLEPNSGTDDRCFISNMSPTSMTPDKKNAAECSSSNIGPTESITEHISPRDLCIAILMKDGLINESRTRMAHKEEFTDNDANPLLACNNCGCLEHSLKMLICDSCEAGFHLSCCIPCIKELPTDEWYCAPCLCKKPKSLYGKLSEGRINPSRNTNTRPHGMSHIEYMLKDAEPYVTGVRLGRDFQAEVPEWSGPSSSDVYFDEPCAIDSAELTTFNLCKMSNQSHSSIGNWIQCRETLNPGDSDKQVVCGKWRRAPLYVVQSDNWDCFCCLLWDPVHADCAVPQELKTSEVLKQLKFVNMLKNQLVDQNQKPA

SEQ ID NO: 157191 - protein, 64 aa, Zea Mays
MAWMTFSGRLPSVCVSVDRRLACYAFHDERHIALCACILARTKMLGLESTFLVSPRGLFPVSTK

SEQ ID NO: 157192 - protein, 407 aa, Zea Mays
MNGVGDAHAAAAAAAMVQQTLGMSLPMAAFVPEQGSANRLTRPPGLPPLPQAFAAQQRGDVCMEAVDPAAGPRKAHRRSRSDVPFGYFPPAGHHQLPPPKVEAGWGGHLPAGGGGGGDDDLFNAYLNLEGLDGLNSSDDRLDDGDSRGSSMRTNGADSSENESEECAADSRAGIRLCAAAADRREGLKRAAAAPVARHARSLSMDSLIGKLNFSAGATGAASGVIPGPNRFSLEFGTGEFSPVEMKKIMADEKLAEMALADPKRVKRQSAARSKERKMRYIGELEHKVQILQTEATTLSAQLTLLQRDSAGIATQNNELKFRLQAMEQQAQLRDALNEALTAEVQRLKVATAELGDSCSSSNLAQQIQISVQDQMFQLHQQQATPIPFYQLQQAQQNGAGKKHEPTE

SEQ ID NO: 157193 - protein, 897 aa, Zea Mays
MTRRSQATPAASAALPLLLAPFLLLLLLLHCQCHRAGAATDAERRALLDFKAAVTADPRGVLASWTPAGDPCGFVGVTCDASTGAVQRLRIHGAGLAGTLAPSLARLPALESVSLFGNALAGGVPPGFRALAPTLRKLNLSRNALAGEIPPFLGAFPWLRLLDLSYNHFAGGIPAGLFDPCLRLRYVSLAHNDLTGPVPPGIANCSRLAGFDFSYNRLSGELPDRVCAPPEMNYISVRSNALSGQISNKLTSCGGIDLFDVGSNNFSGAAPFALLGSVNITYFNVSSNAFEGEIPSIATCGTKFSRLDASGNRLTGPVPESVVNCRGLRFLDLGANALGGAVPPVIGTLRSLSFLRLAGNPGISGSIPPELGGIEMLVTLDLAGLALTGEIPGSLSQCRFLLELNLSGNKLQGAIPDTLNNITYLKVLDLHRNQLDGGIPVTLGQLTNLVLLDLSENQLTGAIPPQLGNLSNLTHFNMSFNNLSGMIPPEPVLQKFDYTAYMGNQFLCGSPLPNNCGTGMKHRKRVGVPVIIAIVAAALILIGICIVCALNIKAYTRKSTDEDMKEEEEVLVSESTPPIASPGSNAIIGKLVLFSKSLPSRYEDWETGTKALLDKDCLIGGGSIGTVYKATFENGMSIAVKKLETLGSVRGQDEFEHEMSQLGNLSHPNLVAFQGYYWSSSMQLLLSEFVASGSLYDHLHGSHPHAFSESSSRGAGGELSWEQRFNVALGAARALAYLHHDCRPQILHLNIKSSNIMLDGKYEAKLSDYGLGKLLPILGSIELSRIHTAIGYIAPELSSPTLRYSDKSDVFSFGVVLLETVTGRKPVDSPGVATAVVLRDYVREVLEDGTASDCFDRSLRGIVEAELVQVLKLGLVCTSNTPSSRPSMAEVAQQRNS

SEQ ID NO: 157194 - protein, 881 aa, Zea Mays
MTRRSQATPAASAALPLLLAPFLLLLLLLHCQCHRAGAATDAERRALLDFKAAVTADPRGVLASWTPAGDPCGFVGVTCDASTGAVQRLRIHGAGLAGTLAPSLARLPALESVSLFGNALAGGVPPGFRALAPTLRKLNLSRNALAGEIPPFLGAFPWLRLLDLSYNHFAGGIPAGLFDPCLRLRYVSLAHNDLTGPVPPGIANCSRLAGFDFSYNRLSGELPDRVCAPPEMNYISVRSNALSGQISNKLTSCGGIDLFDVGSNNFSGAAPFALLGSVNITYFNVSSNAFEGEIPSIATCGTKFSRLDASGNRLTGPVPESVVNCRGLRFLDLGANALGGAVPPVIGTLRSLSFLRLAGNPGISGSIPPELGGIEMLVTLDLAGLALTGEIPGSLSQCRFLLELNLSGNKLQGAIPDTLNNITYLKVLDLHRNQLDGGIPVTLGQLTNLVLLDLSENQLTGAIPPQLGNLSNLTHFNMSFNNLSGMIPPEPVLQKFDYTAYMGNQFLCGSPLPNNCGTGMKHRKRVGVPVIIAIVAAALILIGICIVCALNIKAYTRKSTDEDMKEEEEVLVSESTPPIASPGSNAIIGKLVLFSKSLPSRYEDWETGTKALLDKDCLIGGGSIGTVYKATFENGMSIAVKKLETLGSVRGQDEFEHEMSQLGNLSHPNLVAFQGYYWSSSMQLLLSEFVASGSLYDHLHGSHPHAFSESSSRGAGGELSWEQRFNVALGAARALAYLHHDCRPQILHLNIKSSNIMLDGKYEAKLSDYGLGKLLPILGSIELSRIHTAIGYIAPELSSPTLRYSDKSDVFSFGVVLLETVTGRKPVDSPGVATAVVLRDYVREVLEDGTASDCFDRSLRGIVEAELVQVLKLGLAQQRNS

SEQ ID NO: 157195 - protein, 419 aa, Zea Mays
MLLYLQVVNCSYSFYDTMSKVSVPLSLGKIDLDHFCPVKMADELRSTSVGQKFHGQSVLLSRISSYSAMNNPVFNNAYSAYNVPQRSYHGMNATAGLSSVMAPSPVFASAPKEKGFSGFMIDFMMGGVSAAVSKTAAAPIERVKLLIQNQDEMLKTGRLSEPYKGIGDCFGRTIRDEGFVSLWRGNTANVIRYFPTQALNFAFKDHFKRMFNFKKDKDGYWKWFAGNLASGGAAGACSLFFVYSLDYARTRLANDAKAAKKGGERQFNGLVDVYRKTLASDGIRGLYRGFNISCVGIIVYRGLYFGMYDSLKPVLLVGTLQDNFLASFLLGWGITIGAGLASYPIDTVRRRMMMTSGEAVKYNSSLDAFKQIVAKEGTKSLFKGAGANILRAVAGAGVLAGYDKLQVVVFGKKYGSGGG

SEQ ID NO: 157196 - protein, 362 aa, Zea Mays
MLELMCKFFIMLTIVEHHELMLCVFVQPRLFVGRGMHESAFSLFMYTMFWIALLLIKFAFSYYVEIKPLVEPTKVIMKTPIHTFRWHEFFPREKSNIGVVIAIWAPIILVYFMDTQIWYTIFSTLLGGIYGAFQRLGEIRTLGMLRSRFDSIPLAFNSCLIPVETSDAKRKKGLRSYLHNRFKEMEHADKENIAARFAQMWNEIVTSFRDEDLIDNREKELLLVPYVSDRTLGVVQWPPFLLASKIPIAVDMAKDSNGKDRDLRKRLDNDYYFKCAIEECYASFKNIINGLVQGEPEKRVINKIFVEVEKCISEDKVIADLNMRALPDLYFKFVELVNYLEKNDHPNLPRNYMRPRYAGQYH

SEQ ID NO: 157197 - protein, 303 aa, Zea Mays
MLTIVEHHELMLCVFVQPRLFVGRGMHESAFSLFMYTMFWIALLLIKFAFSYYVEIKPLVEPTKVIMKTPIHTFRWHEFFPREKSNIGVVIAIWAPIILVYFMDTQIWYTIFSTLLGGIYGAFQRLGEIRTLGMLRSRFDSIPLAFNSCLIPVETSDAKRKKGLRSYLHNRFKEMEHADKENIAARFAQMWNEIVTSFRDEDLIDNREKELLLVPYVSDRTLGVVQWPPFLLASKIPIAVDMAKDSNGKDRDLRKRLDNDYYFKCAIEECYASFKNIINGLVQGEPEKRFEHAGPARSLLQVC

SEQ ID NO: 157198 - protein, 297 aa, Zea Mays
MGNQCPNGTLGSDYYNRPTSRFADGCLEDDRYSDLKKFDKPWPEVNSFKPTAVGILKRGLDPTSITVLERKTADIREHYIIGRRLGQGQFGTTFLCTEISTGCEYACKTIPKRKLITKEDVEDVRREIQIMHHLSGHKNVVSIKDVYEDGQAVYIVMELCAGGELFDRIQEKGHYSEQKAAELIRIIISLVAMCHSLGVMHRDLKPENFLLWDKEDDLSIKAIDFGLSVFFKPGQVFTELVGSPYYVAPEVLHKRYGPEADVWSAGVILYVLLSGVPPFWAGYFYTQRRNKVYLMLS

SEQ ID NO: 157199 - protein, 104 aa, Zea Mays
MSLFTFVPAACVFGASKIDWQNVLSHSIYFMPNDVENYMISAPCHGAVLGAWLGGWPMPLDWERPWQEWPICVSYGAVAGYLVGMAVSVVLVAVHNRRVRAKAD

SEQ ID NO: 157200 - protein, 156 aa, Zea Mays
MSGLQSHGRLSISSSSGIRDRNQGQFALLASSSSGGRGMQRRSTSEVWLEEAAGACVLYTPRKLSSLLSCACLFHSFCYAIICLQASEVHASAQLPCDEATNSQTSLAFHSTQLYCIVLVLKVSQALRLVCLRFLESAFGLIARFYRFNYIQAHYP

SEQ ID NO: 157201 - protein, 88 aa, Zea Mays
MRRRRLNRGQQQLNGGGERQPRLARGRTIWAGWWAGPPNPSFSFFLFLFFFFFLLHGAVLLILRLIRRRLARLRRLGGGPAPYLALPP

SEQ ID NO: 157202 - protein, 450 aa, Zea Mays
MAKTRKPPAPPSPPPPPAETPSPQRRRKKKGRPSLLDLQRRSLRLQAQNPSPAASPTRRDPNPSDDDEDGTGSGRRRQKRLKSVLSGVVKEEQGEGKKDAAKATGKEDAASDGGPTGTPLPDKKLLLFILDRLQKKDTYGVFSEPVDAEELPDYFDIIDHPMDFSTIREKLLNDSYSKLEQFEDDVFLLTSNAMSYNSADTIYFRQARSIEALAKKDFENLRQPSDEEEPKPPARRGRPPKNPKTEGDVSPDLSNVKANKPEDNVDTFRKRSTGDRTRNTNTPMKDLSSFHDTFGSFSAKRTDKIGDYSGSSKWGKKPVSLDDDRRSTYDQHYSRNSSLFAALDDERKLLVPVGVQQPHAYARSLARFASKLGPVGWDVAANRIRRALPPGTSFGPGWVVDGEPPQNSQWAPAASTNPSSEPTAPPNMPSKNDVLDHKSGPSSNGDVTVK

SEQ ID NO: 157203 - protein, 214 aa, Zea Mays
MDFSTIREKLLNDSYSKLEQFEARSIEALAKKDFENLRQPSDEEEPKPPARRGRPPKNPKTEGDVSPDLSNVKANKPEDNVDTFRKRSTGDRTRNTNTPMKDLSSFHDTFGSFSAKRTDKIGDYSGSSKWGKKPVSLDDDRRSTYDQHYSRNSSLFAALDDERKLLVPGFSSHMHMLGAWHDLHQNWAQLAGMWQQIVSEGHSPLGQVSAQDGL

SEQ ID NO: 157204 - protein, 211 aa, Zea Mays
MDFSTIREKLLNDSYSKLEQFEDDVFLLTSNAMSYNSADTIYFRQARSIEALAKKDFENLRQPSDEEEPKPPARRGRPPKNPKTEGDVSPDLSNVKANKPEDNVDTFRKRSTGDRTRNTNTPMKDLSSFHDTFGSFSAKRTDKIGDYSGSSKWGKKPVSLDDDRRSTYDQHYSRNSSLFAALDDERKLLVPVSILRSDTVCGQELQISIFG

SEQ ID NO: 157205 - protein, 449 aa, Zea Mays
MEFFAATGEDDDSIDTSNLPAKQASWELSPQASRSMGVPGAHLQRAAANFNSFDLNSEAPNYGSFTQLVLSPSIPNPDLEFGAGRRGKVAGQHSVSPSHAAAPQKSCRVDTTSVARNPITMGAHGGHHRSVASLRGAKASRLHPEIGSRHGNLGVGASSNVTAPSLADTDHAQDMEDEVVIDAFSNGEHYDKANWNSENTNVFCDLCVEEMRAGNHSNGFLTARAYKNIAEKYFLTTGLRHSRQQFKNRWQALKRMYNFWLWVNKQTGQGSVFDDDAFWESNTKGQSEWKKLRYAPPEWIDQFEIMFQHVAVDGSSACIPGEQIFNKGGCGDKKDVDGRKRVGQSSICATSPQKKTKSPMVRIMKGIWETMQKNAAATQKAVDGDVQSDSIKKAMSLVVECGAPEGSAEHFMASQLFAKSAYRDIFFTLTTKEGRLAWLRRWCQSRNVY

SEQ ID NO: 157206 - protein, 74 aa, Zea Mays
MPPLNLRSKTNEPDIISQCQLQIAWIRTQLCSSSYSIGPCFQEVAPLQHEHFQQWRPRLGCSPVCQKNPFLGAE

SEQ ID NO: 157207 - protein, 474 aa, Zea Mays
MTTPRRHADPSPSPSPSSPPQLLSRLRSGASSFLARQYSTGKGGDNTGPSKPKGGGSSAPRHLRPGFVDPSSWKHFDSRAVGIKPGAIHTDAWAVLKKLRREGFQAYLVGGCVRDLLLKRVPKDFDVITTASLEQLKKNIFRRSRIVGKRFPICLLKMRDSVIEISSFRTVANYGNRSEVVDYVAELNGSDVRDILRWKDSMRRDFTINGLFFNPMNCKIYDYVNGVRDMRKNKVCTVIPAHISFMEDPARILRGFRIAARLGFQFSSETSNAIRDFSSSINNIDKARLMMEMNYIMSYGAAAPSVRLLRKYGLLDILLPFQSAYLSEQMKGGSSDRHLMLMKLLSNLDRLLSADRPCHSSLWLALLAFHSTLVIYPQDTLVIRAFAAVLYFGTWETTVKFLREEVGAEVPFAPETMGPSRTKLDCLKEQTSHLASLVNSSVDILTCPHDLEQSLARFSEPLQFSGVEKVVGRI

SEQ ID NO: 157208 - protein, 273 aa, Zea Mays
MTTPRRHADPSPSPSPSSPPQLLSRLRSGASSFLARQYSTGKGGDNTGPSKPKGGGSSAPRHLRPGFVDPSSWKHFDSRAVGIKPGAIHTDAWAVLKKLRREGFQAYLVGGCVRDLLLKRVPKDFDVITTASLEQLKKNIFRRSRIVGKRFPICLLKMRDSVIEISSFRTVANYGNRSEVVDYVAELNGSDVRDILRWKDSMRRDFTINGLFFNPMNCKIYDYVNGVRDMRKNKVCTVIPAHISFMEDPELLLALVSSFPVKLLMRYVIFLHL

SEQ ID NO: 157209 - protein, 96 aa, Zea Mays
MENAVVLREWFDRVDAGRTGNITAAQLQGALAVGNLNFPISVVQQMIRMYDFDRNGTMNFEEFLALNKFLQKAIFLFHNQLGLICLIPTNGRENVI

SEQ ID NO: 157210 - protein, 177 aa, Zea Mays
MENAVVLREWFDRVDAGRTGNITAAQLQGALAVGNLNFPISVVQQMIRMYDFDRNGTMNFEEFLALNKFLQKVFPVSNLQVQNVFSTLDRGRGFLSLEEVYQALIKLGFSLDSPAFYTVCESFDKSKKGMIQLDEFISLCIFVQSARNLFNSFDTSKQGRVTLDFNQFVYCTANCRI

SEQ ID NO: 157211 - protein, 132 aa, Zea Mays
MATMSAALAISLPSLTRVAVASTPSASSRIKEQEISGAPPAPPLDKSARSPPSSLLGISTSTWSAGVAGLGFLETGYLTYLKLTGSEAFCPITGAGCGDVLDSDYSVVFGNLLGGVADSLLVNCALTGASAS

SEQ ID NO: 157212 - protein, 63 aa, Zea Mays
MAYVVRKKGSNLSEREVMEFVAKQVAPYKKVRKVAFVAEIPKNASGKILRKDLIKLATSKSKL

SEQ ID NO: 157213 - protein, 508 aa, Zea Mays
MGCCGSSQRAGTHPEKKPPGALPPHRPSYSLNQHQAPAPPPPSAARAGARQVPPLKEFSLAELRAATAGFAAGNIVSESGEKAPNFVYRGRLDAGRRAIAVKKFTKMAWPDPKQFAEEAKGVGKLRHCRLANLIGYCCDGDERLLVAEFMPNDTLAKHLFHWENQTIEWAMRLRVAYYIAEALEYCSTEGRPLYHDLNAYRVLFDENGDPRLSCFGLMKNSRDGKSYSTNLAYTPPEYLRNGRVTSESVIFSFGTILLDLLSGKRIPPSRALDMIKGNNIQVLMDSHLEGNYSTDEATTLVDLASQCLQYEPRDRANTKKLVSVLEPLQIKSEVPSYEMLGIPKHEEEAPPPPQPQRPLSPMGEACSRTDLTAIHQILVNTHYRDDEGSNEEWTQQMRDMLEARKRGDFAFRDKDFKAAIDCYTQFVDVGTMVSPTVYARRSLCHLMCDQPDAALRDAMQAQCVYPDWPTAFYMQAVALAKLNMQSDATDMLNEASQLEEKRQKNTKP

SEQ ID NO: 157214 - protein, 278 aa, Zea Mays
MATYAASGRVTSESVIFSFGTILLDLLSGKRIPPSRALDMIKGNNIQVLMDSHLEGNYSTDEATTLVDLASQCLQYEPRDRANTKKLVSVLEPLQIKSEVPSYEMLGIPKHEEEAPPPPQPQRPLSPMGEACSRTDLTAIHQILVNTHYRDDEGSNELSFQEWTQQMRDMLEARKRGDFAFRDKDFKAAIDCYTQFVDVGTMVSPTVYARRSLCHLMCDQPDAALRDAMQAQCVYPDWPTAFYMQAVALAKLNMQSDATDMLNEASQLEEKRQKNTKP

SEQ ID NO: 157215 - protein, 359 aa, Zea Mays
MVACSRGLAWPPFDLTTARGAASWPRRRAAIRCCCAGADAQPQRRLSRAAAVAPERAEEWRIDGNKPSAAAPGRRRTSLTAMPPLPFPAPRSRRQVKQPDFYPRCTPRGSAPQSRDTPPKRDTGIASEKEWGINLLDEAVKESGINEDGSTWYRESGDDIGENGYRCRWARMGGQSHDGSTEWKETWWEKSDWTGYKELGAEKSGRNAEGDSWWEKWKEVLYQDEWSNLARIERSAEKQAKSGIENAGWYEKWWEKYDAKGWTEKGAHKYGRLNEQSWWERWGEHYDGRGFVLKWTDKWAETDLGTKWGDKWEEKFFAGIGSRQGETWHVGQEPGEKNTLVTEKSTSMERAQPARGGTW

SEQ ID NO: 157216 - protein, 257 aa, Zea Mays
MGGQSHDGSTEWKETWWEKSDWTGYKELGAEKSGRNAEGDSWWEKWKEVLYQDEWSNLARIERSAEKQAKSGIENAGWYEKWWEKYDAKGWTEKGAHKYGRLNEQSWWERWGEHYDGRGFVLKWTDKWAETDLGTKWGDKWEEKFFAGIGSRQGETWHVCPGGERWSRTWGEEHFGNGKVHKYGKSTTGERWDLVVDEETYYEAEPHYGWADVVGDSTQLLSIQPVERPPGVFPAIDFSSAPPPKDAPPGMPPSPLD

SEQ ID NO: 157217 - protein, 230 aa, Zea Mays
MSPFAARVASLAALLLALLLAAPASAANFTCATVGKTCQSAIGYAVPNATTYGELVARFNATTTLAELLGANGLPATTPASTPLAAKATVRVPFRCRCGSNGVGQSDGGPFYVVYPLDGLDHIAREVFGGFVTYQEIATANNITNVNLIVVGQKLRIPLPCTCDQVDGADVMHFAYSVAKGDDPPGIAARFGVTETTLLSVNKITDPKTSLQQGQILDVPLPGLKWHTTI

SEQ ID NO: 157218 - protein, 77 aa, Zea Mays
MVEEHQLKLLLLLKGRAQCRSAGEMKKEQQSSVALHLHLLCCCSSRNYCLDSRLRLVISALIATQILSHSFLSLDMR

SEQ ID NO: 157219 - protein, 128 aa, Zea Mays
MISRSIGDVYLKKPEYNREPLHSKFRLRETFQRPILSSEPQITEHRIQPNDQFVIFASDGLWEHLSNKEAVDLVQSSPRNGIARRLVKAAMQEAAKKREMRYSDLKKIDRGVRRHFHDDITVVVVFMP

SEQ ID NO: 157220 - protein, 91 aa, Zea Mays
MIVMTAMKMLMTNLSRLTKIINVKVLMMRRWVQRKERSPIKDRKLLFSTSTLVFCTPKNKGWSASGECVGLVLSEVTEGLSLFFFICHGLV

SEQ ID NO: 157221 - protein, 266 aa, Zea Mays
MYFICYDLLYKDYNFDQKFSLSTCSNSGLNLTATGVKINEDFIGDIRTQHKSGRTTVDVIIDSDSKVSTTVTVDEALTGLKTSFAFKVPDHKSGKLDLQYAHNRFSMNSTIGLTSTPLVELAATVGTSELAIGAEFGFDSTSAAVTKYNSGVGYNKSDFSASLLLADKGETLKASYVHLFNPTNGATVAAEVTHKLKTKENYFTLGSSHALDPSTLLKTRFSNSGKVGLLCQHEWRPKSLVTLSAEYDPKVVSAPSRIGVAISLKP

SEQ ID NO: 157222 - protein, 110 aa, Zea Mays
MDEERGRMSQIITGDTCMRLRLGRARAASKLAHIHMDGPPRPRCLQATATRCRCAANSPLRFRPDPSLSTTDVDQVCQWSAGLPVNYSALITQRGIGTVVWWFMPLKIDW

SEQ ID NO: 157223 - protein, 117 aa, Zea Mays
MQDEVEVEVSFGDNVLDLDTMERSTRETTPCSLIRNPEMISTPGSTTKSKTSSNSTTSRRRTEETPSCRFIPSSLEMEEFFSAAEQQEQHSFREKYNFCPVNDCPLPGRYEWARLDC

SEQ ID NO: 157224 - protein, 54 aa, Zea Mays
MQSTGQVDKVKSGHMHVHYTTLLHLKTLFLYIYCSGDVYVFYAHVKHFSWDLKF

SEQ ID NO: 157225 - protein, 207 aa, Zea Mays
MTRDGVNDAPALKNADIGITVAYSTDAACSASDIVLSEPSLSVIIGVVLTSRAIFQRMKNYMFDFPPFMVLIIAILNDGTIMTVSKDIVKPSPQPEGEIFATRVVLSAYLATMTVIFFWDAYKTDFFPVWTSNCYSDYRIRQLGICYDQGHWMRLGRHIWLYNIISFFPPDIIQFLIRYALSRRAWNLVLEQRQELWYRRKGMQMGR

SEQ ID NO: 157226 - protein, 85 aa, Zea Mays
MLRCSNFTALKDLARHLQYLTYHGMVPGCLAWSTRFFFLTLKRAGLLILCCSPLEAFYQLDFQTSKSCKIMLASWPVLVQRSLVR

SEQ ID NO: 157227 - protein, 561 aa, Zea Mays
MMALNLSHQTGAAVAAAPAAPRAAVVAAAATAPRSAVVAAAATVAPPPASAPAPAPALQLQTMTVDPAPAQAPDAVKPDLAMACQALVEAAPEAEHADVAAELRSRAGVPVFVMMPLDTVRKDGNSLNRRKAVEGIMVDVWWGIAEADGPGQYNFNGYMELMEMAKKTGLKVQAVMSFHQCGGNVGDSVTIPLPGWVLEEMDKDQDLAYTDRSGRRNYEYVSLGCDAMPVLKGRTPIQCYADFMRAFRDHFATFMGNTIVEIQVGMGPAGELRYPSYPESDGTWSFPGIGEFQCYDRFMLSSLKAAAEAVGKPEWGNAGPGDSGSYKDWPEDTGFFRREGGWSTEYGEFFMSWYSQMLLEHGERILSAATGVFTGSPGVKISVKVAGIHWHYGTRSHAAELTAGYYNTRSHDGYAPIARMLARHGAVLNFTCVEMRDHEQPQDAQCRPEALVQQVAAAAREAGVGLAGENALPRYDDTAHDQVVATAADRAAEDRMVAFTYLRMGPDLFQPDNWRRFAAFVKRMTEPGAREACREQVEREAEGVAHATQPLVHEAAVALTN

SEQ ID NO: 157228 - protein, 618 aa, Zea Mays
MRSGQGHALFTAECSHKFHFHCISSNIKHGNLICPICRAKWKELPGAQPADASYGRARVNPLNWPQDEGHMAVVRRLSHTYSGNLQEHLPFFRTLEAGVFNDDEHIDLQSDNISEHNAVAGSVKIKAYSEVPAIEQSTTKEIFAILIHLRAPKSSHSASSRAPLDLVTVLDVSGSMAGTKIALLKNAMSFVIQTLGPNDRLSVVAFSSTARRLFPLRRMTLSGRQQALQAVSSLVASGGTNIADGLKKAAKVIEDRRLKNSVCSIILLSDGQDTYTLPSDRNLQDYSAVVPPSILPGTCQHVQIHTFGFGSDHDSAAMHAIAEISSGTFSFIDAEGSIQDGFAQCIGGLLSVVVKEVRLGIECVDNGVLLTSIKSGGYTSQVAEDGRGGSVDIGDLYADEERGFLVTLHVPAAQGQTVLIKPSCMYHDAITTENIEVHGEEVRIQRPEHRVDCKMSPEVEREWHRVQATEDMSAARAAAEVGAFSQAVAILEARRRILEAQAAQSSDDQFLALMAELREMQQRVENRRRYEESGRAFMLAGLSSHSWQRATARGDSTEITTTIHTYQTPSMVDMLQRSQILVPPIADMLNSSPTVAPPNRFSRPSRSRTIKSFSEQLL

SEQ ID NO: 157229 - protein, 364 aa, Zea Mays
MDNACQIWKTRPCHRGVGGRGIPVGTFSCETDSTDSDESSTPCLKNVDSNLGAMPNLEQINALIKHYGPTVFFHPQETYLPSSVSWFFENGATLHEKDAKMGDAILPGGLNLPVGGTNDGEYWIDLPDDDRKELVRAGNLKSAELYAHVKPAHGGTFTDIAMWVFCPFNGPATIKVGFASFALQKVGRHIGDWEHFTLRVSNFSGQLSSIYFSQHSGGEWVEACDLEFISGNKAIIYSSRNGHASYPHPGCYLMGSETLGVGVRNDVARSDLSVDSSTRYEIISAGHLGEDAVAEPCWLQYMREWGPTITYSSRSEIDTALSFLPFFLRFTAEAIFNSLPAELYEEEGPTGPKEKNNWEGDERC

SEQ ID NO: 157230 - protein, 838 aa, Zea Mays
MKMLIAQEMAKEGDANQKTTNVVARLMGLDDNVDLAKPVVPPNRRSFPDGHLSATLARVNNQIPFEKHTSSAEDVEYKDVYEVGYQPPRGDEYPRRRRPSEDHDKRRMDLVRQKFVEAKRLASHDNILQSKEFHDALEVLNSNKDLFLKFLEEPNSLFAKQSGGLGSAPTSPQRKHITVLKPSKSVEMKGDKAIRRQTNHAAGNRTDRSNVHKSDAAHVKEDKLPKHTRIVVLKPTSVIASMEQSEQSYHADLDDSEAPVLSRHLSDEIDWSVHGISRRHTESLQGCIQSNMFGADRPYHQYAEEEGNSLSDSDIGTPTSHHSWEYIYRFSNPYFGSLSHASCSPESHVTREAKKHASDRWATVPSSEMTQDKVPVRRSLSTLGEMLAMPDMKKEEAAEQASPDATHQLCEPTVGVSSNCAVGEGEGESSLRKISRSRSVPVSSTAFDSLRLDGGCLDAQHKEPTVPKEVKPKSGKSSLKGKITSFFSKRKKAEKEKPSPSPLGTLNGRGSSVSTVAVAKPDAPQHVCASSQDDVSFESLEDQFNHGPIGAPVDEPEAPSVSKPPASLEKTLSFEIRASHFDQPSPTSVFDVQFEDISEKSPISSESAITAKQEPLSRSIPIGSIARTLSWDDASQEAPPQCSTKGDSNHEQEQHEFVEKTLASAGFCNEKTQDIFARWHSLDRPLDPAVVEQLLERKVEDAKCRERRSNQRLLIDSVNAALLDIGQSKVWGGAYPCTARHYSNAPGVGTCDDDVLVTDEAWRLVRSWLFDDENDIAGLGDNAGLAADWVVGREIHGKGWAETLRMEVDEMSREICGEVLGELVGEAFSELAGAAGWH

SEQ ID NO: 157231 - protein, 1212 aa, Zea Mays
MTSLLYTYRSCVKALPQLPDSMKHNQADLYLETYQVLDMEMSHLREIQRWQASAASKLAADMQRFSRPERLVNGPTITHFWSMLKLLDVLLQLDHLKNAKASIPNDFSWYKRTFTQVSTQWQDTDTMREELDDLQIFLSTRWAILLNLHAEMFRTNTVEDILQVLIVFCVESLELDFALLFPERHTLLRVLPVLVVLATSSEKESESLYKRVKINRLLNVFKNDPVIPAFPDLHLSPAAILKELSSYFQNFSSQTRLLALQAPHEIQGRELQDYQRHYLILNHMGTIRADHDDFSIRFASAMDQMIRLKSSDGVYNDWSRDIKGNMYDIVVEGFQLLSRWTGRIWEQCAWKFSRPISDSQQNSMTCFDYEKVVRYNYTAEERRALLELIGYIKSIGLMMQHCDTLVSEALWETIHMEVQDFVQDKLDTMLRTTFRKKKDLSRILSDMRTLSADWMASTSKADPEQHSLHQETEEMRQNTFYPRPVAPTAAQIHCLQFLICELVSGGNLRKVGGLFGNSGSGIPVEDLKQLETFFYKLSFFLHILDYTATIGTLTDLGFLWFREFYLESSRVIQFPIECSLPWMLVGHVIESEDAGLLESILIPFDLYNDSAQHALTSLKQRFLYDEIEAEADLCFDLLAQKLNEIIFTYYKSCAASTLLDSSFTYACDDGDKYFVKPLRFDAIFKLRRVMVLGRTIDLRSIITQRMNKIFRENIDFLLERFENGDLCGVVELQQLLDILELTHQSISRFLELDSYSLMLSEMQENLSLVSYSSRISSQIWSEMQTDFLPNFILCNTTQRFVRSAKGTHHSSHRSSASTGKPYFYCGSHDLTMAYQGLAGLYRDFFGVPHMFAVVKLLGSRSLPAIIRALLDHISSKITGLLPKINALQEALPKSIGLLSFDGGIAGCQKIVHEILTWEAKSEVKTEVLHDLKEIGSALYWMSILDIVLRQIDTTQFMQSAPWLGLVPGNDGQVKHAYSDNTPFTTLLSAASNAVTSSPTCPNPSTFLVMSKQAEAASLLYKSNLNSGSVLEYALAFTSAALDRHYSKWSATPKTGFIDITTSKDFYRIFSGLQYSYLEDSINNPSKKQEMLGDSVAWAGCTIMYLLGQQQHFELFDFSYQFLNVAEVESATVSHYQSSERTKSSNFLQGYEGILEAMRKARRLNNHVFSMLRARCPLEDKVACAIKPSGAPLHRMKFMNTVSAFETLPQRVT

SEQ ID NO: 157232 - protein, 971 aa, Zea Mays
MAIPVEEAIAALSTFSLEDEQPDVQGLAVLLSSERYATNSPIEYSDVAAYRLSLGEDTKAINQLNTLIKEGKEMTSLLYTYRSCVKALPQLPDSMKHNQADLYLETYQVLDMEMSHLREIQRWQASAASKLAADMQRFSRPERLVNGPTITHFWSMLKLLDVLLQLDHLKNAKASIPNDFSWYKRTFTQVSTQWQDTDTMREELDDLQIFLSTRWAILLNLHAEMFRTNTVEDILQVLIVFCVESLELDFALLFPERHTLLRVLPVLVVLATSSEKESESLYKRVKINRLLNVFKNDPVIPAFPDLHLSPAAILKELSSYFQNFSSQTRLLALQAPHEIQGRELQDYQRHYLILNHMGTIRADHDDFSIRFASAMDQMIRLKSSDGVYNDWSRDIKGNMYDIVVEGFQLLSRWTGRIWEQCAWKFSRPISDSQQNSMTCFDYEKVVRYNYTAEERRALLELIGYIKSIGLMMQHCDTLVSEALWETIHMEVQDFVQDKLDTMLRTTFRKKKDLSRILSDMRTLSADWMASTSKADPEQHSLHQETEEMRQNTFYPRPVAPTAAQIHCLQFLICELVSGGNLRKVGGLFGNSGSGIPVEDLKQLETFFYKLSFFLHILDYTATIGTLTDLGFLWFREFYLESSRVIQFPIECSLPWMLVGHVIESEDAGLLESILIPFDLYNDSAQHALTSLKQRFLYDEIEAEADLCFDLLAQKLNEIIFTYYKSCAASTLLDSSFTYACDDGDKYFVKPLRFDAIFKLRRVMVLGRTIDLRSIITQRMNKIFRENIDFLLERFENGDLCGVVELQQLLDILELTHQSISRFLELDSYSLMLSEMQENLSLVSYSSRISSQIWSEMQTDFLPNFILCNTTQRFVRSAKGTHHSSHRSSASTGKPYFYCGSHDLTMAYQGLAGLYRDFFGVPHMFAVVKLLGSRSLPAIIRALLDHISNYRFATENKCTARSITKIYWASFI

SEQ ID NO: 157233 - protein, 954 aa, Zea Mays
MAIPVEEAIAALSTFSLEDEQPDVQGLAVLLSSERYATNSPIEYSDVAAYRLSLGEDTKAINQLNTLIKEGKEMTSLLYTYRSCVKALPQLPDSMKHNQADLYLETYQVLDMEMSHLREIQRWQASAASKLAADMQRFSRPERLVNGPTITHFWSMLKLLDVLLQLDHLKNAKASIPNDFSWYKRTFTQVSTQWQDTDTMREELDDLQIFLSTRWAILLNLHAEMFRTNTVEDILQVLIVFCVESLELDFALLFPERHTLLRVLPVLVVLATSSEKESESLYKRVKINRLLNVFKNDPVIPAFPDLHLSPAAILKELSSYFQNFSSQTRLLALQAPHEIQGRELQDYQRHYLILNHMGTIRADHDDFSIRFASAMDQMIRLKSSDGVYNDWSRDIKGNMYDIVVEGFQLLSRWTGRIWEQCAWKFSRPISDSQQNSMTCFDYEKVVRYNYTAEERRALLELIGYIKSIGLMMQHCDTLVSEALWETIHMEVQDFVQDKLDTMLRTTFRKKKDLSRILSDMRTLSADWMASTSKADPEQHSLHQETEEMRQNTFYPRPVAPTAAQIHCLQFLICELVSGGNLRKVGGLFGNSGSGIPVEDLKQLETFFYKLSFFLHILDYTATIGTLTDLGFLWFREFYLESSRVIQFPIECSLPWMLVGHVIESEDAGLLESILIPFDLYNDSAQHALTSLKQRFLYDEIEAEADLCFDLLAQKLNEIIFTYYKSCAASTLLDSSFTYACDDGDKYFVKPLRFDAIFKLRRVMVLGRTIDLRSIITQRMNKIFRENIDFLLERFENGDLCGVVELQQLLDILELTHQSISRFLELDSYSLMLSEMQENLSLVSYSSRISSQIWSEMQTDFLPNFILCNTTQRFVRSAKGTHHSSHRSSASTGKPYFYCGSHDLTMAYQGLAGLYRDFFGVPHMFAVVKLLGSRSLPAIIRALLDHISSKVCYRK

SEQ ID NO: 157234 - protein, 1101 aa, Zea Mays
MAIPVEEAIAALSTFSLEDEQPDVQGLAVLLSSERYATNSPIEYSDVAAYRLSLGEDTKAINQLNTLIKEGKEMTSLLYTYRSCVKALPQLPDSMKHNQADLYLETYQVLDMEMSHLREIQRWQASAASKLAADMQRFSRPERLVNGPTITHFWSMLKLLDVLLQLDHLKNAKASIPNDFSWYKRTFTQVSTQWQDTDTMREELDDLQIFLSTRWAILLNLHAEMFRTNTVEDILQVLIVFCVESLELDFALLFPERHTLLRVLPVLVVLATSSEKESESLYKRVKINRLLNVFKNDPVIPAFPDLHLSPAAILKELSSYFQNFSSQTRLLALQAPHEIQGRELQDYQRHYLILNHMGTIRADHDDFSIRFASAMDQMIRLKSSDGVYNDWSRDIKGNMYDIVVEGFQLLSRWTGRIWEQCAWKFSRPISDSQQNSMTCFDYEKVVRYNYTAEERRALLELIGYIKSIGLMMQHCDTLVSEALWETIHMEVQDFVQDKLDTMLRTTFRKKKDLSRILSDMRTLSADWMASTSKADPEQHSLHQETEEMRQNTFYPRPVAPTAAQIHCLQFLICELVSGGNLRKVGGLFGNSGSGIPVEDLKQLETFFYKLSFFLHILDYTATIGTLTDLGFLWFREFYLESSRVIQFPIECSLPWMLVGHVIESEDAGLLESILIPFDLYNDSAQHALTSLKQRFLYDEIEAEADLCFDLLAQKLNEIIFTYYKSCAASTLLDSSFTYACDDGDKYFVKPLRFDAIFKLRRVMVLGRTIDLRSIITQRMNKIFRENIDFLLERFENGDLCGVVELQQLLDILELTHQSISRFLELDSYSLMLSEMQENLSLVSYSSRISSQIWSEMQTDFLPNFILCNTTQRFVRSAKGTHHSSHRSSASTGKPYFYCGSHDLTMAYQGLAGLYRDFFGVPHMFAVVKLLGSRSLPAIIRALLDHISSKITGLLPKINALQEALPKSIGLLSFDGGIAGCQKIVHEILTWEAKSEVKTEVLHDLKEIGSALYWMSILDIVLRQIDTTQFMQSAPWLGLVPGNDGQVKHAYSDNTPFTTLLSAASNAVTSSPTCPNPSTFLVMSKQAEAARLRGHPGSDEEG

SEQ ID NO: 157235 - protein, 932 aa, Zea Mays
MAIPVEEAIAALSTFSLEDEQPDVQGLAVLLSSERYATNSPIEYSDVAAYRLSLGEDTKAINQLNTLIKEGKEMTSLLYTYRSCVKALPQLPDSMKHNQADLYLETYQVLDMEMSHLREIQRWQASAASKLAADMQRFSRPERLVNGPTITHFWSMLKLLDVLLQLDHLKNAKASIPNDFSWYKRTFTQVSTQWQDTDTMREELDDLQIFLSTRWAILLNLHAEMFRTNTVEDILQVLIVFCVESLELDFALLFPERHTLLRVLPVLVVLATSSEKESESLYKRVKINRLLNVFKNDPVIPAFPDLHLSPAAILKELSSYFQNFSSQTRLLALQAPHEIQGRELQDYQRHYLILNHMGTIRADHDDFSIRFASAMDQMIRLKSSDGVYNDWSRDIKGNMYDIVVEGFQLLSRWTGRIWEQCAWKFSRPISDSQQNSMTCFDYEKVVRYNYTAEERRALLELIGYIKSIGLMMQHCDTLVSEALWETIHMEVQDFVQDKLDTMLRTTFRKKKDLSRILSDMRTLSADWMASTSKADPEQHSLHQETEEMRQNTFYPRPVAPTAAQIHCLQFLICELVSGGNLRKVGGLFGNSGSGIPVEDLKQLETFFYKLSFFLHILDYTATIGTLTDLGFLWFREFYLESSRVIQFPIECSLPWMLVGHVIESEDAGLLESILIPFDLYNDSAQHALTSLKQRFLYDEIEAEADLCFDLLAQKLNEIIFTYYKSCAASTLLDSSFTYACDDGDKYFVKPLRFDAIFKLRRVMVLGRTIDLRSIITQRMNKIFRENIDFLLERFENGDLCGVVELQQLLDILELTHQSISRFLELDSYSLMLSEMQENLSLVSYSSRISSQIWSEMQTDFLPNFILCNTTQRFVRSAKGTHHSSHRSSASTGKPYFYCGSHLLNFLVPDHYLQSSVLYWIIYQVRLQVCYRK

SEQ ID NO: 157236 - protein, 1275 aa, Zea Mays
MAIPVEEAIAALSTFSLEDEQPDVQGLAVLLSSERYATNSPIEYSDVAAYRLSLGEDTKAINQLNTLIKEGKEMTSLLYTYRSCVKALPQLPDSMKHNQADLYLETYQVLDMEMSHLREIQRWQASAASKLAADMQRFSRPERLVNGPTITHFWSMLKLLDVLLQLDHLKNAKASIPNDFSWYKRTFTQVSTQWQDTDTMREELDDLQIFLSTRWAILLNLHAEMFRTNTVEDILQVLIVFCVESLELDFALLFPERHTLLRVLPVLVVLATSSEKESESLYKRVKINRLLNVFKNDPVIPAFPDLHLSPAAILKELSSYFQNFSSQTRLLALQAPHEIQGRELQDYQRHYLILNHMGTIRADHDDFSIRFASAMDQMIRLKSSDGVYNDWSRDIKGNMYDIVVEGFQLLSRWTGRIWEQCAWKFSRPISDSQQNSMTCFDYEKVVRYNYTAEERRALLELIGYIKSIGLMMQHCDTLVSEALWETIHMEVQDFVQDKLDTMLRTTFRKKKDLSRILSDMRTLSADWMASTSKADPEQHSLHQETEEMRQNTFYPRPVAPTAAQIHCLQFLICELVSGGNLRKVGGLFGNSGSGIPVEDLKQLETFFYKLSFFLHILDYTATIGTLTDLGFLWFREFYLESSRVIQFPIECSLPWMLVGHVIESEDAGLLESILIPFDLYNDSAQHALTSLKQRFLYDEIEAEKLNEIIFTYYKSCAASTLLDSSFTYACDDGDKYFVKPLRFDAIFKLRRVMVLGRTIDLRSIITQRMNKIFRENIDFLLERFENGDLCGVVELQQLLDILELTHQSISRFLELDSYSLMLSEMQENLSLVSYSSRISSQIWSEMQTDFLPNFILCNTTQRFVRSAKGTHHSSHRSSASTGKPYFYCGSHDLTMAYQGLAGLYRDFFGVPHMFAVVKLLGSRSLPAIIRALLDHISSKITGLLPKINALQEALPKSIGLLSFDGGIAGCQKIVHEILTWEAKSEVKTEVLHDLKEIGSALYWMSILDIVLRQIDTTQFMQSAPWLGLVPGNDGQVKHAYSDNTPFTTLLSAASNAVTSSPTCPNPSTFLVMSKQAEAASLLYKSNLNSGSVLEYALAFTSAALDRHYSKWSATPKTGFIDITTSKDFYRIFSGLQYSYLEDSINNPSKKQEMLGDSVAWAGCTIMYLLGQQQHFELFDFSYQFLNVAEVESATVSHYQSSERTKSSNFLQGYEGILEAMRKARRLNNHVFSMLRARCPLEDKVACAIKPSGAPLHRMKFMNTVSAFETLPQRVT

SEQ ID NO: 157237 - protein, 1256 aa, Zea Mays
MAIPVEEAIAALSTFSLEDEQPDVQGLAVLLSSERYATNSPIEYSDVAAYRLSLGEDTKAINQLNTLIKEGKEMTSLLYTYRSCVKALPQLPDSMKHNQADLYLETYQVLDMEMSHLREIQRWQASAASKLAADMQRFSRPERLVNGPTITHFWSMLKLLDVLLQLDHLKNAKASIPNDFSWYKRTFTQVSTQWQDTDTMREELDDLQIFLSTRWAILLNLHAEMFRTNTVEDILQVLIVFCVESLELDFALLFPERHTLLRVLPVLVVLATSSEKESESLYKRVKINRLLNVFKNDPVIPAFPDLHLSPAAILKELSSYFQNFSSQTRLLALQAPHEIQGRELQDYQRHYLILNHMGTIRADHDDFSIRFASAMDQMIRLKSSDGVYNDWSRDIKGNMYDIVVEGFQLLSRWTGRIWEQCAWKFSRPISDSQQNSMTCFDYEKHCDTLVSEALWETIHMEVQDFVQDKLDTMLRTTFRKKKDLSRILSDMRTLSADWMASTSKADPEQHSLHQETEEMRQNTFYPRPVAPTAAQIHCLQFLICELVSGGNLRKVGGLFGNSGSGIPVEDLKQLETFFYKLSFFLHILDYTATIGTLTDLGFLWFREFYLESSRVIQFPIECSLPWMLVGHVIESEDAGLLESILIPFDLYNDSAQHALTSLKQRFLYDEIEAEADLCFDLLAQKLNEIIFTYYKSCAASTLLDSSFTYACDDGDKYFVKPLRFDAIFKLRRVMVLGRTIDLRSIITQRMNKIFRENIDFLLERFENGDLCGVVELQQLLDILELTHQSISRFLELDSYSLMLSEMQENLSLVSYSSRISSQIWSEMQTDFLPNFILCNTTQRFVRSAKGTHHSSHRSSASTGKPYFYCGSHDLTMAYQGLAGLYRDFFGVPHMFAVVKLLGSRSLPAIIRALLDHISSKITGLLPKINALQEALPKSIGLLSFDGGIAGCQKIVHEILTWEAKSEVKTEVLHDLKEIGSALYWMSILDIVLRQIDTTQFMQSAPWLGLVPGNDGQVKHAYSDNTPFTTLLSAASNAVTSSPTCPNPSTFLVMSKQAEAASLLYKSNLNSGSVLEYALAFTSAALDRHYSKWSATPKTGFIDITTSKDFYRIFSGLQYSYLEDSINNPSKKQEMLGDSVAWAGCTIMYLLGQQQHFELFDFSYQFLNVAEVESATVSHYQSSERTKSSNFLQGYEGILEAMRKARRLNNHVFSMLRARCPLEDKVACAIKPSGAPLHRMKFMNTVSAFETLPQRVT

SEQ ID NO: 157238 - protein, 1278 aa, Zea Mays
MAIPVEEAIAALSTFSLEGLAVLLSSERYATNSPIEYSDVAAYRLSLGEDTKAINQLNTLIKEGKEMTSLLYTYRSCVKALPQLPDSMKHNQADLYLETYQVLDMEMSHLREIQRWQASAASKLAADMQRFSRPERLVNGPTITHFWSMLKLLDVLLQLDHLKNAKASIPNDFSWYKRTFTQVSTQWQDTDTMREELDDLQIFLSTRWAILLNLHAEMFRTNTVEDILQVLIVFCVESLELDFALLFPERHTLLRVLPVLVVLATSSEKESESLYKRVKINRLLNVFKNDPVIPAFPDLHLSPAAILKELSSYFQNFSSQTRLLALQAPHEIQGRELQDYQRHYLILNHMGTIRADHDDFSIRFASAMDQMIRLKSSDGVYNDWSRDIKGNMYDIVVEGFQLLSRWTGRIWEQCAWKFSRPISDSQQNSMTCFDYEKVVRYNYTAEERRALLELIGYIKSIGLMMQHCDTLVSEALWETIHMEVQDFVQDKLDTMLRTTFRKKKDLSRILSDMRTLSADWMASTSKADPEQHSLHQETEEMRQNTFYPRPVAPTAAQIHCLQFLICELVSGGNLRKVGGLFGNSGSGIPVEDLKQLETFFYKLSFFLHILDYTATIGTLTDLGFLWFREFYLESSRVIQFPIECSLPWMLVGHVIESEDAGLLESILIPFDLYNDSAQHALTSLKQRFLYDEIEAEADLCFDLLAQKLNEIIFTYYKSCAASTLLDSSFTYACDDGDKYFVKPLRFDAIFKLRRVMVLGRTIDLRSIITQRMNKIFRENIDFLLERFENGDLCGVVELQQLLDILELTHQSISRFLELDSYSLMLSEMQENLSLVSYSSRISSQIWSEMQTDFLPNFILCNTTQRFVRSAKGTHHSSHRSSASTGKPYFYCGSHDLTMAYQGLAGLYRDFFGVPHMFAVVKLLGSRSLPAIIRALLDHISSKITGLLPKINALQEALPKSIGLLSFDGGIAGCQKIVHEILTWEAKSEVKTEVLHDLKEIGSALYWMSILDIVLRQIDTTQFMQSAPWLGLVPGNDGQVKHAYSDNTPFTTLLSAASNAVTSSPTCPNPSTFLVMSKQAEAASLLYKSNLNSGSVLEYALAFTSAALDRHYSKWSATPKTGFIDITTSKDFYRIFSGLQYSYLEDSINNPSKKQEMLGDSVAWAGCTIMYLLGQQQHFELFDFSYQFLNVAEVESATVSHYQSSERTKSSNFLQGYEGILEAMRKARRLNNHVFSMLRARCPLEDKVACAIKPSGAPLHRMKFMNTVSAFETLPQRVT

SEQ ID NO: 157239 - protein, 523 aa, Zea Mays
MVLGRTIDLRSIITQRMNKIFRENIDFLLERFENGDLCGVVELQQLLDILELTHQSISRFLELDSYSLMLSEMQENLSLVSYSSRISSQIWSEMQTDFLPNFILCNTTQRFVRSAKGTHHSSHRSSASTGKPYFYCGSHDLTMAYQGLAGLYRDFFGVPHMFAVVKLLGSRSLPAIIRALLDHISSKITGLLPKINALQEALPKSIGLLSFDGGIAGCQKIVHEILTWEAKSEVKTEVLHDLKEIGSALYWMSILDIVLRQIDTTQFMQSAPWLGLVPGNDGQVKHAYSDNTPFTTLLSAASNAVTSSPTCPNPSTFLVMSKQAEAASLLYKSNLNSGSVLEYALAFTSAALDRHYSKWSATPKTGFIDITTSKDFYRIFSGLQYSYLEDSINNPSKKQEMLGDSVAWAGCTIMYLLGQQQHFELFDFSYQFLNVAEVESATVSHYQSSERTKSSNFLQGYEGILEAMRKARRLNNHVFSMLRARCPLEDKVACAIKPSGAPLHRMKFMNTVSAFETLPQRVT

SEQ ID NO: 157240 - protein, 1586 aa, Zea Mays
MDADLNNTNTKKSCRFCRPPFFLLETSSTTIPPLLLTFGIKDSARVLEPYHQYYTRRQKNLGAMDPNFKPIFEEAMKMMRVEITKEISKCFADHDAVVNQRFADFAAAAEHNNARVTSLEEAASKFDHTFSNWQPEIEASVADIRLEISKLNKFFDRDAREHSGFQLGVLGTESTSARPSAGFRVDGPRGHRAEPHYRDDGPGFHNTQTHHPVKGMHDTPLFAPRHEFNRTGQNCQGGVGSRGHIPQMPFPKFEGANPRLWRSRCETYFNMHSVDRDVWVQVASMYLEGPAARWFQSIEHKLAYIPWDGFCSLFMERFGRDEHEVLIRKLFHIRQSGSVAEYISDFSQLVDQLRAYEPMTDPLYYTTRFIDGLHHSIRSSILLQRPPDLDTACVLASLQEEAADTGQRKEYRRLADYSTTSKPDYKQLYKQAHPLPSPPTAEMRKGADPVINSDQSGKLEALRAYRMAKGLCKICAEKWFKGHKCSPSVQLHVVQEIWDMLGPPNCESPADCTDTSSQLFVTLSQAAVSGTEYSKTLKFWGYVAGCQILILVDSGSSHSFINAAVASKLPGVSLLTSPLNVAVANGDKLSCTAEIQNIQWSVDSYSFTSTFKILPLHCYDLILGMDWLESCSPMHVHWEQKWLSFFQGSNQVILQGVLPRLPPATVIQILCASPECFAVDVTALPSDIQQIIQDYGHLFEVPTGLPPSRACDHSIPLIAGAKPFHIRPYRYPPSLKTEIERQVQEMLDTGIIQHSQSPFSSPVLLVKKKDQTWRFCVDFRHLNALTVKRQFPIPVMDDIFHELSAATWFTKLDLRAGFHQILLQPGEEHKTAFSTHEGHFEFRVLAFGLTGAPATFQGAMNATLKPLLRRCVMVFFDDILIYSPSYTQHTVDIRRVLDLLQQDDWKIKLSKCSFAQQQLSYLGHIISAAGISTDPSKVDAIMSWPPPTNVKELRSFLGLAGYYRKFVRHFGVISKPLTNLLRKHTLYVWTSEHEEAFQALKSALQSAPVLSLPDFSQPFCVETDASGKGVGAVLLQHEHPIAFVSKALSPRNLGLSTYEKEYHAILLAVEQWRPYLQYGEFIIRTDHRSLSHLSDQRLHTTWQQKVFTKLLGLQYKVVYKKGTENCVADALSRRPHPELSAISSATPAWLSDVSSSYANDPRAQDLLTALSVKPDSIPHFSLRQGLLRYKDKIYVGAVPSLHTQIVSAFHDTAVGGHSGIPVTLRRIRQLFFWPGMKSSVASFVKTCTTCQQVKPDRSRYPGLLQPLEIPPAAWHTITMDFVTGLPKSGHADCVLVVVDKFSKYGHFLPLHHPYTAVSVARLFLDHIYKLHGLPVAIVSDRDPVFTARFWKELFSLAGVQLRMSSAYHPQSDGQTERVNQCMETFLRCFVNACPSKWLKWLPLAEYWYNTSWHTSLGRSPFEVLYGHSPHHFGLTALDACTSPDVTSWLSERAVMTELVNQHLHRAQLRMKKQADKNRSERIFSVGDSVFVKLQPYVQSSLSRRSSQKLSFRYFGPFTIVSRIGSSGTPRPSQRRHGSGSTDRLVTSSSRTGHLGRCRSTSPRIPCCTCLGASRSPRGRECYVHYS

SEQ ID NO: 157241 - protein, 405 aa, Zea Mays
MQSAAAAAPSSLPLSVFPKDSRPLPCLLLTSLLLLLTLHFLSSSPTPSPPPPQPRLAPLPSTASAGPAPSALAFLLTGSAGDADRLQRLLLATYHPRNVYLLLLDRAASAADRARLARSARAAPGRDNVHVVGDPGFANPRGASALAATLHGAALLLRVDQGWDWFVHLDADEYPLVTPDDLLHVFSYLPKDLNFIQHTSYIGWKEERQIRPIIVDPGLYLSSRNDIFYATQKRDIPNAYKLFTGSSSVILSRKFIEYCIVGMDNLPRTLLMYYTNMPLPHRKYFQTVLCNSAEFNKTVVNHDLHYSTWDARSKNEPRLLTIDDVENMTESGAAFGTRFPKDDHALDRIDEEILHRHPGELVTGGWCIGVGHDSPCDISGNCYLSGYVFAVCLILRCISFAIICI

SEQ ID NO: 157242 - protein, 88 aa, Zea Mays
MEQIQYSEKYYDDTYEYRHVVLPPEVAKLLPRNILLSEKQWRLVGVQQSRGWVHYAIHRPEPHIMLFRRPINYQQQQEEAAAAHVLPK

SEQ ID NO: 157243 - protein, 545 aa, Zea Mays
MRATIPALSLLVTPRLPSLAVPLAGGRLRVGGRSRTRLRVAAPTSVPGEAAEQAEPSTSAPESGEKFSWRDHWYPVSLVEDLDPSRPTPFQLLNRDLVIWKEPKSGEWVALDDRCPHRLAPLSEGRIDETGCLQCSYHGWSFDGSGACTKIPQAMPEGPEARAVRSPKACAIKFPTLVSQGLLFVWPDENGWEKAAATKPPMLPKEFEDPAFSTVTIQRDLFYGYDTLMENVSDPSHIEFAHHKVTGRRDRARPLTFRMESSGAWGYSGANSGNPRITATFEAPCYALNKIEIDTKLPIFGDQKWVIWICSFNIPMAPGKTRSIVCSARNFFQFTMPGKAWWQLVPRWYEHWTSNLVYDGDMIVLQGQEKIFLAATKESSTDINQQYTKITFTPTQADRFVLAFRTWLRKFGNSQPEWFGNPTQEALPSTVLSKREMLDRYEQHTLKCSSCKGAYNAFQNLQKVFMGATVVCCAAAGIPPDVQLRLLIGAAALGIGAVIVSADPSYTGSNGDLPVAPSAVWDACRSNAMGADSTLQDTRWRSNVQ

SEQ ID NO: 157244 - protein, 111 aa, Zea Mays
MRNPTALEGSPLVEAQNDKFSASMANRVFCSSKSQDSTLQQLTSDTTIEVAIDIPFPFRAIPVEAIESSGRQVLEQLLRVMLPRFLKQLVKDYQAWASGDASRKPLGTGEI

SEQ ID NO: 157245 - protein, 166 aa, Zea Mays
MSLPASQYSVLDAERIERVDDSTFRCYVYRFRFFALEVCPVLLVRVDEEPDGCCIRLLSCKLEGSPLVEAQNDKFSASMANRVFCSSKSQDSTLQQLTSDTTIEVAIDIPFPFRAIPVEAIESSGRQVLEQLLRVMLPRFLKQLVKDYQAWASGDASRKPLGTGEI

SEQ ID NO: 157246 - protein, 88 aa, Zea Mays
MANRVFCSSKSQDSTLQQLTSDTTIEVAIDIPFPFRAIPVEAIESSGRQVLEQLLRVMLPRFLKQLVKDYQAWASGDASRKPLGTGEI

SEQ ID NO: 157247 - protein, 161 aa, Zea Mays
MLILDCCATVSRGGRRRFGNMAGVFLVMASAVRALDHSDAESEFLRKIAKIATAEIVTSKEFNVDWQRAAACLLVAIGSHDPDLMMGEIFLHFSGPTSALPAMLQILADFASSEVHPTVEGRAFACFTYPRKCARWPTACFCECIQVLVPGCMAVPGRCPL

SEQ ID NO: 157248 - protein, 1189 aa, Zea Mays
MTNMVDLFARLVVLLHNPLARGQLATQILTVLCYLGPLFPRNLSLFWQDEVPKMKAYISDPEDLKQDSTYQEKWDDMIINFLAECLDVVNDTEWVISLGDAFARQYDLYSISDGHAALLHRCLGMLLQKVDDRIYVSEKIDWMCRHSSMSIPINRLGLAQGIGLVAASHLDTVLEKLKNILDSAEQSAFQRFLSFFSFGPKVEDVDDTYAALALMYGYAARYAPSTVIEARINALVGSNMLGRLLHVQHPTAKQAVITAIDLLGRAVISAAEMGISFPLKRRDQLLEYVLTLMGRDQSNDLTDFNTELLHTQSLALSACTTLVSLEPRLPMETRNRVMKATLGFFALPTEPSSIVESLVTNLIILLGAILLTSGEDGRSRAEQLLHILRQLDPYVSSSLEHQRRRGCVAVQEVLIKFRNLCSGGFGALGSYPTFTMNKQIDRGTRSLSSLPSAFVLPSRDSLSLGERTMAYLPRCADTDTEVRKVAIQIIALFFDISLSLPKQKAYPNDIDLESSYSALSSLEELVSIVRREASVDQTELFQRVVSSVCILLSKDELVVLLHSCTLATCDKIKQSADASIQAIIMFIIRRGKELREADVSRTTQSLLSSAISLTDTHSRQEISCLAENTNHVVVFDEVLSVAGKDICTKDIPRIRGGWAIQDVFYAFSQHKELALLFLEYTLSILHKEPVIINSSEKGESTSESLADDCILQATMFALNAFMRGGGKIGKQAVEKSYPSVLSGLILKLGSLNGVAELGRNELLRSLLIAFQSFCECVGDVEMGKLLARDGEQTEKDKWIELVQEIACSSSVKRPKDVLPTCVILCNALNRNQRAEREAAAAALSEFIHHIEKEPTLLEQMVEEMCQHVSDDSPTVRSLCLRGLVQAPESHMLKYIQQVLGVILALLEDPNESVQLTAVQCLLNVLNLSEQDAVGPILINLLVRLRNLQVSMNTKMRSNAFAAYGALSAYGVGLQRTAFIEQIHATLPRLILHLHDDDLSVRLACRNTFQLLATLMEVEGLSVLLSKQYFASDRRSDYEDFIRDLTRQLCRLSPARVDSYLESAIQAFDAPWPVIRANAVCLVSCMLSFLDDQRFIAPYFSQVFATLVGRMSQSPDAIVRASASSALGILIKRSNMLRSLVSRYDRADSSRNSQSGDSNTKTPSEFQEQAEGNPNDGASGAAIKGTEADH

SEQ ID NO: 157249 - protein, 325 aa, Zea Mays
MKAYISDPEDLKQDSTYQEKWDDMIINFLAECLDVVNDTEWVISLGDAFARQYDLYSISDGHAALLHRCLGMLLQKVDDRIYVSEKIDWMCRHSSMSIPINRLGLAQGIGLVAASHLDTVLEKLKNILDSAEQSAFQRFLSFFSFGPKVEDVDDTYAALALMYGYAARYAPSTVIEARINALVGSNMLGRLLHVQHPTAKQAVITAIDLLGRAVISAAEMGISFPLKRRDQLLEYVLTLMGRDQSNDLTDFNTELLHTQSLALSACTTLVSLEPRLPMETRNRVMKATLGFFALPTEPSSIVESLVTNLIILLGAILLTSCICVA

SEQ ID NO: 157250 - protein, 509 aa, Zea Mays
MYGYAARYAPSTVIEARINALVGSNMLGRLLHVQHPTAKQAVITAIDLLGRAVISAAEMGISFPLKRRDQLLEYVLTLMGRDQSNDLTDFNTELLHTQSLALSACTTLVSLEPRLPMETRNRVMKATLGFFALPTEPSSIVESLVTNLIILLGAILLTSGEDGRSRAEQLLHILRQLDPYVSSSLEHQRRRGCVAVQEVLIKFRNLCSGGFGALGSYPTFTMNKQIDRGTRSLSSLPSAFVLPSRDSLSLGERTMAYLPRCADTDTEVRKVAIQIIALFFDISLSLPKQKAYPNDIDLESSYSALSSLEELVSIVRREASVDQTELFQRVVSSVCILLSKDELVVLLHSCTLATCDKIKQSADASIQAIIMFIIRRGKELREADVSRTTQSLLSSAISLTDTHSRQEVLNAISCLAENTNHVVVFDEVLSVAGKDICTKDIPRIRGGWAIQDVFYAFSQHKELALLFLEYTLSILHKEPVIINSSEKGESTSESLADDCILQATMFALN

SEQ ID NO: 157251 - protein, 228 aa, Zea Mays
MDCVSEPIIRSNSVSTTGNENLRSRSINSEADIQLAIKSLRASSMSHEMVEVSTVPDRRDEGASSRKFTRTASQQRSVIIEDLAPSPEINGEKEKETEVAEKRWKVLVWKTAVYLITLGMLIALLMGLNMSWTAITAALVLLALDFTDAQACLEKVSYSLLIFFCGMFITVDGFNKTGIPNTLWELVEPYSRIDSAKGVALLAVVILILSNVASNVPTGNFSYAYDHV

SEQ ID NO: 157252 - protein, 477 aa, Zea Mays
MALAGTSKVVLGCIAFGIFWVMAVFPTVPFMPVGRTAGSLLGAMLMVLFRVISPEDAYAAIDLPIIGLLFGTMVVSIFLERADMFKYLGNLLSWKSRGSKDLLFRVCIVSAFASALFTNDTCCVVLTEFILKVARQNNLPPQPFLLALATSSNIGSAATPIGNPQNLVIAVESGISFGQFLLGVFPAMIVGVLTNAAILLLYFWKYLSVEKDQEGGQPTGPEVVADDEVTSHRFTPARMSHVSSLNPDDMDCVSEPIIRSNSVSTTGNENLRSRSINSEADIQLAIKSLRASSMSHEMVEVSTVPDRRDEGASSRKFTRTASQQRSVIIEDLAPSPEINGEKEKETEVAEKRWKVLVWKTAVYLITLGMLIALLMGLNMSWTAITAALVLLALDFTDAQACLEKVSYSLLIFFCGMFITVDGFNKTGIPNTLWELVEPYSRIDSAKGVALLAVVILILSNVASNVPTGNFSYAYDHV

SEQ ID NO: 157253 - protein, 433 aa, Zea Mays
MMKSVSGTGSAGSRSDPGGSGELSRFSVATTASSASQPSANGGARGISFLDAFRSCFVPPEARSPENSMSDESHPSHQLSQSLSSQGSNSGSVFGSKRSIKGMYSPMHKSSLDREIPGSTKFSLPQIQKATKNFSPNFKIGQGGSGTVYKGQLADGTLVAVKRAKKNVYDKHMGREFWNEIETLQRIEHLNLVRFHGYLEFGGEQLIIVEYVPNGNLREHLDCINGKILEFSLRLEIAIDVAHAITYLHTYSGFDLQMYIKDHPVIHRDIKSSNILLMNNCRAKVADFGFAKLAPTDSSHISTQVKGTAGYLDPEYLRTYQLNEKSDVYSFGVLLVELVTGRRPIEPKKAIIERVTTKWAMEKFVEGNAIQTLDPNLEATDAINLAVEKLYELALQCLAPTKRNRPSMKRCAEILWSIRKDYRELVVPTSAMN

SEQ ID NO: 157254 - protein, 229 aa, Zea Mays
MMKSVSGTGSAGSRSDPGGSGELSRFSVATTASSASQPSANGGARGISFLDAFRSCFVPPEARSPENSMSDESHPSHQLSQSLSSQGSNSGSVFGSKRSIKGMYSPMHKSSLDREIPGSTKFSLPQIQKATKNFSPNFKIGQGGSGTVYKGQLADGTLVAVKRAKKNVYDKHMGREFWNEIETLQRIEHLNLVRFHGYLEFGGEQLIIVEYVPNGNLREHLDSICRYKW

SEQ ID NO: 157255 - protein, 242 aa, Zea Mays
MVLLSLSNVPRRFHGYLEFGGEQLIIVEYVPNGNLREHLDCINGKILEFSLRLEIAIDVAHAITYLHTYSDHPVIHRDIKSSNILLMNNCRAKVADFGFAKLAPTDSSHISTQVKGTAGYLDPEYLRTYQLNEKSDVYSFGVLLVELVTGRRPIEPKKAIIERVTTKWAMEKFVEGNAIQTLDPNLEATDAINLAVEKLYELALQCLAPTKRNRPSMKRCAEILWSIRKDYRELVVPTSAMN

SEQ ID NO: 157256 - protein, 136 aa, Zea Mays
MRKGFKGSFPDAASSAKIFAVLAGVQSLVACSLRKLRGKDDGINAGVAGCCTGLALSFPGAPQTLIQSCLTFGTFSYIIETLNKQQPALALPLATEIKDQKAGQSVLPPFTLPLPQDAMDGFSKFQNFLSSKFQGK

SEQ ID NO: 157257 - protein, 568 aa, Zea Mays
MVKAYLRYEPALTFGVIASPESNVVYDPSGRRLLAAALDRLAAWDIKRGLPSVSFAPSSSSPSLAVSCIASSHSAAVSSSIASGHADGSIRLWDAETGACEATLHGHRSAASALRFGPSGAVLASGSKDCDVILWDVVAQAGLFRLRGHRDQVTDLVFLDSGKKLMSCSKDKFIRVWDLETQHCLQIVGGHRSEIWSMDVDPSERFLVSGSADPELQVFRIRQSVEEGEDWSKWDVLKLFGEIPRQSKERVANVRFNRDGSLVVCQVAGKTADIYRVLDETEAARKAKRRVSRKKEKASAKSMIAEENGTIIDPLPVQNLQNPTVIVTDVFKLFQVLRASKKICSITFSPSNPPRGCLATLSLSLNNNMLETYSVDKEKVSKMYSVEMHGHRSDIRSVSLNSEDNLLMSTSHNAVKIWNPSTGECLRTIDSGYGLSSAFVGNRYALVGTKSGTLEIMDIASGSLTEAIEAHAGSIRSIVPIPDEDGTVGARGFVTGSADHDVKFWEYQLVQKSDNDSKQLTVTNVRTLKMTEDVLAVSISPEGKHIAVALLDCHVKFSVWTYHQMELC

SEQ ID NO: 157258 - protein, 707 aa, Zea Mays
MVKAYLRYEPALTFGVIASPESNVVYDPSGRRLLAAALDRLAAWDIKRGLPSVSFAPSSSSPSLAVSCIASSHSAAVSSSIASGHADGSIRLWDAETGACEATLHGHRSAASALRFGPSGAVLASGSKDCDVILWDVVAQAGLFRLRGHRDQVTDLVFLDSGKKLMSCSKDKFIRVWDLETQHCLQIVGGHRSEIWSMDVDPSERFLVSGSADPELQVFRIRQSVEEGEDWSKWDVLKLFGEIPRQSKERVANVRFNRDGSLVVCQVAGKTADIYRVLDETEAARKAKRRVSRKKEKASAKSMIAEENGTIIDPLPVQNLQNPTVIVTDVFKLFQVLRASKKICSITFSPSNPPRGCLATLSLSLNNNMLETYSVDKEKVSKMYSVEMHGHRSDIRSVSLNSEDNLLMSTSHNAVKIWNPSTGECLRTIDSGYGLSSAFVGNRYALVGTKSGTLEIMDIASGSLTEAIEAHAGSIRSIVPIPDEDGTVGARGFVTGSADHDVKFWEYQLVQKSDNDSKQLTVTNVRTLKMTEDVLAVSISPEGKHIAVALLDCHVKVFHMDTLKPSLNLYGHKLPVLCMDISSDGALLVTGSADKNLKIWGMDFGDCHRSIFAHSDSVMDVKFVYRTHYMFSVGKDRTMKYWDADKFELLLTLEGHHAEVWCLTLSSRGDFVVTGSHDRSIRRWDRTEEQLFIERRRKDWKKPLRLI

SEQ ID NO: 157259 - protein, 881 aa, Zea Mays
MVKAYLRYEPALTFGVIASPESNVVYDPSGRRLLAAALDRLAAWDIKRGLPSVSFAPSSSSPSLAVSCIASSHSAAVSSSIASGHADGSIRLWDAETGACEATLHGHRSAASALRFGPSGAVLASGSKDCDVILWDVVAQAGLFRLRGHRDQVTDLVFLDSGKKLMSCSKDKFIRVWDLETQHCLQIVGGHRSEIWSMDVDPSERFLVSGSADPELQVFRIRQSVEEGEDWSKWDVLKLFGEIPRQSKERVANVRFNRDGSLVVCQVAGKTADIYRVLDETEAARKAKRRVSRKKEKASAKSMIAEENGTIIDPLPVQNLQNPTVIVTDVFKLFQVLRASKKICSITFSPSNPPRGCLATLSLSLNNNMLETYSVDKEKVSKMYSVEMHGHRSDIRSVSLNSEDNLLMSTSHNAVKIWNPSTGECLRTIDSGYGLSSAFVGNRYALVGTKSDEDGTVGARGFVTGSADHDVKFWEYQLVQKSDNDSKQLTVTNVRTLKMTEDVLAVSISPEGKHIAVALLDCHVKVFHMDTLKPSLNLYGHKLPVLCMDISSDGALLVTGSADKNLKIWGMDFGDCHRSIFAHSDSVMDVKFVYRTHYMFSVGKDRTMNRGDFVVTGSHDRSIRRWDRTEEQLFIEEEKEKRLEETFEADLENDNDYRYGQKDDAPDEGSVGVPGRKTKETVTSADAIMDALDTAEEELKRINQHKMEEQITAKAAKFQPNVIMQGHSPSDYVLNVVSSIRPNDLEQALLALPFSDALKLMSYLKEWSLVPSKVELVCRVCLVLLQTHHNQLTATPAARSLLTELKDILYCRVKECKDTIGFNLAAMDHIKELLALRSDAPFRDAKAKLMEIKKEQSKRSSSRLDGDEKRKKKRKKASAES

SEQ ID NO: 157260 - protein, 619 aa, Zea Mays
MVKAYLRYEPALTFGVIASPESNVVYDPSGRRLLAAALDRLAAWDIKRGLPSVSFAPSSSSPSLAVSCIASSHSAAVSSSIASGHADGSIRLWDAETGACEATLHGHRSAASALRFGPSGAVLASGSKDCDVILWDVVAQAGLFRLRGHRDQVTDLVFLDSGKKLMSCSKDKFIRVWDLETQHCLQIVGGHRSEIWSMDVDPSERFLVSGSADPELQVFRIRQSVEEGEDWSKWDVLKLFGEIPRQSKERVANVRFNRDGSLVVCQVAGKTADIYRVLDETEAARKAKRRVSRKKEKASAKSMIAEENGTIIDPLPVQNLQNPTVIVTDVFKLFQVLRASKKICSITFSPSNPPRGCLATLSLSLNNNMLETYSVDKEKVSKMYSVEMHGHRSDIRSVSLNSEDNLLMSTSHNAVKIWNPSTGECLRTIDSGYGLSSAFVGNRYALVGTKSGTLEIMDIASGSLTEAIEAHAGSIRSIVPIPDEDGTVGARGFVTGSADHDVKFWEYQLVQKSDNDSKQLTVTNVRTLKMTEDVLAVSISPEGKHIAVALLDCHVKVFHMDTLKPSLNLYGHKLPVLCMDISSDGALLVTGSADKNLKIWGMDFGDCHRSIFAHSDRFT

SEQ ID NO: 157261 - protein, 193 aa, Zea Mays
MVSGAAPNPDGGGAQNTQRPPPLTQAGARTALATPPAVSGGAAHSASTSGGSAGSPPSSRSEQHAPDGAAKGPALGAAPAAAASTPASDSTFLRLNNLDINGDDAPSSQAPTSKKKRRGTRAVGPDKGNRGLRQFSMKVCEKVESKGRTTYNEVADELVAEFTDPNNNIEAPDPDNPNAIKRRSSGRACRVLV

SEQ ID NO: 157262 - protein, 192 aa, Zea Mays
MVSGAAPNPDGGGAQNTQRPPPLTQAGARTALATPPAVSGGAAHSASTSGGSAGSPPSSRSEQHAPDGAAKGPALGAAPAAAASTPASDSTFLRLNNLDINGDDAPSSQAPTSKKKRRGTRAVGPDKGNRGLRQFSMKVCEKVESKGRTTYNEMNLLLSLQTPTIILRHQILITLTRNNMMRKIYDEEFMML

SEQ ID NO: 157263 - protein, 352 aa, Zea Mays
MVSGAAPNPDGGGAQNTQRPPPLTQAGARTALATPPAVSGGAAHSASTSGGSAGSPPSSRSEQHAPDGAAKGPALGAAPAAAASTPASDSTFLRLNNLDINGDDAPSSQAPTSKKKRRGTRAVGPDKGNRGLRQFSMKVCEKVESKGRTTYNEVADELVAEFTDPNNNIEAPDPDNPNAQQYDEKNIRRRVYDALNVLMAMDIISKDKKEIQWKGLPRTSISDIEEMKTELVGLKGRIEKKSAYLQELQDQYVGLQNLIQRNEQSYGSGNTPSGGVALPFILVQTRPHATVEVEISEDMQLVHFDFNSTPFELHDDSYVLKEMRFCGREQHDSTQESISNGGILKGRAKHEH

SEQ ID NO: 157264 - protein, 250 aa, Zea Mays
MKVCEKVESKGRTTYNEVADELVAEFTDPNNNIEAPDPDNPNAQQYDEKNIRRRVYDALNVLMAMDIISKDKKEIQWKGLPRTSISDIEEMKTELVGLKGRIEKKSAYLQELQDQYVGLQNLIQRNEQSYGSGNTPSGGVALPFILVQTRPHATVEVEISEDMQLVHFDFNSTPFELHDDSYVLKEMRFCGREQHDSTQESISNGGESSSVSNIYWQHVQHVERPNNGTGRLPSSPPIPGILKGRAKHEH

SEQ ID NO: 157265 - protein, 88 aa, Zea Mays
MQLVHFDFNSTPFELHDDSYVLKEMRFCGREQHDSTQESISNGGESSSVSNIYWQHVQHVERPNNGTGRLPSSPPIPGILKGRAKHEH

SEQ ID NO: 157266 - protein, 179 aa, Zea Mays
MALATTAVSLHLFLTRPASVLRVGRGLPCLLLRATSSTSASPDFNITFAEPAPSKKAPSAQPLVPWIVRGEDGKPRLSTSPPPDVIQAIALAEAEAKKAAKKETLKGQNGAVAAAAAAASNASVKGKERKPAPTVPPKFSKAARRFYNENIKEREPQRLAKVLAAAGEGPVRSSSSKGR

SEQ ID NO: 157267 - protein, 353 aa, Zea Mays
MALATTAVSLHLFLTRPASVLRVGRGLPCLLLRATSSTSASPDFNITFAEPAPSKKAPSAQPLVPWIVRGEDGKPRLSTSPPPDVIQAIALAEAEAKKAAKKETLKGQNGAVAAAAAAASNASVKGKERKPAPTVPPKFSKAARRFYNENIKEREPQRLAKVLAAAGVASRRTSEELIFQGKVTVNGSVCTSPQTKVDISKDSIYVNGNRISKKLPPKLYFAVNKPKGYICSCGEESKSVVSLFNDYLKGWNKIQPGLPKPRLFTVGRLDVATAGLIIVTNDGEFAQKLAHPSSNVTKEYVVTIDGAVHKKHLIAISEGTKIDGVMCIPDLVEPLAAQSDTRKTRLRIVVIFF

SEQ ID NO: 157268 - protein, 351 aa, Zea Mays
MALATTAVSLHLFLTRPASVLRVGRGLPCLLLRATSSTSASPDFNITFAEPAPSKKAPSAQPLVPWIVRGEDGKPRLSTSPPPDVIQAIALAEAEAKKAAKKETLKGQNGAVAAAAAAASNASVKGKERKPAPTVPPKFSKAARRFYNENIKEREPQRLAKVLAAAGVASRRTSEELIFQGKVTVNGSVCTSPQTKVDISKDSIYVNGNRISKKLPPKLYFAVNKPKGYICSCGEESKSVVSLFNDYLKGWNKIQPGLPKPRLFTVGRLDVATAGLIIVTNDGEFAQKLAHPSSNVTKEYVVTIDGAVHKKHLIAISEGTKIDGVMCIPDLVEPLAAQSDTRKTRLRIVGS

SEQ ID NO: 157269 - protein, 270 aa, Zea Mays
MALATTAVSLHLFLTRPASVLRVGRGLPCLLLRATSSTSASPDFNITFAEPAPSKKAPSAQPLVPWIVRGEDGKPRLSTSPPPDVIQAIALAEAEAKKAAKKETLKGQNGAVAAAAAAASNASVKGKERKPAPTVPPKFSKAARRFYNENIKEREPQRLAKVLAAAGVASRRTSEELIFQGKVTVNGSVCTSPQTKVDISKDSIYVNGNRISKKLPPKLYFAVNKPKGYICSCGEESKSVVSLFNDYLKGWGCQNHACLLWVVLMLPRLV

SEQ ID NO: 157270 - protein, 716 aa, Zea Mays
MATGAGWAPGRPVERHGAPRGGNARSKSVVPGPRRPSPSPARSRPAADHSGSADLCRVRVAVRLRPKNSEDLAHGADFDSCVELQPESKRLKLKKNNWSCESYKFDEVFSESASQKRVYEAVAKPVVESVLEGYNGTVMAYGQTGTGKTYTVGRLGKDDPSERGIMVRALEHILSSLSFETDCVAISYLQLYLESVHDLLAPEKTNIPIVEDAKTGEVSLPGAAIVEVKDLEHVFQLLQIGEANRHAANTKMNTESSRSHAILIIHLQRNTRTKEENGSSLYDVRHDTFPDDLPLVLKSKLLIVDLAGSERIDKSGSEGHMIEEAKFINLSLTSLGKCINALAENSSHVPTRDSKLTRILRDSFGGTARTSLVVTIGPSARHYSETSSTIMFGQRAMKVVNTIKLKEEVDYEILYKKMEREVDQLTSEMERQQKVIRSEKMQMDKRLKESERSFHDLRMTFNMQIEQQQQLENLSKTKIITDEFKEYEKEMGELVRKLEEERCCSSSMKDRMSLLQQQLCDAQSSAQESMARELEKELTKATEEFTIEIQSLKGKISGLISEKESIYDELKSTQEKVQLEMSQRKGLEDQILRFKQSVSDSCAEESKTSCSMVRSGSGLGNTAFVSKSEKLREALSGQRGTISKIFEEGVNLQTLLPRNQTVIGIGQFAVCGKAHHIPGAGNRFQPWMPFQRKASTEYILCQTVDGKRNKLPRIVT

SEQ ID NO: 157271 - protein, 515 aa, Zea Mays
MATGAGWAPGRPVERHGAPRGGNARSKSVVPGPRRPSPSPARSRPAADHSGSADLCRVRVAVRLRPKNSEDLAHGADFDSCVELQPESKRLKLKKNNWSCESYKFDEVFSESASQKRVYEAVAKPVVESVLEGYNGTVMAYGQTGTGKTYTVGRLGKDDPSERGIMVRALEHILSSLSFETDCVAISYLQLYLESVHDLLAPEKTNIPIVEDAKTGEVSLPGAAIVEVKDLEHVFQLLQIGEANRHAANTKMNTESSRSHAILIIHLQRNTRTKEENGSSLYDVRHDTFPDDLPLVLKSKLLIVDLAGSERIDKSGSEGHMIEEAKFINLSLTSLGKCINALAENSSHVPTRDSKLTRILRDSFGGTARTSLVVTIGPSARHYSETSSTIMFGQRAMKVVNTIKLKEEVDYEILYKKMEREVDQLTSEMERQQKVIRSEKMQMDKRLKESERSFHDLRMTFNMQIENLEKENRHLESSVKRLTQDLDKERGQNNLLSKQVTELEKLLDENKKSIS

SEQ ID NO: 157272 - protein, 760 aa, Zea Mays
MATGAGWAPGRPVERHGAPRGGNARSKSVVPGPRRPSPSPARSRPAADHSGSADLCRVRVAVRLRPKNSEDLAHGADFDSCVELQPESKRLKLKKNNWSCESYKFDEVFSESASQKRVYEAVAKPVVESVLEGYNGTVMAYGQTGTGKTYTVGRLGKDDPSERGIMVRALEHILSSLSFETDCVAISYLQLYLESVHDLLAPEKTNIPIVEDAKTGEVSLPGAAIVEVKDLEHVFQLLQIGEANRHAANTKMNTESSRSHAILIIHLQRNTRTKEENGSSLYDVRHDTFPDDLPLVLKSKLLIVDLAGSERIDKSGSEGHMIEEAKFINLSLTSLGKCINALAENSSHVPTRDSKLTRILRDSFGGTARTSLVVTIGPSARHYSETSSTIMFGQRAMKVVNTIKLKEEVDYEILYKKMEREVDQLTSEMERQQKVIRSEKMQMDKRLKESERSFHDLRMTFNMQIENLEKENRHLESSVKRLTQDLDKERGQNNLLSKQVTELEKLLDENKQQQLENLSKTKIITDEFKEYEKEMGELVRKLEEERCCSSSMKDRMSLLQQQLCDAQSSAQESMARELEKELTKATEEFTIEIQSLKGKISGLISEKESIYDELKSTQEKVQLEMSQRKGLEDQILRFKQSVSDSCAEESKTSCSMVRSGSGLGNTAFVSKSEKLREALSGQRGTISKIFEEGVNLQTLLPRNQTVIGIGQFAVCGKAHHIPGAGNRFQPWMPFQRKASTEYILCQTVDGKRNKLPRIVT

SEQ ID NO: 157273 - protein, 762 aa, Zea Mays
MATGAGWAPGRPVERHGAPRGGNARSKSVVPGPRRPSPSPARSRPAADHSGSADLCRVRVAVRLRPKNSEDLAHGADFDSCVELQPESKRLKLKKNNWSCESYKFDEVFSESASQKRVYEAVAKPVVESVLEGYNGTVMAYGQTGTGKTYTVGRLGKDDPSERGIMVRALEHILSSLSFETDCVAISYLQLYLESVHDLLAPEKTNIPIVEDAKTGEVSLPGAAIVEVKDLEHVFQLLQIGEANRHAANTKMNTESSRSHAILIIHLQRNTRTKEENGSSLYDVRHDTFPDDLPLVLKSKLLIVDLAGSERIDKSGSEGHMIEEAKFINLSLTSLGKCINALAENSSHVPTRDSKLTRILRDSFGGTARTSLVVTIGPSARHYSETSSTIMFGQRAMKVVNTIKLKEEVDYEILYKKMEREVDQLTSEMERQQKVIRSEKMQMDKRLKESERSFHDLRMTFNMQIENLEKENRHLESSVKRLTQDLDKERGQNNLLSKQVTELEKLLDENKQQQLENLSKTKIITDEFKEYEKEMGELVRKLEEERCCSSSMKDRMSLLQQQLCDAQSSAQLQESMARELEKELTKATEEFTIEIQSLKGKISGLISEKESIYDELKSTQEKVQLEMSQRKGLEDQILRFKQSVSDSCAEESKTSCSMVRSGSGLGNTAFVSKSEKLREALSGQRGTISKIFEEGVNLQTLLPRNQTVIGIGQFAVCGKAHHIPGAGNRFQPWMPFQRKASTEYILCQTVDGKRNKLPRIVT

SEQ ID NO: 157274 - protein, 597 aa, Zea Mays
MVRALEHILSSLSFETDCVAISYLQLYLESVHDLLAPEKTNIPIVEDAKTGEVSLPGAAIVEVKDLEHVFQLLQIGEANRHAANTKMNTESSRSHAILIIHLQRNTRTKEENGSSLYDVRHDTFPDDLPLVLKSKLLIVDLAGSERIDKSGSEGHMIEEAKFINLSLTSLGKCINALAENSSHVPTRDSKLTRILRDSFGGTARTSLVVTIGPSARHYSETSSTIMFGQRAMKVVNTIKLKEEVDYEILYKKMEREVDQLTSEMERQQKVIRSEKMQMDKRLKESERSFHDLRMTFNMQIENLEKENRHLESSVKRLTQDLDKERGQNNLLSKQVTELEKLLDENKQQQLENLSKTKIITDEFKEYEKEMGELVRKLEEERCCSSSMKDRMSLLQQQLCDAQSSAQLQESMARELEKELTKATEEFTIEIQSLKGKISGLISEKESIYDELKSTQEKVQLEMSQRKGLEDQILRFKQSVSDSCAEESKTSCSMVRSGSGLGNTAFVSKSEKLREALSGQRGTISKIFEEGVNLQTLLPRNQTVIGIGQFAVCGKAHHIPGAGNRFQPWMPFQRKASTEYILCQTVDGKRNKLPRIVT

SEQ ID NO: 157275 - protein, 305 aa, Zea Mays
MVRALEHILSSLSFETDCVAISYLQLYLESVHDLLAPEKTNIPIVEDAKTGEVSLPGAAIVEVKDLEHVFQLLQIGEANRHAANTKMNTESSRSHAILIIHLQRNTRTKEENGSSLYDVRHDTFPDDLPLVLKSKLLIVDLAGSERIDKSGSEGHMIEEAKFINLSLTSLGKCINALAENSSHVPTRDSKLTRILRDSFGGTARTSLVVTIGPSARHYSETSSTIMFGQRAMKVVNTIKLKEEVDYEILYKKMEREVDQLTSEMERQQKVIRSEKMQMDKRLKESERSFHDLRMTFNMQIEGARI

SEQ ID NO: 157276 - protein, 551 aa, Zea Mays
MVRALEHILSSLSFETDCVAISYLQLYLESVHDLLAPEKTNIPIVEDAKTGEVSLPGAAIVEVKDLEHVFQLLQIGEANRHAANTKMNTESSRSHAILIIHLQRNTRTKEENGSSLYDVRHDTFPDDLPLVLKSKLLIVDLAGSERIDKSGSEGHMIEEAKFINLSLTSLGKCINALAENSSHVPTRDSKLTRILRDSFGGTARTSLVVTIGPSARHYSETSSTIMFGQRAMKVVNTIKLKEEVDYEILYKKMEREVDQLTSEMERQQKVIRSEKMQMDKRLKESERSFHDLRMTFNMQIEQQQQLENLSKTKIITDEFKEYEKEMGELVRKLEEERCCSSSMKDRMSLLQQQLCDAQSSAQESMARELEKELTKATEEFTIEIQSLKGKISGLISEKESIYDELKSTQEKVQLEMSQRKGLEDQILRFKQSVSDSCAEESKTSCSMVRSGSGLGNTAFVSKSEKLREALSGQRGTISKIFEEGVNLQTLLPRNQTVIGIGQFAVCGKAHHIPGAGNRFQPWMPFQRKASTEYILCQTVDGKRNKLPRIVT

SEQ ID NO: 157277 - protein, 595 aa, Zea Mays
MVRALEHILSSLSFETDCVAISYLQLYLESVHDLLAPEKTNIPIVEDAKTGEVSLPGAAIVEVKDLEHVFQLLQIGEANRHAANTKMNTESSRSHAILIIHLQRNTRTKEENGSSLYDVRHDTFPDDLPLVLKSKLLIVDLAGSERIDKSGSEGHMIEEAKFINLSLTSLGKCINALAENSSHVPTRDSKLTRILRDSFGGTARTSLVVTIGPSARHYSETSSTIMFGQRAMKVVNTIKLKEEVDYEILYKKMEREVDQLTSEMERQQKVIRSEKMQMDKRLKESERSFHDLRMTFNMQIENLEKENRHLESSVKRLTQDLDKERGQNNLLSKQVTELEKLLDENKQQQLENLSKTKIITDEFKEYEKEMGELVRKLEEERCCSSSMKDRMSLLQQQLCDAQSSAQESMARELEKELTKATEEFTIEIQSLKGKISGLISEKESIYDELKSTQEKVQLEMSQRKGLEDQILRFKQSVSDSCAEESKTSCSMVRSGSGLGNTAFVSKSEKLREALSGQRGTISKIFEEGVNLQTLLPRNQTVIGIGQFAVCGKAHHIPGAGNRFQPWMPFQRKASTEYILCQTVDGKRNKLPRIVT

SEQ ID NO: 157278 - protein, 625 aa, Zea Mays
MIEEAKFINLSLTSLGKCINALAENSSHVPTRDSKLTRILRDSFGGTARTSLVVTIGPSARHYSETSSTIMFGQRAMKVVNTIKLKEEVDYEILYKKMEREVDQLTSEMERQQKVIRSEKMQMDKRLKESERSFHDLRMTFNMQIENLEKENRHLESSVKRLTQDLDKERGQNNLLSKQVTELEKLLDENKQQQLENLSKTKIITDEFKEYEKEMGELVRKLEEERCCSSSMKDRMSLLQQQLCDAQSSAQESMARELEKELTKATEEFTIEIQSLKGKISGLISEKESIYDELKSTQEKVQLEMSQRKGLEDQILRFKQSVSDSCAEESKTSCSMVRSGSGLGNTAFVSKSEKLREALSGQRGTISKIFEEVGLPNVLALLKSEDLDVQIHAVKVVANLAAEDVNQERIVEEGGLDALLSLLETSENTTIHRVTAGAVANLAMNGSNQGVIMNKGGARLLANVASETDDPQTLRMVAGAIANLCGNEKLHLMLKQDGGIKALLGMFRSGHADVIAQIARGIANFAKCESRMISQGHRKGRSLLIEDGVLSWMVAHSTMFSASTRRHIELAFCHLAQNEDNTCDIIASGGIKELLRISRESPREDTRNLAKKALDSNPAFLREIQ

SEQ ID NO: 157279 - protein, 472 aa, Zea Mays
MASSADPHAAVAAAMAGTTPSDSLLGAKKAGAAAAVWKLPEAATVPVAVVVENPIMDADSWPALPGLSSPPPPAAGPVAKASPKAASPASTGAVMSPPSLANPGAPDANPGSEAPVRNPVVQRALVMPAANGLEKIAPAPEPSPVYVPNARSNGADPHQNGRFGSHPHGRGGGYVGGNRRGNGGGGGRRGSEHHGFFDGQRRGGGRRDGHGPVHHQRGHQPTYIRTPTLAVVAGAPPPPPPFVSPATPQAPPYGTPMGFPDMAPQVYYYAAPTSEGIQGLPFMSHPASPQAVLIDPFRKGLLDQIEYYFSDANLCKDLYLRQRMDDQGWVPLPLIAGFPQVQKITNNIQFILETVMLSNVVEVQGDKLRRRGAWENWLLPKQNYSAGSSSGSLPPVTSNIDSLTSQFRFVGLEGATYHATMPVMHGEALLTRSATSVSLGYHASTMGGLPSNGSEPLLGPKSARNLLRSDTF

SEQ ID NO: 157280 - protein, 372 aa, Zea Mays
MASSADPHAAVAAAMAGTTPSDSLLGAKKAGAAAAVWKLPEAATVPVAVVVENPIMDADSWPALPGLSSPPPPAAGPVAKASPKAASPASTGAVMSPPSLANPGAPDANPGSEAPVRNPVVQRALVMPAANGLEKIAPAPEPSPVYVPNARSNGADPHQNGRFGSHPHGRGGGYVGGNRRGNGGGGGRRGSEHHGFFDGQRRGGGRRDGHGPVHHQRGHQPTYIRTPTLAVVAGAPPPPPPFVSPATPQAPPYGTPMGFPDMAPQVYYYAAPTSEGIQGLPFMSHPASPQAVLIDPFRKGLLDQIEYYFSDANLCKDLYLRQRMDDQGWVPLPLIAGFPQVQKITNNIQFILETVMLSNVVEVQSLYRLLGC

SEQ ID NO: 157281 - protein, 417 aa, Zea Mays
MASWDNLGELSNIAQLTGLDAVKLISLIVRAASTARLHKRNCRRFAQHLKLIGGLLEQLRVSELRKYPETREPLEQLEDALRRGYLLVNSCQDRSYLYLLAMGWNIVYQFRKAQSEIDNYLRLVPLITLVDNARIRDRLEYIERDQCEYSFDEEDKKVQDALLNPDPCSNPTIVLKKTLSCSYPNLPFNEALRKESEKLQVELQRSQSNMDLGSCEVIQHLLGVTKTVESTIPEKETNVKAPEKKGSNYSESKGETAKSFDDDDDYPKKQNDDYPKKQKETCSTQRCSSQVPYGHDLVSSRGSYSDEWHADLLGCCSEPALCLKTLFFPCGTFSRIASIAKDRPMSSGEACNDIMAYSLILSCCCYTCCVRRKLRQKLDIAGGCCDDFLSHLLCCCCALVQEWREVEIRGAYSEFPT

SEQ ID NO: 157282 - protein, 219 aa, Zea Mays
MDLGSCEVIQHLLGVTKTVESTIPEKETNVKAPEKKGSNYSESKGETAKSFDDDDDYPKKQNDDYPKKQKETCSTQRCSSQVPYGHDLVSSRGSYSDEWHADLLGCCSEPALCLKTLFFPCGTFSRIASIAKDRPMSSGEACNDIMAYSLILSCCCYTCCVRRKLRQKLDIAGGCCDDFLSHLLCCCCALVQEWREVEIRGAYSEKTKVTPPACQYMEH

SEQ ID NO: 157283 - protein, 155 aa, Zea Mays
MLKLQKRRVQTTVNPKERLQNRLMMMTTILRSKTMTILRSKRKPAAHNGLKTLFFPCGTFSRIASIAKDRPMSSGEACNDIMAYSLILSCCCYTCCVRRKLRQKLDIAGGCCDDFLSHLLCCCCALVQEWREVEIRGAYSEKTKVTPPACQYMEH

SEQ ID NO: 157284 - protein, 594 aa, Zea Mays
MDEPEKVRGREDAASGREAGGAEEAGDGFQLVIHGKKKKRAASGQDCGTAGSGSGAGAGPVRALTREKGAAPAPGAKAKVPFHDPSIPRPQDVYKIRVDNYKPFEHVWLERSEDGTRRVHPLENLPVEQFVDRNVPDREPVKPADLEDTPFTLVQDHKGLTELAKKLKSVTEFAVDLEHNQYRSFQGLTCLMQISTRTEDFIVDTLKLRIYIGLYLQEPFKDPTKRKVMHGADRDIMWLQRDFHIYVCNLFDTGQASRVLQMERNSLEHLLLHFCGVTAKKEYQNADWRSRPLPDEMIKYAREDTHYLLYIYDLMRQRLQRESTFENDLLLEVHKRSNEICLQFYEKELLTDTSYLHIYGLQEHELDARQLAVVAALHEWRDRIARQEDESTGYILPNKALIEIAKQMPTDVGHLKRIVKSKYPYVESNLELIAYTVWNALEYSYAFEGIAEQLKKERLEQVALKSGQTSDEVTPLDADIDRSNFDSSDQSANVNVASGSRAGFMSEAALISSIHLEDKTQTMSSVKTSQTLLGQIRPVNKDVLSNNIHQQAIQDLSLTLKALKGNLASGGESNEQDTPRFDLRRLEAVAPDIL

SEQ ID NO: 157285 - protein, 490 aa, Zea Mays
MFWRVLTEWRSYKLIDRCENLPVEQFVDRNVPDREPVKPADLEDTPFTLVQDHKGLTELAKKLKSVTEFAVDLEHNQYRSFQGLTCLMQISTRTEDFIVDTLKLRIYIGLYLQEPFKDPTKRKVMHGADRDIMWLQRDFHIYVCNLFDTGQASRVLQMERNSLEHLLLHFCGVTAKKEYQNADWRSRPLPDEMIKYAREDTHYLLYIYDLMRQRLQRESTFENDLLLEVHKRSNEICLQFYEKELLTDTSYLHIYGLQEHELDARQLAVVAALHEWRDRIARQEDESTGYILPNKALIEIAKQMPTDVGHLKRIVKSKYPYVESNLELIAYTVWNALEYSYAFEGIAEQLKKERLEQVALKSGQTSDEVTPLDADIDRSNFDSSDQSANVNVASGSRAGFMSEAALISSIHLEDKTQTMSSVKTSQTLLGQIRPVNKDVLSNNIHQQAIQDLSLTLKALKGNLASGGESNEQDTPRFDLRRLEAVAPDIL

SEQ ID NO: 157286 - protein, 475 aa, Zea Mays
MQISTRTEDFIVDTLKLRIYIGLYLQEPFKDPTKRKVMHGADRDIMWLQRDFHIYVCNLFDTGQASRVLQMERNSLEHLLLHFCGVTAKKEYQNADWRSRPLPDEMIKYAREDTHYLLYIYDLMRQRLQRESTFENDLLLEVHKRSNEICLQFYEKELLTDTSYLHIYGLQEHELDARQLAVVAALHEWRDRIARQEDESTGYILPNKALIEIAKQMPTDVGHLKRIVKSKYPYVESNLELIAYTVWNALEYSYAFEGIAEQLKKERLEQVALKSGQTSDEVTPLDADIDRSNFDSSDQSANVNVASGSRAGFMSEAALISSIHLEDKTQTMSSVKTSQTLLGQIRPVNKDVLSNNIHQQAIQDLSLTLKALKGNLASGGESNEQAGINVENFRSSVFPSRQLSGEVKPFYPNPGMHSENVWIQTTQTNETMKLCNTTYYRQLPGHSTESINQRSTGSFQSSVRRQSFPPSSYKK

SEQ ID NO: 157287 - protein, 327 aa, Zea Mays
MRQRLQRESTFENDLLLEVHKRSNEICLQFYEKELLTDTSYLHIYGLQEHELDARQLAVVAALHEWRDRIARQEDESTGYILPNKALIEIAKQMPTDVGHLKRIVKSKYPYVESNLELIAYTVWNALEYSYAFEGIAEQLKKERLEQVALKSGQTSDEVTPLDADIDRSNFDSSDQSANVNVASGSRAGFMSEAALISSIHLEDKTQTMSSVKTSQTLLGQIRPVNKDVLSNNIHQQAGINVENFRSSVFPSRQLSGEVKPFYPNPGMHSENVWIQTTQTNETMKLCNTTYYRQLPGHSTESINQRSTGSFQSSVRRQSFPPSSYKK

SEQ ID NO: 157288 - protein, 470 aa, Zea Mays
MADKAASPEKKSWADVEEEEEAKAKATAAAEAAAAAAAASSSSSITEPAVEEQAKQIEALSLAPSVDDAAGEEGPPLLDDSDDSQIQAVISGGTVYESATTFEDLKLSPELLKGLHDEMGFSRPSKIQAITLPMILTPPYKDLVAQAHNGSGKTTCFVLGMLSRVDPQRKIPQAICICPTRELAQQNKAVLMRMGKFTGITCACAIPPAQKDYMPISKMAPITDQIVIGTSDADHMLAEDGFRSDSERMMRDIQRSAGGCQVLLFSATFNDRVKDFVTKVIRDGNQIFVKKEELTLEKVKQYKVQVPDESAKIEVIRDKIFEFGQKVGQVIIFVRTKQSTKNVHNALTREDYVCSSIQGSLDQSEREKIIQEFKDGYTKVLISTDVLARGFDQAQVNLVINYDMPIKFGTRDEPDYEVYLHRIGRAGRFWPERFGIGNVKKILRLLSRMQVYFKVTTETCGEQRSPAQDN

SEQ ID NO: 157289 - protein, 292 aa, Zea Mays
MTKNFRQDSLLGGGGFGRVYKGFITKDLREGLEIEEPTRVAVKAEVIFLGQLSHPNLVKLIGYCCEDDHRVLVYEFMPLGSVESHLFSRVMVPLTWSIRMKIALGAAKGLAFLHEAEKPVIYRDFKTSNILLDEEYNAKLSDFGLAKDGPVGDKSHVSTRIMGTYGYAAPEYIMTGHLTAMSDVYSYGVVLLELLTGRKSLDKSRPVREQMLADWALPLLAQKKKVLGIVDPRLAEDYPVKAVQKTAMLAYHCLSRNPKARPLMRDIVATLEPLQQLEETPGDSVAVTLEGT

SEQ ID NO: 157290 - protein, 142 aa, Zea Mays
MPLGSVESHLFSRVMVPLTWSIRMKIALGAAKGLAFLHEAEKPVIYRDFKTSNILLDEEYNAKLSDFGLAKDGPVGDKSHVSTRIMGTYGYAAPEYIMTAMVLYYWSSSRAGSHWTSPGQSGSRCWQTGHSHCWHRRRRCLA

SEQ ID NO: 157291 - protein, 309 aa, Zea Mays
MLTTRADLQDGLFLVRFLRAIDSARRSFFFRSRALWVIAGLRGIHTLTGFLPMQPKQNLPKFRAPRRELKRRIASYHPTRKRQDSLLGGGGFGRVYKGFITKDLREGLEIEEPTRVAVKVHDGDNSFQGHREWLAEVIFLGQLSHPNLVKLIGYCCEDDHRVLVYEFMPLGSVESHLFSRVMVPLTWSIRMKIALGAAKGLAFLHEAEKPVIYRDFKTSNILLDEEYNAKLSDFGLAKDGPVGDKSHVSTRIMGTYGYAAPEYIMTAMVLYYWSSSRAGSHWTSPGQSGSRCWQTGHSHCWHRRRRCLA

SEQ ID NO: 157292 - protein, 216 aa, Zea Mays
MPLGSVESHLFSRVMVPLTWSIRMKIALGAAKGLAFLHEAEKPVIYRDFKTSNILLDEEYNAKLSDFGLAKDGPVGDKSHVSTRIMGTYGYAAPEYIMTGHLTAMSDVYSYGVVLLELLTGRKSLDKSRPVREQMLADWALPLLAQKKKVLGIVDPRLAEDYPVKAVQKTAMLAYHCLSRNPKARPLMRDIVATLEPLQQLEETPGDSVAVTLEGT

SEQ ID NO: 157293 - protein, 82 aa, Zea Mays
MLADWALPLLAQKKKVLGIVDPRLAEDYPVKAVQKTAMLAYHCLSRNPKARPLMRDIVATLEPLQQLEETPGDSVAVTLEGT

SEQ ID NO: 157294 - protein, 122 aa, Zea Mays
MDAATPPGLAVPSFLLRFSAPATPNASALSTGLSATNLAVAFCTYDKEQIVKRSLLCCTTNTHCQIYSSSGTKRKRWHVVFVTRTARTSPSVALSSSPHAHELAAAADCACAASLPGDELGD

SEQ ID NO: 157295 - protein, 296 aa, Zea Mays
MRVFECVEAKGIQLNTNICNALVDAFLSAGDLLSAMTLYETMESMDACSPNSATYDAFICAFSLLGSGHAMMSWYVAAKNAGFTPSIQAFESLITGFVRLNMLDDAKTVFEEMIALEIKPNSTILEASLEILSRKEETSRVGDFLKRARDGNWELNKATVVRLTRICLDGGVIDEMEQLLALIQKGTHLNSETQLHHGIIRFYANADRLADMEDAIYRMLDNGVMFTCPEDVDVIICCYFRHREFDRLDLFLNRIRSLFKLNRSTYDILVAGYRKFDLHERLDSTIADMMREAGFA

SEQ ID NO: 157296 - protein, 565 aa, Zea Mays
MKADILSWKGNSLNSNRKLGLSQTAGSSSTVGANMGPSVLPLEPKGDQLPLFSSGDWISESGSGYGAAETAASTQTSSGATSSVPAGSAFDSSWMLINHDQSDGPSTSAGTSSQQKVVPQNEHPRNLNRLPDLQEIPESKNLFADLNPFGDTKSKKTSVPFKGPDQRNNELQKRRENIVPNGGRPQQRLVMKNWSPYNDVSNNKQYNYVEDSFARRNVGNNAASSSSQITQQAARSNLNSGLRNDASYHNYDSIMAGTSATNITSTAETGKVPERVLRGDLDKGQTNYRLQDQHVVGQPPQERLPWGNPAEGRVPMNRFQNQAKQHMGNIDTKQDHKKLLPDPKKSPLDRFMDTSLPSRNLDVRSQRLDFDDVSECEIPWEDLVIGERIGLGSYGEVYRADWNGTEVAVKKFLDQDFYGDALDEFRSEVRIMRRLRHPNIVLFMGAVTRPPNLSIVSEYLPRCDVYSFGVILWELATLRMPWSGMNPMQVVGAVGFQDRRLDIPKEVDPLVARIIFECWQKDPNLRPSFAQLTSALKTVQRLVTPSHQETQSPHVHQEISVNLTP

SEQ ID NO: 157297 - protein, 763 aa, Zea Mays
MKSLFKSKIRWQHRSNDPASPSGQPQPQPQQALGPPSPSPSSSPSSAAPLSVSTAATSSPSSPPSAAATPTGAGAAAAAGAGAAGEDYIASEEEFQMQLAMALSASSNSDCVGDLDGEQIRKAKLISLDRFAAHRDEGHTAESLSRRYWILADSVGILCKLVKGSNYTGGDDDDAINIIKMDNEREFLVDLMAAPGALIPADILSWKGNSLNSNRKLGLSQTAGSSSTVGANMGPSVLPLEPKGDQLPLFSSGDWISESGSGYGAAETAASTQTSSGATSSVPAGSAFDSSWMLINHDQSDGPSTSAGTSSQQKVVPQNEHPRNLNRLPDLQEIPESKNLFADLNPFGDTKSKKTSVPFKGPDQRNNELQKRRENIVPNGGRPQQRLVMKNWSPYNDVSNNKQYNYVEDSFARRNVGNNAASSSSQITQQAARSNLNSGLRNDASYHNYDSIMAGTSATNITSTAETGKVPERVLRGDLDKGQTNYRLQDQHVVGQPPQERLPWGNPAEGRVPMNRFQNQAKQHMGNIDTKQDHKKLLPDPKKSPLDRFMDTSLPSRNLDVRSQRLDFDDVSECEIPWEDLVIGERIGLGSYGEVYRADWNGTEVAVKKFLDQDFYGDALDEFRSEVRIMRRLRHPNIVLFMGAVTRPPNLSIVSEYLPRCDVYSFGVILWELATLRMPWSGMNPMQVVGAVGFQDRRLDIPKEVDPLVARIIFECWQKDPNLRPSFAQLTSALKTVQRLVTPSHQETQSPHVHQEISVNLTP

SEQ ID NO: 157298 - protein, 803 aa, Zea Mays
MKSLFKSKIRWQHRSNDPASPSGQPQPQPQQALGPPSPSPSSSPSSAAPLSVSTAATSSPSSPPSAAATPTGAGAAAAAGAGAAGEDYIASEEEFQMQLAMALSASSNSDCVGDLDGEQIRKAKLISLDRFAAHRDEGHTAESLSRRYWDYNFLDYHEKVIDGFYDIFGSMESSRQGNMPSLADLQTGIGDLGFEVIVVNRAIDSTLQEMEQVAQCILLDFPVANIALLVQRIAELVTDNMGGPVKDANDMLTRWLEKSTELRTSLQTSLLPIGCIKIGLSRHRALLFKILADSVGILCKLVKGSNYTGGDDDDAINIIKMDNEREFLVDLMAAPGALIPADILSWKGNSLNSNRKLGLSQTAGSSSTVGANMGPSVLPLEPKGDQLPLFSSGDWISESGSGYGAAETAASTQTSSGATSSVPAGSAFDSSWMLINHDQSDGPSTSAGTSSQQKVVPQNEHPRNLNRLPDLQEIPESKNLFADLNPFGDTKSKKTSVPFKGPDQRNNELQKRRENIVPNGGRPQQRLVMKNWSPYNDVSNNKQYNYVEDSFARRNVGNNAASSSSQITQQAARSNLNSGLRNDASYHNYDSIMAGTSATNITSTAETGKVPERVLRGDLDKGQTNYRLQDQHVVGQPPQERLPWGNPAEGRVPMNRFQNQAKQHMGNIDTKQDHKKLLPDPKKSPLDRFMDTSLPSRNLDVRSQRLDFDDVSECEIPWEDLVIGERIGLGSYGEVYRADWNGTEVAVKKFLDQDFYGDALDEFRSEVRIMRRLRHPNIVLFMGAVTRPPNLSIVSEYLPRKKL

SEQ ID NO: 157299 - protein, 86 aa, Zea Mays
MPWSGMNPMQVVGAVGFQDRRLDIPKEVDPLVARIIFECWQKDPNLRPSFAQLTSALKTVQRLVTPSHQETQSPHVHQEISVNLTP

SEQ ID NO: 157300 - protein, 64 aa, Zea Mays
MFGSGVHEGFELPVLYSPGQSTSQSCATDRCESKAVVVPRTICYQNKKDESGWWPRLMKKDLCS

SEQ ID NO: 157301 - protein, 56 aa, Zea Mays
MFGSGVHEGFELPVLYSPGQSTSQSCATDRRAKQLLSQEPYATRTRKMRAVGGQGS

SEQ ID NO: 157302 - protein, 111 aa, Zea Mays
MFGSGVHEGFELPVLYSPGQSTSQSCATDRVFLTIELPDAKGVKQSLKPKGHFNLSSSDDSPCEFDLELFDVVDLIHVELAFQILIVLVFLFAGEQSSCCPKNHMLPEQER

SEQ ID NO: 157303 - protein, 100 aa, Zea Mays
MEGVLEFAPTYKYELGSRRSLIVSIIIQATLGSGSMVMMTQKSTHSKCGVHEGFELPVLYSPGQSTSQSCATDRRAKQLLSQEPYATRTRKMRAVGGQGS

SEQ ID NO: 157304 - protein, 129 aa, Zea Mays
MGPFKFDLLSYSCPLILSISRFCSLIYKTAYNICLLILFIFTKLKKWAPKNLGAMCHRPSCTWHWTGLPKCLPIIMICSKPLHRFTCTHSPSKEVMEWKSLRWSLKGKNHSEYAFKIHSYGGRRHLHAP

SEQ ID NO: 157305 - protein, 51 aa, Zea Mays
MFLNRPCYLHCKTFPLVTLCTHISIYNWCGVIETILVFLEGTSYVHEYRLA

SEQ ID NO: 157306 - protein, 122 aa, Zea Mays
MQLDVVKATCGMVQAGRHQVLLLGLLFVLVRQALYLDALFFFPTSLNGIHAMNILGNLTPWTTSVADKQLERSISNLLVHPPVYRCSFKLCMDFSLCPDSHWVVQKPSFPSCLQILPVHQIV

SEQ ID NO: 157307 - protein, 166 aa, Zea Mays
MERLRRDKSILLAEVVKLRQEQQSTRAGMRAMEERLRHAEHKQVQMMGFLARAVQSPDLFQLLAQQQARRRELEGAALLSAASRKRRRPIGAAPANGGLQQQEEDQQQGGFETAELTDDFWEELLNEGMKGGAEAETLPPERRRPAWYVDALAQKLSSMSNNTTAK

SEQ ID NO: 157308 - protein, 266 aa, Zea Mays
MGASGLAASSNGGNKWAKAANEEATMTVVAVESDEPRTESPLERGTIIYNLLVTLPFPSGLISRLRRAFLLCRFTTDLVSRSSLHMLQLLVQECLRSAIDLSSAQVAATTDNRPPAHCFTFGDESTTGQLPLPKLEVSILRPLVWSGMEHPSVFDRFNYDRAYAPLCKHVDHQSYIPGFQVDQTEWIQSCSKLASCVNKQAPSATRFMGMQQSLGIQPTQLGKDAPAADDYAAEKLDIELSGSYLLPPRYSKGALALHWRTGHKND

SEQ ID NO: 157309 - protein, 67 aa, Zea Mays
MLFDNGFKLTKQSGYSHAQSWQAVSTSRPHLLLASWACNKALVFSRRSLGRMHLQQMIMQQKNLILS

SEQ ID NO: 157310 - protein, 67 aa, Zea Mays
MLFDNGFKLTKQSGYSHAQSWQAVSTSRPHLLLASWACNKALVFSRRSLGRMHLQQELHVELVLNER

SEQ ID NO: 157311 - protein, 91 aa, Zea Mays
MIVYSLSKNIVFELCFLLGIIKAYGGTTYRLQRSIRSMFIAEAKCSDDFVFSIVFSVIGSVCTYIDMIYGMTSAIFVIFMTSFLIDVCRHE

SEQ ID NO: 157312 - protein, 68 aa, Zea Mays
MHSPEVQIDILSSWGHHCPKTRFQDIVFMNTTRRARPPLGPTFTGSCSGTCLTRLTQSKINLIILCNT

SEQ ID NO: 157313 - protein, 427 aa, Zea Mays
MCATTHGLCILYISMEYNQAIPNNSHFHGISRGSDPHASATHDRAVADPIVALVELVTQSAADPIAALSVKIACPVAGSAGCGRWSPQICSRRRSASRRGASSPTGSRQASWICSRRRSSSRRGAFSSPASRGRAALLQLGALSMAADDAAAVQAAEDRRLAVEAEARRAEDARRAEEGRLRAAALDEFERAHEALWAQATAVVNVKALIPVILDQATNTYTKWRGMFITVLGKYALTRHVLEDEAFPSRPAWVQADCCVLTWIYSTISGDLQQSLMMRQGLARGAWCYLEDEFLGQRESRALLLETKFRNFRQESLSITDYCRQLESMAASLAGFGDPIGDRQMVLTLLRGLGGKFRHMVSILKMHQPFPTFAEARAHLLLEELEIDARPPSPPSALVAAAPRHATPGAPVPPRPGAPPPARPPGT

SEQ ID NO: 157314 - protein, 247 aa, Zea Mays
MLVTNTLFRMGGAAVLLSNRRADRARARYRLVHTVRTHRGGASDESYACVTQEEDAEGNVGVSLSRGLMSVAGDALRSNITALGPLVLPLSEQLRFLAAALLRRVAAVKPYVPDFKLALEHFCIHAGGRGVLDELERSLGLSAWHMEPSRMTLYRFGNTSSSSLWYELAYCEAKGRIKRGDRVWQIAFGSGFKCNSAVWKALRTVDDAGRRDTNPWADDIHDLPVHVPKVSPFASSDQAPPTNAQHA

SEQ ID NO: 157315 - protein, 526 aa, Zea Mays
MRSQLNASFSPPPSLRRALPSATPRALRYGERTASIGSAFLLRRATEAGRLLNTALPGSRFHAFPWRFRAPQHHGRGAGARCATNLPAPGSHGVGVLASERRADDGDTTVKNADAPSTSTATQGNLNMAAIVSIAFCFLHRIVSGRMQSMMNLFPWMSNGIASLPFACISDPTRKPMPLKLDLTLPPLPDFGWNFSRLYYRFNSQLDRNIALSIITLLITCFSFVIVGGLLFHKFRKQQQSLEDCFWEAWACLCSSSTHLRQKTRVERVIGFFLAIWGILFYSRLLSAMTEQFRNQMHKVREGAQVQVIEDDHIIICGVNSHLMSILNQLNKYHESSIRLGLATARKQKILLLSDLPRKQIDKLADSLAKDLNHIDVFTKSCSLSMSTSFERAAAHKAKSIIILPAQHERYEVDTDAFVSLLALQPCKQIAPVPIIVEASNATTCELLKSITGLNVQPVEMVASKLFVQCSRQKDLLKIYKHLLNQHSNVLIFCHDIYEKTISILVHFRAKLCYPGLSRLNFFAIL

SEQ ID NO: 157316 - protein, 337 aa, Zea Mays
MRSQLNASFSPPPSLRRALPSATPRALRFHAFPWRFRAPQHHGRGAGARCATNLPAPGSHGVGVLASERRADDGDTTVKNADAPSTSTATQGNLNMAAIVSIAFCFLHRIVSGRMQSMMNLFPWMSNGIASLPFACISDPTRKPMPLKLDLTLPPLPDFGWNFSRLYYRFNSQLDRNIALSIITLLITCFSFVIVGGLLFHKFRKQQQSLEDCFWEAWACLCSSSTHLRQKTRVERVIGFFLAIWGILFYSRLLSAMTEQFRNQMHKVREGAQVQVIEDDHIIICGVNSHLMSILNQLNKYHESSIRLGLATARKSFFSPIFQGSRLINLQIAWPKI

SEQ ID NO: 157317 - protein, 369 aa, Zea Mays
MRSQLNASFSPPPSLRRALPSATPRALRYGERTASIGSAFLLRRATEAGRLLNTALPGSRFHAFPWRFRAPQHHGRGAGARCATNLPAPGSHGVGVLASERRADDGDTTVKNADAPSTSTATQGNLNMAAIVSIAFCFLHRIVSGRMQSMMNLFPWMSNGIASLPFACISDPTRKPMPLKLDLTLPPLPDFGWNFSRLYYRFNSQLDRNIALSIITLLITCFSFVIVGGLLFHKFRKQQQSLEDCFWEAWACLCSSSTHLRQKTRVERVIGFFLAIWGILFYSRLLSAMTEQFRNQMHKVREGAQVQVIEDDHIIICGVNSHLMSILNQLNKYHESSIRLGLATARKSFFSPIFQGSRLINLQIAWPKI

SEQ ID NO: 157318 - protein, 573 aa, Zea Mays
MRSQLNASFSPPPSLRRALPSATPRALRFHAFPWRFRAPQHHGRGAGARCATNLPAPGSHGVGVLASERRADDGDTTVKNADAPSTSTATQGNLNMAAIVSIAFCFLHRIVSGRMQSMMNLFPWMSNGIASLPFACISDPTRKPMPLKLDLTLPPLPDFGWNFSRLYYRFNSQLDRNIALSIITLLITCFSFVIVGGLLFHKFRKQQQSLEDCFWEAWACLCSSSTHLRQKTRVERVIGFFLAIWGILFYSRLLSAMTEQFRNQMHKVREGAQVQVIEDDHIIICGVNSHLMSILNQLNKYHESSIRLGLATARKQKILLLSDLPRKQIDKLADSLAKDLNHIDVFTKSCSLSMSTSFERAAAHKAKSIIILPAQHERYEVDTDAFVSLLALQPCKQIAPVPIIVEASNATTCELLKSITGLNVQPVEMVASKLFVQCSRQKDLLKIYKHLLNQHKNVFNLFRRPELEGMKYMDVRRKIHDAVVCGIFRSGKIHFHPSEEELLKETDKLLLIAPVRGMKRPQYRALSVRKETQTLSRNSEPREGQGSFNMATTMDNETRLNNIVKRPLKSLSK

SEQ ID NO: 157319 - protein, 605 aa, Zea Mays
MRSQLNASFSPPPSLRRALPSATPRALRYGERTASIGSAFLLRRATEAGRLLNTALPGSRFHAFPWRFRAPQHHGRGAGARCATNLPAPGSHGVGVLASERRADDGDTTVKNADAPSTSTATQGNLNMAAIVSIAFCFLHRIVSGRMQSMMNLFPWMSNGIASLPFACISDPTRKPMPLKLDLTLPPLPDFGWNFSRLYYRFNSQLDRNIALSIITLLITCFSFVIVGGLLFHKFRKQQQSLEDCFWEAWACLCSSSTHLRQKTRVERVIGFFLAIWGILFYSRLLSAMTEQFRNQMHKVREGAQVQVIEDDHIIICGVNSHLMSILNQLNKYHESSIRLGLATARKQKILLLSDLPRKQIDKLADSLAKDLNHIDVFTKSCSLSMSTSFERAAAHKAKSIIILPAQHERYEVDTDAFVSLLALQPCKQIAPVPIIVEASNATTCELLKSITGLNVQPVEMVASKLFVQCSRQKDLLKIYKHLLNQHKNVFNLFRRPELEGMKYMDVRRKIHDAVVCGIFRSGKIHFHPSEEELLKETDKLLLIAPVRGMKRPQYRALSVRKETQTLSRNSEPREGQGSFNMATTMDNETRLNNIVKRPLKSLSK

SEQ ID NO: 157320 - protein, 498 aa, Zea Mays
MSTSFERAAAHKAKSIIILPAQHERYEVDTDAFVSLLALQPCKQIAPVPIIVEASNATTCELLKSITGLNVQPVEMVASKLFVQCSRQKDLLKIYKHLLNQHKNVFNLFRRPELEGMKYMDVRRKIHDAVVCGIFRSGKIHFHPSEEELLKETDKLLLIAPVRGMKRPQYRALSVRKETQTLSRNSEPREGQGSFNMATTMDNETRLNNIVKRPLKSLSKSSDYMLGPKECVLIVGWRPKVTEMIREYDNYLGPGSTVEILSETPIKERSSIINPLLQSQLKNVKVTHRVGCPLNYDTLKETIINVRESAKSDKEVPLSIVVISDRDWFVGADAAQADKQLAYTLLLAENICQKHGVMVENLVSEIVDMGLGKQISKIRPSLSFIGAEEIMSRVTAQVAESSELNEVWKDILNAEGDEIYIKEIGLYMKEGEKISFLELSERAVLRREVAIGYIKDGKQHINPINKSEPLSLEMNDSLIVISEFEGEQPIMMGGETSG

SEQ ID NO: 157321 - protein, 334 aa, Zea Mays
MKRPQYRALSVRKETQTLSRNSEPREGQGSFNMATTMDNETRLNNIVKRPLKSLSKSSDYMLGPKECVLIVGWRPKVTEMIREYDNYLGPGSTVEILSETPIKERSSIINPLLQSQLKNVKVTHRVGCPLNYDTLKETIINVRESAKSDKEVPLSIVVISDRDWFVGADAAQADKQLAYTLLLAENICQKHGVMVENLVSEIVDMGLGKQISKIRPSLSFIGAEEIMSRVTAQVAESSELNEVWKDILNAEGDEIYIKEIGLYMKEGEKISFLELSERAVLRREVAIGYIKDGKQHINPINKSEPLSLEMNDSLIVISEFEGEQPIMMGGETSG

SEQ ID NO: 157322 - protein, 327 aa, Zea Mays
MPDIPGIEHVIDSDAALDLPSKPEKIAIVGGGYIALEFAGIFNGLKSEVHVFIRQKKVLRGFDEEVRDFVAEQMSLRGITFHTEQSPQAITKSNDGLLSLKTNKENFGGFSHVMFATGRRPNSKNLGLEAVGVEMDKNGAIVVDEYSRTSVDSIWAVGDVTNRVNLTPVALMEGGAFAKTVFGNEPTKPDYRAIPSAVFSQPPIGQVGLTEEQAIEEYGDVDVFVANFRPLKATLSGLPDRVLMKILVCATSNKVVGVHMCGDDAPEIIQGIAIAVKAGLTKQDFDATIGIHPTSAEEFVTMRSPTRKIRKSSTDQVESKDEVVSKQ

SEQ ID NO: 157323 - protein, 92 aa, Zea Mays
MDLRKYRKALCYLHVCWEKEKIDEGSSSSTTGAIVGGVAAGAALLFAVPAISFAYWRHRKPQEQAFFSMYLASKLVFDYYLSRNIRANNVYM

SEQ ID NO: 157324 - protein, 96 aa, Zea Mays
MSKSIWRQCGVGFPRGRNIVGCRSQGTPDILRQTVARCPRAAPRSSSGWSSSGTIMWQRRCPGLRTYMLLTPTLNIAVVLCNDMSFPNAPKLGWVR

SEQ ID NO: 157325 - protein, 98 aa, Zea Mays
MCEGTYLEDVHTMPPPPGPSRLASSVPPSPHPHHRRWKSPRPWLPDRRSPKIPRRDAATTWSPLQGSGMGALTTTTRVSSCFCYIISFFHNSEFVCEV

SEQ ID NO: 157326 - protein, 488 aa, Zea Mays
MVVMMTRHILLFIQPNFQKRLYEFVVRHFLACCSQPAVGAETTVEIDIAGEQFNASGRVILAKNYLDVYRFDSWGGTLLPTYNIGQQAGIGTDATMHDHIKKLLDRCYATKDENTRFSPTNLGEALVMGYDEMGYELWKPYLRSMMEADMKSVSVGTKSKSEVLESCLQQMKACFLDARVKKAKLLDAMGTFFARSNRPINETQNPVEVVRPCGACNGSEMLLKRRASGEFMVGCRSYPQCRNVVWLPGSLSEAAVTNQVCPICAPGPVYKIQFKFRRRDIPPNFDVDHLGCVGGCDDILKDLMEISRFGSRSQAATPARGPTPNGVGQGTPRQDLHTIFRPASQLNNDNPSVMHSQGFRSTHTQNPSNASDAGQVLCTSCGALCISRIANTEANRGRRFYKCQDPGCGFFKWEDEVDNGTGRGRRGRGSSRQASASASAGRRGGGRRGRGRNADGGMFVSATGDTVLGCCFNCGDPSHFANACPNRR

SEQ ID NO: 157327 - protein, 860 aa, Zea Mays
MQPDGGGAIRVLNVAEKPSVAKAVAEILSRRSAQSRAGRSQYNRIFEFNYAINGRACHMLVTSVTGHLMELEFDDRFRRWHSCDPAELFHAPVRKSVPQDKQAIKQTLEEEARRCQWLVLWLDCDREGENIAYEVIDVCTRANSHLNIWRARFSALIDREIHESVQHLGRPNKLFADAVDARQEIDLRIGASFTRFQTMLLKDAFVIDVTGDERSLVLSYGPCQFPTLGFIVERFWEIQAHEPEEFWTINCTHTSDEGTASFGWIRGHLFDYSCAISIYEMCVSEPMATVQNVRNQEKLKYPPYPLSTVELQKRASRYFRMSSEHTMKVAEELYQAGFISYPRTETDNFSPNTDLHAIVREQVNHPVWGAYAQRLLNPEARLWRNPSNGGHDDKAHPPIHPTKFSEGERNWSPDHTRLYEFVVRHFLACCSQPAVGAETTVEIDIAGEQFNASGRVILAKNYLDVYRFDSWGGTLLPTYNIGQQFVPTTLTLDSGVTRPPPLLAEADLLSCMDKAGIGTDATMHDHIKKLLDRCYATKDENTRFSPTNLGEALVMGYDEMGYELWKPYLRSMMEADMKSVSVGTKSKSEVLESCLQQMKACFLDARVKKAKLLDAMGTFFARSNRPINETQNPVEVVRPCGACNGSEMLLKRRASGEFMVGCRSYPQCRNVVWLPGSLSEAAVTNQVCPICAPGPVYKIQFKFRRRDIPPNFDVDHLGCVGGCDDILKDLMEISRFGSRSQAATPGQVLCTSCGALCISRIANTEANRGRRFYKCQDPGCGFFKWEDEVDNGTGRGRRGRGSSRQASASASAGRRGGGRRGRGRNADGGMFVSATGDTVLGCCFNCGDPSHFANACPNRR

SEQ ID NO: 157328 - protein, 516 aa, Zea Mays
MVVMMTRHILLFIQPNFQKRLYEFVVRHFLACCSQPAVGAETTVEIDIAGEQFNASGRVILAKNYLDVYRFDSWGGTLLPTYNIGQQFVPTTLTLDSGVTRPPPLLAEADLLSCMDKAGIGTDATMHDHIKKLLDRCYATKDENTRFSPTNLGEALVMGYDEMGYELWKPYLRSMMEADMKSVSVGTKSKSEVLESCLQQMKACFLDARVKKAKLLDAMGTFFARSNRPINETQNPVEVVRPCGACNGSEMLLKRRASGEFMVGCRSYPQCRNVVWLPGSLSEAAVTNQVCPICAPGPVYKIQFKFRRRDIPPNFDVDHLGCVGGCDDILKDLMEISRFGSRSQAATPARGPTPNGVGQGTPRQDLHTIFRPASQLNNDNPSVMHSQGFRSTHTQNPSNASGQVLCTSCGALCISRIANTEANRGRRFYKCQDPGCGFFKWEDEVDNGTGRGRRGRGSSRQASASASAGRRGGGRRGRGRNADGGMFVSATGDTVLGCCFNCGDPSHFANACPNRR

SEQ ID NO: 157329 - protein, 236 aa, Zea Mays
MAHGCMLVRREYRLKLMATSEPVQESLVVHYSQPSRPRVLLAASGSVAAIKFESLCRSFSEWADVRAVATTSSLHFVDRSSLPSGIVLYTDDDEWSTWKKIGDEVLHIELRKWADVMVIAPLSANTLAKIAGGLCDNLLTCIVRAWDYSKPLFVAPAMNTLMWNNPFTERHLHTINQLGIALIPPVTKRLACGDYGNGAMAETSQIHTSVRLACKTQPHDASSSLAGPVSNNRPSS

SEQ ID NO: 157330 - protein, 335 aa, Zea Mays
MELDRKMMMLLLIYISHLLFCSRDLLKDRQPPALLPVRHRHVEQSQHLVLDPVIVVALAPAPALIRRASSSVTAATARPRRMRHDPGQQLLHFPDDLAVLLVAGLQVPPGEHVGEDELGVGEPGLLDEAEGEVARLVGVRVDHLRLPVHHLRRHEVALLHVRPREVAQDARCLLLDGDVDLAAVRAGALGGPAMERLAEVDLAELLLEQLDLLLGPPAGLVEVQEDVVQRLLGLLRAQVPQRPDGVDGLRQVPALLHHHRHVLERAVQLVARADRLPEPRDRRVQVLLHQLNYSIITATVLIINNLKVHFNQITPFQIIVSRFAFFSLSRSLVNK

SEQ ID NO: 157331 - protein, 149 aa, Zea Mays
MLVCGDFNSTPGSTSHGLLARGKVDHLHPDLAIDPLGILRPLSKLTHQLPLVSAYSSFVSMAGVGYDLDHQRRRMDPGTNEPLFTNCTRDFTGTLDYIFYTADSLTVESLLELLDEDSLRKDTALPSPEWSSDHIALLAEFRCKLRVRR

SEQ ID NO: 157332 - protein, 132 aa, Zea Mays
MASRMGMVAILSLFVCALVASTSVNANVWQTDEDAFYSTNKLGVNGNMEMAQQQGGFIGHRPRLALFNRASKQLDREKRPVPSGPDPIHHSIPSHAPQHPPSYGKAPYEDDKSIASPGLSNPIGPPPLPDRY

SEQ ID NO: 157333 - protein, 138 aa, Zea Mays
MNTKMATYGNGGEGYDERIAAILRLMNGMMYNFLDGQKDIYTSDLFCPLSSNLCNLMPNEQAKDVLDTTTLVGTMLDSEGKHCKTLVASLCTCCAQHYIICLLFVMVAYFEWLLRPSQTRSPQRPAHAISIGRLPFRF

SEQ ID NO: 157334 - protein, 173 aa, Zea Mays
MDRELSPRGNAPGRGSGGASSSKHKNGGGGKKPIKVLYIANPMRVQTSAEGFRALVQELTGQHADPSKYSPGDLDSGAAAQGLSPRARVADVSSETIVASHSPGSKAAPHGGDYYDVEEDEDDVFRLLLNRRLGSQRSMTISGPNEAEQVNTTIATNGFSEEHSTRQHWYKRL

SEQ ID NO: 157335 - protein, 175 aa, Zea Mays
MNVTFSTRTSCRSNLILPFLLWWDQSDTKWPRTADDDDDMATIAALRLTFWLSNTVVLREIIVQTFGISHQFTPSMMNLSMNGGAKKLDGKSMTMLWRNSYNGMQAKFAARQMPDDWQETSTLLATLEKIESWIFSRIVETIWWQALTPHMQKRVEGSSTPKAGRVLCPTLGDQQ

SEQ ID NO: 157336 - protein, 91 aa, Zea Mays
MAPRLPSIASASSVLLSSEESLPSMAPLLQFPPRSTLPPLPTRSALPPLLPRCPFPGTLPSMASLLQVPRNQLHCRHDPLPPTTLTFHRQN

SEQ ID NO: 157337 - protein, 143 aa, Zea Mays
MMCMLASGQETQKYFIDECDIFHKNEIRNGQGLLTMMTTWPPSLPSVVLREIIVQTFGISHQFTPSMMNLSMNGGAKKLDGKSMTMLWRNSYNGMQAKFAARQMPDDWQETSTLLATLEKIESWIFSRIVETIWWQVNVCLRH

SEQ ID NO: 157338 - protein, 156 aa, Zea Mays
MVLLSWVAKNIASGLVLVVKSSSNDASRLTFWLSNTVVLREIIVQTFGISHQFTPSMMNLSMNGGAKKLDGKSMTMLWRNSYNGMQAKFAARQMPDDWQETSTLLATLEKIESWIFSRIVETIWWQALTPHMQKRVEGSSTPKAGRVLCPTLGDQQ

SEQ ID NO: 157339 - protein, 85 aa, Zea Mays
MCPLSAGGHECGCLPILAKLVMEQCVARLNVAMFNAILRESSSEIPTDSISDPIVDPKVLPIPVGDLSFGSGAQLKNSIMMTLRT

SEQ ID NO: 157340 - protein, 826 aa, Zea Mays
MSMAWRLLRTIHFRHLSPGVRRASKIVDQGFTNNAPELSTNKGSLLRCSSIRFGEKRNSIFACAPDNLEQKSGQTFEADAHSALKLCSGIGSVVIAKCSHIFERNGDTFDGNCSLQDILKPGLWLSPETLRRFWRVSELKPKDFLDILNGFGLSAVKVRNARFLWNLYRWTSRQSKEFQHLPRSNETMVSILADAHMLSQAESLLLSLIDHMTPAVSSELFSQIIQVYSEAGNLGKSVALYDYARGKHLIPSASCYQVLLHFLTRNRKDELILRVYLDMLEVGFGSCTEGNILDSVVMALIRKGYCRYRRFDDIEQVLRHMKTNGVNVLLSGNCVLSKALSFLGLDHLGVKIKRDNVTGFPKAEFFDSVGNGLYLDTDSKMFEVSLSQVLDSALLPDINSELIRASQQGDVASALLVKDKAFQWGYDISPDSCSELFKALCVSPAYVIDVIDLMEEMPDILYKLDAQNLDLVAQTLSRNGMSAHAKLVLEKMLREDLSISHNTYTYLMIGLCEERNIAGFWECWNLATKCRWSPDSKDMMGLISYLCKWGVIEEALKLMNSLFDCYHDLFFSAYCALLKELCRTGHTSIGCAMLEALKEKGVAVDRSLFFYVMEGFLKEQRTAESIGMHDMWLSKSKELDVFTYRSVLPSLPWLDTDRAKNLVESMLTVKLTEFSYRGCIVNELMQTRNIKWAIPVLQESAPGKLSATLLNSLLQAYGWLKNWRKLDAVLCKMLKMHATLSISSYRFLVCRMCEQSRFSSASSLRALFQHTDKSRELIACNILIFYLFQRRNSSQIHDLLKDIEGNKTKQPQSQNSVKSLLQARKP

SEQ ID NO: 157341 - protein, 905 aa, Zea Mays
MVSILADAHMLSQAESLLLSLIDHMTPAVSSELFSQIIQVYSEAGNLGKSVALYDYARGKHLIPSASCYQVLLHFLTRNRKDELILRVYLDMLEVGFGSCTEGNILDSVVMALIRKGYCRYRRFDDIEQVLRHMKTNGVNVLLSGNCVLSKALSFLGLDHLGVKIKRDNVTGFPKAEFFDSVGNGLYLDTDSKMFEVSLSQVLDSALLPDINSELIRASQQGDVASALLVKDKAFQWGYDISPDSCSELFKALCVSPAYVIDVIDLMEEMPDILYKLDAQNLDLVAQTLSRNGMSAHAKLVLEKMLREDLSISHNTYTYLMIGLCEERNIAGFWECWNLATKCRWSPDSKDMMGLISYLCKWGVIEEALKLMNSLFDCYHDLFFSAYCALLKELCRTGHTSIGCAMLEALKEKGVAVDRSLFFYVMEGFLKEQRTAESIGMHDMWLSKSKELDVFTYRSVLPSLPWLDTDRAKNLVESMLTVKLTEFSYRGCIVNELMQTRNIKWAIPVLQESAPGKLSATLLNSLLQAYGWLKNWRKLDAVLCKMLKMHATLSISSYRFLVCRMCEQSRFSSASSLRALFQHTDKSRELIACNILIFYLFQRRNSSQIHDLLKDIEGNGISLDKTTYDFLVYGFHKSGDINDSVNALDACIAQGIKPSNRSLRIVLSHYCRLGNHEKSLALFHLIERNGWKHGLIIKTTLASCLLSFGRQLEAKSCLNNLSKGEFIGCSSNFDDLIKEFCILGDLKMTLYLLNTMLKKGTLPNEASYSSVIYKLCTLKEFDQALDFLAEMQLASLKSSEISCDALVHGLCAMGRPSDARKVLEMLTTLGSAPSYGMFRVVFDNYCRSSNLQKAAALLHDMQQAGQVPNFEMHWSVISNLSSTNEKTEGHGECILPNLFLSANSP

SEQ ID NO: 157342 - protein, 67 aa, Zea Mays
MFCFPTLLTMLRLKSGHRNTNEINCQIALGIHLVLLPSIESIHTYSSLNSKCKTIIKSLSNFLISFE

SEQ ID NO: 157343 - protein, 517 aa, Zea Mays
MEMKPQRKPLGRNPLSDAPYRNPGMVLNEQGPGRHPSSDALSLDLEPVISEQGSGRRILSGALHRRPGVVKNEQGSLHLPRRVRRVRKLVEPTRVRVGSWNVGSLTGKLREIVDVAVRRRVNILCVQETKWKGQKAKEVEGTGFKLWYTGTATNKNGVGVLIDKSLKDGVVDVKRVGDRIILVKLVIGDLVLNVISAYAPQVGLNENSKREFWEGLEDMVSSVPVGEKLFIGGDLNGHVGTSSTSFEGVHGGFGFGTRNQEGEEILNFALAYDMFIANTFFKKRQSHLVTFSSGQHTSQIDFVLLRKEDRHACLDCKVIPGECVVTQHKLVVADFRFKIRLQRNKHNKVTRTKWWKLKGDVAQTFKKRVIEEGPWAGEEDANIMWRKMATCIRKIASEEFGLSQGNRREVKDTWWWNEDVQKAIKEKKDCYKRLHHDKCAENIEKYRIAKKSAKRAVSRARGQAYDDLYQRLDTKQGEKDIYRMAKIRERKTRDVNQVKCIKDEANQLLVKSEEIKN

SEQ ID NO: 157344 - protein, 183 aa, Zea Mays
MDGRFVPNITIGPLVVDALRPVTDLPLDVHLRVPDFIKAGADIVSVHCEQTSTIHLHRTVNQIKSLGAKAGVVLNPATPLTAIDYVLDVVDLVLIMSVNPGFGGQSFIESQVKKIAELRRLCAEKGVNPWIEVDGGVGPKNAYKVIEAGANAIVAGSAVFGAPDYAEAIKGIKTSQRPLAVAA

SEQ ID NO: 157345 - protein, 271 aa, Zea Mays
MSSVDSGSNGLTGYVTLLSLMEELISLEMKAFHVRASARVDKFSKSDIIVSPSILSANFAKLGDQVKAVEVAGCDWIHVDVMDGRFVPNITIGPLVVDALRPVTDLPLDVHLMIVEPEQRVPDFIKAGADIVSVHCEQTSTIHLHRTVNQIKSLGAKAGVVLNPATPLTAIDYVLDVVDLVLIMSVNPGFGGQSFIESQVKKIAELRRLCAEKGVNPWIEVDGGVGPKNAYKVIEAGANAIVAGSAVFGAPDYAEAIKGIKTSQRPLAVAA

SEQ ID NO: 157346 - protein, 809 aa, Zea Mays
MAVPSPAPRSPRRPDAIVAPDPSSADVPPSLDFGDPASLAALRVLTDAGAATRLLHECVAYQRGLDARLDALLARRADLDRAAASLLRSAPPLLSLAASDAAALKESSSTTAALADALSSRVRHLDAAHSRADAALARAEAALDRSRALEAARRALAADDLAAAATAVHEFLAIDARFPTDDDLRRDLLDMKRRLEGLARRRLAAVVDAQDHPAVLRLVRLFPLLGLADEGLQVYVAYLKKVVALRARADFEHLAELTSATQPTSERPDFVGCLTRLFKDIVLAVEENDAVLRELRGDDGVAYAIIELQEECDSRGTQILRRYADYRKLARLASDINSYTKNLLSVMGSMASAAGGSEGPDPREIELYLEEILALTQLGEDYTEFMVNKIRGLRDVKPELGPRAMKAFRNGNFYKTEQDLTGFYVIFEEFFMVENVRKAIRIDEPISDGLTTSMVDDVFFVLQSCCRRAASTASINSVLAVLGGAMSLLSNEYQEALQWRMREPNLGAKLFLGGVGVQKTGEEIATALNNIDISSEYVLKLRHEIEELCVEVFHTPADREKIKSCLSELGEVSASFKKILHSALEHLVASVVPRIRPVLDTVATVSYELDDTEYGENEVNDPWVQKLILTVNTNVAWLQPVMTLNNYDSFVHLIIDFIVKRLEVIMMQKRFSQLGGLQLDKEVRSLINHFSEMSQRPVRDKFSRLSQMSTILNFERVSEILDFWGDNAGHLTWLLTPAEMPAYHAAPKWCWYRYNICQLLPLTASYLNCIDLPTTSLHRLLYCINQPNGYHETTQCQPSDMSLLIFGFL

SEQ ID NO: 157347 - protein, 318 aa, Zea Mays
MGEGRAGDGLIKLFGKTIPVPETAAVGEAAKSKSASATSHFLQRVRAGLPVDPLVCAAAKTNGTVLSFGSAMSSLDLTEQMKQLKEKLVPIAGDERSVGSRTQGPSAKAEDPDRKENVTADKSARVVQHPCMTNGVAMWPFSCAPPVPASACYGPGSIAIPFYPAAAAAAAYWGCMVPGAWSGAWPPHSGQSETGSSITSASPAASTKSNICFTPGKHPRDRDEEGGAKGNGKVWVPKTIRIDDVDEVARSSILSLIGIGGDKAGKDGGRGCKLARVFEQNEEAARTATPHSAAISGLPFLQGNPAALSRSLTFQEGS

SEQ ID NO: 157348 - protein, 446 aa, Zea Mays
MAASLLRRGAVTSRRRCPVEMLRRLVSSEAAADRAPSRPPPEMPPFDYRPRPYAGLGGAEIFEKRKAVLGPSLFHYYQKPLNIVEGKMQYLYDEHGKRYLDCFGGIVTVSCGHCHPDIVNAVVEQTKLLQHTTTIYLHHTIVEFAEALTSKMPGNLKVAYFVNSGTEANELAMLMARLYSGNLSMVALRNAYHGGSAGTIGLTAYAKEVEEHITYGSSGRVAGFIAETFQGVGGAVELAPGYLKLAYDIVRKAGGVCIADEVQSGFGRTGSHYWGFQTQGVIPDIVTMAKGIGNGLPLGAVVTTPEIASVLAQKIQFNTFGGNPVCSAGGLAVLKVLDKEKRQAHCADVGSHLLERLKSLQEKHEIIGDVRGRGLMLGVELVTDRKEKTPAKSETIELFEKLRDLGVLVGKGGLHGNVFRIKPPMCFSKDDADFLVDSMDYAMSRL

SEQ ID NO: 157349 - protein, 391 aa, Zea Mays
MQYLYDEHGKRYLDCFGGIVTVSCGHCHPDIVNAVVEQTKLLQHTTTIYLHHTIVEFAEALTSKMPGNLKVAYFVNSGTEANELAMLMARLYSGNLSMVALRNAYHGGSAGTIGLTGMQTWKYPIPQGEIHHVMNPDPYRGTFGSDAAAYAKEVEEHITYGSSGRVAGFIAETFQGVGGAVELAPGYLKLAYDIVRKAGGVCIADEVQSGFGRTGSHYWGFQTQGVIPDIVTMAKGIGNGLPLGAVVTTPEIASVLAQKIQFNTFGGNPVCSAGGLAVLKVLDKEKRQAHCADVGSHLLERLKSLQEKHEIIGDVRGRGLMLGVELVTDRKEKTPAKSETIELFEKLRDLGVLVGKGGLHGNVFRIKPPMCFSKDDADFLVDSMDYAMSRL

SEQ ID NO: 157350 - protein, 71 aa, Zea Mays
MLWRPNGRGLQSTPLKRSKDQLEYHGVALLFLIPLARNLHSLEPLALTKDVHKESRSKGGISNSHTTQRSQ

SEQ ID NO: 157351 - protein, 230 aa, Zea Mays
MAAPYHQPTSLEEVRTLWIGDLQYWTDENYLYSCFAHTGEVQSVKIIRNKVTSLPEGYGFIEFVSHEAAEKILQTYNGTQMPGTEHTFRLNWASFSSGERRPDPGSDHSIFVGDLAPDVTDYLLQETFRVNYSSVRGAKVVTDPNTGRSKGYGFVKFADENEKNRAMTEMNGVYCSTRPMRISAAIPKKSTGSQLQYSAAKAVYPATAYAMPQLQAVLPDSDPTNTTGIS

SEQ ID NO: 157352 - protein, 454 aa, Zea Mays
MPWPFCTLSSSPAAGAPSAAVKGEEVALDKHLTRCAAAGIAPLRVAVLVSGGVDSSVALRLLHAAGHRCTAFYLKIWFQEDFRNFWSECPWDEDLKYAQAVCDKIDVPLEVVHLSDEYWNHVVSHMINEYRCGRTPNPDVLCNTRIKFGSFLEAIENLGFDYIASGHYAHVVHPSAENTEAPSVLQLSKDKIKDQTYFLSHLSQSQLRRLLFPLGCITKDEVRRLATQMGLPNQGRKDSQGICFLGKVKFSEFVERHIGEKEGIILEAESGDYLGIHRGFWFYTIGQRQGLRLPGGPWYVVEKDVQNNVVFVSRNYYSLDKRRRTFRVGSLNWFDNCGPGNNEQLKCKVRHSPEFHDCTLVKERSEENGDALVVHLAEDDQGLAAGQFAAFYSENVCLGSGIILDSWDKMSFPVCSRALEIAKLADKSSLGKPIRIVNLEHIVKPEQQEEIKVA

SEQ ID NO: 157353 - protein, 294 aa, Zea Mays
MVRVVVSTLPALRPLLRRGSLLNHKPLPRSRLQPWPFCTLSSSPAAGAPSAAVKGEEVALDKHLTRCAAAGIAPLRVAVLVSGGVDSSVALRLLHAAGHRCTAFYLKIWFQEDFRNFWSECPWDEDLKYAQAVCDKIDVPLEVVHLSDEYWNHVVSHMINEYRCGRTPNPDVLCNTRIKFGSFLEAIENLGFDYIASGHYAHVVHPSAENTEAPSVLQLSKDKIKDQTYFLSHLSQSQLRRLLFPLGCITKDEVRRLATQMGLPNQGRKDSQGICFLGKEKRKESYWKLSPEIT

SEQ ID NO: 157354 - protein, 285 aa, Zea Mays
MVRVVVSTLPALRPLLRRGSLLNHKPLPRSRLQPWPFCTLSSSPAAGAPSAAVKGEEVALDKHLTRCAAAGIAPLRVAVLVSGGVDSSVALRLLHAAGHRCTAFYLKIWFQEDFRNFWSECPWDEDLKYAQAVCDKIDVPLEVVHLSDEYWNHVYRCGRTPNPDVLCNTRIKFGSFLEAIENLGFDYIASGHYAHVVHPSAENTEAPSVLQLSKDKIKDQTYFLSHLSQSQLRRLLFPLGCITKDEVRRLATQMGLPNQGRKDSQGICFLGKVYTVPFFLRDQCF

SEQ ID NO: 157355 - protein, 271 aa, Zea Mays
MRAAAAATSTAAALLAPGLKLCAGGARARVSCPSRSRLPLHRIAAMASAPNPSFRPEEARSPPALELPTPPLSKFKVALCQLSVTADKNRNIAHARAAIEKAASEGAKLVLLPEIWNGPYSNDSFPEYAEDIEAGGDAAPSFSMMSEVARILQVTLVGGSIAERSGNNLYNTCCIFGSDGKLKGKHRKIHLFDIDIPGKITFKESKTLTAGQNPTVVDTDVGRIGIGICYDIRFQELAMLYAARGAHLLCYPGAFNMTTGPLHWELLQRAR

SEQ ID NO: 157356 - protein, 324 aa, Zea Mays
MRAAAAATSTAAALLAPGLKLCAGGARARVSCPSRSRLPLHRIAAMASAPNPSFRPEEARSPPALELPTPPLSKFKVALCQLSVTADKNRNIAHARAAIEKAASEGAKLVLLPEIWNGPYSNDSFPEYAEDIEAGGDAAPSFSMMSEVARILQVTLVGGSIAERSGNNLYNTCCIFGSDGKLKGKHRKIHLFDIDIPGKITFKESKTLTAGQNPTVVDTDVGRIGIGICYDIRFQELAMLYAARGAHLLCYPGAFNMTTGPLHWELLQRARATDNQLFVATCGPARDTSAGYVAWGHSTLVGPTDTMHHHKTNSVPVVVFANNL

SEQ ID NO: 157357 - protein, 63 aa, Zea Mays
MWFQWASEAVHRAIVKVVSWQNNFVKRVWSLDRQNESLSILILIEWIRFMYLRVYCVKNIIYK

SEQ ID NO: 157358 - protein, 147 aa, Zea Mays
MSNTSTTSSLTSSFSPQITMADNFSSQPTPPMVPLHHAVTIRLNKSNNLLWRVQLLPYLRSCRLIGFLDGTKPAPARMIAASTAPDAAQVINPAYIKWYDQDQQLLSGLLSSMSEDSLRDVVMATTAKEVWDSLQTQFASSTRACIL

SEQ ID NO: 157359 - protein, 287 aa, Zea Mays
MLREHYHGGEQVQVGNGASLQILNTGHSTINSVDRPLALRNVLHVPDISKHLLSVHKFTQDNDVFFEFHPTYFPIKDRQTKRRLLEGQSKNGLYPLPSSAVNHLKHALLSRPITRVDWHARLGHPSSQVVNSILHVNNISCPKQLESSVCNACQLAKSHQLPYNSSVHRSTCPLELIFSDVWGLLQHLLEGINTTLVSSMILANFRGFISCEIVLKLRVYFYNFMPMPNVFWALRLNVSNLIGVVNIKKSTIPFFDLSALLIEYHVLTPTNKMDPPNANIVISLKLV

SEQ ID NO: 157360 - protein, 301 aa, Zea Mays
MGAFMRKMKAAFPAMEQVCVWHALCRYWGGLRPGTPGLPPTKVVAPKFSSGLQRTMEDLAVDKIVSNGVGLIEHKRAQPSPPWRVGPSCSLLVDLSRRSSTASRPARSSPSSLPQLAESLCFLPWRGVPCRLLAAPISSARPRAHLPSSDARACSLCLSVSPWSICTGRPPPKSGQTCVTSLLGPPWPPRRRSSLVMPLPCVIVVARVCVFSWWCSTSGSGSHVRGRRACSPSKLPCWLRPARLCVARIAFCCSHARKALCSSTLQLVARPAPCCRELQPGFRFVAQLGPTSPMTVCSSSP

SEQ ID NO: 157361 - protein, 283 aa, Zea Mays
MMGDGQSTLFWHDKWLLGQRIADLAPHVFSLVPKRLVKRRTVADALCSSSWIGDLRRVVTWEVIVDFIILADVVADVDLQPGVPDKHYWRFFSNGIYPAKSAHEIMFCGSTSLAGFERVWTTWTPPKCQFFLWLVLHNKRWTAIWLAKKGLPHPSTCPLCDQKGESIHHLLVSCVFARQFWFLLLQHVGLAALSPGMEDISFEAWWSRSAEVVPKDLIDGFNSLVVLGAWNIWRHRNDCVFNGAQPSIARLLTSAGDEFNMWCFAGAKGLTRLSDLAFVFNPG

SEQ ID NO: 157362 - protein, 108 aa, Zea Mays
MVAVVAMVWRRTRDQRPPRRAADRRRRGWWVRCWLLRAWRRVGEGRRRTWGVVVGNGGADEGWEGAREVVDWWLTSAGILTREGRGEGRTMVTCLQAEARRTEELQSM

SEQ ID NO: 157363 - protein, 101 aa, Zea Mays
MPYCYQLGIMLRIRRSRSAQQCVGHACSSLSSHRMQTLSMPHAEFAPLVHHVASELQMVFVRCNALALRSFLQMVFVLCNALAVRAVLSAACMCSTFGQLS

SEQ ID NO: 157364 - protein, 489 aa, Zea Mays
MSIEERKISMISKSTALNPNAEEFVPSSLRSFSDSSKKSDATMIVSGSSKESSTDKPESILRSNSDEEAHQYWQQQLPDDITPDFKVLGQDESPGPDSLSLTGLSINDGIDTSIFSPNQTLGVQHHASPFIRDKLNTRPKINLSGPTYMDERSQAAILSPTAGSMSPNAAPWVKNLRNGGHYNTSRRDATASHYNGDSSIGASLHNLTDAYHGSRRSLSTTMDIMSQLESKVDGRLNQNLRSLSFGNSSPPSPASYAQNDDIVSPSAGREHISLDVPRGRYKTTSLPVPGLGSSRGSQVLGGPYNGNHDMISTNTLQNMAGIQTGAAWLETDAAANTYLESKDEVHDFASLRHAVLEQDRQAFLMGNNPLAKDLTLKELYSIQSRLAQEKARETTYRQRFQIPELQGLIQEQNPPIDLCGLHISEAMHVLNYELNNRRKIVRSTGRRLQAMIISSARTPARLTAAVEQYLMEHGLQYTQAQPGLFRVLL

SEQ ID NO: 157365 - protein, 365 aa, Zea Mays
MSIEERKISMISKSTALNPNAEEFVPSSLRSFSDSSKKSDATMIVSGSSKESSTDKPESILRSNSDEEAHQYWQQQLPDDITPDFKVLGQDESPGPDSLSLTGLSINDGIDTSIFSPNQTLGVQHHASPFIRDKLNTRPKINLSGPTYMDERSQAAILSPTAGSMSPNAAPWVKNLRNGGHYNTSRRDATASHYNGDSSIGASLHNLTDAYHGSRRSLSTTMDIMSQLESKVDGRLNQNLRSLSFGNSSPPSPASYAQNGLGNYSNEAFGLPNSPYRSHSAILADDIVSPSAGREHISLDVPRGRYKTTSLPVPGLGSSRGSQVLGGPYNGNHDMISTNTLQNMAGIQTGAAWLETDAAGSAREL

SEQ ID NO: 157366 - protein, 125 aa, Zea Mays
MGNNPLAKDLTLKELYSIQSRLAQEKARETTYRQRFQIPELQGLIQEQNPPIDLCGLHISEAMHVLNYELNNRRKIVRSTGRRLQAMIISSARTPARLTAAVEQYLMEHGLQYTQAQPGLFRVLL

SEQ ID NO: 157367 - protein, 98 aa, Zea Mays
MVVFDDFPAEKAEELMQLAGSGNAAQDALGQPSLTDMPLARKVSLKRFLEKRKNRLTAADPYPAAAATAAASESSTKPPAVKDEGAPWVGVNSALSLS

SEQ ID NO: 157368 - protein, 458 aa, Zea Mays
MQQDNPMKLLLRKACSRNCLSDLLHCQRHWRCRCPYQLSPARGMTRGRSVKDRSKKKRVHALEVATERWKVLSKVLAVVDALKKEDEHVTPLKRLEILRPQLGLVKPHKVAHFVRRSPHLFEVCRDSRGVMWAGLSPQAEALVEEEARLLEDHSPVAVQYVTRMLMMSVDRRLPVDKIAHFRRDMGLPHDFRTRWVHMFPEHFRLVRLEDGEYLELISWDPTWAVTELEKKASVSTGDAIASSPGELSLPFPMKFPPNFTTYYRFRGKAHHYVKMGNTDQFQKVTYLSPYAEAKGLTPGSPEFDKRAVAVMHEILSFMLEKRLVTDHLTHFRREFVMPQKLMRLLLKHYGIFYVSERGKRLSVFLTEAYDGNELIEKCPLVRWREKLLQLTGYRGRLKNLGKVDVCSDSDEYLLGHDDDDDVLDVESENPDDILDDCSISDDSEMDLGDADADEFCRD

SEQ ID NO: 157369 - protein, 289 aa, Zea Mays
MASLTPGILLKVLKHINSDVKVCGEYRSILLQVISIVPAITGSELWPDHGFFIKVSDSSHSTYVSLSKEDNELILSNKLQLGQFIYVEKVQSSIPVPVLVGVRPVPGRNPCIGNPKDLMQMSTPSGVMEALDHQRTTSKSADLSESEKENLQRKVVIKEQKTVVASRYMLGVSSNNGKITNLNSSIDSEKSNGGSTISESNKKSVALKVRQEAKPQSRSKCQRRAKRKLLLREDHHQSFIGVRQHQRGLHQQSSVQQQSRMETLVQFLLYLLLKKELVKLSLGTPSQQA

SEQ ID NO: 157370 - protein, 584 aa, Zea Mays
MASLTPGILLKVLKHINSDVKVCGEYRSILLQVISIVPAITGSELWPDHGFFIKVSDSSHSTYVSLSKEDNELILSNKLQLGQFIYVEKVQSSIPVPVLVGVRPVPGRNPCIGNPKDLMQMSTPSGVMEALDHQRTTSKSADLSESEKENLQRKVVIKEQKTVVASRYMLGVSSNNGKITNLNSSIDSEKSNGGSTISESNKKSVALKVRQEAKPQGKKNPMLDDYFQERSNNTSPSNAKLVSTKQEISKDTRKNIGTSPSPNGSAVVKKQMPKESKKEVATERRSPPKLHRSSPTPARTSPTKLSPAAKQNGNSGPVSSVSTVKKRVSETISWDSLPTSLINSGKAVVRRKNIALIVAAEAQREAAAAAYLVKGLGIFSEIRESSEVDPQAAITKFFELHRLIVQQSAVWKAYTPEPSKESRPEKEKPSRKASASHHHQNKAGTRDTAKNPEGAQGSEKTEWAREDGFKEICRSWIVLRKESRSWFLSFLEDALESGFMSEGQTTKNTRERVRGQPKPKGGDGRIAVLLSQLKETSNWLDQLLQDEADTSADGLAETVDQLKQKVYKCLLGTVETAASALGGR

SEQ ID NO: 157371 - protein, 452 aa, Zea Mays
MEAMTGGKFLQKFRLYETRSKFYLIGRDKSRIHWRVLKIDRSEFTELGVEEDPTIYTENECQELLRRIHEGNRLTGGLKFVTKCYGIVGFVKFLGPYYMVIITRRRKIGTICGHEIYSVGKSEMIAIPSVTVWPNMAYSRDENRYKHLLCSVDLSKDFFFSYSYNIMHSLQKNITEKNIGQVYETMCVWNEFMTRAIRDHLMNTCWTVALVHGFFKQSRFSVSGKDFWLTLIARRSRHFAGTRFLKRGVNGKGRVANDVETEQIVFEDTSGGIPTQMASVVQHRGSIPLVWFQETSRLNIRPDIILKPDLDYKATRLHFENLALRYGNPIIILNLIKTHEKKPRESLLCAEFAKAIHYINKSLSDDKCLKFLHMDLSNLFRRKGTNVLALLSKVASDVLDLTEFLHCEISTSTKSDDISSEEKTVAKPRDDRSSRDQTECAAKASTSCTGTC

SEQ ID NO: 157372 - protein, 106 aa, Zea Mays
MNPLSSSWSRMTHENFVDMLGDRIKRNLRIVSYEFATMGSLHDVLHGRKVFQGARPGPTFGWMQRVQIVVDATKGLDIFMGKFISPLSIGIIEQLISSCLKASRQR

SEQ ID NO: 157373 - protein, 101 aa, Zea Mays
MPVCCHLTSTVACPSTRIRTPSFRDTDAAPKEGASRGTQTSTSSSSSMADRCESHVKATTNKIDGVTKGLRDSATAKVEPHDDAPPIDVDVLSLDDLIKNC

SEQ ID NO: 157374 - protein, 91 aa, Zea Mays
MRHPRRVPRGGPRPPPLRRLQWLVVMWRLCCCNCQVDETDRCESHVKATTNKIDGVTKGLRDSATAKVEPHDDAPPIDVDVLSLDDLIKNC

SEQ ID NO: 157375 - protein, 330 aa, Zea Mays
MGSSSGAPLLVAHPSRGKEDLGDQRRLRWCCGVSSEGRWAEATAEAGRLAALAAPMIAVALLQLMMQVISTIMVGHLGEVPLAGAAIAGSLTNVSGFSVLMGLACGLETICGQAFGAEQYHKVALYTYRSIVVLLIASVPMAILWVFLPDVLPLIGQDPQIAIEAGRYALWLIPGLFAFSVAQCLSKFLQSQSLIFPLVLSSLTTLAVFIPLCWFMVYKVGMGNAGAAFAVSICDWVEVTVLGLYIKFSPSCEKTRAPFTWEAFQGIGSFMRLAVPSALMVCLEWWSYELLVLLSGMLPNAALETSVLSICISTVILVYNLPYGIGTAAR

SEQ ID NO: 157376 - protein, 206 aa, Zea Mays
MGSSSGAPLLVAHPSRGKEDLGDQRRLRWCCGVSSEGRWAEATAEAGRLAALAAPMIAVALLQLMMQVISTIMVGHLGEVPLAGAAIAGSLTNVSGFSVLMGLACGLETICGQAFGAEQYHKSASVTGLKSRFLVFILSSHLLVRKLVLHSRGKLFKGLAVSCGWLYLRLLWFVLNGGHMSCLFCFLGCYQMQHLKLLCSLYVSLQ

SEQ ID NO: 157377 - protein, 88 aa, Zea Mays
MVFFCFSTYMHGQVASSSLKKLEMLNSSHWLMHGSIGPACSLSSRSYDDQILFFLRRIRMCWENPQPLASGTTKSGHRHGQARAKIIR

SEQ ID NO: 157378 - protein, 117 aa, Zea Mays
MKDDNIERIYETLKECAVISKSAGGIGVSVHNIRATESYIRGTNGTSNGIVLMLCVFNDTARYVDQGGGKRKVHFAVYLEPWHADIFEFLDLRKNPGKVLKKSSDEEREQAEEMMKY

SEQ ID NO: 157379 - protein, 85 aa, Zea Mays
MMRRSPTSCGSPAEETWRSWDHYVLCVCGTSVNVASGLGLSSVYPEKEGISREETNAGLEQCPLVRCSSSCTAGEGRGMPCAHLY

SEQ ID NO: 157380 - protein, 607 aa, Zea Mays
MARRRMRRGGGGGGGGGGGVVDVVRVRRLLLLSLTCCSSIWPGGRIFAAADTDPNDLNVLNTLFTSLNSPGQLTGWQANGGDPCGQSWKGITCSGSGVTKIQLPNLSLTGNLAYNMNNLGSLVELDMSQNNLGGGGQIQYNLPNMKLEKLNLAGNQFGGNLPYSISTMPNLKYLNLNHNQLQGNISDVFSNLYSLSELDLSFNSLTGDLPQSFTGLSSLKKVYLQNNQFTGNINVLANLPLETLNVANNHFTGWIPSQLKKINSLQTDGNSWSTGPAPPPPPYTAPPPPPNHWNADGSSSSSSSGGRSGIGGGGVAGIIISLLVVGSVVAFLVIKRRKRKAAMKEHFEQHQPFTSFPSNEVKDMKPVYEATTVDIESLASPASVNLKPPPKIERNKSFDDDDDFSNKLVAKKSNITPINATVYSVADLQMATDSFSFDNLVGEGTFGRVYRAQFNDGKVLAIKKLDSTVMPFQSSDDFAELVSNISKLHHPNLNELVGYCMEHGQHLLVYDFHRNGSLHDLLHLSDEYSKPLSWNTRIKIALGSARALEYLHEICSPSIIHKNFKSSNILLDSEFNPHLSDAGLASFIPDAEFQQNKVPDTLPQKWT

SEQ ID NO: 157381 - protein, 553 aa, Zea Mays
MARRRMRRGGGGGGGGGGGVVDVVRVRRLLLLSLTCCSSIWPGGRIFAAADTDPNDLNVLNTLFTSLNSPGQLTGWQANGGDPCGQSWKGITCSGSGVTKIQLPNLSLTGNLAYNMNNLGSLVELDMSQNNLGGGGQIQYNLPNMKLEKLNLAGNQFGGNLPYSISTMPNLKYLNLNHNQLQGNISDVFSNLYSLSELDLSFNSLTGDLPQSFTGLSSLKKVYLQNNQFTGNINVLANLPLETLNVANNHFTGWIPSQLKKINSLQTDGNSWSTGPAPPPPPYTAPPPPPNHWNADGSSSSSSSGGRSGIGGGGVAGIIISLLVVGSVVAFLVIKRRKRKAAMKEHFEQHQPFTSFPSNEVKDMKPVYEATTVDIESLASPASVNLKPPPKIERNKSFDDDDDFSNKLVAKKSNITPINATVYSVADLQMATDSFSFDNLVGEGTFGRVYRAQFNDGKVLAIKKLDSTVMPFQSSDDFAELVSNISKLHHPNLNELVGYCMEHGQHLLVYDFHRNGSLHDLLHLSDEYSKPLSWNTRIKIALGSARALECSLT

SEQ ID NO: 157382 - protein, 292 aa, Zea Mays
MPNLKYLNLNHNQLQGNISDVFSNLYSLSELDLSFNSLTGDLPQSFTGLSSLKKVYLQNNQFTGNINVLANLPLETLNVANNHFTGWIPSQLKKINSLQTDGNSWSTGPAPPPPPYTAPPPPPNHWNADGSSSSSSSGGRSGIGGGGVAGIIISLLVVGSVVAFLVIKRRKRKAAMKEHFEQHQPFTSFPSNEVKDMKPVYEATTVDIESLASPASVNLKPPPKIERNKSFDDDDDFSNKLVAKKSNITPINATVYSVADLQMATDSFSFDNLVGEGTFGRVYRAQFNDGKD

SEQ ID NO: 157383 - protein, 267 aa, Zea Mays
MPFQSSDDFAELVSNISKLHHPNLNELVGYCMEHGQHLLVYDFHRNGSLHDLLHLSDEYSKPLSWNTRIKIALGSARALEYLHEICSPSIIHKNFKSSNILLDSEFNPHLSDAGLASFIPDAEFQAAEQSAGYTAPEVDMTGQYTLKSDVYSFGVVMLELLTGRRPFDSSRPRSEQSLVRWATPQLHDIDALDRMVDPALKGLYPAKSLSRFADVLALCVQPEPEFRPPMSEVVQALVRLVQRANMTKRMLDGDTSRRPDDLDQDFI

SEQ ID NO: 157384 - protein, 424 aa, Zea Mays
MKMEIGTRLGFISFNLFGELRIEDRLQWKEHSMIFAMPNKPGEFSRFDFPETLPAPINGIWAILRNNEMLTWPEKVKFAIGLLPAMVGGQPYVEAQDGLTVSEWMKKQGVPDRVNDEVFIAMSKALNFINPDELSMQCILIALNRFLQEKHGSKMAFLDGNPPERLCMPIVDHIRSRGGEVRLNSRIKKIELNPDGTVKHFALSDGTQITGDAYVCATPVDIFKLLVPQEWSEITYFKKLEKLVGVPVINVHIWFDRKLNNTYDHLLFSRSSLLSVYADMSVTCKEYYDPNRSMLELVFAPADEWIGRSDTEIIDATMEELAKLFPDEIAADQSKAKILKYHIVKTPRSVYKTVPNCEPCRPLQRSPIEGFYLAGDYTKQKYLASMEGAVLSGKLCAQSIVQDYSRLTLRSQKSLQSGEVPVPS

SEQ ID NO: 157385 - protein, 323 aa, Zea Mays
MDEKAAQGVPDRVNDEVFIAMSKALNFINPDELSMQCILIALNRFLQEKHGSKMAFLDGNPPERLCMPIVDHIRSRGGEVRLNSRIKKIELNPDGTVKHFALSDGTQITGDAYVCATPVDIFKLLVPQEWSEITYFKKLEKLVGVPVINVHIWFDRKLNNTYDHLLFSRSSLLSVYADMSVTCKEYYDPNRSMLELVFAPADEWIGRSDTEIIDATMEELAKLFPDEIAADQSKAKILKYHIVKTPRSVYKTVPNCEPCRPLQRSPIEGFYLAGDYTKQKYLASMEGAVLSGKLCAQSIVQDYSRLTLRSQKSLQSGEVPVPS

SEQ ID NO: 157386 - protein, 569 aa, Zea Mays
MDTGCLSSMNITGASQTRSFAGQLPPQRCFASSHYTSFAVKKLVSRNKGRRSHRRHPALQVVCKDFPRPPLESTINYLEAGQLSSFFRNSERPSKPLQVVVAGAGLAGLSTAKYLADAGHKPILLEARDVLGGKVAAWKDEDGDWYETGLHIFSYPNIQNLFGELRIEDRLQWKEHSMIFAMPNKPGEFSRFDFPETLPAPINGIWAILRNNEMLTWPEKVKFAIGLLPAMVGGQPYVEAQDGLTVSEWMKKQGVPDRVNDEVFIAMSKALNFINPDELSMQCILIALNRFLQEKHGSKMAFLDGNPPERLCMPIVDHIRSRGGEVRLNSRIKKIELNPDGTVKHFALSDGTQITGDAYVCATPVDIFKLLVPQEWSEITYFKKLEKLVGVPVINVHIWFDRKLNNTYDHLLFSRSSLLSVYADMSVTCKEYYDPNRSMLELVFAPADEWIGRSDTEIIDATMEELAKLFPDEIAADQSKAKILKYHIVKTPRSVYKTVPNCEPCRPLQRSPIEGFYLAGDYTKQKYLASMEGAVLSGKLCAQSIVQDYSRLTLRSQKSLQSGEVPVPS

SEQ ID NO: 157387 - protein, 392 aa, Zea Mays
MIFAMPNKPGEFSRFDFPETLPAPINGIWAILRNNEMLTWPEKVKFAIGLLPAMVGGQPYVEAQDGLTVSEWMKKQGVPDRVNDEVFIAMSKALNFINPDELSMQCILIALNRFLQEKHGSKMAFLDGNPPERLCMPIVDHIRSRGGEVRLNSRIKKIELNPDGTVKHFALSDGTQITGDAYVCATPVDIFKLLVPQEWSEITYFKKLEKLVGVPVINVHIWFDRKLNNTYDHLLFSRSSLLSVYADMSVTCKEYYDPNRSMLELVFAPADEWIGRSDTEIIDATMEELAKLFPDEIAADQSKAKILKYHIVKTPRSVYKTVPNCEPCRPLQRSPIEGFYLAGDYTKQKYLASMEGAVLSGKLCAQSIVQDYSRLTLRSQKSLQSGEVPVPS

SEQ ID NO: 157388 - protein, 569 aa, Zea Mays
MDTGCLSSMNITGASQTRSFAGQLPPQRCFASSHYTSFAVKKLVSRNKGRRSHRRHPALQVVCKDFPRPPLESTINYLEAGQLSSFFRNSERPSKPLQVVVAGAGLAGLSTAKYLADAGHKPILLEARDVLGGKVAAWKDEDGDWYETGLHIFFGAYPNIQNLFGELRIEDRLQWKEHSMIFAMPNKPGEFSRFDFPETLPAPINGIWAILRNNEMLTWPEKVKFAIGLLPAMVGGQPYVEAQDGLTVSEWMKKQGVPDRVNDEVFIAMSKALNFINPDELSMQCILIALNRFLQHGSKMAFLDGNPPERLCMPIVDHIRSRGGEVRLNSRIKKIELNPDGTVKHFALSDGTQITGDAYVCATPVDIFKLLVPQEWSEITYFKKLEKLVGVPVINVHIWFDRKLNNTYDHLLFSRSSLLSVYADMSVTCKEYYDPNRSMLELVFAPADEWIGRSDTEIIDATMEELAKLFPDEIAADQSKAKILKYHIVKTPRSVYKTVPNCEPCRPLQRSPIEGFYLAGDYTKQKYLASMEGAVLSGKLCAQSIVQDYSRLTLRSQKSLQSGEVPVPS

SEQ ID NO: 157389 - protein, 450 aa, Zea Mays
MDTGCLSSMNITGASQTRSFAGQLPPQRCFASSHYTSFAVKKLVSRNKGRRSHRRHPALQVVCKDFPRPPLESTINYLEAGQLSSFFRNSERPSKPLQVVVAGAGLAGLSTAKYLADAGHKPILLEARDVLGGKVAAWKDEDGDWYETGLHIFFGAYPNIQNLFGELRIEDRLQWKEHSMIFAMPNKPGEFSRFDFPETLPAPINGIWAILRNNEMLTWPEKVKFAIGLLPAMVGGQPYVEAQDGLTVSEWMKKQGVPDRVNDEVFIAMSKALNFINPDELSMQCILIALNRFLQEKHGSKMAFLDGNPPERLCMPIVDHIRSRGGEVRLNSRIKKIELNPDGTVKHFALSDGTQITGDAYVCATPVDIFKLLVPQEWSEITYFKKLEKLVGVPVINVHIWFDRKLNNTYDHLLFSRSSLLSVYADMSVTCKTNGLVEVTLKSSMQLWKS

SEQ ID NO: 157390 - protein, 1073 aa, Zea Mays
MAIHRSNLSRRFKISRIWHQSEQYRAKSFASSSPTSETTPLKVLTGLLRDAYSLKCLRELHAHLAVAGAIQDTFVVTGLVESIKFVELWLEKMPDKKIEGADSSHIVSSTKSLESSVGPNLIESTDGDYCNNLHKTAVANFVASMLQEHPMSLILAENKSNLQEISVEQKIPIFVSINLSPKVDGSELPCPIEVHDGITSSSSKTNEPMEAQDYSNTMKSNTASCMFEASKRQECPISLILADKKGSLQEVSVEQNVPCGDYVALSQKADGSELTSTREAPEGFLTSSSKVYVLKEAQDGSITTEASKVNVCAASHSMLRLIEGVQDEASCIDSDKVTCETPPAILKKLKEDKPLVVHRFHKHQMSLGDTHQKVPAPVSRSNTSKYLRMDKNIVDTTTPIESVKAVASKFGGSMNWKTRKTQTAQVTEKCFPFILFVYCNCYYCVTYSLCFYKQVSDRIVLELDKLKNEISECKHQAEAAEAAKLSVLKELERTKKLIDEMKHVLEREQAEEVDAKDDLELFQIILQAMEGVDCNDSVVVREKLNNIQERHKALDAKVISVKYVLGKVQEDYDSLLIGTDISINKAQAAFTMSKGAEKEVEELTIELQRLKEVFDLANAKFQDVEERKNTLMARDEDRLAWEEDLRQSDKELNQISMDLCSFQELQSKHDTSATMLLNLKNEVANYLEAKRIEEAREQESGTHKPVQEVIIMLKSELVEQRKSIARVTDELCVLKATAELLKSQLKKEKAALAAAQQMEVMASMSTQSLKMDIKLSQQELEALHAKAKECRDRSGKALQDASHEADEAKVIATKAQGELKKTEEEVAQAKAALSTVESKLEAVLRDIQAAKASERLALDTLTTTTLEEHSKVGARYSETVTLDLDEYTSLVQRSRQAEEAAHEKTTAASTAEVEAAKESAARTISRLNEILQALEEQKQALAAATERAGRASEGKLAMEQELRQRREEENGKRRRMASEAPKPVTGPRSAAEIAGRVDMTLTCTGKGDSSCPAASVHPVSDASGTGTGRSSPSDAALPVPVPAKTKKAKKLPFFTRVVMFLGGRRRRRLRAAR

SEQ ID NO: 157391 - protein, 1127 aa, Zea Mays
MLRRVLLLRHFQHHRHRLRLLSTTPTPHASPSTSASSLPIAATPAAPHHLAPHRGGARRLAPLLAFSSLSLAAAGAVYLTTDNLEDTLQRSRDSAGRVVERMQHTWTAARVLWKSLLSVLSSANHEVRSGFELRVAALLADIAAASAARRTAIVSAGGGAVLDWLLESVVRGATQAEAARALAHLLADPWVAPAVLGRPHAVPCLLHFIFSFQPTRGKKKSSFDGLDHSKGRSMLVAALMDIITSNDNADYSSFKPLLPADADTRDIATAIEVIEQGGMHFDDHEDNSSNDGDSGLKGIGIKVLGGTTVLGFSRGNNSLELDNSDYDTMDVSYDSSRSVVEQSTAESPLLRKLSSSAVPGLWDDLQREHVAVPFATWALANWAIASDLNRTLVQELDSDGHAVATALKAAERTVKWHGTLVARALLEDQNLALAPSVPDWCSSLLSTASQATANDDMPLGQLSLSTFLLSMMRCNESKFVIRQKGLHPLRSIAKKIENQNGQNSMKESIASALSLLYAGEVPLSLEESQRWSGILLRWLFDKSVSNKTHLTAMKILSCILEDYGPASVPISQGWLALVLSEILGDNKAQGSKGTTQPEPEKVKNPVDYHNASTATQVLNQLGSAVVKLASTQSNCEPGSDDKDKGPLSDFLSLEPFATVLKNMNKKNLPKFDAADSASATLKGIKALAELCSEDGACQKRIADLGALPLLRHILLGDDYEKLAAIEAYDASRTREVQDKNVAPNVSSTDATTDPSSVRVPPAAHIRRHAGRLLTILSLLPNSKKEIISDAVWCKWLEDCASGRIPCNDIKLKSYCRLTLLNILCSESPNTRKASDEYPDSESEYKRNCPQFGDALFLLNPELPLEVHVDNSGFGILRVSRDNCKEDGGIGGSGSETVNSVDDAEAASKSVPLMDVVFVHGLRGGPFNSWRIADDKSSTTKAGLVESIDEDAGKEGTCWPREWLAADFPQARFFTVKYKTNLTQWTGASLPLQEVSSMLLRKLVAAGIGSRPVIFVTHSMGGLVVKQLLYQAKLNNYDKFLNNTIGLVFYSCPHFGSKLADMPWRMGLVFRPAPSVWSSIVMVARSVRDWREISMDRNAGRGPVPTAEQEEGFSLLILACFISHPLIT

SEQ ID NO: 157392 - protein, 1021 aa, Zea Mays
MLRRVLLLRHFQHHRHRLRLLSTTPTPHASPSTSASSLPIAATPAAPHHLAPHRGGARRLAPLLAFSSLSLAAAGAVYLTTDNLEDTLQRSRDSAGRVVERMQHTWTAARVLWKSLLSVLSSANHEVRSGFELRVAALLADIAAASAARRTAIVSAGGGAVLDWLLESVVRGATQAEAARALAHLLADPWVAPAVLGRPHAVPCLLHFIFSFQPTRGKKKSSFDGLDHSKGRSMLVAALMDIITSNDNADYSSFKPLLPADADTRDIATAIEVIEQGGMHFDDHEDNSSNDGDSGLKGIGIKVLGGTTVLGFSRGNNSLELDNSDYDTMDVSYDSSRSVVEQSTAESPLLRKLSSSAVPGLWDDLQREHVAVPFATWALANWAIASDLNRTLVQELDSDGHAVATALKAAERTVKWHGTLVARALLEDQNLALAPSVPDWCSSLLSTASQATANDDMPLGQLSLSTFLLSMMRCNESKFVIRQKGLHPLRSIAKKIENQNGQNSMKESIASALSLLYAGEVPLSLEESQRWSGILLRWLFDKSVSNKTHLTAMKILSCILEDYGPASVPISQGWLALVLSEILGDNKAQGSKGTTQPEPEKVKNPVDYHNASTATQVLNQLGSAVVKLASTQSNCEPGSDDKDKGPLSDFLSLEPFATVLKNMNKKNLPKFDAADSASATLKGIKALAELCSEDGACQKRIADLGALPLLRHILLGDDYEKLAAIEAYDASRTREVQDKNVAPNVSSTDATTDPSSVRVPPAAHIRRHAGRLLTILSLLPNSKKEIISDAVWCKWLEDCASGRIPCNDIKLKSYCRLTLLNILCSESPNTRKASDEYPDSESEYKRNCPQFGDALFLLNPELPLEVHVDNSGFGILRVSRDNCKEDGGIGGSGSETVNSVDDAEAASKSVPLMDVVFVHGLRGGPFNSWRIADDKSSTTKAGLVESIDEDAGKEGTCWPREWLAADFPQARFFTVKYKTNLTQWTGASLPLQEVSSMLLRKLVAAGIGSRPVIFVTHRLGS

SEQ ID NO: 157393 - protein, 1154 aa, Zea Mays
MLRRVLLLRHFQHHRHRLRLLSTTPTPHASPSTSASSLPIAATPAAPHHLAPHRGGARRLAPLLAFSSLSLAAAGAVYLTTDNLEDTLQRSRDSAGRVVERMQHTWTAARVLWKSLLSVLSSANHEVRSGFELRVAALLADIAAASAARRTAIVSAGGGAVLDWLLESVVRGATQAEAARALAHLLADPWVAPAVLGRPHAVPCLLHFIFSFQPTRGKKKSSFDGLDHSKGRSMLVAALMDIITSNDNADYSSFKPLLPADADTRDIATAIEVIEQGGMHFDDHEDNSSNDGDSGLKGIGIKVLGGTTVLGFSRGNNSLELDNSDYDTMDVSYDSSRSVVEQSTAESPLLRKLSSSAVPGLWDDLQREHVAVPFATWALANWAIASDLNRTLVQELDSDGHAVATALKAAERTVKWHGTLVARALLEDQNLALAPSVPDWCSSLLSTASQATANDDMPLGQLSLSTFLLSMMRCNESKFVIRQKGLHPLRSIAKKIENQNGQNSMKESIASALSLLYAGEVPLSLEESQRWSGILLRWLFDKSVSNKTHLTAMKILSCILEDYGPASVPISQGWLALVLSEILGDNKAQGSKGTTQPEPEKVKNPVDYHNASTATQVLNQLGSAVVKLASTQSNCEPGSDDKDKGPLSDFLSLEPFATVLKNMNKKNLPKFDAADSASATLKGIKALAELCSEDGACQKRIADLGALPLLRHILLGDDYEKLAAIEAYDASRTREVQDKNVAPNVSSTDATTDPSSVRVPPAAHIRRHAGRLLTILSLLPNSKKEIISDAVWCKWLEDCASGRIPCNDIKLKSYCRLTLLNILCSESPNTRKASDEYPDSESEYKRNCPQFGDALFLLNPELPLEVHVDNSGFGILRVSRDNCKEDGGIGGSGSETVNSVDDAEAASKSVPLMDVVFVHGLRGGPFNSWRIADDKSSTTKAGLVESIDEDAGKEGTCWPREWLAADFPQARFFTVKYKTNLTQWTGASLPLQEVSSMLLRKLVAAGIGSRPVIFVTHSMGGLVVKQLLYQAKLNNYDKFLNNTIGLIGELRSGSPRLVELNDFVRQRHNKGFLDVLSFSETQVTPIVEGYGGWALRMEIVPIESAYPGFGELVVLPSTDHINSCKPVNKNDPSYAETLAFLEKNFKLCLERAES

SEQ ID NO: 157394 - protein, 1038 aa, Zea Mays
MLRRVLLLRHFQHHRHRLRLLSTTPTPHASPSTSASSLPIAATPAAPHHLAPHRGGARRLAPLLAFSSLSLAAAGAVYLTTDNLEDTLQRSRDSAGRVVERMQHTWTAARVLWKSLLSVLSSANHEVRSGFELRVAALLADIAAASAARRTAIVSAGGGAVLDWLLESVVRGATQAEAARALAHLLADPWVAPAVLGRPHAVPCLLHFIFSFQPTRGKKKSSFDGLDHSKGRSMLVAALMDIITSNDNADYSSFKPLLPADADTRDIATAIEVIEQGGMHFDDHEDNSSNDGDSGLKGIGIKVLGGTTVLGFSRGNNSLELDNSDYDTMDVSYDSSRSVVEQSTAESPLLRKLSSSAVPGLWDDLQREHVAVPFATWALANWAIASDLNRTLVQELDSDGHAVATALKAAERTVKWHGTLVARALLEDQNLALAPSVPDWCSSLLSTASQATANDDMPLGQLSLSTFLLSMMRCNESKFVIRQKGLHPLRSIAKKIENQNGQNSMKESIASALSLLYAGEVPLSLEESQRWSGILLRWLFDKSVSNKTHLTAMKILSCILEDYGPASVPISQGWLALVLSEILGDNKAQGSKGTTQPEPEKVKNPVDYHNASTATQVLNQLGSAVVKLASTQSNCEPGSDDKDKGPLSDFLSLEPFATVLKNMNKKNLPKFDAADSASATLKGIKALAELCSEDGACQKRIADLGALPLLRHILLGDDYEKLAAIEAYDASRTREVQDKNVAPNVSSTDATTDPSSVRVPPAAHIRRHAGRLLTILSLLPNSKKEIISDAVWCKWLEDCASGRIPCNDIKLKSYCRLTLLNILCSESPNTRKASDEYPDSESEYKRNCPQFGDALFLLNPELPLEVHVDNSGFGILRVSRDNCKEDGGIGGSGSETVNSVDDAEAASKSVPLMDVVFVHGLRGGPFNSWRIADDKSSTTKAGLVESIDEDAGKEGTCWPREWLAADFPQARFFTVKYKTNLTQWTGASLPLQEVSSMLLRKLVAAGIGSRPVIFVTHRFSIVVRILAVNLQTCHGVWV

SEQ ID NO: 157395 - protein, 1180 aa, Zea Mays
MLRRVLLLRHFQHHRHRLRLLSTTPTPHASPSTSASSLPIAATPAAPHHLAPHRGGARRLAPLLAFSSLSLAAAGAVYLTTDNLEDTLQRSRDSAGRVVERMQHTWTAARVLWKSLLSVLSSANHEVRSGFELRVAALLADIAAASAARRTAIVSAGGGAVLDWLLESVVRGATQAEAARALAHLLADPWVAPAVLGRPHAVPCLLHFIFSFQPTRGKKKSSFDGLDHSKGRSMLVAALMDIITSNDNADYSSFKPLLPADADTRDIATAIEVIEQGGMHFDDHEDNSSNDGDSGLKGIGIKVLGGTTVLGFSRGNNSLELDNSDYDTMDVSYDSSRSVVEQSTAESPLLRKLSSSAVPGLWDDLQREHVAVPFATWALANWAIASDLNRTLVQELDSDGHAVATALKAAERTVKWHGTLVARALLEDQNLALAPSVPDWCSSLLSTASQATANDDMPLGQLSLSTFLLSMMRCNESKFVIRQKGLHPLRSIAKKIENQNGQNSMKESIASALSLLYAGEVPLSLEESQRWSGILLRWLFDKSVSNKTHLTAMKILSCILEDYGPASVPISQGWLALVLSEILGDNKAQGSKGTTQPEPEKVKNPVDYHNASTATQVLNQLGSAVVKLASTQSNCEPGSDDKDKGPLSDFLSLEPFATVLKNMNKKNLPKFDAADSASATLKGIKALAELCSEDGACQKRIADLGALPLLRHILLGDDYEKLAAIEAYDASRTREVQDKNVAPNVSSTDATTDPSSVRVPPAAHIRRHAGRLLTILSLLPNSKKEIISDAVWCKWLEDCASGRIPCNDIKLKSYCRLTLLNILCSESPNTRKASDEYPDSESEYKRNCPQFGDALFLLNPELPLEVHVDNSGFGILRVSRDNCKEDGGIGGSGSETVNSVDDAEAASKSVPLMDVVFVHGLRGGPFNSWRIADDKSSTTKAGLVESIDEDAGKEGTCWPREWLAADFPQARFFTVKYKTNLTQWTGASLPLQEVSSMLLRKLVAAGIGSRPVIFVTHSMGGLVVKQLLYQAKLNNYDKFLNNTIGLVFYSCPHFGSKLADMPWRMGLVFRPAPSIGELRSGSPRLVELNDFVRQRHNKGFLDVLSFSEVTPIVEGYGGWALRMEIVPIESAYPGFGELVVLPSTDHINSCKPVNKNDPSYAETLAFLEKNFKLCLERAES

SEQ ID NO: 157396 - protein, 1068 aa, Zea Mays
MLRRVLLLRHFQHHRHRLRLLSTTPTPHASPSTSASSLPIAATPAAPHHLAPHRGGARRLAPLLAFSSLSLAAAGAVYLTTDNLEDTLQRSRDSAGRVVERMQHTWTAARVLWKSLLSVLSSANHEVRSGFELRVAALLADIAAASAARRTAIVSAGGGAVLDWLLESVVRGATQAEAARALAHLLADPWVAPAVLGRPHAVPCLLHFIFSFQPTRGKKKSSFDGLDHSKGRSMLVAALMDIITSNDNADYSSFKPLLPADADTRDIATAIEVIEQGGMHFDDHEDNSSNDGDSGLKGIGIKVLGGTTVLGFSRGNNSLELDNSDYDTMDVSYDSSRSVVEQSTAESPLLRKLSSSAVPGLWDDLQREHVAVPFATWALANWAIASDLNRTLVQELDSDGHAVATALKAAERTVKWHGTLVARALLEDQNLALAPSVPDWCSSLLSTASQATANDDMPLGQLSLSTFLLSMMRCNESKFVIRQKGLHPLRSIAKKIENQNGQNSMKESIASALSLLYAGEVPLSLEESQRWSGILLRWLFDKSVSNKTHLTAMKILSCILEDYGPASVPISQGWLALVLSEILGDNKAQGSKGTTQPEPEKVKNPVDYHNASTATQVLNQLGSAVVKLASTQSNCEPGSDDKDKGPLSDFLSLEPFATVLKNMNKKNLPKFDAADSASATLKGIKALAELCSEDGACQKRIADLGALPLLRHILLGDDYEKLAAIEAYDASRTREVQDKNVAPNVSSTDATTDPSSVRVPPAAHIRRHAGRLLTILSLLPNSKKEIISDAVWCKWLEDCASGRIPCNDIKLKSYCRLTLLNILCSESPNTRKASDEYPDSESEYKRNCPQFGDALFLLNPELPLEVHVDNSGFGILRVSRDNCKEDGGIGGSGSETVNSVDDAEAASKSVPLMDVVFVHGLRGGPFNSWRIADDKSSTTKAGLVESIDEDAGKEGTCWPREWLAADFPQARFFTVKYKTNLTQWTGASLPLQEVSSMLLRKLVAAGIGSRPVIFVTHSMGGLVVKQLLYQAKLNNYDKFLNNTIGLHRFSIVVRILAVNLQTCHGVWV

SEQ ID NO: 157397 - protein, 917 aa, Zea Mays
MPSPLHLLIPAHARQEDHSKGRSMLVAALMDIITSNDNADYSSFKPLLPADADTRDIATAIEVIEQGGMHFDDHEDNSSNDGDSGLKGIGIKVLGGTTVLGFSRGNNSLELDNSDYDTMDVSYDSSRSVVEQSTAESPLLRKLSSSAVPGLWDDLQREHVAVPFATWALANWAIASDLNRTLVQELDSDGHAVATALKAAERTVKWHGTLVARALLEDQNLALAPSVPDWCSSLLSTASQATANDDMPLGQLSLSTFLLSMMRCNESKFVIRQKGLHPLRSIAKKIENQNGQNSMKESIASALSLLYAGEVPLSLEESQRWSGILLRWLFDKSVSNKTHLTAMKILSCILEDYGPASVPISQGWLALVLSEILGDNKAQGSKGTTQPEPEKVKNPVDYHNASTATQVLNQLGSAVVKLASTQSNCEPGSDDKDKGPLSDFLSLEPFATVLKNMNKKNLPKFDAADSASATLKGIKALAELCSEDGACQKRIADLGALPLLRHILLGDDYEKLAAIEAYDASRTREVQDKNVAPNVSSTDATTDPSSVRVPPAAHIRRHAGRLLTILSLLPNSKKEIISDAVWCKWLEDCASGRIPCNDIKLKSYCRLTLLNILCSESPNTRKASDEYPDSESEYKRNCPQFGDALFLLNPELPLEVHVDNSGFGILRVSRDNCKEDGGIGGSGSETVNSVDDAEAASKSVPLMDVVFVHGLRGGPFNSWRIADDKSSTTKAGLVESIDEDAGKEGTCWPREWLAADFPQARFFTVKYKTNLTQWTGASLPLQEVSSMLLRKLVAAGIGSRPVIFVTHSMGGLVVKQLLYQAKLNNYDKFLNNTIGLVFYSCPHFGSKLADMPWRMGLVFRPAPSVWSSIVMVARSVRDWREISMDRNAGRGPVPTAEQEEGFSLLILACFISHPLIT

SEQ ID NO: 157398 - protein, 58 aa, Zea Mays
MERSFRLLQNRRNGHSLIKSSVSLDRVPFCQCQFLCVVPWFSEETGPEEHILPNDPWT

SEQ ID NO: 157399 - protein, 892 aa, Zea Mays
MVTTTVKSRPPHASFAMSGGRRRSSPVAPSCSSVPGRSLVPLCCLILVLLSFSMSSSAVAAEDCVEDSDGADGDGCCLSFRDVCADRSSFCFSSSVAQMLLASEDAAEAPDLELPRGWEPSSLPLSFPMSGGGGMVTCSSVDSSLTRARDGLGRGDDARARYDVASCQAPLVPDNWMRASAGVPMEVEGPATDADPSGLQSPLSMNVEINPPVLDWGRSDLYAATKANLTVVNLNKNSALRLYEPFSTDPQFYVYGYEDLELQPGENATVTFVFLPKLLGSSSAHLVVQTNFGGFIIHAKGMAVSSPYQILPLTGIDVLIGGQLERNLSIYNPYDDTLYVEEVSVWMSSLESTRYSSHLVCQLGPFDGALELSSSRSNWYTASSEEFRWPVVNIRPSEQWEVLPSKRNTVIELKLQAVSEGKVFGAICLKLRNCTLSTTHAFVIPIELEVHTRTYYDSSGLIAVTFEHVWTCDETGPIFSLSLRNDGPKLLRIIDITEHAIKGPMIFQVKYLNGLILYPDTVTDIALVRYTSSVTEDISSDSCNIVVETNSTLGSSIIIPCKDLVRASESVGPFARQVYEEDISANARTRTLGSMLQVKHSHHVKPMVRKAVKADDRMLKQWKSHGTSDGISVLMDHEMMFPVVQIGSQFSKWIKVHNPSLERAAMQLIVNSEEIIDQCKTVTDVCELTFSSKSPEVNSTETRFGFSLGDAAITEAYVDPSETALLGPIVFRPSNHCMWSSMVLIRNNLSGVEMLPLRAYGGRQSIVLLEESEPAWKLEFSLGSNVHNKSTMTKQEIPSSLCSQQLTKEIHVKNSGDLPLQVTKVKVSGADCGVDGFTVDNCKGFSLAPSESIRMLISFQADFSSAMVQRDLELVMTTGIFPIPMTATIPIL

SEQ ID NO: 157400 - protein, 220 aa, Zea Mays
MSWRFPLFGSSQQQQADPSFQDIPTQSWYPPSVVGSSSRPSTPTSSSASLHQRASDSPQSSSRGQPSPAEAAGIIARLKDKSIEELQRLLKDREAYNAFFNSLDQVKTQNNVRDELKKETLQLARENLEKEQRILELRNQCTIIRTTELAAAQDRLTDLERQKDDIMRSYSPAALLNKLQKSDTMYITCQCSGIMIMLAFRTFSIPVQNNNNKNINGKVG

SEQ ID NO: 157401 - protein, 174 aa, Zea Mays
MSWRFPLFGSSQQQQADPSFQDIPTQSWYPPSVVGSSSRPSTPTSSSASLHQRASDSPQSSSRGQPSPAEAAGIIARLKDKSIEELQRLLKDREAYNAFFNSLDQVKTQNNVRDELKKETLQLARENLEKEQRILELRNQCTIIRTTELAAAQDRLTDLERQKDDIMSINGKVG

SEQ ID NO: 157402 - protein, 157 aa, Zea Mays
MATTTTTILLLLLVPAGSFAFDPATGAGTVIDSGTVITRWTAPVYAALREEFRRQVAAPSGYTSLGAFDTCFNTDEVAAGGAPPVTLHMDGGVDLTLPMENTLIHSSATPLACLAMAEAPQNVNAVVNVVANLQQQNVRVVVDVAGSRVGFAREPCN

SEQ ID NO: 157403 - protein, 261 aa, Zea Mays
MAEPEMEVAVATAAPAGQKREREEGGDPAAECGGEETEVEGAAAKKPKLEEAKEAEKGRVEETAEGKTQEANEEKAVEAEDKPVTEEANEKKAVEAEGKPVTQEANEEKAAEAEGKPVKLGPKEFASAIDMFNYFYALLHSWTPQLEFNKYEQMVLEDLLRKGHAEPAKKIGAGVEAFEIGNHPVWKSHCFFVRRTDGSVDDFSFRKCVDNILPLPEDFKIGNGKKSGGHQKDGGGGRAGGRRGGGRGGWRGGRGRGRRGG

SEQ ID NO: 157404 - protein, 1115 aa, Zea Mays
MYKLSGRGGGRGGSGAAKRPLPPHGRGRGGASSIGGMAGPPRGRAGAGAATQPAGRDEAFRLESSGPPAFAAIIRLTPDLVDEIRRAEEAGGGARIKFNPNMYNSSENVIDVSGKEFKFTWASERGELCDIYEERQSGEDGNGLLLECGSAWRKVNVQRILDESTKNLVKMRSEEAERLSKSRKSIVLDPANPSVKSQAKSMAAAAVEGNPRRMHWKQKNEFFKKNKAAVITPTKSVSKVKLSNNIPKGNISSSPAPSPEQPGASNPSFPVGSDANNEVTTPFDLNKGENSKHEKSTASKMSNKGINRRASSHAANVDNNTKEVRSYLISVLSKNPKGMGLKALEKVAADAFPNASKKIESIVKNIANYQGPERYVLKPGLEVESSKRHASEGVRSISENIEESAPSLKIDDPDICERIDIVGSPLAVTDGKLSNDSEGKAGTSSDSGSDSDSDSDSSDSGSDSESQSRSAAETGSGSSSDSDSDASSSSKEGSDAIVDITSDDDKANTAHTKVVDDLNLSSSPRDLTRLNVDDEQIDIGTNLDYRSASPHIDLNNFNTGNDDAAAEGFSSGNLNKPSEMPGSKNMTNTRMDSIGVDNKHNEMSFVDNLFDDSMRAASENSPKGEAGQLTVQHGNKRKSTSKDESKLVPVNIAKPKLKRSSGSENSTAKPESAKKAKPDVTSPIGSLSEHKRSLPPEKHTNDRLNKETGNVSRDASRDSSPAMKGRPSAPGNLQRIDQSPNLPIPTMHSEGTKGNAVKSSSKKKSDKMQKPWHGIDGDFGSCYSHGVDHHANFDGSDDSSTRKRSRHENPLIDDKMLKHSKDTNANINSMNLTKSSREIVVPDEVTAFPESNESNGEPSNSQRDNVEKSPYGKKKLQRELSDLELGELRETSLENDDGRIRKQFERNSSSKSLDAKLTGVNNFYPSINDRKTPVTVFHDKRKPSPQEYGNRGHVNQEGFQRKAAVYAFDDNRPQQRENFPESLHLPKIDNSDSENIMYPDRSGEKTSKRETRMAHSGMLEYADMQKKKATSRLPQNGTNNVIVSRMQKSISTSDNEERSRNNSLIETKTGRKRRDSSSDDDNLFFSKYDKDAPELKGPIKDFSQSTMRSMESILT

SEQ ID NO: 157405 - protein, 458 aa, Zea Mays
MDTAEKMRWPFSDGSVTDLLDARSLHGSPDIKKKAQFHSSLVQKLALEKEMEGHVGCVNAIAWNSSGSLLVSGSDDTRINLWNYNNRELVHDIDTGHSANIFCTKFVPETCDEVVVSGAGDAEVRVFNMSRLSGRRPREISMEPTMVYQCHSKRVKKLAVELGNPNVVWSASEDGTLRQHDFRECSSCPRAGSANQECHNVLLDLRCGAKKSLADLPKHPLALKSCDISSVCPHQIIVGGSDAFARLYDRRMLPPLSSCQTKTKPPPCVKMFCPLHLANSKKTYLHLTHVAFSPNGKEVLLSYSGEHVYLFDVDPDNLSSVRYTADYVREQLFVPPFHKVPAKEHAKEKKTSVNTAPRNLSRVDMCKKFMQVATRSLEIGKNLMHGIEACSEVLESTEPDIDDDMRHGFLCTRAALYLKRKWKNDVYMAIRDCNRARKIDATSYQAHLHMAEALLQED

SEQ ID NO: 157406 - protein, 304 aa, Zea Mays
MDTAEKMRWPFSDGSVTDLLDARSLHGSPDIKKKAQFHSSLVQKLALEKEMEGHVGCVNAIAWNSSGSLLVSGSDDTRINLWNYNNRELVHDIDTGHSANIFCTKFVPETCDEVVVSGAGDAEVRVFNMSRLSGRRPREISMEPTMVYQCHSKRVKKLAVELGNPNVVWSASEDGTLRQHDFRECSSCPRAGSANQECHNVLLDLRCGAKKSLADLPKHPLALKSCDISSVCPHQIIVGGSDAFARLYDRRMLPPLSSCQTKTKPPPCVKMFCPLHLANKEDIFAPYTCCIQPKWEGGSFKLQW

SEQ ID NO: 157407 - protein, 59 aa, Zea Mays
MCKKFMQVATRSLEIGKNLMHGIEACSEVLESTEPDIDDDMRHGFLCTRAALYLKSAED

SEQ ID NO: 157408 - protein, 204 aa, Zea Mays
MELDYETSVSGDESRENDQDILRGRLSYRFHQREDQTNEHTGENGSIEFAQNDDFAFQSDVAIDMKQRYVAHCNVGTDIKQASFLGEQGEFIASGSDDGRWFIWEKRTGRLIKMLAGDGAVVNCIQSHPFDCAVATSGIDNTIKLWTPDANATSMVAGPELDVLSAIENNQRTLCRKRQIVLPFEFLERVRMREFSESFECNQS

SEQ ID NO: 157409 - protein, 201 aa, Zea Mays
MELDYETSVSGDESRENDQDILRGRLSYRFHQREDQTNEHTGENGSIEFAQNDDFAFQSDVAIDMKQRYVAHCNVGTDIKQASFLGEFIASGSDDGRWFIWEKRTGRLIKMLAGDGAVVNCIQSHPFDCAVATSGIDNTIKLWTPDANATSMVAGPELDVLSAIENNQRTLCRKRQIVLPFEFLERVRMREFSESFECNQS

SEQ ID NO: 157410 - protein, 63 aa, Zea Mays
MELDYETSVSGDESRENDQDILRGRLSYRFHQREDQTNEHTGENGSIEFAQNDDFAFQMLPSI

SEQ ID NO: 157411 - protein, 140 aa, Zea Mays
MKQRYVAHCNVGTDIKQASFLGEQGEFIASGSDDGRWFIWEKRTGRLIKMLAGDGAVVNCIQSHPFDCAVATSGIDNTIKLWTPDANATSMVAGPELDVLSAIENNQRTLCRKRQIVLPFEFLERVRMREFSESFECNQS

SEQ ID NO: 157412 - protein, 183 aa, Zea Mays
MELDYETSVSGDESRENDQDILRGRLSYRFHQREDQTNEHTGENGSIEFAQNDDFAFQSDVAIDMKQRYVAHCNVGTDIKQASFLGEFIASGSDDGRWFIWEKRTGRLIKMLAGDGAVVNCIQSHPFDCAVATSGIDNTIKLWTPDANATSMVAGPELDVLSAIENNQRTLCRKRQIVLASKG

SEQ ID NO: 157413 - protein, 153 aa, Zea Mays
MKTGPSITDAAMSRISQVTKVIAEGGYDKIFHQTFEVAPGEKLKKPYACYLSTSAGPVMGVLYLSNVKLAFCSDNPLAYQVGDKTEWSYYKVVIPLAQLRSINSSTSRTNAAEKYIQVVSVDNHEFWFMGFVYYDSAVKNLQEALQEAQNLRA

SEQ ID NO: 157414 - protein, 245 aa, Zea Mays
MLFAYVACGGCPDTWHGFSLEAFAGMWEFVKLSSASGVMLCLENWYYRILVLLTGNLKDAAIAVDALSICMSINGWQMMIPLAFFAGTGVRVANELGAGNGEGARFATIVSTVTSLVIGLFFWVLIMGLHDKYALIFTSSPVVLDAVDHLSVLLAFTILLNSIQPILSGVAVGSGWQSMVAYVNIGCYYLIGIPMGILLGWLFNLGVLGIWAGMIGGTAVQTLVLAIMTVRCDWEKEVSHSCQRP

SEQ ID NO: 157415 - protein, 271 aa, Zea Mays
MERADEDACRVALLDADGGGGGEGGKKQQQQLAARVWEESRKLWDIVAPAIFSRVVTYSMNVITQAFAGHLGDLELAAISIANTVVVGFNFGLMSACGQRARRGQRGGRQVRDHRVDGDVAGDRALLLGAHHGPARQVRAHLHLQPRRPRRRRPPLGSSRLHHPPQQHPAHPLRCGRRLRLAIHGGLRQHRLLLPHRNPHGHPARMALQPWRAGDLGGDDRRDRRPDARPGHHDSPLRLGKGGLDREHAHGQTVGSSVMAGSGAAHLNERP

SEQ ID NO: 157416 - protein, 390 aa, Zea Mays
MASALETLCGQAFGAKKFHMMGVYMQRSWIVLFMCAVLLLPMYFFAEDVLLLTGQPPELAAMAGKVCVWFIPLHFSFAFLFPLQRFLQCQMRNSANAAAAAAALCVHLLASWLLVSRLRFGLAGIALTLNFSWWATGAMLFAYVACGGCPDTWHGFSLEAFAGMWEFVKLSSASGVMLCLENWYYRILVLLTGNLKDAAIAVDALSICMSINGWQMMIPLAFFAGTGVRVANELGAGNGEGARFATIVSTVTSLVIGLFFWVLIMGLHDKYALIFTSSPVVLDAVDHLSVLLAFTILLNSIQPILSGVAVGSGWQSMVAYVNIGCYYLIGIPMGILLGWLFNLGVLGIWAGMIGGTAVQTLVLAIMTVRCDWEKEALIASTRMGKLSEVR

SEQ ID NO: 157417 - protein, 299 aa, Zea Mays
MALEAVVFSQPQAGHFGCGRGDSPYAVPWSDLLQGGGGGGFGDVCAAGEWVDQHDLDTCWAAPTVGDDWDWGEALSRDHSSSDAASTDHGSRKAAPEPAAGRRKRRRTRVVKNKEEIESQRITHIAVERNRRRQMNEYLAVLRSLMPPSHAHRGDQASIVGGAINYVRELEQLLQSLEVQKSLKQSRGRRPAGGGASCSPPFAGFFSFPQYSTAPSTTSSSGGEKCCGHDAAAADIEVTMVEGHASLKVLARRRPKQLLKLVAGLHQLRVPPLHLNVTAAVDAMVLYTFSLKVILNYTY

SEQ ID NO: 157418 - protein, 172 aa, Zea Mays
MTRRRSAARRRPARRPRGPARTAPRTATPAWSSATSRRRPTPAARRSSRRPWPGSARRSWTRRWRRRAARLPPFSSRPSGSSTGRHSTRSHSTRTRPAPAMASRRNGSPARTSSAATAARRGSSPRITPPASTSTGARVASRAGSEEGFLICTASVKKPMLRWHLYMHGTGV

SEQ ID NO: 157419 - protein, 283 aa, Zea Mays
MDEDEDELGPGLGGGRAARSPCGLGEKKRRLALEQVRALERCFETDNKLDPDRKARIARDLALQPRQVAVWFQNRRARWKTKTLERDFAALRARHDALRADCDALRRDKDALAAEIRELRQKLLPKPEATVKLEATTGNDTAEERRQATAGAPPAGACKDGSSDSDSSVVFSDVEASPYSGGAAFEPPALAGLGAPFLDTSVAPTGCSSPPVFVETKWQQHGPTQYPFPFDSYKACAGYGFTEEWLASSDLIGSDGGAAGFFSEDHASSLNFNWCPSGIQGWE

SEQ ID NO: 157420 - protein, 453 aa, Zea Mays
MEVARQLYGRVTGEAVYVAEPVSAPARRGSPTKGCLGAMRLVAGPRRKGDQVVCLGFDMRNTVCSSNGCYPTIVLVHVWGIGHFVPMLEEASGLAIRFHHLPAVEPPTDHSGIEEYISRYVQLYSPHVKAVVASLTCPVAGVVVDIFCTVLFDAAYQLSVPAYVYLITSAAMCALLLRSPALDEEVVIEVEFEQMEGDVDVLGLPPVPASCLPTGLDNRKIPTYRWFLYNGRRYMEATGIIVNTIVEVEPRVLAAIADGRCTHGVPAPPVYSIGPPLGSVVFFCFGGQGCFTAPQAHDLDHSGHRFLWVLRGTPEPGTKMPSDGNLAELLSTDFLARTKDRGLVWPTKAPQKEILAHAAVGGFVTQCGWNSVLESLWHCMPMVPWPLAVEQHYIAFTLVADMGIAVALNVERKRKNFVEATELERAVKALMCDDETARKVRDKVMEMKLGRES

SEQ ID NO: 157421 - protein, 233 aa, Zea Mays
MMFMTRIQGLIGTRKNLLSALLAGLLWAFAEAKDIRFILLVISAIFCGYVYQCPPFRLSYQGLGEPLCFAAFGPLATTAFYFSNSSLNTSSGGAALLPLTKTVIASSVLVGLTTTLILFCSHFHQIDGDLAVGKMSPLVRIGTKAGSRIVSIGIVMLYILLATFGTCGSLPPSCIVLCALTLPMGKTVVDYVLKHHEDNAKIFMAKYYCVRLHALFGMALASGLVLARNGILA

SEQ ID NO: 157422 - protein, 187 aa, Zea Mays
MPLAGIALTPLLVSPLAPSPRRSRVATSAARRPRALQRARCSATAASGEAGELSHATLLWRAAKLPIYSVALIPLTVGSASAYYHAGLFFTKRYFVLLTAAVLVITWLNLRATLGLCRSQGYQIHFIGDLCNLLWLCLPVSSIPIKLPRTRRAVVFRCIWSFGNHSLLLLKQQLKYFERRSGSSPSH

SEQ ID NO: 157423 - protein, 363 aa, Zea Mays
MPLAGIALTPLLVSPLAPSPRRSRVATSAARRPRALQRARCSATAASGEAGELSHATLLWRAAKLPIYSVALIPLTNWIPRSCFGIGIAMTIHISRLCMVAAVLVITWLNLSNDVYDSDTGADRDKKESVVSITGSRAMTQNAANFSLFLGFAGLLWAFAEAKDIRFILLVISAIFCGYVYQCPPFRLSYQGLGEPLCFAAFGPLATTAFYFSNSSLNTSSGGAALLPLTKTVIASSVLVGLTTTLILFCSHFHQIDGDLAVGKMSPLVRIGTKAGSRIVSIGIVMLYILLATFGTCGSLPPSCIVLCALTLPMGKTVVDYVLKHHEDNAKIFMAKYYCVRLHALFGMALASGLVLARNGILA

SEQ ID NO: 157424 - protein, 224 aa, Zea Mays
MAVVSALAKYKLVFLGNQAVGKTAIITRFMYDKFDDTYQATIGIDFLSKTMYLEDRTVRLQLWDTAGQERFRSLIPSYIRDSSVAVIVYDVTVSSLISCRSFADRQSFLNTSKWIEEVNTQRGGDVLIFLVGNKTDLVDKRKVSTDEGEAKAQEHGAMFMETSAKAGFNVKPLFRKIAGSLPGLDALSSGKQEDMVDINLRPASGSSASGAAAQLEQKSGGCSC

SEQ ID NO: 157425 - protein, 67 aa, Zea Mays
MFMETSAKAGFNVKPLFRKIAGSLPGLDALSSGKQEDMVDINLRPASGSSASGAAAQLEQKSGGCSC

SEQ ID NO: 157426 - protein, 408 aa, Zea Mays
MMKPHFLHYPSSNQVQQGLQSLAKSTLAARLQQRSKGPVKVLNTARPRPPENVEALSSSTQTWPTPDQGLVLSGYSQLRSGTQPTRENAMPTISSNTVWNPVAPNKMKHSVSTPNLVSGGSSAQVSLSTAYGSNKSQDPPQGNQTLPVPEDFRAANKTLVERMRSALGMDEDRYSAFKEIAGEYRQGIIGTLEYLSYVEQFGLSHLVPEMARLLPDPQKQRELADAYYTNTRFKSLQENGGGTSSQEGNRKKKGKGKAPVTESSAANDVNSALADNILETVRRLQSNQQAREGGAEVLSKDGYRPSKGVQPAAGSSSNLDSDTSSNTKSSGAKDNIGKGGGNKQPKKTAKFLRARLGDNSLATLDLSRPSASPERPERELQGPETGLPARGAWKNGGGQKLFSSNGRK

SEQ ID NO: 157427 - protein, 594 aa, Zea Mays
MALREHYSCHICQRQHPEQYDYFRNYDDLELHFRKDHFLCEDEACLAKKFVVFLSEAELKRHNAMEHGGRMSRSQRNAALQIPTSFIYRRNEQAQRRGRGSFQSLSIGSSSGGAEVGQGSRTGQVLEQLSFPPLLDPDIPDNNVDSFHDETSFPSLSEQQSRYALALSQSARGTARLGDESLFPPLPGSSGSNNNRGAGSVQQGLQSLAKSTLAARLQQRSKGPVKVLNTARPRPPENVEALSSSTQTWPTPDQGLVLSGYSQLRSGTQPTRENAMPTISSNTVWNPVAPNKMKHSVSTPNLVSGGSSAQVSLSTAYGSNKSQDPPQGNQTLPVPEDFRAANKTLVERMRSALGMDEDRYSAFKEIAGEYRQGIIGTLEYLSYVEQFGLSHLVPEMARLLPDPQKQRELADAYYTNTRFKSLQENGGGTSSQEGNRKKKGKGKAPVTESSAANDVNSALADNILETVRRLQSNQQAREGGAEVLSKDGYRPSKGVQPAAGSSSNLDSDTSSNTKSSGAKDNIGKGGGNKQPKKTAKFLRARLGDNSLATLDLSRPSASPERPERELQGPETGLPARGAWKNGGGQKLFSSNGRK

SEQ ID NO: 157428 - protein, 528 aa, Zea Mays
MLWSTVGECLVPRGMLHFRYLPVLYIAEMSKHNGVAESLSIGSSSGGAEVGQGSRTGQVLEQLSFPPLLDPDIPDNNVDSFHDETSFPSLSEQQSRYALALSQSARGTARLGDESLFPPLPGSSGSNNNRGAGSVQQGLQSLAKSTLAARLQQRSKGPVKVLNTARPRPPENVEALSSSTQTWPTPDQGLVLSGYSQLRSGTQPTRENAMPTISSNTVWNPVAPNKMKHSVSTPNLVSGGSSAQVSLSTAYGSNKSQDPPQGNQTLPVPEDFRAANKTLVERMRSALGMDEDRYSAFKEIAGEYRQGIIGTLEYLSYVEQFGLSHLVPEMARLLPDPQKQRELADAYYTNTRFKSLQENGGGTSSQEGNRKKKGKGKAPVTESSAANDVNSALADNILETVRRLQSNQQAREGGAEVLSKDGYRPSKGVQPAAGSSSNLDSDTSSNTKSSGAKDNIGKGGGNKQPKKTAKFLRARLGDNSLATLDLSRPSASPERPERELQGPETGLPARGAWKNGGGQKLFSSNGRK

SEQ ID NO: 157429 - protein, 60 aa, Zea Mays
MTYVALNPCICQPFPQILHNVNRSALPGSTVLLRPASSQEGTRYSHHLPRPVRGCLFTYG

SEQ ID NO: 157430 - protein, 103 aa, Zea Mays
MARLEARRRASLNLHLRHCRCRKVFTEPLHNSVGKSSGDASTAWLTHMAPMHKPCWHSTQLTNITKTLNLVYLIWIRSKQSKLHLQTDTFQLTLRLINGERDF

SEQ ID NO: 157431 - protein, 253 aa, Zea Mays
MAAGRAFLGAPCSSLAAGARCLAFASPLPRNLTPALRCGVRGRCIASASSSPDSPPLPEPYVLTTPLYYVNAPPHMGSAYTTIAADAIARFQRLLEKNVIFITGTDEHGEKISASAEASGRNPKEHCDAISSSYRTLWADLDIEYDKFIRTTDRKHEAVVNEFYSRVLNNGDIYRADYEGLYCVSCEEYKDEKELLENNCCPVHLKPCVERKEDNYFFALSKYQHKLEELLTRNPDFVRPSYRLNELVGPRLD

SEQ ID NO: 157432 - protein, 462 aa, Zea Mays
MAAGRAFLGAPCSSLAAGARCLAFASPLPRNLTPALRCGVRGRCIASASSSPDSPPLPEPYVLTTPLYYVNAPPHMGSAYTTIAADAIARFQRLLEKNVIFITGTDEHGEKISASAEASGRNPKEHCDAISSSYRTLWADLDIEYDKFIRTTDRKHEAVVNEFYSRVLNNGDIYRADYEGLYCVSCEEYKDEKELLENNCCPVHLKPCVERKEDNYFFALSKYQHKLEELLTRNPDFVRPSYRLNEVQGWIKSGLRDFSISRASVEWGIPVPNDTKQTIYVWFDALLGYISALLDDGEQASLQQAVDHGWPASLHLIGKDILRFHAVYWPAMLMSAGLSVPDTVFGHGFLTKDGMKMGKSLGNTLEPKDLVERFGADAVRYFFLREVEFGNDGDYSEERFINIVNAHLANTIGNLLNRTLGLLKKNCKSVLAFDSIAAADGGLFRNKIENLVSRFSWYLQLW

SEQ ID NO: 157433 - protein, 362 aa, Zea Mays
MAAGRAFLGAPCSSLAAGARCLAFASPLPRNLTPALRCGVRGRCIASASSSPDSPPLPEPYVLTTPLYYVNAPPHMGSAYTTIAADAIARFQRLLEKNVIFITGTDEHGEKISASAEASGRNPKEHCDAISSSYRTLWADLDIEYDKFIRTTDRKHEAVVNEFYSRVLNNGDIYRADYEGLYCVSCEEYKDEKELLENNCCPVHLKPCVERKEDNYFFALSKYQHKLEELLTRNPDFVRPSYRLNEVQGWIKSGLRDFSISRASVEWGIPVPNDTKQTIYVWFDALLGYISALLDDGEQASLQQAVDHGWPASLHLIGKDILRFHAVYWPAMLMSAGLSVPDTVFGHGFLTKETSLIVHLGY

SEQ ID NO: 157434 - protein, 383 aa, Zea Mays
MAAGRAFLGAPCSSLAAGARCLAFASPLPRNLTPALRCGVRGRCIASASSSPDSPPLPEPYVLTTPLYYVNAPPHMGSAYTTIAADAIARFQRLLEKNVIFITGTDEHGEKISASAEASGRNPKEHCDAISSSYRTLWADLDIEYDKFIRTTDRKHEAVVNEFYSRVLNNGDIYRADYEGLYCVSCEEYKDEKELLENNCCPVHLKPCVERKEDNYFFALSKYQHKLEELLTRNPDFVRPSYRLNEVQGWIKSGLRDFSISRASVEWGIPVPNDTKQTIYVWFDALLGYISALLDDGEQASLQQAVDHGWPASLHLIGKDILRFHAVYWPAMLMSAGLSVPDTVFGHGFLTKDGMKMGKSLGNTLEPKDLVERFGADAVRKPP

SEQ ID NO: 157435 - protein, 597 aa, Zea Mays
MRKHGWQLPYHPLQVVAIAVFSALGFAFYVFFVPFVGTKPFQIVAMAIYTPLITCVVVLYIWCAATNPGDPGIFDSTKNLKLDKNEKHSYVNSDQGINHGGRPLSETFGTADNSEKLSSMLERNDSPSWPRFSGIISLVCLPFSCLCKRCLHSDSLSSEHKMCEEGMFFCSLCEAEVLKNSKHCRVCDKCVDGFDHHCRWLNNCIGKRNYKGFFVLMASAVILWLSGGLVLILCIVKRGEFSRQVVTKLGSSFSTVAFVIVVATCTILAMVATVPLAQLLCFHVLLVKKGISTYDYIIALREHEEQQEVPGHQSPQMSIVSSVTGFSTASSFGPLHRGSWCTPPRLFLEDQFDAIPPEIGISRNSGSKKTKEEEGARRKAGAVKISPWTLARLNAEEVSKAAAEARKKSKILKPVGKHGAPENSSKPDHLPSYKRRLDRRGFPAELSLDPLATLSASGTESNYSDAATEICGSLAPLQLEARSAFQPSTAASTRNVASSPESSFDSPNLHPFRTSSATADEMQGAMMHTAHRGIEFKRSSSDGYEASGGEDSDRIPSRIVHRSSNWASVFLHSGQGDPPADLLTTSAEGFVANDSGS

SEQ ID NO: 157436 - protein, 559 aa, Zea Mays
MRKHGWQLPYHPLQVVAIAVFSALGFAFYVFFVPFVGTKPFQIVAMAIYTPLITCVVVLYIWCAATNPGDPGIFDSTKNLKLDKNEKHSYVNSDQGINHGGRPLSETFGTADNSEKLSSMLERNDSPSWPRFSGIISLVLKNSKHCRVCDKCVDGFDHHCRWLNNCIGKRNYKGFFVLMASAVILWLSGGLVLILCIVKRGEFSRQVVTKLGSSFSTVAFVIVVATCTILAMVATVPLAQLLCFHVLLVKKGISTYDYIIALREHEEQQEVPGHQSPQMSIVSSVTGFSTASSFGPLHRGSWCTPPRLFLEDQFDAIPPEIGISRNSGSKKTKEEEGARRKAGAVKISPWTLARLNAEEVSKAAAEARKKSKILKPVGKHGAPENSSKPDHLPSYKRRLDRRGFPAELSLDPLATLSASGTESNYSDAATEICGSLAPLQLEARSAFQPSTAASTRNVASSPESSFDSPNLHPFRTSSATADEMQGAMMHTAHRGIEFKRSSSDGYEASGGEDSDRIPSRIVHRSSNWASVFLHSGQGDPPADLLTTSAEGFVANDSGS

SEQ ID NO: 157437 - protein, 376 aa, Zea Mays
MQWLSGGLVLILCIVKRGEFSRQVVTKLGSSFSTVAFVIVVATCTILAMVATVPLAQLLCFHVLLVKKGISTYDYIIALREHEEQQEVPGHQSPQMSIVSSVTGFSTASSFGPLHRGSWCTPPRLFLEDQFDAIPPEIGISRNSGSKKTKEEEGARRKAGAVKISPWTLARLNAEEVSKAAAEARKKSKILKPVGKHGAPENSSKPDHLPSYKRRLDRRGFPAELSLDPLATLSASGTESNYSDAATEICGSLAPLQLEARSAFQPSTAASTRNVASSPESSFDSPNLHPFRTSSATADEMQGAMMHTAHRGIEFKRSSSDGYEASGGEDSDRIPSRIVHRSSNWASVFLHSGQGDPPADLLTTSAEGFVANDSGS

SEQ ID NO: 157438 - protein, 201 aa, Zea Mays
MAPPSPSPQPVHARAASLAPHLNLLRMSPHLAAAVPMRHRPSPSCPPYPHARNCQHMATSMAAAFTRYLSSPFPVPHPPDLGARRRVEARAIPAGPPPTSPGVQQLSRSPCPRHARTGSAKHPPLAHSSGAAAALHSRFVTKLLNDLFGVQSRGDCACAVRPALLGVGEDLALRIRDAIVKGYHGMKPGWTRFRLDFRPKC

SEQ ID NO: 157439 - protein, 70 aa, Zea Mays
MVNLHDQYEEDRIIRCFVILACNSLMFPTIQARHVATLKRPNPLGLKCDTITSPRRLVTTFLTSNSTEFK

SEQ ID NO: 157440 - protein, 230 aa, Zea Mays
MAGYEQRVVAVIMVGGPTKGTRFRPLSLNVPKPLFPIAGQPMVHHPISACSRIPNLAQIYLIGFYDEREFALYVSSISNELRIPVRYLREDKPHGSAGGLYIFRDYIMEDSPSHIVLLNCDVCSSFPLPDMLEAHKKYGGMGTLLVNKVSAESANQFGELVADPETNELLHYTEKPETFQICGVYLALKLFIQQPSMYCVILFMFFFLQIFFVLQLSPFSSPLCGGSSKN

SEQ ID NO: 157441 - protein, 273 aa, Zea Mays
MAGYEQRVVAVIMVGGPTKGTRFRPLSLNVPKPLFPIAGQPMVHHPISACSRIPNLAQIYLIGFYDEREFALYVSSISNELRIPVRYLREDKPHGSAGGLYIFRDYIMEDSPSHIVLLNCDVCSSFPLPDMLEAHKKYGGMGTLLVNKVSAESANQFGELVADPETNELLHYTEKPETFVSDLINCGVYIFTPNIFSAIEDVLKQKKDRANLRRVSSFEALHSATKYVLCYTVYVFFFTNLLCPAVITFLFAIMWRFFQKLARPRLFHQTLFG

SEQ ID NO: 157442 - protein, 209 aa, Zea Mays
MSRLSPTSSGSLSGSLANLNFRYLREDKPHGSAGGLYIFRDYIMEDSPSHIVLLNCDVCSSFPLPDMLEAHKKYGGMGTLLVNKVSAESANQFGELVADPETNELLHYTEKPETFVSDLINCGVYIFTPNIFSAIEDVLKQKKDRANLRRVSSFEALHSATKYVLCYTVYVFFFTNLLCPAVITFLFAIMWRFFQKLARPRLFHQTLFG

SEQ ID NO: 157443 - protein, 83 aa, Zea Mays
MAELAADFLGTPRPGRRLGSRTKPAVVLPSQICALVVQERSWRPAATVAGAPSLASRSRQPPQSRWRPPPRELLIWRQSSVDC

SEQ ID NO: 157444 - protein, 594 aa, Zea Mays
MLGGRVLNVLFDSLLLYFGLGVQFRPDLHHKDPYQGEFPETIEEYLHHGTMKCIAFNRKGTLLAAGCSNGSCIIWDFETRGLAKEFRDKDSTAPITSVSWSRYGHRLLASATDKSLTLWDVPTGEKIARITLQQTPLRASLQPGSPTPSICLACPLSSAPLLVDLNTGSTTVLPVSVSENGNPPAPNPRNKFADGTPPFTPTAATFDKHGALIYVGNSKGEILIIDSKSIQVHAIVPIPGGSVVKDIVLSRDGQYLLTNSNDRVIRVYRNILPVKGSREEIRNISSNSNEYGSHYDKLKANGTSCLILSCELLDAITKIQWKAPCFSGNGEWIVGASANKGEHRLQIWNQAGRLVKMLEGPKEALIDLAWHPVEPTIATVSVTGFVYIWAKEHVENWSAFAPDFVELEENEEYAEREDEFDLNPREEQAEKVVIDEDADVDIETSEKNTVFSDVEDSVDEISYLPAIPYPDSPDEQPEKCLGSSKLEDSNHSGSPSSMDAVQNGQAIPPASSPMEVDNSTAEDPEEGPNSKRKRRLSVKGLELQQSEKGKKGSTKNKSLGKSTKSSAKKMESANGNSSAFDDEATEDDEINIDS

SEQ ID NO: 157445 - protein, 342 aa, Zea Mays
MATSFDRWEKDPFFLAAEEVQESADRMESVYRVWVQERSGGDSEAASVTGGPTAAQLRRELHTALGTAKWQLDELARAVRSNDLVMSAGKDTRARHDDFVTAIGYRILEVENYLKESNLADGRGPLSWVHLDEDERDDLAAFLSASPFQQKDKVVTIPSAGDIEVGSNAARMKNDISTDSSKDSAGSTDLISGTAKQDLHRGHRRAASASADIGSWSMSIPNECEGTTEQLSDGSDKLPLHKIVKTCALTSTLQSKTRTKWKNGAVRWAGSNQQDVEEAIPLNTSQLSQGLEECFERNKSCLSTCDEHTYNKKLHGWLGALRRQLQSCMHSEDNLVTIFICS

SEQ ID NO: 157446 - protein, 484 aa, Zea Mays
MLRCAAEHLQMTDDDSRGGNLAGRTEAYLEAVALMSLAGAVTVLRRSEDLLPVSEEVDLVGRCVDAIAYFTCNDSQFSMSNESRNCHEGEGVQGHCSGHAHHALCAEVAANAGELNRAMCICICLQDTHGREKQKMEPRQEHEKRVVLETIVTLLPKERNSMSVSFLSMLLRAALCLDTTLACRLDLEKRMAAQLGQAVLDDLLIPIFLPDAGNTFDVDAVQRILVGYLEHEAEADRLDYNTDDDFTSTASPPNDVGMVGKLMESYLAEIASDVDLPVDKFTGLAEMIPERARFNDDGMYRSIDIYLKAHPYLSEAERKTVCRVMDCQKLSREACAHAAQNNRLPVQTVVQVLHHEQRRLREAPTSSFYGGESPTPAPSLQGRHGRSVPDEMSQLQRENEELKMELLRLKMNLRDPSAPPQHSDAPPSGRRPLPKKAAGGSGGFINNVSKKLGRLNPFLRPDAVGGAKVRTKPSRTKDRRHSIG

SEQ ID NO: 157447 - protein, 174 aa, Zea Mays
MPFVLKPETNTAHVVTSTDLEKETVWHPLNFFPPILLCFLPSHPASAGVATRTPPHPSTNPPPFAGLRLLPRVPTTRTRARGHHLDATDGLESAGARPPDRRRFLPPHPHRPRRRARRPPPPPPSSALPLPAFAGTTATGGPEGEEGCQGGATDEGGGRPGHVDAASHHRSAVP

SEQ ID NO: 157448 - protein, 94 aa, Zea Mays
MPLTGWNPLAPVLQTVAAFSRHILIAPDAGLDDHRLRPLLALSLSPPSPAPPQPEVRKEKKDAKEAPLTKEEVGRATWMLLHTIAAQNDQNAME

SEQ ID NO: 157449 - protein, 106 aa, Zea Mays
MERPSVLILLIFAFAGGNLLVGIASNARSIKNTGHGSIDLNDRKLKERYTFTIRKTRGLENVRTDDYQPVDPSPSSKATIRPGPIEHGAPLLPYVPRYPPPPPASC

SEQ ID NO: 157450 - protein, 245 aa, Zea Mays
MSPYGTPLSSLISTSIESNLIQSNPQQTMASNGSDMVMMYGTRRCWSHPSSPSQRLSPSRYHNSWIPNLRRMLMLTITACTQSRAFYRDEIMSAIEKHITAWTFFLGARWISSACKYRYESMYMKFSVLALECHAYVPSVKGQLENIPLHQVLGTSFASKGIALPGRLGETGCPLCRSFIKAQTIDDDDSGQCQRYIHIGSDANQKEQSGTNINKLGRQSPIEVERHGGHPAAEPGMSQQLLIGA

SEQ ID NO: 157451 - protein, 97 aa, Zea Mays
MISPSPSSSSEEPLLVRAARGEDGIPHWMMRQAGRYMAEYQASAKGKLTFGHQVRGASSCEVLRWDFDLKVQGDAYGVDVRYRDNKTGQHVGTGSEP

SEQ ID NO: 157452 - protein, 111 aa, Zea Mays
MDPKHSAEVSKHLDKQNQALMETYGAMSHELHKLQVEEETIMRKLYELMSAEGLLPKSAQQNFEISVRTGTGTHSAYIILYGRRIQDVKRKKEKQHGENIVASTESKEQEP

SEQ ID NO: 157453 - protein, 793 aa, Zea Mays
MVLYRISSNKDPGAGRGESLSMKEHAALLLEKKLLDLPKLLDICAIYEHDNGKLTSSLVTNVINVQPSVLDDINIVIPQFLNIFHTMHDRCMTSLQVLTSTGSIDNGYVQLQKDFMEVLDFINDAIVTLDSFVGAYQPAALLFCTNFEMSYGVEELLNALARLYSSLLPSLLHGFKVMPKSQSNAEASLDSTLSDIPLAIRMLSKRTARFGWRLLHYCYLNDQVREHDAQTSTKMFPAKVEDPMIRGDILVQTLKDINRESTYSSQVNHGNTFLQELESEFQLMSQIGDIRNKGWIYMDDEQFQFLSRLCGSTHTSWNGISDLPVSSHGGELQQKDEETAMVESKISQIRDLFPDYGKGFLSACLEAYNLNPEEVIQRILEGTLHQDLLALDTSLEEMPHEKPAPTAVKDKGKGILVETVPQITKKPHKVAETHYFVQDGLSSATSSASQGPSSAISPASLGPSSAISSAFQGPSSAISSASLGPSSSISSVPKGRFTRKANDDLPDTAILDSKNAKNAARSVILDSQYEYEDEYDDSFDDLGFSVVESSYEETDGVNDAEASSHGPRWSSQKKPQFYVKDGKNYSYKVAGSVAVSSAREAAVMRQTQKETIYGLGRGGNVPFGVPNRQHIDVEAEEVGDADNSGRGSNSRGRGRKGGREGNRPEENESSNGRGSGFGGKRGGWSQGNPAEENWNPNGQQGFGRGGRRGGWNQGGPAKEDGNSSGRQESFGRGARRGSMNHDQSAEDNEGHNNPAQDFTRGPAPRGGHGRGGGRNHHRRDRAMKKHMQGLTGL

SEQ ID NO: 157454 - protein, 645 aa, Zea Mays
MSYGVEELLNALARLYSSLLPSLLHGFKVMPKSQSNAEASLDSTLSDIPLAIRMLSKRTARFGWRLLHYCYLNDQVREHDAQTSTKMFPAKVEDPMIRGDILVQTLKDINRESTYSSQVNHGNTFLQELESEFQLMSQIGDIRNKGWIYMDDEQFQFLSRLCGSTHTSWNGISDLPVSSHGGELQQKDEETAMVESKISQIRDLFPDYGKGFLSACLEAYNLNPEEVIQRILEGTLHQDLLALDTSLEEMPHEKPAPTAVKDKGKGILVETVPQITKKPHKVAETHYFVQDGLSSATSSASQGPSSAISPASLGPSSAISSAFQGPSSAISSASLGPSSSISSVPKGRFTRKANDDLPDTAILDSKNAKNAARSVILDSQYEYEDEYDDSFDDLGFSVVESSYEETDGVNDAEASSHGPRWSSQKKPQFYVKDGKNYSYKVAGSVAVSSAREAAVMRQTQKETIYGLGRGGNVPFGVPNRQHIDVEAEEVGDADNSGRGSNSRGRGRKGGREGNRPEENESSNGRGSGFGGKRGGWSQGNPAEENWNPNGQQGFGRGGRRGGWNQGGPAKEDGNSSGRQESFGRGARRGSMNHDQSAEDNEGHNNPAQDFTRGPAPRGGHGRGGGRNHHRRDRAMKKHMQGLTGL

SEQ ID NO: 157455 - protein, 255 aa, Zea Mays
MSGAQVGCKMGCRFCATGTMGFKSNLSSGEIVEQLVHASRYSQIRNVVFMGMGEPMNNYNALVEAIGVFTGSPFQLSPKRITVSTVGIIHGINKFNGDLPKVNLAVSLHAPDQDIRCQIMPAARAFPLGKLMNALQSYQNESKQTIFIEYIMLDGVNDQEEHAHQLGKLLETFKAVVNLIPFNPIGSSSNFKTSSDQNVKNFQKVLKGIYRIRTTIRQQMGQDIAGACGQLVVSLPDERSAGGATLLSDIEDLRI

SEQ ID NO: 157456 - protein, 92 aa, Zea Mays
MKACAKAAGERLSLVCAPSTRQPLARSFVKARRLPSQHETKSQVSCSVRVSENTAHRIDATAENIFPAVKDHVLKATDAINRGEVIALCRSS

SEQ ID NO: 157457 - protein, 630 aa, Zea Mays
MGKKQHSKDRMFITRTEWATEWGGAKQKDVGTPFKRLPFYCCSLTFLPFEDPVCTVDGSVFDLMSIIPYLKKFGKHPVTGAPLKHEDLIPLTFHKNSDGEFQCPVLNKVFTEFTHIVAVKTTGNVFCYEAIQELNIKPKNWKELLTDEPFTRNDLITIQNPNVVDGKVLGEFDHVKKGLKLEDEELQRMKDDPTYNINISGDLKQMIKELGTEKGNEAFLQGGGGLKAQKERAAALAAILARKEKDDSKAGKEPKPNQSFSIVDAASASVHGRSAAAAKATSAEKTAARIAMHMAGERAPVNAKLVKSRYTTGAASRSFTSTSYDPVTKNEYEYVKVERNPKKKGYVQLHTTHGDLNLELHCDITPRTCENFLTHCENGYYNGLIFHRSIKNFMIQGGDPTGTGSGGESIWGKPFKDEPNSKLLHSGRGVVSMANSGPHTNGSQFFILYKSAPHLNYKHTVFGMVVGGLTTLSTMERVPVDDDDRPMEEIKILKVSIFVNPYTEPDEEEEKAKEEKKKDEDYDKVGSWYSNPGTGVAGSTSTGGGVGKYLKARAAGSIDVTGSAGVADDSSKKRKATASSVEFKDFSGWKKMAVAYYGCIGVLDTFKSCGVLKIVFLLISEHEHFVPSDF

SEQ ID NO: 157458 - protein, 568 aa, Zea Mays
MGKKQHSKDRMFITRTEWATEWGGAKQKDVGTPFKRLPFYCCSSIIPYLKKFGKHPVTGAPLKHEDLIPLTFHKNSDGEFQCPVLNKVFTEFTHIVAVKTTGNVFCYEAIQELNIKPKNWKELLTDEPFTRNDLITIQNPNVVDGKVLGEFDHVKKGLKLEDEELQRMKDDPTYNINISGDLKQMIKELGTEKGNEAFLQGGGGLKAQKERAAALAAILARKEKDDSKAGKEPKPNQSFSIVDAASASVHGRSAAAAKATSAEKTAARIAMHMAGERAPVNAKLVKSRYTTGAASRSFTSTSYDPVTKNEYEYVKVERNPKKKGYVQLHTTHGDLNLELHCDITPRTCENFLTHCENGYYNGLIFHRSIKNFMIQGGDPTGTGSGGESIWGKPFKDEPNSKLLHSGRGVVSMANSGPHTNGSQFFILYKSAPHLNYKHTVFGMVVGGLTTLSTMERVPVDDDDRPMEEIKILKVSIFVNPYTEPDEEEEKAKEEKKKDEDYDKVGSWYSNPGTGVAGSTSTGGGVGKYLKARAAGSIDVTGSAGVADDSSKKRKATASSVEFKDFSGW

SEQ ID NO: 157459 - protein, 538 aa, Zea Mays
MLSYSDGEFQCPVLNKVFTEFTHIVAVKTTGNVFCYEAIQELNIKPKNWKELLTDEPFTRNDLITIQNPNVVDGKVLGEFDHVKKGLKLEDEELQRMKDDPTYNINISGDLKQMIKELGTEKGNEAFLQGGGGLKAQKERAAALAAILARKEKDDSKAGKEPKPNQSFSIVDAASASVHGRSAAAAKATSAEKTAARIAMHMAGERAPVNAKLVKSRYTTGAASRSFTSTSYDPVTKNEYEYVKVERNPKKKGYVQLHTTHGDLNLELHCDITPRTCENFLTHCENGYYNGLIFHRSIKNFMIQGGDPTGTGSGGESIWGKPFKDEPNSKLLHSGRGVVSMANSGPHTNGSQFFILYKSAPHLNYKHTVFGMVVGGLTTLSTMERVPVDDDDRPMEEIKILKVSIFVNPYTEPDEEEEKAKEEKKKDEDYDKVGSWYSNPGTGVAGSTSTGGGVGKYLKARAAGSIDVTGSAGVADDSSKKRKATASSVEFKDFSGWKKMAVAYYGCIGVLDTFKSCGVLKIVFLLISEHEHFVPSDF

SEQ ID NO: 157460 - protein, 205 aa, Zea Mays
MRIRTSVHTAAFCQPRPATRSRPTPQPAAALATARIRGFHPEISVAIASRNRHNPPNLALPCALRPPHFTQPISAPCAVFVREVGADDGGGGADSDFCGGQVGDTGDARRGASGGSRVPRLAARVRGPPRVLGLLPLRAVERAVEPGTPQPQPEQPCEIGARTIALFAMEPPRRRLSPARAIPSRRLSAPDTTSAVMGNLQGLNG

SEQ ID NO: 157461 - protein, 392 aa, Zea Mays
MRIRTSVHTAAFCQPRPATRSRPTPQPAAALATARIRGFHPEISVAIASRNRHNPPNLALPCALRPPHFTQPISAPCAVFVREVGADDGGGGADSDFCGGQVGDTGDARRGASGGSRVPRLAARVRGPPRVLGLLPLRAVERAVEPGTPQPQPEQPCEIGARTIALFAMEPPALVLDVQNNMLLSQDRHLAFYGVEPGSSDLTGPFNQGIMQPELMCTIANPVDVLHGAIHDASTMNHVILQSDVLTYVYAVPYVLPKLSSVTHAHIVVGGEHASHREFDLHAAFRRHDKEFLHLPLIMLLLAEGGVKRSATSSAMVATEKTGEALATLWRRREASKDINRSVSLEIRCSRIFTRYKSRFSIYLYLLRFSCLYFYYNGLGKCHSSSALIFRN

SEQ ID NO: 157462 - protein, 126 aa, Zea Mays
MLLSQDRHLAFYGVEPGSSDLTGPFNQGIMQPELMCTIANPVDVLHGAIHDASTMNHVILQSDVLTYVYAVPYVLPKLSSVTHAHIVVGGEHASHREFDLHVKYILKSCRRHDEPSQGCHSQDDEN

SEQ ID NO: 157463 - protein, 104 aa, Zea Mays
MLLSQDRHLAFYGVEPGSSDLTGPFNQGIMQPELMCTIANPVDVLHGAIHDASTMNHVILQSDVLTYVYAVPYVLPKLSSVTHAHIVVGGEHASHREFDLHSTY

SEQ ID NO: 157464 - protein, 119 aa, Zea Mays
MLLSQDRHLAFYGVEPGSSDLTGPFNQGIMQPELMCTIANPVDVLHGAIHDASTMNHVILQSDVLTYVYAVPYVLPKLSSVTHAHIVVGGEHASHQYILKSCRRHDEPSQGCHSQDDEN

SEQ ID NO: 157465 - protein, 187 aa, Zea Mays
MAEPTNARGSPKNRTRRKTSTAQEIQGTEFGGTSECRELYLRDRGRVASGQTKREVSGKQEEWMQCRGREGRGDGFVVQCRCGDDVRRGGGGGAAMWGCLVRMTKEMGRGWQWPPPEATRCLSVVTPPPGACVDVVCTAAVCAVTQQLRVFCRHFVEVGGGSADWGWGKQAKQRERERVRACLFGMV

SEQ ID NO: 157466 - protein, 205 aa, Zea Mays
MADFKRVRDLIPCSPNQGYNLIVVDPPWENGCVRQKEVYPTLPNKNFLYLPVQQLAHPTGALLVLWITNREKLRAFVEKKLLPSWGVEDSTVFYWLKVKPDGSLIGDLDLFHHRPYECLLLGYINVNANAKKGSNFKLLERSQVIMSVPGAHSRKPPLEKLLSEYIPGPKPSRCIELFARELFPRWTSWGNEPLHFQDTMYFSEK

SEQ ID NO: 157467 - protein, 84 aa, Zea Mays
MIQHQASDFYRPKNKYLTESYSAAQHSTRRADPDVDTAGISTTTRKLRRGAPQGRLPIFRRRRAAFPRRATGEAPFHRRWWERR

SEQ ID NO: 157468 - protein, 55 aa, Zea Mays
MVCWYDLAEVVALTESIGKPLAEVLKELGKRVPDSLVKTRIEDDGFTINSRRGFQ

SEQ ID NO: 157469 - protein, 292 aa, Zea Mays
MVCWYDLAEVVALTESIGKPLAEVLKELGKRVPDSLVKTRIEDDGFTIKFYFACGQVKSYERAIISVEQLNAILRQASKTKEKEDLRKIDNWQYISCVTLWVRFLCCHYKDYNLHPLFSQVLQLLFDCLELREVSQKEQTQRTKINFSSLLKVPKNLLKPRDFQEECILSAIQILSAHFAQWSYHVSFLEVATIPLVLLKRLHEQTTVESLRHPIKCLIDQVTENKDFIERKREVVSFSPNDKASVDSFLQSIASHLLFNIWPAEFAEKHITVECRRRRSAEPLHSLGSMHP

SEQ ID NO: 157470 - protein, 98 aa, Zea Mays
MEGEADAQIDGIPALRSPLLPRSTWKARPAPKSTGSLLGQDCGLDPRSPDSPRLTASAPRLPRSMESRSPDASPGLATRGRRGETTHRLSIRALHGSL

SEQ ID NO: 157471 - protein, 306 aa, Zea Mays
MDSSLASAAAIADQRQKIEQYRHILASVLSSSPPDISQAKRFLDHMVSDEVPLVVSRQLLQTFAQDLGKLESDAQKEVAHYALTQIQPRVVSFEEQVVVIREKLAELYESEQQWSKAAQMLSGIDLDSGIRMLDDTNKLSKCVQIARLYLEDDDAVNAEAFINKASFLVTNSHQEVLNLQYKVCYARILDLKRRFLEAALRYYDISQIEQRKIGDEEIDENALEQALSAAVTCTILAGAGPQRSRVLATLYKVVQQIPINLDVYGFSGKYGLTEIIASGLSWVVSDLVQCQPVCIYTFLRSCNLDN

SEQ ID NO: 157472 - protein, 342 aa, Zea Mays
MDSSLASAAAIADQRQKIEQYRHILASVLSSSPPDISQAKRFLDHMVSDEVPLVVSRQLLQTFAQDLGKLESDAQKEVAHYALTQIQPRVVSFEEQVVVIREKLAELYESEQQWSKAAQMLSGIDLDSGIRMLDDTNKLSKCVQIARLYLEDDDAVNAEAFINKASFLVTNSHQEVLNLQYKVCYARILDLKRRFLEAALRYYDISQIEQRKIGDEEIDENALEQALSAAVTCTILAGAGPQRSRVLATLYKDERCSKLKIYPILQKVYLERILRKPEIDAFAEELRPHQKALLPDKSTVLDRAMIEHNLLSASKLYTNISFDELGTLLGIDPRKFPIFGYL

SEQ ID NO: 157473 - protein, 95 aa, Zea Mays
MIEHNLLSASKLYTNISFDELGTLLGIDPRKAEKIASRMIYEDRMRGSIDQVEAVIHFDDDTEELQQWDQQIAGLCQALNDILDSMSSKGITIPV

SEQ ID NO: 157474 - protein, 81 aa, Zea Mays
MISAQSTGDAWPEPIVTRPHRTVRCAPDTVRCAKGTMAATVGFAKQGKKSCTVHVRWCTRLSDVPTNRRQELPNKWSSNGS

SEQ ID NO: 157475 - protein, 297 aa, Zea Mays
MLPCLRLHARFCCCRDAAGLGGSAWHHSSLACTCREAFVASEASVFMNQPPPHMSRPTIIIKLILWLLWTITHLAISILNLWSHLIYSLDCYLISSGLLRKYQNLHLGRLKYLAIVVDSKEAKSTVKVKRLLCWLSSMGVKYVCLYDIEGVLKKSFEPAVNVSRDRTAGEHFGIGANIKDLHCSQREMMIDCLSGSDGKEGIAKAASLLCSTYLNGDTHGDDKRKPAFTEADMAGALKAVGCGGPEPDLLLMYGPARCHLGFPTWRLRYMGPLKSMKYGAIVKALYNFSKKHQNYGK

SEQ ID NO: 157476 - protein, 165 aa, Zea Mays
MGVKYVCLYDIEGVLKKSFEPAVNVSRDRTAGEHFGIGANIKDLHCSQREMMIDCLSGSDGKEGIAKAASLLCSTYLNGDTHGDDKRKPAFTEADMAGALKAVGCGGPEPDLLLMYGPARCHLGFPTWRLRYTEIMYMGPLKSMKYGAIVKALYNFSKKHQNYGK

SEQ ID NO: 157477 - protein, 89 aa, Zea Mays
MAVPTSTSSPLPLLFLHRCTANSSPSVLSFPSSLRGASLRSRAAAAPPAETLSDDGIPDAPPEGAGTGIPLPSSIGDDGEQLLYGSAEN

SEQ ID NO: 157478 - protein, 105 aa, Zea Mays
MRLAPKQKIRIKLRSYWVPLIEDSCKKIIEAAKTTNAKTMGPVPLPTKRRVYCVLNSPHVHKDSRFHFEIRTHQRLIDIMYPTAQTIDSLMQLQLPAGVDVEVKL

SEQ ID NO: 157479 - protein, 77 aa, Zea Mays
MEDKVRSWHLGACDVLSYNVLGNQKECQEGRSYQYCLPIPLQIAHIYCVKRSVSNTVVFIRQVKMKGQCLVSTLTPW

SEQ ID NO: 157480 - protein, 560 aa, Zea Mays
MPTVPQDSPSSRQNQETLLKPRELQLPSFPKHFIQAPAMEASAAVESSAAVSVFEVVSSKQRRPPDTAKLVLNSPSPPSLREELVGVVGKAFRPRAHAGAAAGAGGRPPPRRAWVLTALQCVFPVLQWGRSYTLESFRSDVMAGLTLASLGIPQWHPGNFLIGCSFLIFILTTRFIGRRYKKLFWLSAISPLLSVILSTAAVYATRADRHGVKIIQKVHAGLNPSSVKQIHLNGPHTTECAKIAVICAVIALTEAIAVGRSFASVRGYRLDGNKEMLAMGFSNVAGSLSSCYVATGSFSRTAVNFSAGARSTVSNIVMSITVFVTLELFMKLLYYTPMAVLASIILSALPGLIDIKEACSIWKIDKMDFLTCLGAFVGVLFGSVEIGLAVALGISFAKIIIQSLRPQVEILGRLQGTDIFCSVRQYPVACLTPTVLPIRVDTSFLCFINATSVKERITEWVWEGVETSNGKARERIQAVVLDMSSVVNIDTSGLTALEEIHKELVSLGLQMAIASPGWKAVQKMKVSQVVDRVGQDWIFMTVGEAVEACLAAHKGTALAC

SEQ ID NO: 157481 - protein, 698 aa, Zea Mays
MPTVPQDSPSSRQNQETLLKPRELQLPSFPKHFIQAPAMEASAAVESSAAVSVFEVVSSKQRRPPDTAKLVLNSPSPPSLREELVGVVGKAFRPRAHAGAAAGAGGRPPPRRAWVLTALQCVFPVLQWGRSYTLESFRSDVMAGLTLASLGIPQSIGYANLAKLDPQYGLYTSVVPPLIYAVMGTSREIAIGPVAVVSLLLSSMIQKVVDPAADPATYRSLVFTVTFLAGVFQVSFGLFRLGFLVDFLSHAAIVGFMGGAAIVIGMQQLKGLLGLAHFTNSTDVVSVLKAVCSALRHDPWHPGNFLIGCSFLIFILTTRFIGRRYKKLFWLSAISPLLSVILSTAAVYATRADRHGVKIIQKVHAGLNPSSVKQIHLNGPHTTECAKIAVICAVIALTEAIAVGRSFASVRGYRLDGNKEMLAMGFSNVAGSLSSCYVATGSFSRTAVNFSAGARSTVSNIVMSITVFVTLELFMKLLYYTPMAVLASIILSALPGLIDIKEACSIWKIDKMDFLTCLGAFVGVLFGSVEIGLAVAIIIQSLRPQVEILGRLQGTDIFCSVRQYPVACLTPTVLPIRVDTSFLCFINATSVKERITEWVWEGVETSNGKARERIQAVVLDMSSVVNIDTSGLTALEEIHKELVSLGLQMAIASPGWKAVQKMKVSQVVDRVGQDWIFMTVGEAVEACLAAHKGTALAC

SEQ ID NO: 157482 - protein, 683 aa, Zea Mays
MPTVPQDSPSSRQNQETLLKPRELQLPSFPKHFIQAPAMEASAAVESSAAVSVFEVVSSKQRRPPDTAKLVLNSPSPPSLREELVGVVGKAFRPRAHAGAAAGAGGRPPPRRAWVLTALQCVFPVLQWGRSYTLESFRSDVMAGLTLASLGIPQSIGYANLAKLDPQYGLYTSVVPPLIYAVMGTSREIAIGPVAVVSLLLSSMIQKVVDPAADPATYRSLVFTVTFLAGVFQVSFGLFRLGFLVDFLSHAAIVGFMGGAAIVIGMQQLKGLLGLAHFTNSTDVVSVLKAVCSALRHDPGRRYKKLFWLSAISPLLSVILSTAAVYATRADRHGVKIIQKVHAGLNPSSVKQIHLNGPHTTECAKIAVICAVIALTEAIAVGRSFASVRGYRLDGNKEMLAMGFSNVAGSLSSCYVATGSFSRTAVNFSAGARSTVSNIVMSITVFVTLELFMKLLYYTPMAVLASIILSALPGLIDIKEACSIWKIDKMDFLTCLGAFVGVLFGSVEIGLAVALGISFAKIIIQSLRPQVEILGRLQGTDIFCSVRQYPVACLTPTVLPIRVDTSFLCFINATSVKERITEWVWEGVETSNGKARERIQAVVLDMSSVVNIDTSGLTALEEIHKELVSLGLQMAIASPGWKAVQKMKVSQVVDRVGQDWIFMTVGEAVEACLAAHKGTALAC

SEQ ID NO: 157483 - protein, 188 aa, Zea Mays
MLAMGFSNVAGSLSSCYVATGSFSRTAVNFSAGARSTVSNIVMSITVFVTLELFMKLLYYTPMAVLASIILSALPGLIDIKEACSIWKIDKMDFLTCLAWHFLRKDHHTVASASGGDPWQATRDRYLLQRQAVPCSLPNSDCTAYTRRHILPLLHQRHFRQRKDHRVGLGRSGDLKWKSEGEDTSSCP

SEQ ID NO: 157484 - protein, 377 aa, Zea Mays
MYRPGRLNVIADALSRRDTEEGSTSFGSALCVRSGPSFTFIDDIRRATSHADDAKDVRRRFEAGELQGPWRIDDGLLLHGNRIYVPGHANLRHQALSLAHSAGHEGVWADISIDFIEGLPKVGGKSLILTVVDRFSKYAHFIALGHPYTATTVARAFFEDIVRLHSFPSSIVSDRDPVFTGHVWRDLFGMVGVKLHMSTAFHPQTDDQSEVVNKVLAMYLRCVTGDRPRAWFDWLAWAEYCYNTSFHTALRATPFEVVYGRSPRPSCPIHQGQHGQRRLRLFYAVGTRYLLKLVNVFFKPSRCPRNTTMPTTTTWSMLWETGFGCVCCTERRSPWTPVPSASLGRAMRGHFKWWNTSAASPTVYSFRTGRASMTFST

SEQ ID NO: 157485 - protein, 872 aa, Zea Mays
MRAFNGRRLHDPKPPSFLPLPLAPRTTTPPPPPPSSPPHAIPPLNFRYLTPCPRWSAWVATALSDPVFAPILASSAISGAVAASTAVVSPDRAALSALLSLWDPDTHAFRLPAGPATFTLEDALVLAGLPPAGAPLDRTLTPEEDDLRVRLVVEREKIKELHPCARAARRVSAEVWLEWFDGGGIRPGEDDELRWLGFLAYWLAFFVTPRLRSRGGELPERVFAHAARLSLGERIALGQGMVANLYAEMDKIVTCTVADGVCGRLDVCVPVWMLQVWMWERYKRLCPPELKAPQFPVSNVRVLYWSRRKKKSTSEEALKILLDEVCFEWRPYRHNSLNWMEPKWFNKDTILVTCHGKDKPEWLLDYIAVISQTMLTGFHSDDTDNSVLYNPQLVARQFGYDQAAPVSIVREIHFEGIELWIPSIGRYGMPGEDYVAWCSSSGQFYKHQNDVQYGCSVLRNHENGAISSQLNVNEKCVVVPTLDQFITQVTRRDHINYIVEGQPEKMDNGSHEDETEVIVCGLEACVKDSRTTSVKQNVQKQRDKFAEDGGDSKKKRKVESNTKRSSLQLEGQKYSSLQKALNSDSKKCEELAQVDSDDECIVLEQPKNKCEVINLDDDEEQSVSNREHHNMQLVLELEEFVRSGLLSQWEESSDEDDVSGSKQETQKKSNNDPYAEAAMREYPLFFEFIPQKPHYRGFVNYDETLGDLPYSGLWFLLIGLAKEVLKTSCDTDASEIAYLMKKAQHLEQLGFNVTHLIARLKEPQIRLKKLQDSRARLDHAREKEEGNVVESLSSHLNKLKGNIRMMDSHLDGTKQAFISNIQDKLNEGINLASLEKEVETAEKCCQAMKDEVAAMRMRLSVCSWISNCSLEG

SEQ ID NO: 157486 - protein, 869 aa, Zea Mays
MRAFNGRRLHDPKPPSFLPLPLAPRTTTPPPPPPSSPPHAIPPLNFRYLTPCPRWSAWVATALSDPVFAPILASSAISGAVAASTAVVSPDRAALSALLSLWDPDTHAFRLPAGPATFTLEDALVLAGLPPAGAPLDRTLTPEEDDLRVRLVVEREKIKELHPCARAARRVSAEVWLEWFDGGGIRPGEDDELRWLGFLAYWLAFFVTPRLRSRGGELPERVFAHAARLSLGERIALGQGMVANLYAEMDKIVTCTVADGVCGRLDVCVPVWMLQVWMWERYKRLCPPELKAPQFPVSNVRVLYWSRRKKKSTSEEALKILLDEVCFEWRPYRHNSLNWMEPKWFNKDTILVTCHGKDKPEWLLDYIAVISQTMLTGFHSDDTDNSVLYNPQLVARQFGYDQAAPVSIVREIHFEGIELWIPSIGRYGMPGEDYVAWCSSSGQFYKHQNDVQYGCSVLRNHENGAISSQLNVNEKCVVVPTLDQFITQVTRRDHINYIVEGQPEKMDNGSHEDETEVIVCGLEACVKDSRTTSVKQNVQKQRDKFAEDGGDSKKKRKVESNTKRSSLQLEGQKYSSLQKALNSDSKKCEELAQVDSDDECIVLEQPKNKCEVINLDDDEEQSVSNREHHNMQLVLELEEFVRSGLLSQWEESSDEDDVSGSKQETQKKSNNDPYAEAAMREYPLFFEFIPQKPHYRGFVNYDETLGDLPYSGLWFLLIGLAKEVLKTSCDTDASEIAYLMKKAQHLEQLGFNVTHLIARLKEPQIRLKKLQDSRARLDHAREKEEGNVVESLSSHLNKLKGNIRMMDSHLDGTKQAFISNIQDKLNEGINLASLEKEVETAEKCCQAMKDEVAAMRMRKEDLELVDSVL

SEQ ID NO: 157487 - protein, 129 aa, Zea Mays
MGVTDIARFCLFQISSNLITLRCEIRCQPVGTCYRCPTNVKRKALQSRHRLLRLHILSAMDSSIAPHTPMAFCLSWPLPSTKVPLAATMVAIVLRLTSCCRLQSLWALLLSFCYPFTLLSGNHPVTLLQ

SEQ ID NO: 157488 - protein, 132 aa, Zea Mays
MAAAAPSYSATTTEFGATRSLSPATVPESPRFGSMEAQITASATDPKSPPRPSFARCSPSPAVLLLEAPPTCASVSTPTPPPVSSISTAYGHANSFGVGLEIDWDSIQLDPRWEEEDYKKLLTWKWCMIHWA

SEQ ID NO: 157489 - protein, 185 aa, Zea Mays
MSCLVVRRIVSNFVLLEGSCVGEKFKKAYEGRIEQLGDKSFWPKVEMANEVGAPLGRRGVGRQRKNRIKGCLEGGRGKKACANETVKQWKAKEAATLLKNGFLATTDLHKNLEHRISTKLYKTLVHHMNSHRLRSHFQGGSLNALGKEEESHEKGRGKTGSLNVAPWLTPSVLSSKCERTSAFNH

SEQ ID NO: 157490 - protein, 84 aa, Zea Mays
MAIDVLQLMCLTMSLHILQKELTKLASNATLKSLSLVLDLPPFTCPMKLILNGHEKVINSLLGKLCFCLKGRGAKVMHHENFRF

SEQ ID NO: 157491 - protein, 487 aa, Zea Mays
MFIESFRVESPHVRYGPTEIESEYRYDTTELVHEGKDGASRWVVRPKSVKYNFRTRTAVPKLGGISWATKDKVQQANYYGSLTQASTIRVGSYNGEEIYAPFKSLLPMVNPDDIVFGGWDISNMNLADSMTRAKVLDIDLQKQLRPYMESMVPLPGIYDPDFIAANQGSRANSVIKGTKKEQVEQIIKDIREFKEKNKVDKIVVLWTANTERYSNVCAGLNDTMENLLASVDKNEAEVSPSTLYAIACVMEGVPFINGSPQNTFVPGLIDLAIKNNCLIGGDDFKSGQTKMKSVLVDFLVGAGIKPTSIVSYNHLGNNDGMNLSAPQTFRSKEISKSNVVDDMVSSNAILYEPGEHPDHVVVIKYVPYVGDSKRAMDEYTSEIFMGGKNTIVLHNTCEDSLLAAPIILDLVLLAELSTRIQLKAEGEDKFHSFHPVATILSYLTKAPLVPPGTPVVNALAKQRAMLENIMRACVGLAPENNMILEYK

SEQ ID NO: 157492 - protein, 380 aa, Zea Mays
MVNPDDIVFGGWDISNMNLADSMTRAKVLDIDLQKQLRPYMESMVPLPGIYDPDFIAANQGSRANSVIKGTKKEQVEQIIKDIREFKEKNKVDKIVVLWTANTERYSNVCAGLNDTMENLLASVDKNEAEVSPSTLYAIACVMEGVPFINGSPQNTFVPGLIDLAIKNNCLIGGDDFKSGQTKMKSVLVDFLVGAGIKPTSIVSYNHLGNNDGMNLSAPQTFRSKEISKSNVVDDMVSSNAILYEPGEHPDHVVVIKYVPYVGDSKRAMDEYTSEIFMGGKNTIVLHNTCEDSLLAAPIILDLVLLAELSTRIQLKAEGEDKFHSFHPVATILSYLTKAPLVPPGTPVVNALAKQRAMLENIMRACVGLAPENNMILEYK

SEQ ID NO: 157493 - protein, 197 aa, Zea Mays
MKSVLVDFLVGAGIKPTSIVSYNHLGNNDGMNLSAPQTFRSKEISKSNVVDDMVSSNAILYEPGEHPDHVVVIKYVPYVGDSKRAMDEYTSEIFMGGKNTIVLHNTCEDSLLAAPIILDLVLLAELSTRIQLKAEGEDKFHSFHPVATILSYLTKAPLVPPGTPVVNALAKQRAMLENIMRACVGLAPENNMILEYK

SEQ ID NO: 157494 - protein, 76 aa, Zea Mays
MACTRALKEEKIAARSAILPMLQAEEDERFVKEWKKYLEEEARIMKDVPGWKVGESVYNSGKWMPPATGELRPEVW

SEQ ID NO: 157495 - protein, 535 aa, Zea Mays
MEAGGRRLAAGRVEASPERGRPAAYASAGRPAPARPMRRVQIIYYLCRNGQLEHPHFMELAQHPHQPLRLKDVMDRLTLLRGKGMPALFSWSCKRNYKNGYVWNDLSENDVIYPSDGVEYVLKGSEIFPGCSSSGTHLIPRLFCVHLVRVLSTMVSFLLTGVSRAAAVLRLVKASAAFLVCFTRLHCSVASPFLHNLVIREDFLRCGSISVAHHLELIIGHLPRQIIQFQMGGQAVRVHFFPLFSDTTTPSPFSPGRADRFQHLRVTDRSPTKPPLALPHMSHNKQYPVDGYGDYDAVEDRDDDELGHSYHHRRTASGRPEKAAAAAVSARAATNRARPVELPVEETSPPSSTSSDKPPPPAALLMQQQQQPGRRATSEVPEPSRPGSMLLQLIACGSTTAPSAAGGGGGPGKCRAEPRRSCGLVSRLSARGGADADEDEDGVGAGTDLGRRFGRLAAEDKEYFSGSIVEGGGGRGTPLPASSLKRSNSYNEERPGGVAGGAAIGEEAMDEGDGGVRGRCIPGRKKPPPQQQQQK

SEQ ID NO: 157496 - protein, 569 aa, Zea Mays
MATVWSGCSTSCGSFGQELPPRGKRGGGEGTRFLPRRRGRIRGDARQTQALSAAMVTVGACVCRAAPCLLDSVVDGTEDVSVGFGGIDGEPLADGYDGGKRRGPRRRPTRPTVFQKEVGARTAPPAMASEPDSKSEHGVSRLHFLEERDEETLSRRLIKLSQNNKVRSATELFDSMRASGLQPSAHACNSLLACYVRRSPLADAMRMFEFMKAKGMATGHTYTMILKAVASNQGYVSALEMFDKIEEEEGSKKIIDVIVYNTMISVCGRAKEWMLVERLWRRLEQHSLNGTLLTYDLLVSIFVQCGQSELAIAAYQEMLQKGLDPSEDIMKAIIASCTKEGKWEFAMSTFSRMLRAGMKPSLILFNSIINSLGKAGQDELAFRMYHLLEKSGLKPDQYTWSALLLALYRSGRCWDCLKLFHGIKGKHPTLLNDHLYNTALMSCEKLGQWEHGLQLLWLMEKRGLKLSVVSYNHVIGACEVASKPKVALKVYQRMINQRCSPDTFTHLSVIRACIWGSLWTEVEDILEWLPKLLSFKKSGTTLYEYEVLSIMGVKLPSIKNVTKYQHDAL

SEQ ID NO: 157497 - protein, 162 aa, Zea Mays
MQRLVLAGNLIEIIPANIGYLQNLKILTLDRNRISILPEELGSLSNLQQLSVPQNFLLCLPKSIGDLRNMSVLNVSDNKLKELPESIGGCSSLEEFQANGIMNRIFVVQLQQNCNSLSPNLNSAFSASTKLTERLHGSSEFIPARQPNHNGPVPTNGWIWRV

SEQ ID NO: 157498 - protein, 544 aa, Zea Mays
MLHQENSEAFGRHHSEQLACVNMRGADNGHPNFLPEKCQIAVCPEVHQRGEKVGLFDEELVHGIHLTSPCVQSPFLPSGVKETPIVDHNKRPASSDILDIVECKRLKQEDQIVTKEDNHTSAEEEFHDYPTYTTCERSFDSPLYESEESEDEGVDSPLHCSHARTYVEDGLWPASFHQSVGPFSLRKPVPIGSNHQAELPECRPFGGRTEEDESVKWIRNSVVPMPGTDASSLVLEPVHCKAGCDCLDEGSINCVKKHVMEARENLKDSVGADAFRELGFYDMGEEVASRWSEEEERLFQQVVSSNRASLRRNFWDELPLAFPSKSSKELVSYYFNVFMLRKRAEQNRFDPANIDSDDDEWQAGGDFEFPITGRTDEYMPIESLTDQDDVACNPFPLEGDLYGDSDDEDELDNSSGDRHNGVQRAGMLSEGHPEMSFIDHDQQTLKLDADAQDDSCTSFEAHQVGCDGGAHTDIGNHYRSDDGLCGGAEHGFFGDHCDTKEWGFGFSTGWERHDFLSTNNVIEEVFGKGSSEDGSDTATGQDLI

SEQ ID NO: 157499 - protein, 486 aa, Zea Mays
MVIRISFLRNARLQSPFLPSGVKETPIVDHNKRPASSDILDIVECKRLKQEDQIVTKEDNHTSAEEEFHDYPTYTTCERSFDSPLYESEESEDEGVDSPLHCSHARTYVEDGLWPASFHQSVGPFSLRKPVPIGSNHQAELPECRPFGGRTEEDESVKWIRNSVVPMPGTDASSLVLEPVHCKAGCDCLDEGSINCVKKHVMEARENLKDSVGADAFRELGFYDMGEEVASRWSEEEERLFQQVVSSNRASLRRNFWDELPLAFPSKSSKELVSYYFNVFMLRKRAEQNRFDPANIDSDDDEWQAGGDFEFPITGRTDEYMPIESLTDQDDVACNPFPLEGDLYGDSDDEDELDNSSGDRHNGVQRAGMLSEGHPEMSFIDHDQQTLKLDADAQDDSCTSFEAHQVGCDGGAHTDIGNHYRSDDGLCGGAEHGFFGDHCDTKEWGFGFSTGWERHDFLSTNNVIEEVFGKGSSEDGSDTATGQDLI

SEQ ID NO: 157500 - protein, 163 aa, Zea Mays
MQPFSFSYRCEKSKYLSVCVGSVCSYRSISSSVGVLRYFRSCLRSQKTLEKPTPTKIQVSLSLLGAELKKMEICAMWNHRIFHFGLDQASQASSRTFSSTTRKGNPISVSHRKPRPTNRILVGLVGKEEWVSGLLSRFVHILNFDLQSQIILLLPAYCAYSDK

SEQ ID NO: 157501 - protein, 420 aa, Zea Mays
MAGGFRVLHLVRPFLAFLPEVQSADRKIPFREKVIYTVISLFIFLIIEVDNSVREDRALLNGAQKLLGILIAIGEAVAYVLSGMYGSVSQLGTGNAILIILQLFFAGIIVICLDELLQKGYGLGSGISLFIATNICENIIWKAFSPTTINSGRGAEFEGAVIALFHLLITRTDKVRALREAFYRQNLPNVTNLLATVLVFLIVIYFQGFRVVLPVRSKNARGQQGSYPIKLFYTSNMPIILHSALITNLYFISQLLYRKYSGNFLVNLLGKWKESEYSGHSIPVGGLAYYVTAPSSLADVLANPFHALFYVVFMLSACALFSKTWIEVSGSSAKDVAKQLKEQQMVMPGHRESNLQKELNRYIPTAAAFGGVCIGALTVLADFMGAIGSGTGILLAVTIIYQYFETFEKERATELGFFGF

SEQ ID NO: 157502 - protein, 1546 aa, Zea Mays
MSHFHPTQHAGDNDFQMWQQQMMFKQLQEFQRQQQLQQSDHGARMQPSFGQFHAPAKPLPADQLSTMSNEMANNEAMNSAWPHNFTGGDPSLTSNSQMLNNGSTNWDQIVGAPGVGNFMNSSMFANAQNQSMRPMGIATHQVDQSFYPMHPTSSRGHGNQYSQFLGIHADSQSAVARVGPDQSEKTSRPFNSSMNEHGLHMQGPASSMHNFRGKGGFLNNSLMQSQGDSIRAGSPVTVNQLQHGIQTQDFHGRSNQVDLQVGMQDKSAMQVGQASRGASLDPTEEKILFGGDEDGNWGALLRGDNDNGNSLDNDNYGGGYSSLQSGSWSALMQEALQSTTSENSPKEEWSGLSFHKTEQVMANNATLSGHDDNKLTRLSGANLENARPSPTSSYADGTMNNPNLASFQHAIRPPFERRDHMTHESPNAPVNNHQSTSEVNNGYIQHGLKQIQSDGRQEQVHLANGIWPHQKTELLRNNSQSTGMHATPPGAHGFWISQQNTADHNMNRESSNNQNDWKANNVLGQDMHNSQNVFNSNENSWKSTGGNVNSVQRLQQRKSDVSTTNESSDGKSISMMSSSMSMMAQDHYQMVTSRSGEQIGMNRNMAHRAPEISESPRKSTEQRPGDFNQEYLNATPNERQTHTLNHGQHISDSAPRRHSIFAGKESENLGQSSQQAMGSYMLQNRAMGSSGMNIGPSPGNPVSNNLFPPQMRNNLQHHFGTNSLVSNNMPSVSEEQLQSRHGLPNSSSALPFGGADTGLSQNRAVQNSQHMLQLLHKVDNSRNSDVAADIPNNPLGVVSAQQQPNHSLQGFGLRLAPPSQRQSNSGNLWSSQTNVDGKQSDHSAQDDDRTPQPSTPSQSLTPQHQNSQPSPFHSSETENTGQPIARFPQLSPGQHYPVTDDRSGPAPMLQQQSQQSNFATVFKNVWTNISAQRLGGMQANKITPNILQSMMFPNNSSASNLWSSQKADDQGQRASTPSDIATTSANSQNQDPKRAADNDAGLASSQKANLESKGTTVTGGNESLQKPFSDGNSMNAVSSFAQLHQQGILGAKHGENPGANFQAMNSSHNSVNNSGGIVLHGSPAPSNIQQQNYSLLHQMHALRHTDIDPGSLAGKTTRPDVGSDASQIDWKSGQRFAHVDNNQTKSAADNVGSPGVPGSFTSDMKILSFASRSEERNVNIPSHLPSGERPFPGMVTAQNDNQNQVQPMGTSATSNSVESSERPRINPQMAPSWFGHYGNYRNGQSVAVLNAQKPTALPYNFPKVPCNNENNNSAENRVESGQSVTPGHHLPSTRMEALVPSNVKVSPMMRRPKKRKAMDSALVSWHKIIESPQNLRSISTSEMDWAWAANRLIEKDEAETSDDTSLHYLPRKRLILTTQLIQQLLPSIPATILRAQAVSAFESATYTLSMLTLRDACSMASSSLYNSCSPVEDENNPSEQTRSAKKMEDKVSKVVEVFVGRIRKMENDFISLNKRASMLDVQLECQDLERISIVNRLGRFHGRNHAAAVESSSASEMTPRRIFPERHVMSFAVPGNLPEGVHCLSL

SEQ ID NO: 157503 - protein, 1492 aa, Zea Mays
MSHFHPTQHAGDNDFQMWQQQMMFKQLQEFQRQQQLQQSDHGARMQPSFGQFHAPAKPLPADQLSTMSNEMANNEAMNSAWPHNFTGGDPSLTSNSQMLNNGSTNWDQIVGAPGVGNFMNSSMFANAQNQSMRPMGIATHQVDQSFYPMHPTSSRGHGNQYSQFLGIHADSQSAVARVGPDQSEKTSRPFNSSMNEHGLHMQGPASSMHNFRGKGGFLNNSLMQSQGDSIRAGSPVTVNQLQHGIQTQDFHGRSNQVDLQVGMQDKSAMQVGQASRGASLDPTEEKILFGGDEDGNWGALLRGDNDNGNSLDNDNYGGGYSSLQSGSWSALMQEALQSTTSENSPKEEWSGLSFHKTEQVMANNATLSGHDDNKLTRLSGANLENARPSPTSSYADGTMNNPNLASFQHAIRPPFERRDHMTHESPNAPVNNHQSTSEVNNGYIQHGLKQIQSDGRQEQVHLANGIWPHQKTELLRNNSQSTGMHATPPGAHGFWISQQNTADHNMNRESSNNQNDWKANNVLGQDMHNSQNVFNSNENSWKSTGGNVNSVQRLQQRKSDVSTTNESSDGKSISMMSSSMSMMAQDHYQMVTSRSGEQIGMNRNMAHRAPEISESPRKSTEQRPGDFNQEYLNATPNERQTHTLNHGQHISDSAPRRHSIFAGKESENLGQSSQQAMGSYMLQNRAMGSSGMNIGPSPGNPVSNNLFPPQMRNNLQHHFGTNSLVSNNMPSVSEEQLQSRHGLPNSSSALPFGGADTGLSQNRAVQNSQHMLQLLHKVDNSRNSDVAADIPNNPLGVVSAQQQPNHSLQGFGLRLAPPSQRQSNSGNLWSSQTNVDGKQSDHSAQDDDRTPQPSTPSQSLTPQHQNSQPSPFHSSETENTGQPIARFPQLSPGQHYPVTDDRSGPAPMLQQQSQQSNFATVFKNVWTNISAQRLGGMQANKITPNILQSMMFPNNSSASNLWSSQKADDQGQRASTPSDIATTSANSQNQDPKRAADNDAGLASSQKANLESKGTTVTGGNESLQKPFSDGNSMNAVSSFAQLHQQGILGAKHGENPGANFQAMNSSHNSVNNSGGIVLHGSPAPSNIQQQNYSLLHQMHALRHTDIDPGSLAGKTTRPDVGSDASQIDWKSGQRFAHVDNNQTKSAADNVGSPGVPGSFTSDMKILSFASRSEERNVNIPSHLPSGERPFPGMVTAQNDNQNQVQPMGTSATSNSVESSERPRINPQMAPSWFGHYGNYRNGQSVAVLNAQKPTALPYNFPKVPCNNENNNSAENRVESGQSVTPGHHLPSTRMEALVPSNVKVSPMMRRPKKRKAMDSALVSWHKIIESPQNLRSISTSEMDWAWAANRLIEKDEAETSDDTSLHYLPRKRLILTTQLIQQLLPSIPATILRAQAVSAFESATYTLSMLTLRDACSMASSSLYNSCSPVEDENNPSEQTRSAKKMEDKVSKVVEVFVGRIRKMENDFIRYAMANDCNGFHWCMVLYPPQH

SEQ ID NO: 157504 - protein, 1498 aa, Zea Mays
MSHFHPTQHAGDNDFQMWQQQMMFKQLQEFQRQQQLQQSDHGARMQPSFGQFHAPAKPLPADQLSTMSNEMANNEAMNSAWPHNFTGGDPSLTSNSQMLNNGSTNWDQIVGAPGVGNFMNSSMFANAQNQSMRPMGIATHQVDQSFYPMHPTSSRGHGNQYSQFLGIHADSQSAVARVGPDQSEKTSRPFNSSMNEHGLHMQGPASSMHNFRGKGGFLNNSLMQSQGDSIRAGSPVTVNQLQHGIQTQDFHGRSNQVDLQVGMQDKSAMQVGQASRGASLDPTEEKILFGGDEDGNWGALLRGDNDNGNSLDNDNYGGGYSSLQSGSWSALMQEALQSTTSENSPKEEWSGLSFHKTEQVMANNATLSGHDDNKLTRLSGANLENARPSPTSSYADGTMNNPNLASFQHAIRPPFERRDHMTHESPNAPVNNHQSTSEVNNGYIQHGLKQIQSDGRQEQVHLANGIWPHQKTELLRNNSQSTGMHATPPGAHGFWISQQNTADHNMNRESSNNQNDWKANNVLGQDMHNSQNVFNSNENSWKSTGGNVNSVQRLQQRKSDVSTTNESSDGKSISMMSSSMSMMAQDHYQMVTSRSGEQIGMNRNMAHRAPEISESPRKSTEQRPGDFNQEYLNATPNERQTHTLNHGQHISDSAPRRHSIFAGKESENLGQSSQQAMGSYMLQNRAMGSSGMNIGPSPGNPVSNNLFPPQMRNNLQHHFGTNSLVSNNMPSVSEKMMMAQEQLQSRHGLPNSSSALPFGGADTGLSQNRAVQNSQHMLQLLHKVDNSRNSDVAADIPNNPLGVVSAQQQPNHSLQGFGLRLAPPSQRQSNSGNLWSSQTNVDGKQSDHSAQDDDRTPQPSTPSQSLTPQHQNSQPSPFHSSETENTGQPIARFPQLSPGQHYPVTDDRSGPAPMLQQQSQQSNFATVFKNVWTNISAQRLGGMQANKITPNILQSMMFPNNSSASNLWSSQKADDQGQRASTPSDIATTSANSQNQDPKRAADNDAGLASSQKANLESKGTTVTGGNESLQKPFSDGNSMNAVSSFAQLHQQGILGAKHGENPGANFQAMNSSHNSVNNSGGIVLHGSPAPSNIQQQNYSLLHQMHALRHTDIDPGSLAGKTTRPDVGSDASQIDWKSGQRFAHVDNNQTKSAADNVGSPGVPGSFTSDMKILSFASRSEERNVNIPSHLPSGERPFPGMVTAQNDNQNQVQPMGTSATSNSVESSERPRINPQMAPSWFGHYGNYRNGQSVAVLNAQKPTALPYNFPKVPCNNENNNSAENRVESGQSVTPGHHLPSTRMEALVPSNVKVSPMMRRPKKRKAMDSALVSWHKIIESPQNLRSISTSEMDWAWAANRLIEKDEAETSDDTSLHYLPRKRLILTTQLIQQLLPSIPATILRAQAVSAFESATYTLSMLTLRDACSMASSSLYNSCSPVEDENNPSEQTRSAKKMEDKVSKVVEVFVGRIRKMENDFIRYAMANDCNGFHWCMVLYPPQH

SEQ ID NO: 157505 - protein, 902 aa, Zea Mays
MARVERQPRNPSRLAPTSHPAPALPTTPAARRPGTPRNAAQGTVCATCVCGSGNNARCHCKQDARHNQTHHGNDGTATAGGIAKPDSQDKLKMARFSGGTYSKPDARVKLIPAEDITYLQRRKPCGRTVGSVGSQKRHCRRSVTPPPSSRRVSLLGSRSLAENPIPSVSSHDSCLPHKRLETAENRDPCAGGHISSSVTPCTSLKNLASPSCKSSQPLSTNLNTDATPRNLDRMVGIQTQALARSSSSSILHSQGQNSEKVSASLPKEAVTNPASPSPKQIGAQHPSDNPLVTKAGPSKSVCTHESEKLCSRDINLTATSTTVPVLQAPVVEPALLSSTSVFTERPFEVYPDTRTAAPGMQELSVKHVLLTPIPVRHEPSTECLKVPPKHSLHSIASAQHGALSQERNSGASISHGRSSASAGALSILHMKLAKKHYQSQACWKGNFHVTGGLIHTCDGLEAHFPLEISVRVYEASNQMPEILNLEAVPISQLWPKKFKMVPPDIEDIGLWFLSSRQRPHWSFDHLLEKVCSHTGLFTKIGDIELAVFSSKLLTPQDQRKDGKLYFWGVFGKHMRKKSCQPNSHIKNVEISNPSQPNGKSEEVGMKLDMRKGKEKESAKSDEVLDSTGGNDTDRVNGCVAVLEAPDSDPASSCSVPAASSLGGYCHHDSAKNSSSILDSSCQPADGSSVSPDLMLDIPPGISAHIPPGFTKAHCQLQMGTAALSFADRHRSLISDIPPGFTEVHRGLPPAIPPAGPACVSTPGTEKKPFVRFSLNVPRPVGMGAPPGFTPLHAVKKEPGLPDVHETADKHTLHSLAAAAAAVVKPGKGGEMKIADNEVKTEQDENSEERDFPKIRRLSDLYCRPSEDSTEFSQRMPARLPDKFQEQRPEKRLVHPREEVGRR

SEQ ID NO: 157506 - protein, 238 aa, Zea Mays
MFAGFATHFSPRLPQHGPYGKEREGGSGIDRGKPSLCFRDNSGDAMAMAALRREGRRLLLAPTVPNPSSAAASAAVTRSSAMSQPEMAPIGARSISTQVVRNRMKSIKNIQKITKAMKMVAASKLRAVQTRTENSRGLWQPFTALLGDTPSVDVKKNVIVAITSDKGLCGGINSTSVKVSRALHKLTSGPEKESKYVILGEKGKVQLLRDSKNSIEMTASELQKNPINYTQAQMKLSA

SEQ ID NO: 157507 - protein, 499 aa, Zea Mays
MTEDRAHKVADEPAASGRQRPERKKRKWDQPAEDLVSAAVTAAAVSGMPVMNFGALPGVVLPGVTAYGAATLPSVVPVPYSLPPHIAPSVLQNAAAAAQKLSQAKIPDEVIAREIVINDADPSVRYKLTKRQTQEEIQKCTNTVIITRGKYHPPNLLPDGEKPLYLHISAGSQLKDTAERIKAVDRAASMIEEILKQGTTSESISVPFSSSTGQAVRPFSASVFLGFDADPSLNITARIRGPNDQYINHIMKETGVTVVLRGKDSENLGSCHSEASQQPLHLYLTSMHLKNLEAAKVLAENLLDTVAAEFGASRISSSKVYGAVPPPQQLLAGVDTSGTKSDVHYIVGPNVLSGATHSFASTGVIAPVVAPAVTVQSGAPTYSGVPLPSNMAYPIPPANGGAFYSGYGDIYPQATPLQQLAFTLKHASSSATQAVPVTSTPTSMATKGNSILDAEMDKRSRRKFQELPVSKGPATESQAINLNSMATPSFPVLFTRCLS

SEQ ID NO: 157508 - protein, 241 aa, Zea Mays
MKETGVTVVLRGKDSENLGSCHSEASQQPLHLYLTSMHLKNLEAAKVLAENLLDTVAAEFGASRISSSKVYGAVPPPQQLLAGVDTSGTKSDVHYIVGPNVLSGATHSFASTGVIAPVVAPAVTVQSGAPTYSGVPLPSNMAYPIPPANGGAFYSGYGDIYPQATPLQQLAFTLKHASSSATQAVPVTSTPTSMATKGNSILDAEMDKRSRRKFQELPVSKGPATESQVFSLTLSEAHRWQ

SEQ ID NO: 157509 - protein, 346 aa, Zea Mays
MTEDRAHKVADEPAASGRQRPERKKRKWDQPAEDLVSAAVTAAAVSGMPVMNFGALPGVVLPGVTAYGAATLPSVVPVPYSLPPHIAPSVLQNAAAAAQKLSQAKIPDEVIAREIVINDADPSVRYKLTKRQTQEEIQKCTNTVIITRGKYHPPNLLPDGEKPLYLHISAGSQLKDTAERIKAVDRAASMIEEILKQGTTSESISVPFSSSTGQAVRPFSASVFLGFDADPSLNITARIRGPNDQYINHIMKETGVTVVLRGKDSENLGSCHSEASQQPLHLYLTSMHLKNLEAAKVLAENLLDTVAAEFGASRISSSKVYGAVPPPQQLLAGVDTSGTKSDVHYI

SEQ ID NO: 157510 - protein, 483 aa, Zea Mays
MTEDRAHKVADEPAASGRQRPERKKRKWDQPAEDLVSAAVTAAAVSGMPVMNFGALPGVVLPGVTAYGAATLPSVVPVPYSLPPHIAPSVLQNAAAAAQKLSQAKIPDEVIAREIVINDADPSVRYKLTKRQTQEEIQKCTNTVIITRGKYHPPNLLPDGEKPLYLHISAGSQLKDTAERIKAVDRAASMIEEILKQGTTSESISVPFSSSTGQAVRPFSASVFLGFDADPSLNITARIRGPNDQYINHIMKETGVTVVLRGKDSENLGSCHSEASQQPLHLYLTSMHLKNLEAAKVLAENLLDTVAAEFGASRISSSKVYGAVPPPQQLLAGVDTSGTKSDVHYIVGPNVLSGATHSFASTGVIAPVVAPAVTVQSGAPTYSGVPLPSNMAYPIPPANGGAFYSGYGDIYPQATPLQQLAFTLKHASSSATQAVPVTSTPTSMATKGNSILDAEMDKRSRRKFQELPVSKGPATESIFSDLV

SEQ ID NO: 157511 - protein, 516 aa, Zea Mays
MTEDRAHKVADEPAASGRQRPERKKRKWDQPAEDLVSAAVTAAAVSGMPVMNFGALPGVVLPGVTAYGAATLPSVVPVPYSLPPHIAPSVLQNAAAAAQKLSQAKIPDEVIAREIVINDADPSVRYKLTKRQTQEEIQKCTNTVIITRGKYHPPNLLPDGEKPLYLHISAGSQLKDTAERIKAVDRAASMIEEILKQGTTSESISVPFSSSTGQAVRPFSASVFLGFDADPSLNITARIRGPNDQYINHIMKETGVTVVLRGKDSENLGSCHSEASQQPLHLYLTSMHLKNLEAAKVLAENLLDTVAAEFGASRISSSKVYGAVPPPQQLLAGVDTSGTKSDVHYIVGPNVLSGATHSFASTGVIAPVVAPAVTVQSGAPTYSGVPLPSNMAYPIPPANGGAFYSGYGDIYPQATPLQQLAFTLKHASSSATQAVPVTSTPTSMATKGNSILDAEMDKRSRRKFQELPVSKGPATESQFLQFPQRRLQFKFDITIKNNSWIVRLASSCLLYSYTCF

SEQ ID NO: 157512 - protein, 221 aa, Zea Mays
MTEDRAHKVADEPAASGRQRPERKKRKWDQPAEDLVSAAVTAAAVSGMPVMNFGALPGVVLPGVTAYGAATLPSVVPVPYSLPPHIAPSVLQNAAAAAQKLSQAKIPDEVIAREIVINDADPSVRYKLTKRQTQEEIQKCTNTVIITRGKYHPPNLLPDGEKPLYLHISAGSQLKDTAERIKAVDRAASMIEEILKQGTTSESISVPFSSSTGQVILSISP

SEQ ID NO: 157513 - protein, 122 aa, Zea Mays
MCQGPCNDCRRNQPLPLASPSSTELSPRMPFVVKPPEKKHRLPSAYNRFMREEIQRIKAAKPDIPHREAFSMAAKNWAKCDPRCSTAASTETSNSAPAEPRVVPTPQLTEPRFDLEGQGASH

SEQ ID NO: 157514 - protein, 393 aa, Zea Mays
MGSLGEVGDGKEIFHGHGHSDPVVDELNRLQNLLREKERELGHAYSEIKGLKVTEALKDKAIAELSKELKRQDERMRSMEKQLEQKNLEVKRLNNERKEALSAQFAAEATLRRIHSSQKDEESVPFDAIIAPLESDIRKYRHELARAKVYVNRVASTAANEWKDDSDKLMPVKRWLEERRLLQGEIQRLRDRITVAEKSAKIEAQLNDKLKRRLKSLEEDMRNKTSNSSTKEINKQATPKRSLSQPKQPKTMRVLPQLYSPEVVDKRRPISQPRASMVGKVLKQPNSEIEPTKKSTVVKRFDSPGRRTISSKEECPMKNQLWASKTKTDVIVGKENKVQKPNSKARLNASHSQGHVDTKVFDGNDEYGLQNSEHHEAMANERNGNSSSDESSP

SEQ ID NO: 157515 - protein, 246 aa, Zea Mays
MKRSQIIEALGATVERVRPVSITHRDHFVNIARRRALEANKLAAAQRESSEKQTNGLTHVDSEMLDDKLAVMQRESNKMQNGGPAHVNTEFSHCGKCDVNSDSKGGFFADQFENLANYRAHYECTGPEIWKQTKGNLHAFVAAAGTGGTIAGVSRYLKNRSIKCFLMDPPGSGLFNKVTRGVMYTKEEAEGKRLKNPFDTITEGIGINRVTKNFMMAELDGAYRGSDREAVEMSRYMVTSEIFVVI

SEQ ID NO: 157516 - protein, 297 aa, Zea Mays
MKRSQIIEALGATVERVRPVSITHRDHFVNIARRRALEANKLAAAQRESSEKQTNGLTHVDSEMLDDKLAVMQRESNKMQNGGPAHVNTEFSHCGKCDVNSDSKGGFFADQFENLANYRAHYECTGPEIWKQTKGNLHAFVAAAGTGGTIAGVSRYLKEKNRSIKCFLMDPPGSGLFNKVTRGVMYTKEEAEGKRLKNPFDTITEGIGINRVTKNFMMAELDGAYRGSDREAVEMSSSSAMNCVGAVRVAQDLGPGHTIVTILCDSGMRHLSKFFNEQYLADHGLTPTATGLEFLDK

SEQ ID NO: 157517 - protein, 504 aa, Zea Mays
MPFRPSLPCRCPFDRKLTSFLSAVASLADSRSRSPFPPAGAVPATLTPTAYNALMSAYSRAGRHDEVLRLFFSLPFAPTAPLFTTLISSLAASGSKSAALDAFSLLASGIGPTTSAFTALLKSIDAASSESVYRAFFATMAAMECAPDAATYNCLIWILCDSQRLDEAWGVLDSMLEVGVCPTVRSYTAILHGYCKQGRVLEAERLLDTMIQVGCAPDVISYSVLIQGLCRVGEFGKVERILGESEAKGWTPNAVTYNIYMSALCRMGFLDEAFRQVDVMHSRGVYMTIETVNILFDCLCRGSMFSEALTLLECSEELNWDVDVFCYNTMMSRLCDTGDIARVLKLLVDLVKKGIGPDMFSFTIAIRSLCRAGKFKVAKCLLDNKGIEYDVVAFNTLIHGLCMAGELHEMLQTYMDMTSRNVFPNNFTIGMVIDSFCKNREFGAAIKVFLEYSEGCLVPDHFFRLNTWLVKAKGWEYLLTLLRTMRSKVCWNVSPAHSTSQPVV

SEQ ID NO: 157518 - protein, 270 aa, Zea Mays
MLEGKKNHMIERRTAIIREAIHMRYSLLPYFYTLFREASVNGIPVMRPLWLEFPDDKETYNNGEAFMVGPSLLAQGIYEEGQKSVSVYLPGKESWYDLRNGSPYKGSATHKLQVLEDSIPSFQRAGTIVPRKDRFRRSSTQMVNDPYTLVIALNSSGAGEGELYVDDGKSYEYQQGAFIHRRFVFADNKLTSFNIGPDDLGKKFRSDCVIERIIILGLRSGVKKAIIEPGNQELEIESGPISLRSGSSPVAPTIRRPNVCIADSWTIRIA

SEQ ID NO: 157519 - protein, 425 aa, Zea Mays
MAIDKVDAKEREKIEAVRKLLCKQAPLSAKQAQYCNDACLERFLRSRGDSVKKAAKHLRTVLSWRESVGADHIMADEFSAELADGVAFVSGHDDDGRPVVVFRIKQDYPKFHSQKSLFPLGVGFPQPTHGHAQDRRRLLPRPPPPRLRHRPALPLLRPLEGGAAVRGAGASDGGGVLPGLRGLARGRVFHGVPADRVAAVRAGGRRGEEPGRGVGLVAVLRHPHRQPHQAVVPLHHPHLGGLPLRGAHLQQPVAGRRVPALRALLLLRLARHAALHGRHAAAVPARRGRAPDAVLRRQGPEDPAAAAAVPADAAPVVPAVAVDAVRVPEGRAGQPRGARARVLPPVPALLPPALRRDFLPRQDAPPARRPHIHRRRQVQAEAGAAAAAAASPRWAPPPAPLPAAAEDLILVSSLHGDQRIFLHTP

SEQ ID NO: 157520 - protein, 288 aa, Zea Mays
MRGPSGDDCIERKGVDDPCHNSNCHWHRHKQQCSGNYCRVQESSPGGPELKCLEEAFNEGKVEEPACTSWHTTHTSNKSRRSNKNEREDASVEFLHVAHNAVVCSGLDSSSKDRSNKKIKISKDVNSDLGRTETVQEAPKRRRTAVLDNQECSRRKKRKQSNRCGSYSVIIEWLNYYCLSESDEDEVPLINKRTERRRRQRLHEMYLARESNDVEFGSSTSHKVGSCSLAPKDNNKGESVPASQPEERSCSSHPVSSNGVAGNQAGHEHMSSPTDSPIRGEIVDISDG

SEQ ID NO: 157521 - protein, 167 aa, Zea Mays
MTLYLQLVSTSLHAGSPRLALLHLRRSCEFNPRVSMSSYSPPPPPPRDQSMDTEAPNAPITRERRLNPDLQEQLPKPYLARALEAVDPSHPQGTKGRDPRGMSVLQQHAAFFDRNGDGVIYPWETFQGLRAIGCGLTVSFAFSILINLFLSYPTQPRINSEPESRCD

SEQ ID NO: 157522 - protein, 278 aa, Zea Mays
MTLYLQLVSTSLHAGSPRLALLHLRRSCEFNPRVSMSSYSPPPPPPRDQSMDTEAPNAPITRERRLNPDLQEQLPKPYLARALEAVDPSHPQGTKGRDPRGMSVLQQHAAFFDRNGDGVIYPWETFQGLRAIGCGLTVSFAFSILINLFLSYPTQPGWLPSPLLSIRIDNIHKGKHGSDSETYDTEGRFDPSKFDAVFSKYGRTHPNALTKDELSSMLQGNRNTYDFLGWLAAAGEWLLLYSLAKDKDGLLQRETVRGLFDGSLFERLEDDNNKKKSS

SEQ ID NO: 157523 - protein, 91 aa, Zea Mays
MSLEKPHATFNFTLNYPIYKLQDRTNELKDQMEAALLLNPYELFACPAALSRSYRWTSPCSCTSCVRRRKKLMADQIPECSSRVRKIVIRF

SEQ ID NO: 157524 - protein, 648 aa, Zea Mays
MYPPRPAARLPPSSSMSATVFFLPANPSSTASPANTLRQLTPASTSGKLHFAAFPLRLPRHACARTYRSAAFGRGSPVAGRREKDYYATLNIRRDSTLQEIKSAYRILARKYHPDMNKSPEAEEKFKEISAAYEVLSDQDKRSLYDRFGEEGLSGDYRNGDIGTHGIDPYELFNAFFGSSDKLFGDSMGSGGFHYSAEAKDNRALNISYNLLLSFEESILGGKREINVFRHETCGTCHGTGAKCSNDITECTRCRGQGRLMKTQRTPFGIVSQISSCLNCEGSGKVITEHCTECYGSGRVQIERIIKVDIPGGIDDGSTIRISGGGNVDKQRGASGDLYIFVRVNKKQGIHRDGLNLYSDASVDYTDVILGTTVKVETIEGLKDLHIPPGTQPGENLKFSQLGVPDIKKPNVRGDHYFMIKVVITEVGDGTNTKFWKDKWLYGWQLQPEVEDKHVFSIAPNGIYSTKIAYEGFFLGGQERLLVEELAALKKAQNISVPEPTKIENFRERNHHPSAKRRSFWGRVWNFFRDDKGDKRFASISVQPIIPGWNSCRGTDTAVPLLLKGFLMTAIFLFVIRSKLSFVLGKESGFACSVWYPDAAVQKTPAAIPSFDESHMKDMKKHGRRLMYTTETSAAARSRRLATSARAS

SEQ ID NO: 157525 - protein, 428 aa, Zea Mays
MYPPRPAARLPPSSSMSATVFFLPANPSSTASPANTLRQLTPASTSGKLHFAAFPLRLPRHACARTYRSAAFGRGSPVAGRREKDYYATLNIRRDSTLQEIKSAYRILARKYHPDMNKSPEAEEKFKEISAAYEVLSDQDKRSLYDRFGEEGLSGDYRNGDIGTHGIDPYELFNAFFGSSDKLFGDSMGSGGFHYSAEAKDNRALNISYNLLLSFEESILGGKREINVFRHETCGTCHGTGAKCSNDITECTRCRGQGRLMKTQRTPFGIVSQISSCLNCEGSGKVITEHCTECYGSGRVQIERIIKVDIPGGIDDGSTIRISGGGNVDKQRGASGDLYIFVRVNKKQGIHRDGLNLYSDASVDYTDVILGTTVKVETIEGLKDLHIPPGTQPGENLKFSQLGVPDIKKPNVRGDHYFMIKWPGTFAS

SEQ ID NO: 157526 - protein, 275 aa, Zea Mays
MYPPRPAARLPPSSSMSATVFFLPANPSSTASPANTLRQLTPASTSGKLHFAAFPLRLPRHACARTYRSAAFGRGSPVAGRREKDYYATLNIRRDSTLQEIKSAYRILARKYHPDMNKSPEAEEKFKEISAAYEVLSDQDKRSLYDRFGEEGLSGDYRNGDIGTHGIDPYELFNAFFGSSDKLFGDSMGSGGFHYSAEAKDNRALNISYNLLLSFEESILGGKREINVFRHETCGTCHGTGAKCSNDITECTRCRGQGRLMKTQRTPFDIFMLKL

SEQ ID NO: 157527 - protein, 240 aa, Zea Mays
MRFYLIKTKDHYMIALEKRGSAVTTEMEILAHMGLIHMNSSMLSLVVPTNFLGIVWGLGDFIIVQKQRTIGHLTSESILGGKREINVFRHETCGTCHGTGAKCSNDITECTRCRGQGRLMKTQRTPFGIVSQNYMLCISILLCRGASGDLYIFVRVNKKQGIHRDGLNLYSDASVDYTDVILGTTVKVETIEGLKDLHIPPGTQPGENLKFSQLGVPDIKKPNVRGDHYFMIKWPGTFAS

SEQ ID NO: 157528 - protein, 643 aa, Zea Mays
MYPPRPAARLPPSSSMSATVFFLPANPSSTASPANTLRQLTPASTSGKLHFAAFPLRLPRHACARTYRSAAFGRGSPVAGRREKDYYATLNIRRDSTLQEIKSAYRILARKYHPDMNKSPEAEEKFKEISAAYEVLSDQDKRSLYDRFGEEGLSGDYRNGDIGTHGIDPYELFNAFFGSSDKLFGDSMGSGGFHYSAEAKDNRALNISYNLLLSFEESILGGKREINVFRHETCGTCHGTGAKCSNDITECTRCRGQGRLMKTQRTPFGIVSQISSCLNCEGSGKVITEHCTECYGSGRVQIERIIKVDIPGGIDDGSTIRISGGGNVDKQRGASGDLYIFVRVNKKQGIHRDGLNLYSDASVDYTDVILGTTVKVETIEGLKDLHIPPGTQPGENLKFSQLGVPDIKKPNVRGDHYFMIKVVITEVGDGTNTKFWKDKWLYGWQLQPEVEDKHVFSIAPNGIYSTKIAYEGFFLGGQERLLVEELAALKKAQNISVPEPTKIENFRERNHHPSAKRRSFWGRVWNFFRDDKGDKRFASISVQPIIPGWNSCRGTDTAVPLLLKGFLMTAIFLFVIRSKLSFVLGKESGFACSVWYPDAAVQKTPAAIPSFDESHMKDMKKHGRRLMYTVCILSAQSFVTIPA

SEQ ID NO: 157529 - protein, 379 aa, Zea Mays
MHPMQRSRQISSCLNCEGSGKVITEHCTECYGSGRVQIERIIKVDIPGGIDDGSTIRISGGGNVDKQRGASGDLYIFVRVNKKQGIHRDGLNLYSDASVDYTDVILGTTVKVETIEGLKDLHIPPGTQPGENLKFSQLGVPDIKKPNVRGDHYFMIKVVITEVGDGTNTKFWKDKWLYGWQLQPEVEDKHVFSIAPNGIYSTKIAYEGFFLGGQERLLVEELAALKKAQNISVPEPTKIENFRERNHHPSAKRRSFWGRVWNFFRDDKGDKRFASISVQPIIPGWNSCRGTDTAVPLLLKGFLMTAIFLFVIRSKLSFVLGKESGFACSVWYPDAAVQKTPAAIPSFDESHMKDMKKHGRRLMYTVCILSAQSFVTIPA

SEQ ID NO: 157530 - protein, 512 aa, Zea Mays
MYPPRPAARLPPSSSMSATVFFLPANPSSTASPANTLRQLTPASTSGKLHFAAFPLRLPRHACARTYRSAAFGRGSPVAGRREKDYYATLNIRRDSTLQEIKSAYRILARKYHPDMNKSPEAEEKFKEISAAYEVLSDQDKRSLYDRFGEEGLSGDYRNGDIGTHGIDPYELFNAFFGSSDKLFGDSMGSGGFHYSAEAKDNRALNISYNLLLSFEESILGGKREINVFRHETCGTCHGTGAKCSNDITECTRCRGQGRLMKTQRTPFGIVSQNYMLCISILLCRGASGDLYIFVRVNKKQGIHRDGLNLYSDASVDYTDVILGTTVKVETIEGLKDLHIPPGTQPGENLKFSQLGVPDIKKPNVRGDHYFMIKVKIPKSISYFDFYSGQERLLVEELAALKKAQNISVPEPTKIENFRERNHHPSAKRRSFWGRVWNFFRDDKGDKRFASISVQPIIPGWNSCRGTDTAVPLLLKGFLMTAIFLFVIRSKLRYTGKRIDRPTQAEIPVEPE

SEQ ID NO: 157531 - protein, 549 aa, Zea Mays
MYPPRPAARLPPSSSMSATVFFLPANPSSTASPANTLRQLTPASTSGKLHFAAFPLRLPRHACARTYRSAAFGRGSPVAGRREKDYYATLNIRRDSTLQEIKSAYRILARKYHPDMNKSPEAEEKFKEISAAYEVLSDQDKRSLYDRFGEEGLSGDYRNGDIGTHGIDPYELFNAFFGSSDKLFGDSMGSGGFHYSAEAKDNRALNISYNLLLSFEESILGGKREINVFRHETCGTCHGTGAKCSNDITECTRCRGQGRLMKTQRTPFGIVSQNYMLCISILLCRGASGDLYIFVRVNKKQGIHRDGLNLYSDASVDYTDVILGTTVKVETIEGLKDLHIPPGTQPGENLKFSQLGVPDIKKPNVRGDHYFMIKVKIPKSISGQERLLVEELAALKKAQNISVPEPTKIENFRERNHHPSAKRRSFWGRVWNFFRDDKGDKRFASISVQPIIPGWNSCRGTDTAVPLLLKGFLMTAIFLFVIRSKLSFVLGKESGFACSVWYPDAAVQKTPAAIPSFDESHMKDMKKHGRRLMYTVCILSAQSFVTIPA

SEQ ID NO: 157532 - protein, 671 aa, Zea Mays
MYPPRPAARLPPSSSMSATVFFLPANPSSTASPANTLRQLTPASTSGKLHFAAFPLRLPRHACARTYRSAAFGRGSPVAGRREKDYYATLNIRRDSTLQEIKSAYRILARKYHPDMNKSPEAEEKFKEISAAYEVLSDQDKRSLYDRFGEEGLSGDYRNGDIGTHGIDPYELFNAFFGSSDKLFGDSMGSGGFHYSAEAKDNRALNISYNLLLSFEESILGGKREINVFRHETCGTCHGTGAKCSNDITECTRCRGQGRLMKTQRTPFGIVSQISSCLNCEGSGKVITEHCTECYGSGRVQIERIIKVDIPGGIDDGSTIRISGGGNVDKQRGASGDLYIFVRVNKKQGIHRDGLNLYSDASVDYTDVILGTTVKVETIEGLKDLHIPPGTQPGENLKFSQLGVPDIKKPNVRGDHYFMIKVKIPKSISGQERLLVEELAALKKAQNISVPEPTKIENFRERNHHPSAKRRSFWGRVWNFFRDDKGDKRFASISVQPIIPGWNSCRGTDTAVPLLLKGFLMTAIFLFVIRSKLSFVLGKESGFACSVWYPDAAVQKTPAAIPSFDESHMKDMKKHGRRLMYTDNEIRQKKEACYTDVENGLWGWVCRYSPTEKENCVLRCLSPECYDLIYGGDPLEEGELDYVRSQEYKYCMHKSSLGESLDGVKGSFSYS

SEQ ID NO: 157533 - protein, 1272 aa, Zea Mays
MTSGPTCKTGTRPQKCESKINRTCQPRRPSLPPSRTRVFPRSHVRPFPTTCALCRDAPAMAWGEDEAIGPDVASAGLHVSERIGRDAAAQPDLEEALEASRYASHPYSSHPKEWPPLVEVAETRQLPPMLIERYNTAAGEGTALCGIFSDIHRAWATVDNSFFIWRFDKWDGHCQEHNVDEQAICAVGLARAKPGIFIEAIQYLLVLATPVELILVGVCCSASADGTDPYAELSLQPLPEYMIATDGVTMTCITCTDKGQIFVAGRDGHIYELQYTTGSGWRKRCRKVCLTTGIGSLLSRWVLPNAFKFSTVDPIVDMVMDEERNTIYARTEGMKLQLFDLGVNGDGPLTKITEEKNIVDPRDGPYGGRRSNAPRAARSPRPSIVCISPVSSVESKWLHAVAVLSDGKRLFLTTSGGSGSSVGLNSGLQRPTCLKIVATRPSPPLGVGGGLTFGAVSVAGRALPEDLALKVESAFYSAGALVMSDSSATAMSSLLAVQKDSAAQLSLPSTFGTASRTSRALRETVSALPVEGRMLCASDVLPLPDAAYMMQSLYADVECFTCFRKPSEKACIKLWAKGDLPTQHILPRRRVVVFNTMGLMELIFNRPVDILRKLFDGNTLRSQIEEFFNRFGAGEAAAMCLMLAAKLLYAEDSLISNAVSEKAAEAFEDPGLVGMPQINGTTALSNTRTQAGGFSMGQVVQEAEPLFSGAYEGLCLCSSRLLYPIWELPIMSIRGPSGNNKREDGVIVCRLSAGAMKILESKIHSLETFLRSRRNKRRGLYGYVAGLGDSGSILYKTGPIIGPGGHSNGRSPYNSQIRDMNPVDKSASNKKPRLLYTSAELAAMEVRAMECLRRLLRRSGEALFLLQLICQHNVARLAQTLGNDLCKKFVQLTFHQLVCSEDGDQLAMRLISALMEYYIGPEGRGTVEEISTKLREGCPSYFNESDYKYYLAVECLERASMTNNADERDILARDAFNLLTKIPDSADLSAICKRFENLRFYEAVVRLPLQKAQALDSNADIINGQIDPRHHDTIMLQREQCYRIVMDALCTLKGVGHSRMQSADKSSALATAADPASRSKYIKQIIQLSVQWPDTVFHEHLYRTLIELGLENELLEYGGSDLVSFLQSAGRKHQEEVRAVSSVTPGAAKMHDLGAPISTSQTKYLELLARYYVRKGEHIAAARMLLILAERQCSNSEEAPALDKRYEYLRDAVLQAKSAGIAADLSKNPVDSSTVDLLEGKLVVLRFQIQIKEELELMRLLRLLRIRQKNYH

SEQ ID NO: 157534 - protein, 1437 aa, Zea Mays
MHFYVLLIHILSWQWPPLVEVAETRQLPPMLIERYNTAAGEGTALCGIFSDIHRAWATVDNSFFIWRFDKWDGHCQEHNVDEQAICAVGLARAKPGIFIEAIQYLLVLATPVELILVGVCCSASADGTDPYAELSLQPLPEYMIATDGVTMTCITCTDKGQIFVAGRDGHIYELQYTTGSGWRKRCRKVCLTTGIGSLLSRWVLPNAFKFSTVDPIVDMVMDEERNTIYARTEGMKLQLFDLGVNGDGPLTKITEEKNIVDPRDGPYGGRRSNAPRAARSPRPSIVCISPVSSVESKWLHAVAVLSDGKRLFLTTSGGSGSSVGLNSGLQRPTCLKIVATRPSPPLGVGGGLTFGAVSVAGRALPEDLALKVESAFYSAGALVMSDSSATAMSSLLAVQKDSAAQLSLPSTFGTASRTSRALRETVSALPVEGRMLCASDVLPLPDAAYMMQSLYADVECFTCFRKPSEKACIKLWAKGDLPTQHILPRRRVVVFNTMGLMELIFNRPVDILRKLFDGNTLRSQIEEFFNRFGAGEAAAMCLMLAAKLLYAEDSLISNAVSEKAAEAFEDPGLVGMPQINGTTALSNTRTQAGGFSMGQVVQEAEPLFSGAYEGLCLCSSRLLYPIWELPIMSIRGPSGNNKREDGVIVCRLSAGAMKILESKIHSLETFLRSRRNKRRGLYGYVAGLGDSGSILYKTGPIIGPGGHSNGRSPYNSQIRDMNPVDKSASNKKPRLLYTSAELAAMEVRAMECLRRLLRRSGEALFLLQLICQHNVARLAQTLGNDLCKKFVQLTFHQLVCSEDGDQLAMRLISALMEYYIGPEGRGTVEEISTKLREGCPSYFNESDYKYYLAVECLERASMTNNADERDILARDAFNLLTKIPDSADLSAICKRFENLRFYEAVVRLPLQKAQALDSNADIINGQIDPRHHDTIMLQREQCYRIVMDALCTLKGVGHSRMQSADKSSALATAADPASRSKYIKQIIQLSVQWPDTVFHEHLYRTLIELGLENELLEYGGSDLVSFLQSAGRKHQEEVRAVSSVTPGAAKMHDLGAPISTSQTKYLELLARYYVRKGEHIAAARMLLILAERQCSNSEEAPALDKRYEYLRDAVLQAKSAGIAADLSKNPVDSSTVDLLEGKLVVLRFQIQIKEELELMVARLENIPSSSELPNVPFPRDNILANAETAKAAKDKAKELSLNLKSITQLYNDYAVPFDLWEVCLEMLSFANYSGDADSKIVREVWARLLDQALTKGGVAEACSVVKRVGSKLDPADGACLPLDIICLHLEKAAVDRLSSGEELVGDDDVARALLGACKGLPGPVLSVYDHLLSNGAIIPSLNLKLRLLRSVLAILREWGISVIAHRLGTTSAGASFFLDGTFSLNQTGTANQGARDKIISLANRYMTEVRRLNLPQNQTENVYRGFRELEEKLLSSY

SEQ ID NO: 157535 - protein, 219 aa, Zea Mays
MPSSAARALTSVSRAAFSWKPTGRPQQTLAAAVSRSGVGLHSGARVTATLFPTQAGEGRYFLVEGDEEARVAAEVGNAEPLSQLCTTLRRGEGAHTRVRTVEHLLSAMEALGVDNCRIEVSGGDEIPLLDGSAQEWVEAVQGVGLCAAEDANGEKLDKLAPEIQEPVYLRKHDCFIAAFPSPQIHITCGIDFPKILASPLVRMAQEKMIQQEKMKHQKD

SEQ ID NO: 157536 - protein, 129 aa, Zea Mays
MPSSAARALTSVSRAAFSWKPTGRPQQTLAAAVSRSGVGLHSGARVTATLFPTQAGEGRYFLVEGDEEARVAAEVGNAEPLSQLCTTLRRGEGAHTRVRTVEHLLSAMEALGVDNCRIEVSGGDERKSG

SEQ ID NO: 157537 - protein, 124 aa, Zea Mays
MPSSAARALTSVSRAAFSWKPQTLAAAVSRSGVGLHSGARVTATLFPTQAGEGRYFLVEGDEEARVAAEVGNAEPLSQLCTTLRRGEGAHTRVRTVEHLLSAMEALGVDNCRIEVSGGDERKSG

SEQ ID NO: 157538 - protein, 632 aa, Zea Mays
MLRENRRGFDVIISDVHMPDMDGFRLLELVGLEMDLPVIMMSADSRTDIVMKGIKHGACDYLIKPVRMEELKNIWQHVVRKKFNGNKDHEHSGSLDDTDRNRPTNNDNEYASSANDGGDGSWKSQKKKREKEDDETDLESGDPSTSKKPRVVWSVELHQQFVNAVNHLGIDKAVPKKILELMNVPGLTRENVASHLQKFRLYLKRIAQHHAGIPHPFVASASSAKVAPLGGLEFQALAASGQIPPQALAALQDELLGRPTSSLALPGRDQSSLRLAAIKGNKPHGEREIAFGQPIYKCQNNTYGAFSQSSPAVGGLPSFAAWPNNKLGMTDSSNTLGNVGNSQNSNMLLHELQQQPDTLLSGTLHNIDVKPSGVVMPSQSLNVFPASEGISHNQNPLVIPSQSPSFLASVPPSMKHESLLGSPSPSTSLLGGLDMVNQASTSQPLISSHGANLPGLMNRSSNAMPSPGISNFQSGNIPYVVTQNAMGVSSRPPGVLKTECTESLTHSYGYIGGSTSVDSSLLSSQAKNPQYGLLQSQNDVSSSWLSSQDFDSFGNSLGQGHPGSTSSSFQSSALGKLPDQGRGRNHGFVGKGTCIPSRFAVDEVGSPTNLSHNIVNSGDIVNPDIFGFSGQM

SEQ ID NO: 157539 - protein, 439 aa, Zea Mays
MLPAICRLYLKRIAQHHAGIPHPFVASASSAKVAPLGGLEFQALAASGQIPPQALAALQDELLGRPTSSLALPGRDQSSLRLAAIKGNKPHGEREIAFGQPIYKCQNNTYGAFSQSSPAVGGLPSFAAWPNNKLGMTDSSNTLGNVGNSQNSNMLLHELQQQPDTLLSGTLHNIDVKPSGVVMPSQSLNVFPASEGISHNQNPLVIPSQSPSFLASVPPSMKHESLLGSPSPSTSLLGGLDMVNQASTSQPLISSHGANLPGLMNRSSNAMPSPGISNFQSGNIPYVVTQNAMGVSSRPPGVLKTECTESLTHSYGYIGGSTSVDSSLLSSQAKNPQYGLLQSQNDVSSSWLSSQDFDSFGNSLGQGHPGSTSSSFQSSALGKLPDQGRGRNHGFVGKGTCIPSRFAVDEVGSPTNLSHNIVNSGDIVNPDIFGFSGQM

SEQ ID NO: 157540 - protein, 526 aa, Zea Mays
MAAALAPGVSRKLKKVLETRTDNPDLLASLGALSTFYVQNTPQARRNLKSSIEQRALAINRHFLDASLPAHKALDRVEGEVHALNDSWKKIEEALNSCSASTGDIISTTERLQQELEVITQRQEIVSCFLRDYQLSNEEINALREEEIDDKFFKALLHVQEIHSNCKVLLRTHHQRAGLELMDMMSVYQEGAYERLCRWVQAECKKLGDTDNPEVSELLKMAVCCLKERPVLFKYCAEEVANMRHHALFRRFISALTRGGPGGFPRPIEVHAHDPLRYVGEMLGWLHQSGRDGDSSKGEPDVTSVLDRIFEGACRPFKVRVEQVLQSQPSLIVSFKLSNTLEFYCYTISELLGEDTALCNTIWSLRDAAQQTFFNILKSRGEKLLRYPPLVAVDLSPPPAVREGISLLLELIDTYNSMMVPASGKRPNFDPVISALLDPIIQVCEQAAEAQKSKGSLARRGRTSSDPSGNSRDSISVDAILSKNLSTSILSAESSSKVYLINCLSAIQEPLMGQEVATSYEMWTIK

SEQ ID NO: 157541 - protein, 554 aa, Zea Mays
MAAALAPGVSRKLKKVLETRTDNPDLLASLGALSTFYVQNTPQARRNLKSSIEQRALAINRHFLDASLPAHKALDRVEGEVHALNDSWKKIEEALNSCSASTGDIISTTERLQQELEVITQRQEIVSCFLRDYQLSNEEINALREEEIDDKFFKALLHVQEIHSNCKVLLRTHHQRAGLELMDMMSVYQEGAYERLCRWVQAECKKLGDTDNPEVSELLKMAVCCLKERPVLFKYCAEEVANMRHHALFRRFISALTRGGPGGFPRPIEVHAHDPLRYVGEMLGWLHQALASERELIVVLLDPDAMTDSGPTFRRQSGRDGDSSKGEPDVTSVLDRIFEGACRPFKVRVEQVLQSQPSLIVSFKLSNTLEFYCYTISELLGEDTALCNTIWSLRDAAQQTFFNILKSRGEKLLRYPPLVAVDLSPPPAVREGISLLLELIDTYNSMMVPASGKRPNFDPVISALLDPIIQVCEQAAEAQKSKGSLARRGRTSSDPSGNSRDSISVDAILSKNLSTSILSAESSSKVYLINCLSAIQEPLMGQEVATSYEMWTIK

SEQ ID NO: 157542 - protein, 114 aa, Zea Mays
MKCGLSNKMPYIKEYGSKADARPLADIIETSPQMLMECLKAFYGIVTGTEGSLPEFEQLQVPRLRSDACNGLARALAESYELIYSAVMDPNNSYPDPRSLVKHSPEQIRTILEA

SEQ ID NO: 157543 - protein, 100 aa, Zea Mays
MQTMKMWNHLRQPNRTLLTIIAVAMATIHLGGSRGWHIIITNIAGHLRRGGWAGIPGVLKRNTSLREEPIPVLLIKKLENPLHVPAVVDEERPGMVLPQP

SEQ ID NO: 157544 - protein, 116 aa, Zea Mays
MLELSCSFSSHETLYIGKTKSQWGGKEYFKLWSINRLFELEEFTRFAKTSSVCLDLVQKGAMLDWLKKMHQEKQLDTLVDKGLRSKYDHIELEEMMQVALLCTQFLPGHSTSVPRC

SEQ ID NO: 157545 - protein, 243 aa, Zea Mays
MAATAAEEMERMVEAEWEEGKQGMRKRKRYGLVEYRALPAYLRDNEYIHRHYRCEWPLPQVLLSAFSIHNETLNVWTHLIGFFIFLALTIYTATQVPNAVDIRSLQHLPDVLRKADIHKIQAELVSCLPSLPHLSDLQKLKDELKTSWNSMEVLPSLSRWHLLELLANCLPHRFTHPNETSLSVLVSSLQLAELLDYILLLLLQGYYCFALRSREVNFSEVGEDFTSVGLYQRKSEDQCDRSF

SEQ ID NO: 157546 - protein, 558 aa, Zea Mays
MFICLICLLHLLAMFNLQLDLSSYITCFHVLELLLFIAVIITYGIYLSYMLVLFGISIFNIFKYYGSMSLISLNLQQSRKPIRIMASSSDVIKPEAFDGASFKRWQIKTRMWLTDLKLFWVVTSAVPQAASDDSDDAAKAAALAEKAKWDEANEACLSRLLNVLSNRLFDVYSGFTSAKGLWTELENEFSEVDNGNESFTTENYLNYKMVEGRSVMKQLQEIQLLVRDLVQYGCVLPDSFQVNAILAKLPPSWRDFVTSRRHMKKQMTLTELSAVINVEERARSSNKPSQQLQAHVVEKGGDRKFQKKKKNSPQKNMNQPKSKTMKKKKKDFICYVCGVSGHTARRCKLRKGKGPPPQRKEGNVVVNSTPGYAPQAFMASPLDDWWMDSGATVHICADRSMFSSFQGFNSAPVLMGNGVPAAVRGTGQVYLKLTSGKTLVLKDVLYVPSMSRNLISVSLLCRQGLKLVFESNKVVLSKFGTFVGKSYESGGLFRLSVLNNHSSYHVNVVCSNDSINNIWHSRLCHVNFEAIKRLSDMSLIPEYKHVKGVKCGICVQAK

SEQ ID NO: 157547 - protein, 162 aa, Zea Mays
MASGSSRPQIDQGRSGARIEHGSISAWECASRRRHAIRFNRLRQPLHAAGGGEMKWGLAAVMASTTTVARDFSGDKCRRSEETAGYKDLQLQLPSKTDLQPPATLMAVMPSRETDNIAEHGHNAAKHVASLISVDTPKVGPDIQQHTTKKRVFDLLELDHHR

SEQ ID NO: 157548 - protein, 177 aa, Zea Mays
MKKLFVSQLECKDTPDEPRSARRVNPRVAEKEIVVVLSFASVALVESSVAVVDHLTFLVSHLPPLQNLTAASSSSLQDPIMEEGARTEEVPVQRCALPNAPDTVFISINGCIQHWFKALLLALQKIKVSQEQKKICIATTEPLLMFALSCGMYSSPKVSCQSILGFDFSDDNEGNIS

SEQ ID NO: 157549 - protein, 318 aa, Zea Mays
MMYSPPRTDPDREEEQCFSIGSNLLTSLDHYHTMDFDEPVVSPMTNAGMQEGVQLYSSTGDAQLNRNMNTGKCLEDGKRKGSGEDSSSLRSLVRKLEASIAFSHRITLPLFHPTVHVNVLLQGETSALQREVSMECADEKAGDARAKREDYVHVRAKRGQATNSHSLAERFRREKINERMKLLQDLVPGCNKITGKAMMLDEIINYVQSLQRQIEFLSMKLSAIGPGLNCDLDLQDILCTQDASSAFPGYNLQTSNVHINLYRASEEGFSHRNRIIPSPANVHVTRNAQLSAFPQRGVIWNEELCSIASDRNAGSLIQ

SEQ ID NO: 157550 - protein, 122 aa, Zea Mays
MCFYLSSIYQPWNVGRLLQRDRISVPFSWTLEYSSIHCALILEQVRMYNDGSCAVLHLHKRKQAPTRIQFGDDTPLLATSVRQEALQDVIPLLHASLRFDCIIRRPAPYQQLPHLRYCSVII

SEQ ID NO: 157551 - protein, 241 aa, Zea Mays
MMYSPPRTDPDREEEQCFSIGSMQEGVQLYSSTGDAQLNRNMNTGKCLEDGKRKGSGEDSSSLRSLGETSALQREVSMECADEKAGDARAKREDYVHVRAKRGQATNSHSLAERFRREKINERMKLLQDLVPGCNKITGKAMMLDEIINYVQSLQRQIEFLSMKLSAIGPGLNCDLDLQDILCTQDASSAFPGYNLQTSNVHINLYRASEEGFSHRNRIIPSPANVHVTRNAQLSAFPQIQ

SEQ ID NO: 157552 - protein, 145 aa, Zea Mays
MMYSPPRTDPDREEEQCFSIGSMQEGVQLYSSTGDAQLNRNMNTGKCLEDGKRKGSGEDSSSLRSLGETSALQREVSMECADEKAGDARAKREDYVHVRAKRGQATNSHSLAERFRREKINERMKLLQDLVPGCNKADYRQGHDA

SEQ ID NO: 157553 - protein, 319 aa, Zea Mays
MMYSPPRTDPDREEEQCFSIGSNLLTSLDHYHTMDFDEPVVSPMTNAGMQEGVQLYSSTGDAQLNRNMNTGKCLEDGKRKGSGEDSSSLRSLVRKLEASIAFSHRITLPLFHPTVHVNVLLQGETSALQREVSMECADEKAGDARAKREDYVHVRAKRGQATNSHSLAERFRREKINERMKLLQDLVPGCNKITGKAMMLDEIINYVQSLQRQIEFLSMKLSAIGPGLNCDLDLQDILCTQDASSAFPGYNLQTSNVHINLYRASEEGFSHRNRIIPSPANVHVTRNAQLSAFPQRGVIWNEELCSIASDRNADSMKVE

SEQ ID NO: 157554 - protein, 511 aa, Zea Mays
MAATAAAAGVEFPLIGVAVATLIVTVLVAAVMRRRRRPWHQAPLVEGKPAPEAGCAVSDGGTDVIIVGAGVAGSALAYTLGKDGRRVHVIERDLTEPDRIVGELLQPGGYLKLIELGLQDGRNTKLAYPLEKFHSDVAGRSFHNGRFIQRMRQKAASLPNVQLEQGTVTSLLEENGTVKGVQYKTKSGEELKAYAPLTIVCDGCFSNLRRALCSPKVDVPSCFVGLVLENCQLPHPNHGHVILANPSPILFYPISSTEVRCLVDVPGQKVPSIATGEMANYLKTVVAPQIPPEIYDSFIAAIDKGSIRTMPNRSMPAAPHPTPGALLMGDAFNMRHPLTGGGMTVALSDIVVLRNLLKPLRNLHDASSLCKYLESFYTLRKPVASTINTLAGALYKVFSASPDQARNEMRQACFDYLSLGGVFSNGPIALLSGLNPRPLSLVAHFFAVAIYGVGRLMLPLPSPKRMWIGARLISGACGIILPIIKAEGVRQMFFPATVPAYYRAAPTGEKA

SEQ ID NO: 157555 - protein, 358 aa, Zea Mays
MLLCLCSVQLEQGTVTSLLEENGTVKGVQYKTKSGEELKAYAPLTIVCDGCFSNLRRALCSPKVDVPSCFVGLVLENCQLPHPNHGHVILANPSPILFYPISSTEVRCLVDVPGQKVPSIATGEMANYLKTVVAPQIPPEIYDSFIAAIDKGSIRTMPNRSMPAAPHPTPGALLMGDAFNMRHPLTGGGMTVALSDIVVLRNLLKPLRNLHDASSLCKYLESFYTLRKPVASTINTLAGALYKVFSASPDQARNEMRQACFDYLSLGGVFSNGPIALLSGLNPRPLSLVAHFFAVAIYGVGRLMLPLPSPKRMWIGARLISGACGIILPIIKAEGVRQMFFPATVPAYYRAAPTGEKA

SEQ ID NO: 157556 - protein, 66 aa, Zea Mays
MAASSALRLILGSSSASRRQILSEMGYKFTLISADIDEKAIRKENPEELVVALAHAKGMGLWDWSW

SEQ ID NO: 157557 - protein, 186 aa, Zea Mays
MAASSALRLILGSSSASRRQILSEMGYKFTLISADIDEKAIRKENPEELVVALAHAKADAILEKMQNNGMMKEILDSQDTTLMITADQIMKSVGLQHLAPNLESSSFEDWWEGVVAVPADPAYKGLHKGLNSLIILGAWAIWNHHNRCVFNGVQSSSSMVINWVKEESHIWCRVGASDLSSILMLQ

SEQ ID NO: 157558 - protein, 103 aa, Zea Mays
MAASSALRLILGSSSASRRQILSEMGYKFTLISADIDEKAIRKENPEELVVALAHAKADAILEKMQNNGMMKEILDSQDTTLMITADQCQIVSKTRQVQAYDQ

SEQ ID NO: 157559 - protein, 630 aa, Zea Mays
MCNAAGTDSLPAPAPPLGSLKASAHQLLHPVDGDQANAHALQLSKVAGEARAIGRVSVPMAVTGLVMYSRALISMLFLGRLGELALAGGSLALGFANITGYSVLSGLALGMEPICGQAFGARRGKLLALALHRTVLLLLAVALPISLLWVTSTGHVLKLLGQDEGVADAAQTFAAYASADLAVLAVLHPLRVYLRSQNLTLPITACSLFSVLLHGPINYLLVVRLRMGVAGVALAVALTDLNLLLALLCFLAISGAHRDSWVGPTLDCLCGWPELLRLAVPTATAVCLEWWWYELMIVLSGLLANPRATVASMGILIQATSLVYVFPSSLGQGASTRVSHQLGAGRPAGARRAAGAALSIGVGVGLVAATFMVSVRSHWGRMFTSDADILRLTGVALPIAGLCELGNCPQTAGCGVLRGSARPGSGARINLASFYLVGMPVGVALAFGARLGFAGLWLGLLAAQAACAVWMARAVAATDWDVEVGRAKELTKATASNNHSECNSSSSTSASSDITTVIATSNSAAGCKNNGYVPISERCSNDSELEKLEEGLMSSDDIPSASVSGSASAGDTGAVVRENRGSCCNDSGAAGTAATTEGKEQRRGGSERGPLISVSDGEHDGDGRGGGGQV

SEQ ID NO: 157560 - protein, 858 aa, Zea Mays
MAMAPSTAAASTLLPVLLLIATATQCTAADSFSSQDAAALLNLSAAVADPSGYLSTHWTPDTAVCSWPRVSCDATDTRVISLDLSGLNLSGPIPAAALSSFPYLQSLNLSNNILNSTAFPDEIIASLKSLRVLDLYNNNLTGSLPAALPNLTDLVHVHLGGNFFSGSIPRSYGQWSRIRYLALSGNELTGEIPEELGNLTTLRELYLGYYNNFTGGIPPELGRLRALVRLDMANCGISEEIPPELANLTSLDTLFLQINALSGRLPTEIGAMGSLKSLDLSNNLFVGEIPASFASLKNLTLLNLFRNRLAGEIPEFIGDLPNLEVLQLWENNFTGGIPTNLGVAATRLRIVDVSTNKLTGVLPSELCAGQRLETFIALGNSLFGDVPDGLAGCPSLTRIRLGENFLNGTIPAKLFTLPNLTQVELHNNLLSGELRLDGGKVSSSIGELSLFNNRLTGQVPTGIGGLLGLQKLLLAGNMLSGELPPEVGKLQQLSKADLSGNLLSGAVPPAIGRCRLLTFLDISSNKLSGSIPPELGSLRILNYLNVSHNALQGEIPPAIAGMQSLTAVDFSYNNLSGEVPSTGQFGYFNATSFAGNAGLCGAFLSPCRSVGVATSALGSLSSTSKLLLVLGLLALSVVFAGAAVLKARSLKRSAEARAWRLTAFQRLDFAVDDVLDCLKEENVIGKGGSGIVYKGAMPGGAVVAVKRLPAIGRAGAAHDDYGFSAEIQTLGRIRHRHIVRLLGFAANRETNLLVYEYMPNGSLGEVLHGKKGGHLQWATRFKIAVEAAKGLCYLHHDCSPPILHRDVKSNNILLDADFEAHVADFGLAKFLRGNAGGSECMSAIAGSYGYIAPGTPTR

SEQ ID NO: 157561 - protein, 209 aa, Zea Mays
MEPAICTFMHGSYPLRGKHYHEMINPFRVLTDVSYIHVFQVKKLIKEKKNDAGISEYIDINKELQEVYGTMIHLRVSDSYVLSQGQDDKREFFHRFYLSIVRDERTMLNPHGVMHALSLNVGHFNLTRQQDASEAFLHLLISLRDEFAHCYVPHRSSLADITLSDSKVYKQREGNLPECKRWKQNLFGPFDGTVGSILSCRNCSSVVDS

SEQ ID NO: 157562 - protein, 187 aa, Zea Mays
MAAASTSLPLGFSSHHRPTPRIRPQPQSQSQPLKAKPLNPLRFSLALTPATAKPRLAAMPDDVAVANFVEKDWSFLESAGANLQRALASGALSPASRVLALTPTASFVRGQGGARRGEVLPPRGWGRRQRRRRGGGRAREVRRLRCCVRVLLPWNGSLRGGAPQIAGQEVLKRCKSCHVLRSRQTEF

SEQ ID NO: 157563 - protein, 118 aa, Zea Mays
MPSRPQSILGLSAVPFPRRNPSSSPRRRAVRCPSPRLRAPSLLPSHLMFFSRNAFRDLDPIDSPASMASSKKVATRDEWERKLRDVKIRKEDMNRLVMNFLVTEGFVDAADKFRIDGD

SEQ ID NO: 157564 - protein, 114 aa, Zea Mays
MPSRPQSILGLSAVPFPRRNPSSSPRRRAVRCPSPRLRAPSLLPSHLMFFSRNAFRDLDPIDSPASMASSKKVATRDEWERKLRDVKIRKEDMNRLVMNFLVTEGFVDAADNGD

SEQ ID NO: 157565 - protein, 161 aa, Zea Mays
MEVKRAVQSGNVQEAIEKINDLNPTILDMNPQLYFHLQQQKLIELIREGKTNEALEFAQEELAPRGEENQTFLEEIEKTVALLIFKGVKNCPYRELLDVSQRLKTASEVNAAILASQSHGKDSKLPSLLKMLKWTQNHLDERAAYPAINDFTTAVVEDPSI

SEQ ID NO: 157566 - protein, 354 aa, Zea Mays
MREEALERLRGVVRDSAGKHLYTSAIFLADKVAAATGDPGDVYMLAQALFLGRQFRHALHLLNNSRLLRDLRFRFLAAKCLEELKEWHQCLLMLGDAKVDEHGNVLDHDDDSDIYFDKDAEDHEINIKSALCFLRGKAYEALDNRDLARQWYKAAVKADPLCYEALERLVDNYMLTCEEESELLSSLQFGEEDGWLSSFYSCLITKHEKEYLVEAKFKKLEEEACNILSSSSGETMKNNIDVLVCKAEYYHQSGEYQKCFKLTSSLLERDPFHLKCTLVHLATAMELGHSNDLYLLACNLVKDYPEKALSWFAVGCYYYCIKKYDQARRYFGFRWDVSSCLDWYRHCLCCSRGR

SEQ ID NO: 157567 - protein, 305 aa, Zea Mays
MKNNIDVLVCKAEYYHQSGEYQKCFKLTSSLLERDPFHLKCTLVHLATAMELGHSNDLYLLACNLVKDYPEKALSWFAVGCYYYCIKKYDQARRYFGKATGLDGTFPPAWIGTGIAYAAQEEGDQAMAAFRTAARLFPGCHLPTLYMGMQYVRMHNFKLAEQFFTQAKSICPSDPLIYNELGVVAYNMKEYRKAVQLFELTLDHTSSSLNEMWEPTLVNLGHALRKLKEYQKAVSCYEKALTFPTKSLSAFAGLAYSYHLMDNFEAAINYYHKALWLKPDDQFCTEMLTYALESICQSTARRRPS

SEQ ID NO: 157568 - protein, 467 aa, Zea Mays
MYYDDLPLWGFIGKVEKGGKADPSEWKYYLYRHIIFDILYNNDRVIEINVHTDQSALVDLTEDKETNVDFLYSVKWKETPTPFEKRMEKYSSSSNMPHHLEVHWFSIINSCVTVLLLTGFLATILMRVLKNDFVKYAHDEEAADDQEESGWKYIHGDVFRFPKNKSLFSAALGTGTQLFALTTFIFLLALVGVFYPYNRGALFTALVVIYALTSGIAGYVATSFYSQLEGTNWVRNLLLTGCLFCGPLLLTFCFLNTVAIAYSATAALPFGTICVIVLIWTLVTFPLLVLGGIAGKNSKSEFQAPCRTTKYPREIPPLPWYRRTIPQMAMAGFLPFSAIYIELYYIFASVWGHRIYTIYSILFIVFIILLIVTAFITVALTYFQLAAEDHEWWWRSFLCGGSTGFFVYGYCLYYYYARSDMSGFMQTSFFFGYMACICYAFFLMLGMVGFRAALFFVRHIYKSIKCE

SEQ ID NO: 157569 - protein, 371 aa, Zea Mays
MWISCTQSSGRRHQHHLRRGWRRFLATILMRVLKNDFVKYAHDEEAADDQEESGWKYIHGDVFRFPKNKSLFSAALGTGTQLFALTTFIFLLALVGVFYPYNRGALFTALVVIYALTSGIAGYVATSFYSQLEGTNWVRNLLLTGCLFCGPLLLTFCFLNTVAIAYSATAALPFGTICVIVLIWTLVTFPLLVLGGIAGKNSKSEFQAPCRTTKYPREIPPLPWYRRTIPQMAMAGFLPFSAIYIELYYIFASVWGHRIYTIYSILFIVFIILLIVTAFITVALTYFQLAAEDHEWWWRSFLCGGSTGFFVYGYCLYYYYARSDMSGFMQTSFFFGYMACICYAFFLMLGMVGFRAALFFVRHIYKSIKCE

SEQ ID NO: 157570 - protein, 113 aa, Zea Mays
MRLLAPGRQGHALGQRLGDGLRRPARDRQVQGQDRGTGVPEVGVRAGRLPDREELRRGADEGEPGHRGLGAERGGEAAHQQDPPAEDQPGPSLRLRARALQVLRGAMGRRDMI

SEQ ID NO: 157571 - protein, 579 aa, Zea Mays
MQIWTEIGEREQDKDRMFLELETECMRVYRRKVDSANAERAQLRQSLMAKEAELKALVASIGENGPRFTVDEKHTSLKDQLAAVAPLLEDLRVKKQDRVKQISNVQCQIEKIKAQISDHNYQDSDGSIKQLNDDHDLSTRRISDLQMQLRNLQKEKSDRLQKVFIYVDEVHSLCAVLGMDFPKTVKEVHPSLHGSNSENSTNISDSTLEGLTQTILKLKAEKKTRVLKLQETVEKLHKLWNLMESTEKERIHFSEVAAILGSTEEEINSPGILSLETIQKTEEEVEKLTVQKTSRMKELVLKKRLELEGICRNAHMEPDMSTAPEKITALIDSGLVDPCELLSSIEVQITKANEESLTRKDIMERVDKWLSACDEETWLEEYNQDDNRYSAGRGAHLNLKRAEKARITVQKIPTMIDSLIAKTFAWEDERNVPFLYDGIRLVAILEEQKLRRAQREEEKRRSRDQRKLHSLLLKEKELIFGSKPSPRKTSSFNRRTSNHHPNANGAGFMTPVPRRVSAGSATPELLTPRSYSGRYNNYFKENRRLTAAPLNFSVGSKEDSMSSFASISGSEPDSPLFLH

SEQ ID NO: 157572 - protein, 270 aa, Zea Mays
MGRVGEKLDIDFVISTGDNFYKNGLKGVRDQAFEESFVDIYTAQSLQKPWYSVLGNHDYRGNALAQLSPVLRKIDDRFICMRSFIVNAELVDFFFVDTTPFQLEYWTHPGKHRYDWRGVAPRGNYLANLLKDLDVAMKKSTARWKIVVGHHTMRSVSEHRDTEELLELLLPVLKDNGVDFYINGHDHCLEHISSRDSPLQYFTSGGGSKAWRGVFHPNKDKLRFFYDGQGFMSLQLNQDQAHFIFYDVFGNILYRWSSRHPQSSTYLDEE

SEQ ID NO: 157573 - protein, 271 aa, Zea Mays
MMGRVGEKLDIDFVISTGDNFYKNGLKGVRDQAFEESFVDIYTAQSLQKPWYSVLGNHDYRGNALAQLSPVLRKIDDRFICMRSFIVNAELVDFFFVDTTPFQLEYWTHPGKHRYDWRGVAPRGNYLANLLKDLDVAMKKSTARWKIVVGHHTMRSVSEHRDTEELLELLLPVLKDNGVDFYINGHDHCLEHISSRDSPLQYFTSGGGSKAWRGVFHPNKDKLRFFYDGQGFMSLQLNQDQAHFIFYDVFGNILYRWSSRHPQSSTYLDEE

SEQ ID NO: 157574 - protein, 423 aa, Zea Mays
MVNTVEGLKVYEGLLNVTEANKILSLVNETRASYRRGGLEARQKVIIAKRPMKGHGREIVQLGVPIIDGPPDDENLRETRVEAIPGLLNDLFDRLSQQEIIPFKPDYCVIDIFNEGDYSHPHQSPSWYGRPLCTLCLTDCDMVFGRYISGEKGDHRGPLKLSLATGSLLLMQGRSIDCAKRAIPATRKQRVILNFGKSVARKHIPAESAWSTPLTPPMPWGQSSRPVNGSRHPQSPKHYGYAPISGVLPAPPVGAHHVPPSDGMQPLFVAPAPISAAAIPFTPTVPLQNTSAAWIQEVTPRPAPPRFPGPGTGVFLPPGSGHPLPHQMMPASHGHGEPNSPQGSSAYLHSKVNGKETSNGNLSPKNSPRKTSCTAEEKPECNGSLNGGGGSADEKSTVGMEQQNGVQKNVGSSKVQPHGHATE

SEQ ID NO: 157575 - protein, 620 aa, Zea Mays
MASAAAVIASPAPGAAAAEPAAWLVDERDGFITWLRGEFAAANAIVDHLIFHLRSISEPGEYDHVFSLVQQRRHHWPHVIHMQQFFPVSDIAFALQQASWRRHAPPAQALGAGASPAALPPPPPRRASFSQSHHSHQHHRHGAHYRPDPARGAATAATGSEKDEGEEKSKLQAVSEESSKMVATPVEYSTNEIIDGSMVNTVEGLKVYEGLLNVTEANKILSLVNETRASYRRGGLEARQKVIIAKRPMKGHGREIVQLGVPIIDGPPDDENLRETRVEAIPGLLNDLFDRLSQQEIIPFKPDYCVIDIFNEGDYSHPHQSPSWYGRPLCTLCLTDCDMVFGRYISGEKGDHRGPLKLSLATGSLLLMQGRSIDCAKRAIPATRKQRVILNFGKSVARKHIPAESAWSTPLTPPMPWGQSSRPVNGSRHPQSPKHYGYAPISGVLPAPPVGAHHVPPSDGMQPLFVAPAPISAAAIPFTPTVPLQNTSAAWIQEVTPRPAPPRFPGPGTGVFLPPGSGHPLPHQMMPASHGHGEPNSPQGSSAYLHSKVNGKETSNGNLSPKNSPRKTSCTAEEKPECNGSLNGGGGSADEKSTVGMEQQNGVQKNVGSSKVQPHGHATE

SEQ ID NO: 157576 - protein, 315 aa, Zea Mays
MASAAAVIASPAPGAAAAEPAAWLVDERDGFITWLRGEFAAANAIVDHLIFHLRSISEPGEYDHVFSLVQQRRHHWPHVIHMQQFFPVSDIAFALQQASWRRHAPPAQALGAGASPAALPPPPPRRASFSQSHHSHQHHRHGAHYRPDPARGAATAATGSEKDGREVHNNKEGRGLKEAGNVVDTKSLRLDSPITDEGEEKSKLQAVSEESSKMVATPVEYSTNEIIDGSMVNTVEGLKVYEGLLNVTEANKILSLVNETRASYRRGGLEARQKVIIAKRPMKGHGREIVQLGVPIIDGPPDDENLRGWRRFLGC

SEQ ID NO: 157577 - protein, 372 aa, Zea Mays
MKGHGREIVQLGVPIIDGPPDDENLRETRVEAIPGLLNDLFDRLSQQEIIPFKPDYCVIDIFNEGDYSHPHQSPSWYGRPLCTLCLTDCDMVFGRYISGEKGDHRGPLKLSLATGSLLLMQGRSIDCAKRAIPATRKQRVILNFGKSVARKHIPAESAWSTPLTPPMPWGQSSRPVNGSRHPQSPKHYGYAPISGVLPAPPVGAHHVPPSDGMQPLFVAPAPISAAAIPFTPTVPLQNTSAAWIQEVTPRPAPPRFPGPGTGVFLPPGSGHPLPHQMMPASHGHGEPNSPQGSSAYLHSKVNGKETSNGNLSPKNSPRKTSCTAEEKPECNGSLNGGGGSADEKSTVGMEQQNGVQKNVGSSKVQPHGHATE

SEQ ID NO: 157578 - protein, 465 aa, Zea Mays
MSSILKVCEGEEKSKLQAVSEESSKMVATPVEYSTNEIIDGSMVNTVEGLKVYEGLLNVTEANKILSLVNETRASYRRGGLEARQKVIIAKRPMKGHGREIVQLGVPIIDGPPDDENLRETRVEAIPGLLNDLFDRLSQQEIIPFKPDYCVIDIFNEGDYSHPHQSPSWYGRPLCTLCLTDCDMVFGRYISGEKGDHRGPLKLSLATGSLLLMQGRSIDCAKRAIPATRKQRVILNFGKSVARKHIPAESAWSTPLTPPMPWGQSSRPVNGSRHPQSPKHYGYAPISGVLPAPPVGAHHVPPSDGMQPLFVAPAPISAAAIPFTPTVPLQNTSAAWIQEVTPRPAPPRFPGPGTGVFLPPGSGHPLPHQMMPASHGHGEPNSPQGSSAYLHSKVNGKETSNGNLSPKNSPRKTSCTAEEKPECNGSLNGGGGSADEKSTVGMEQQNGVQKNVGSSKVQPHGHATE

SEQ ID NO: 157579 - protein, 354 aa, Zea Mays
MASAAAVIASPAPGAAAAEPAAWLVDERDGFITWLRGEFAAANAIVDHLIFHLRSISEPGEYDHVFSLVQQRRHHWPHVIHMQQFFPVSDIAFALQQASWRRHAPPAQALGAGASPAALPPPPPRRASFSQSHHSHQHHRHGAHYRPDPARGAATAATGSEKDGREVHNNKEGRGLKEAGNVVDTKSLRLDSPITDEGEEKSKLQAVSEESSKMVATPVEYSTNEIIDGSMVNTVEGLKVYEGLLNVTEANKILSLVNETRASYRRGGLEARQKVIIAKRPMKGHGREIVQLGVPIIDGPPDDENLRETRVEAIPGLLNDLFDRLSQQEIIPFKPDYCVIDIFNEEKKAIIEVL

SEQ ID NO: 157580 - protein, 253 aa, Zea Mays
MQGRSIDCAKRAIPATRKQRVILNFGKSVARKHIPAESAWSTPLTPPMPWGQSSRPVNGSRHPQSPKHYGYAPISGVLPAPPVGAHHVPPSDGMQPLFVAPAPISAAAIPFTPTVPLQNTSAAWIQEVTPRPAPPRFPGPGTGVFLPPGSGHPLPHQMMPASHGHGEPNSPQGSSAYLHSKVNGKETSNGNLSPKNSPRKTSCTAEEKPECNGSLNGGGGSADEKSTVGMEQQNGVQKNVGSSKVQPHGHATE

SEQ ID NO: 157581 - protein, 282 aa, Zea Mays
MFGDSDGSKDASAAAPGSNSNPPEPPFPNRELTLSSYLCDKAPPAAAAGPSSPPNPEAAAPADDAAASAKLCVERDFLHLSAPKRGDPPGDDSSVVGDGVTDCSVTGSKSKGILAAQTSKSTDMLHLQTPTITPPKSPFNFKPSTSILDSQIDVLKASPKPLPIEPHFSSSSKDDDSSSLETIVKCKEAEAKLFQKLADDARKEVDSYRQIVRTKTQKLEEEYATKVAKLCFQETEEKRRKKVEELKTLENSHYDYHKMKLRMQTEIQGLLERMEATKKMWV

SEQ ID NO: 157582 - protein, 233 aa, Zea Mays
MNCVAISAVEWADTLTNISFGHLLTEASKGTHLDCGGTSVKNPLFFENPCSYDSFDAAVALHASRYQASEQSAHAPHSTIWGAEETCDEFIFNLSASRKQEGSNTLSSSPDTNNGVHPSNSEGFKGFLEDLAGEADADNHYNNDDAKDEEFYAKSPPRNDETNELKDQSLADIYWPDSLGPLDLDIPSVRYEADDILIGDSQNSWNRLMANSLDAFRNLSFFSDKNDSIPSIM

SEQ ID NO: 157583 - protein, 150 aa, Zea Mays
MESAVNPKAYPLADAQLTMGILDIIQQAANYKQLKKGANEATKTLNRGISEFVVMAADTEPLEILLHLPLLAEDKNVPYVFVPSKQALGRACGVTRPVIACSVTSNEGSQLKQQIQGLKCDGPRRHIFQRLGLVMVSCLHYAFQTIFEHC

SEQ ID NO: 157584 - protein, 153 aa, Zea Mays
MESAVNPKAYPLADAQLTMGILDIIQQAANYKQLKKGANEATKTLNRGISEFVVMAADTEPLEILLHLPLLAEDKNVPYVFVPSKQALGRACGVTRPVIACSVTSNEGSQLKQQIQGLKIFQCDGPRRHIFQRLGLVMVSCLHYAFQTIFEHC

SEQ ID NO: 157585 - protein, 82 aa, Zea Mays
MESAVNPKAYPLADAQLTIGIIDIIQQAANYKQLKKGANEATKTLNRGISEFVVMAADTEPLEILLHLPLLAEDKENCVSLY

SEQ ID NO: 157586 - protein, 525 aa, Zea Mays
MPCFGAPPPLLRPHPPIPLFDLSFDLVSLPLLLCLFPFLSPLSPLRPSRARKRRGQKSRTGFLPPPEEMELFYELLLTAAVTLLAALLLATLFAANDSHRRTDRAAAAIAEEVAEEERIIEVDEVMRSEGMAAVAPSEADGWVEAEKAPAVVVAEVKEPESLPEEEGVPVKAVREVRLAAEVEEGEDGGGGVKRPDLTSATVVAAVGAEASQLVSGAEVVPKEVSGAAGLEERTVQDVVVNQYDLGAEVALVPVEVLEAGPDKQGVEVVGVAQVPPLETEAAEVKQHHLVAEAAPAEDVLDVGLVDKSVRAIEVRPNELDSETVLEEILDAVLEEEEQVEHELPAGAAPQPVLDVPLAGKGELKHHQPVEEAAEVHEDVQCKQEAECEAQTVDQQQELVPEEESVAGKNDDVNVIHECSFSDEVVTELPVGEVTSQGLPKDDPEADMEFEEWEGIERSEVEKRFGAAAAFAASGAGAAALSKLDSDVQLQLQGLLKVAIDGPCYDSAQPLTLRPSSRAKWRSGTV

SEQ ID NO: 157587 - protein, 566 aa, Zea Mays
MPCFGAPPPLLRPHPPIPLFDLSFDLVSLPLLLCLFPFLSPLSPLRPSRARKRRGQKSRTGFLPPPEEMELFYELLLTAAVTLLAALLLATLFAANDSHRRTDRAAAAIAEEVAEEERIIEVDEVMRSEGMAAVAPSEADGWVEAEKAPAVVVAEVKEPESLPEEEGVPVKAVREVRLAAEVEEGEDGGGGVKRPDLTSATVVAAVGAEASQLVSGAEVVPKEVSGAAGLEERTVQDVVVNQYDLGAEVALVPVEVLEAGPDKQGVEVVGVAQVPPLETEAAEVKQHHLVAEAAPAEDVLDVGLVDKSVRAIEVRPNELDSETVLEEILDAVLEEEEQVEHELPAGAAPQPVLDVPLAGKGELKHHQPVEEAAEVHEDVQCKQEAECEAQTVDQQQELVPEEESVAGKNDDVNVIHECSFSDEVVTELPVGEVTSQGLPKDDPEADMEFEEWEGIERSEVEKRFGAAAAFAASGAGAAALSKLDSDVQLQLQGLLKVAIDGPCYDSAQPLTLRPSSRAKWSAWQKLGNMNPEIAMEKYMNLLSETIPGWMMNETLRTLAVYLRRLS

SEQ ID NO: 157588 - protein, 84 aa, Zea Mays
MNPEIAMEKYMNLLSETIPGWMMNETLDTENTGSLPAETILTTMASTSDQRSNQGNEDNSSIGEGHPITSPNPEKGQSSDIPTE

SEQ ID NO: 157589 - protein, 543 aa, Zea Mays
MKMHRFALRGLGFLVLWMLHCGSELAAAVPPGASRSRRCTTEAFSSSAAAAETRTDTARRRPASSPRRSWCTTSTRPPCWVKLEGAYSALITARLAPDNTGARCIATVVARSDCWAFVKGGFVLDWPTQTSVIFFQNADKTPMKITVASGSLQPFTTDQWAMHQQDTIRKRRKRVATIHVADPQGARVVGASVSVQQTAKDFPIGSAIASTILGNQAYQQWFVDRFNAAVFEDELKWYSTEPMSGQLRFDVPDQMLAFVRSHRVMVRGHNIFWENQDATPRWVKNLTADDLRAAVNTRIQSLMTRYRGEFAHWDVNNEMLHYNFYEQRLGPNASAEFFSVAQDADPLATLFMNEYNVIETCDDPFSTVDTYVSKLKDLRSAGAILEGIGLEGHFSKPNIPLMRAILDKLATLGLPIWFTEIDISNKFDAQTQAAYLEQVLREAYSHPAVSGVMLWTALHPSGCYQMCLTDWNLSNLPTGDVVDRLLNEWRTLQAAGQTDAHGAYSFTGYLGEYVLTVSYNNRTTQSTFSLSPGDETRHINVQM

SEQ ID NO: 157590 - protein, 276 aa, Zea Mays
MARCPAAHAALCSLALLLLLPAARAATFTMTNNCGYTVWPGLLSGAGTAPLPTTGFALAHGASAAVDAPAGWSGRVWARTLCAADAATGRFSCATGDCGSGAVQCNGGGAAPPATLAEFTLGGSGGLDFFDVSLVDGYNVPMLIVPAQGAGGGGSSSSSNGSAGGSSKCMATGCLVDLNGACPADLRVMAASASASASGAGGAVACRSACEAFGSPQYCCSGAYGNPNTCRPSTYSQFFKNACPRAYSYAYDDSTSTFTCATGISYAITFCPSTTR

SEQ ID NO: 157591 - protein, 300 aa, Zea Mays
MARCPAAHAALCSLALLLLLPAARAATFTMTNNCGYTVWPGLLSGAGTAPLPTTGFALAHGASAAVDAPAGWSGRVWARTLCAADAATGRFSCATGDCGSGAVQCNGGGAAPPATLAEFTLGGSGGLDFFDVSLVDGYNVPMLIVPAQGAGGGGSSSSSNGSAGGSSKCMATGCLVDLNGACPADLRVMAASASASASGAGGAVACRSACEAFGSPQYCCSGAYGNPNTCRPSTYSQFFKNACPRAYSYAYDDSTSTFTCATGISYAITFCPSTTRGKPNSPLKLCWSASSTLLSEKKNV

SEQ ID NO: 157592 - protein, 496 aa, Zea Mays
MSSEASSVVVADENGAAETVGVGRYVEMEKDQESSAAKSRLSGLLWHGGSAYDAWFSCASNQLLYGLMGSWTAYLISVLYVEYRARKEREKADFRNHVIQWFEVLDGLLGRHWRNVGLAFNCTFLLFGSVIQLIACASNIYYINDKLDKRTWTYIFGACCATTVFIPSFHNYRIWSFLGLVMTTYTAWYLAVASLIHGQVDGVKHSGPTKMVLYFTGATNILYTFGGHAVTVEIMHAMWRPQKFKAIYLMATLYVLTLTLPSAASVYWAFGDQLLTRSNALALLPRTAFRDAAVVLMLAHQFITFGFACTPLYFVWEKLVGLHDCRSLCRRAAARLPVVVPIWFLAIIFPFFGPINSAVGSLLVSFTVYIIPALAHMITFRSATARENAMEPPPRLLGRWTGAYMINAFVVAWVLVVGFGFGGWASMTNFVRQIDTFGLFTKCYQCPPPPPLPFPGGGLGNITMPFNGDGLPPTPAPSPAHYFFRHHRHHSHHRGL

SEQ ID NO: 157593 - protein, 51 aa, Zea Mays
MINFRLLFGTLPSNSLCKQTPIIGLYELDYIIYIKYLDYIILQRNKHALKL

SEQ ID NO: 157594 - protein, 241 aa, Zea Mays
MPKITSSPSPTISAMNPLLPSSFPKSPHPPDPNPSSPNPSPCSYLLHADADDEALIQIPGQNPSLVGASASFALLPSIDPAPHVSSQFYTFSAASYGLMLRCIRAGRSASSDEVRGATSLSVLASWRAVWKDRNEDTAYLTAWKRIQDKLAASADGLHLHFKSNAAQRVSHVGMWRDIVSEAHADPELLRHLAFRDTVDRIKQSWTVGAKFYGSSATFAMCSLSARLLSSTDIRWYTTSSS

SEQ ID NO: 157595 - protein, 643 aa, Zea Mays
MPKITSSPSPTISAMNPLLPSSFPKSPHPPDPNPSSPNPSPCSYLLHADADDEALIQIPGQNPSLVGASASFALLPSIDPAPHVSSQFYTFSAASYGLMLRCIRAGRSASSDEVRGATSLSVLASWRAVWKDRNEDTAYLTAWKRIQDKLAASADGLHLHFKSNAAQRVSHVGMWRDIVSEAHADPELLRHLAFRDTVDRIKQSWTVGAKFYGIPESFVRACVAACPVCKAAPAGQPYFTISSPGHGKRRRRFEYTETLDVPARDVARRLQQLAAKHKVVLCIRQKYIRYRPFMAEVKDYACHRAGEPTSSSGSAASSAGNLEGKKARVKREPYQSKRCGCGFRIRAIVPIANYNEKDKSFVYLEEGTAVFKLYAVHSGHEPGPLDGNARIVHRLVGHKGGLEFDPDIYGVSGEGDPTFSAKGYEYADIDDSHQAVLQQVRDLRSEVLLLEGKVAKMHPELLGSLSTELSEVLHRIRKFNLEGNVYQHETLMVGNEEVRGWGSADVSHQLDQHDRAFCKDDEMLDDDTDFGSSLGPIVSWDRMEAECEDRKMLMGDSPKCDKWMLKDDVGEFDAKSILNCGDDDGVGDSKVIKPLMHDDTMVTGPSLVHQQRLRCAAFQQGYCQALTSDGIPPVQAKKQANEG

SEQ ID NO: 157596 - protein, 70 aa, Zea Mays
MIVYMQLTRCPCRWCQQDATSSSNNMLVHLGCVWFRFLNQIRYQKSEISIKQFRQNKFQWRLLVWFSGDC

SEQ ID NO: 157597 - protein, 63 aa, Zea Mays
MIVYMQLTRCPCRWCQQDATSSSNNMLVHLGCVWFRFLNQIRYQKSEISIKQWRLLVWFSGDC

SEQ ID NO: 157598 - protein, 172 aa, Zea Mays
MATAMRGSSLLRFGFRHPSCLLFQSPRCPAPSLGLNLAVGRTGLIRLRCSAAGAGDAGGKKVSARLALTQQVLRNAEERAASAGSDPAPKITLDHVTVNFARSGGPGGQNVNKVNTKVDMRFNVKEAHWLGERIKERILQAEKNRINKDGELVISSTKTRTQKCIAENTGNH

SEQ ID NO: 157599 - protein, 191 aa, Zea Mays
MAPGLQRFTDIADDGTPQLDAASGEELVRVDRTVAVALGPRSPESPGTLFVTTRRVIWLSEAEKGKGYAVDFLAISLHAVSRDLEAYPSPCIYTQIEAAVGTEEEAGESNPEANELELSRVSEMRLILADPGQLDALFDVFCHCAELNPDPNSAMGRMAGSVVKICLMVTGFVMMWTWLMKMSRSFSMPIR

SEQ ID NO: 157600 - protein, 172 aa, Zea Mays
MARGGGGGCCPPMDLMRSEAMQLVQVIIPAESAHLTVSYLGDLGLLQFKDLNIDKSPFQRTYAAQIKRCSEMARKLRFFKEQMSKADITASPTQLNGTHMDFDELEIKLGELEAELTEVNANNEKLQRTYNELLEYHTVLQKLKELLQRNKWKWRQINLVKLHWRALCWNRR

SEQ ID NO: 157601 - protein, 921 aa, Zea Mays
MASAVAAPPPTPPESDPRLVEIFSPFLEKLIKNASWRNKAHSKLSHTAKSILDRLQKPPPPPAAEAQAPSTPTSSPSTPTSSSAQPGPLRSLSLADSELLLAPVISTLLSAVTSTSVRLHGDCLLRAVRACYDMYLGSRSAVNQATAKASLVQMLVIVFRRMEADSSTVPVQPIVVADVIELPDAISGSSPTADPNVVQGFISKIIGDFDGALTPLARTTSSAGAGPTVAHDGAFETTAAAEEGANPADLLDSTDKDMLDAKYWEISMYKTAIEGRKDELGVEGAVVGTLDDDADVRIGNKLRRDAFLVFRALCKLSMKTPPKDAPADPIVMRGKILALELLKILLENAGAVFRTSERFLGAIKQYLCLSLLKNCASSHMIVFQLSCSIFISLVARFRPGLKAEIGVFFPMIILRVLENIAQPNYQAKMIVLRFLEKLCGDSQILVDIFLNYDCDVHSSNIFERMVNGLLKTAQGPPAGVPTTLVPPQDTTMKSEAMKCLVAILRSMGDWMNKQLRIPDPASPNVESEKNDNDDGNELPQADNNGDESSEASDSHSELSNGISEAASLEQRRAYKIELQEGIYLFNRKPKKGIEFLVNASKVGETPEEIAAFLKSASGLNKTMIGDYLGEREDLSLKVMHAYVDSFDFQRLEFDEAIRAFLQGFRLPGEAQKIDRIMEKFAERYCKCNPKAFSSADTAYVLAYSVIMLNTDAHNPMVKNKMSPEDFIRNNRGIDDGKDLPEEFMRSLYERIWKKEIKMKEDEFVPQQQQSTSSNKILGLDNILNIVVRKRGSSMETSDDLIKHMQEQFKEKARMSESVFYPATDVVVLKFMVEVCWAPMLAAFSVPLDQSDDEIVVSQCLEGFRSAIHVTAAMSMKTQRDAFITSLAKFTSLHSAADIKQKNVEAIKMKMEITCKKHGSIY

SEQ ID NO: 157602 - protein, 1786 aa, Zea Mays
MASAVAAPPPTPPESDPRLVEIFSPFLEKLIKNASWRNKAHSKLSHTAKSILDRLQKPPPPPAAEAQAPSTPTSSPSTPTSSSAQPGPLRSLSLADSELLLAPVISALGSGSAKLAEAALELLHRLIAHSYIHGEADPSADPSAQLVASLLDAACNALGLDDEHIELLLLKTLLSAVTSTSVRLHGDCLLRAVRACYDMYLGSRSAVNQATAKASLVQMLVIVFRRMEADSSTVPVQPIVVADVIELPDAISGSSPTADPNVVQGFISKIIGDFDGALTPLARTTSSAGAGPTVAHDGAFETTAAAEEGANPADLLDSTDKDMLDAKYWEISMYKTAIEGRKDELGVEGAVVGTLDDDADVRIGNKLRRDAFLVFRALCKLSMKTPPKDAPADPIVMRGKILALELLKILLENAGAVFRTSERFLGAIKQYLCLSLLKNCASSHMIVFQLSCSIFISLVARFRPGLKAEIGVFFPMIILRVLENIAQPNYQAKMIVLRFLEKLCGDSQILVDIFLNYDCDVHSSNIFERMVNGLLKTAQGPPAGVPTTLVPPQDTTMKSEAMKCLVAILRSMGDWMNKQLRIPDPASPNVESEKNDNDDGNELPQADNNGDESSEASDSHSELSNGISEAASLEQRRAYKIELQPKKGIEFLVNASKVGETPEEIAAFLKSASGLNKTMIGDYLGEREDLSLKVMHAYVDSFDFQRLEFDEAIRAFLQGFRLPGEAQKIDRIMEKFAERYCKCNPKAFSSADTAYVLAYSVIMLNTDAHNPMVKNKMSPEDFIRNNRGIDDGKDLPEEFMRSLYERIWKKEIKMKEDEFVPQQQQSTSSNKILGLDNILNIVVRKRGSSMETSDDLIKHMQEQFKEKARMSESVFYPATDVVVLKFMVEVCWAPMLAAFSVPLDQSDDEIVVSQCLEGFRSAIHVTAAMSMKTQRDAFITSLAKFTSLHSAADIKQKNVEAIKAILLIADEDGNYLQEAWEHILTCVSRFENLHLVGEGAPPDATFFALQQPDLDKSKQAKSSILPVLKKKAPNATSASKRGSYDSAGVGGKASGVDQMNNEVTSLLEQVGMAEMNRVFVRSQKLNSEGIIDFVKALCKVSMEELRSASDPRVFSLTKIVEIAHYNMNRIRLVWSSIWHVLSDFFVTIGCSENLSIAIFAMDSLRQLSMKFLEREELTNYNFQNEFMKPFVVVMRKSRAVEIRELIIRCVSQMVLARVSHVKSGWKSMFMVFATASYDDHKNIVLLAFEIIEKILREYFPYITETETTTFNDCVNCLIAFTNSRFNKDISLNAIGFLRFCAAKLAEGDIGSSRLKDNPSNSNPPSPHLTNDGKQECTVLVDKEDHIHFWFPLLAGLSELTFDLRPEIRKSALQVLFDTLRNHGHLFSLPLWEKVFDSVLFPIFDYVRHAIDPSGNPPQGQSVENDPAELDQDAWLYETCTLALQLVVDLFVKFYDTVNPLLKKVLLLLTSFIKRPHQSLAGIGIAAFVRLMSSAGSMFVDEKWLEVVLSLKEAATETLPDFTYVSSGAYLENVPTENGVSADNREDESEPVADDNEESSRSRNLYFTIGDAKCRAAVQLLLIQAVMEVYNMYRGQLSAQNTVILFEALHTVAAHAHKINSDSDLRSKLQELGSMTQMQDPPLLRLENESYQLCLSILQNIFLDSSPDHGSTEVVESHLIGLCKEVLEVYLSTARPSQPSSGTQPLGHWLIPVGSSKRRELAARAPLVVSTLQAISGLGDSAFEKNLRQFFPLLAGLISCEHGSSEVQVALSDMFSTWVGPLVLQSC

SEQ ID NO: 157603 - protein, 626 aa, Zea Mays
MDSLRQLSMKFLEREELTNYNFQNEFMKPFVVVMRKSRAVEIRELIIRCVSQMVLARVSHVKSGWKSMFMVFATASYDDHKNIVLLAFEIIEKILREYFPYITETETTTFNDCVNCLIAFTNSRFNKDISLNAIGFLRFCAAKLAEGDIGSSRLKDNPSNSNPPSPHLTNDGKQECTVLVDKEDHIHFWFPLLAGLSELTFDLRPEIRKSALQVLFDTLRNHGHLFSLPLWEKVFDSVLFPIFDYVRHAIDPSGNPPQGQSVENDPAELDQDAWLYETCTLALQLVVDLFVKFYDTVNPLLKKVLLLLTSFIKRPHQSLAGIGIAAFVRLMSSAGSMFVDEKWLEVVLSLKEAATETLPDFTYVSSGAYLENVPTENGVSADNREDESEPVADDNEESSRSRNLYFTIGDAKCRAAVQLLLIQAVMEVYNMYRGQLSAQNTVILFEALHTVAAHAHKINSDSDLRSKLQELGSMTQMQDPPLLRLENESYQLCLSILQNIFLDSSPDHGSTEVVESHLIGLCKEVLEVYLSTARPSQPSSGTQPLGHWLIPVGSSKRRELAARAPLVVSTLQAISGLGDSAFEKNLRQFFPLLAGLISCEHGSSEVQVALSDMFSTWVGPLVLQSC

SEQ ID NO: 157604 - protein, 685 aa, Zea Mays
MPSRQPTPSPGPAAAVAVSDPRSRGPRHRRAPPAGPVAAWASAAALVLVAAVALLLLLLWRRRRRRKLTVAAGAQPAADLRRLSYQQLRRATGGFAAGSKLGQGGFGPVFRGALPRSGQPVAVKVMDAAGSLQGEREFHNELSLASHLLGCAATAHGGGGGGGPPAPDPPPILLPFAYSLSTQPRRCRMMLVYDLMPNGSLQDALLGKRCPDLVSGWPRRLSVARDVATALHYLHSVVQPPVIHGDVKPSNVLLDADLRARLSDFGLARIRSEEEDELGSGAIGADADGNANPSGGCDEDMSVAGESTTAVVVNGEDNAAKSPEDDEALTTASPAAEAVSTSGCDKTSVGSGCNARSCNGGGAGGSGTGSDWWWRQDNGGGGSGGGGSGGVKDYVMEWIRSEIKKERPKNDWIAGPSAVTPVAPTERKKPKRRAREWWREEYAEELTKKQKRRALAKSKSDAGAMSGLQWWERDCDFEEKGHSRWTMMKSWSRRSSNGNGNSNSSISWWVDGVRRSSRDWASGEFVPKSGGAVSSTPSMRGTVCYVAPEYGGGGPLSEKCDIYSFGVLLLVLISGRRPLQMTTSPMSEFEKASLISWARHLAQVGRLLDLVDPALQDVDRDQALLCITVALLCIQRSPARRPSSAEVLDMLAGEGEPPPLPIEFSPSPPGGFPFKSRRKGRLCCS

SEQ ID NO: 157605 - protein, 65 aa, Zea Mays
MQLDPRASLDRRTNLGMVRAIRLELRGGKEETIRKWSRFLLFRLYFGRYNGGLRGKHHHCPPLLF

SEQ ID NO: 157606 - protein, 463 aa, Zea Mays
MEGTVIRIASESKRGNEQTDSLTEEWSLSLKMLQGISTAHMQEVQVFGFGSAGTRVGCKAMILIKKFSPGKWVVTKFIKNHNHGPVPPRKLDSRLVDQDCDPMEKPHSIEVDPVEEPFEGMEFESEEAAKLFYVNYARLNGFRARISRYCRSRRDNSIISRQIVCSKEGFREVRTKKVLTDEGKTKRPRMITRVGCKAMIVVKKMNSGKWMVSKFEKEHNHSLSYSKMVPSTSNITSGEIVDLAAKGAHPSEVKNEGYSAGTQCNPADSLTILYNNLCQEAIKFAKEGSVTEEIYHVAVSALKEAAEKVAEVKRSRPTLSHCGFVRESKHDVLQEKSMSALQCSNQVELTRTSPGSRPLQDSASNLLLIPTDILTDSRLYSGVDTAPLTGGFPTNGKYAMRVKVHMHQKVLLCILRTQRKPLQKNLRTLVLINSSMERSKVSMDLLKIPWLLFLRYLLHCACL

SEQ ID NO: 157607 - protein, 610 aa, Zea Mays
MEFESEDAARDFYSTYARSAGFRIRISRYTRSRRDNSVISRRIVCSKEGFHETRACDGLHPEQKQQERAGTRVGCKAMILIKKFSPGKWVVTKFIKNHNHGPVPPRKLDSRLVDQDCDPMEKPHSIEVDPVEEPFEGMEFESEEAAKLFYVNYARLNGFRARISRYCRSRRDNSIISRQIVCSKEGFREVRTKKVLTDEGKTKRPRMITRVGCKAMIVVKKMNSGKWMVSKFEKEHNHSLSYSKMVPSTSNITSGEIVDLAAKGAHPSEVKNEGYSAGTQCNPADSLTILYNNLCQEAIKFAKEGSVTEEIYHVAVSALKEAAEKVAEVKRSRPTLSHCGFVRESKHDVLQEKSMSALQCSNQVELTRTSPGSRPLQDSASNLLLIPTDILTDSRLYSGVDTAPLTGGFPTNESESTHASESSFMHFKNTKKTSSEKSQNTCFNQLIHGKEQGIHGSSKDTMVAIPAIPLALCMPVTQSLPGSSTEGPYRLLAAPIEAVPISYCPAEPIRQTQKGICALGPFGGVLSELKNQGTVPKSIVHATALACGARAVPLEDAASLISAIESKIRSGGAIIAKLPSNNLAPLVPPAIAMSSSSEDDEEHDHSEPSQ

SEQ ID NO: 157608 - protein, 593 aa, Zea Mays
MEGTVIRIASESKRGNEQTDSLTEEWSLSLKMLQGISTAHMQEVQVFGFGSAGTRVGCKAMILIKKFSPGKWVVTKFIKNHNHGPVPPRKLDSRLVDQDCDPMEKPHSIEVDPVEEPFEGMEFESEEAAKLFYVNYARLNGFRARISRYCRSRRDNSIISRQIVCSKEGFREVRTKKVLTDEGKTKRPRMITRVGCKAMIVVKKMNSGKWMVSKFEKEHNHSLSYSKMVPSTSNITSGEIVDLAAKGAHPSEVKNEGYSAGTQCNPADSLTILYNNLCQEAIKFAKEGSVTEEIYHVAVSALKEAAEKVAEVKRSRPTLSHCGFVRESKHDVLQEKSMSALQCSNQVELTRTSPGSRPLQDSASNLLLIPTDILTDSRLYSGVDTAPLTGGFPTNESESTHASESSFMHFKNTKKTSSEKSQNTCFNQLIHGKEQGIHGSSKDTMVAIPAIPLALCMPVTQSLPGSSTEGPYRLLAAPIEAVPISYCPAEPIRQTQKGICALGPFGGVLSELKNQGTVPKSIVHATALACGARAVPLEDAASLISAIESKIRSGGAIIAKLPSNNLAPLVPPAIAMSSSSEDDEEHDHSEPSQ

SEQ ID NO: 157609 - protein, 518 aa, Zea Mays
MEGTVIRIASESKRGNEQTDSLTEVPRAIGTLVTHNREVENLIVLEDDTELTPYEGMEFESEDAARDFYSTYARSAGFRIRISRYTRSRRDNSVISRRIVCSKEGFHETRACDGLHPEQKQQERAGTRVGCKAMILIKKFSPGKWVVTKFIKNHNHGPVPPRKLDSRLVDQDCDPMEKPHSIEVDPVEEPFEGMEFESEEAAKLFYVNYARLNGFRARISRYCRSRRDNSIISRQIVCSKEGFREVRTKKVLTDEGKTKRPRMITRVGCKAMIVVKKMNSGKWMVSKFEKEHNHSLSYSKMVPSTSNITSGEIVDLAAKGAHPSEVKNEGYSAGTQCNPADSLTILYNNLCQEAIKFAKEGSVTEEIYHVAVSALKEAAEKVAEVKRSRPTLSHCGFVRESKHDVLQEKSMSALQCSNQVELTRTSPGSRPLQDSASNLLLIPTDILTDSRLYSGVDTAPLTGGFPTNESESTHASESSFMHFKNTKKTSSEKSQKDHIDCWLHLLKQFQFHTALQNP

SEQ ID NO: 157610 - protein, 403 aa, Zea Mays
MILIKKFSPGKWVVTKFIKNHNHGPVPPRKLDSRLVDQDCDPMEKPHSIEVDPVEEPFEGMEFESEEAAKLFYVNYARLNGFRARISRYCRSRRDNSIISRQIVCSKEGFREVRTKKVLTDEGKTKRPRMITRVGCKAMIVVKKMNSGKWMVSKFEKEHNHSLSYSKMVPSTSNITSGEIVDLAAKGAHPSEVKNEGYSAGTQCNPADSLTILYNNLCQEAIKFAKEGSVTEEIYHVAVSALKEAAEKVAEVKRSRPTLSHCGFVRESKHDVLQEKSMSALQCSNQVELTRTSPGSRPLQDSASNLLLIPTDILTDSRLYSGVDTAPLTGGFPTNGKYAMRVKVHMHQKVLLCILRTQRKPLQKNLRTLVLINSSMERSKVSMDLLKIPWLLFLRYLLHCACL

SEQ ID NO: 157611 - protein, 270 aa, Zea Mays
MITRVGCKAMIVVKKMNSGKWMVSKFEKEHNHSLSYSKMVPSTSNITSGEIVDLAAKGAHPSEVKNEGYSAGTQCNPADSLTILYNNLCQEAIKFAKEGSVTEEIYHVAVSALKEAAEKVAEVKRSRPTLSHCGFVRESKHDVLQEKSMSALQCSNQVELTRTSPGSRPLQDSASNLLLIPTDILTDSRLYSGVDTAPLTGGFPTNESESTHASESSFMHFKNTKKTSSEKSQVSCYMLTYVLCMDPAFFGISFWTRRCLFVAGTTEHLF

SEQ ID NO: 157612 - protein, 86 aa, Zea Mays
MRNAHRSKSGGDNAAHLRARAARNLTSARAEPSLPPPLPSSLLFARVPLDPLSLLLLPPPLQSPGSISSHRSASSLTPALPTDPVT

SEQ ID NO: 157613 - protein, 94 aa, Zea Mays
MELREEREEEDLGLKLSGLRLSEAERRGVKGAWLNLEEGGGKVQVVGKLFAEKPGRADGIAQTLGKIWCPIKGIKCKELVVKRDLQHVAVDTSP

SEQ ID NO: 157614 - protein, 624 aa, Zea Mays
MPSPMARVLHRRLLLLAAVSFAVVASLLRPAAAVRPFVLVLSGEDFLKDSAAHPSLPSADSTDDDGWDDFADDSPAADPLLSPSSWVPLLDPASPPLSGDETDSSADALFVAGARAMLSAASDGDDAAFATAAAQIEAAAEAGHPGAQSALAFLTGAGMTRPASRSLAFLLHKFAADAGDLQSKMALAYSYFRQEMYEEAVILYAELAEAALTSSLISKEPPVIEPIRLHSGTEENKEALRKSRGEDDEDFQITEYQAQRGNAANMYKLGLLYYYGLRGLRRDYGKAFHWFSKAVEKGETRALELLGEIYARGAGVERNYTEAYKWLALAAKQQHYSAYNGLGYLYVKGYGVEKKNLTKAKELFELAAENKEAGGHYNLVNAGQPKAIYQVAKLFQKGIGLKRNLHMATMLYKSVAERGPWSSLSRWALESYLKGDVGKALLLYSRMADLGYEVAQSNAAWILDRYGDQSICMGESSFCTDMERHLRAHALWWQASEQGNEHAALLIGDAYYYGRGVARDYERAAEAYMHARSQSNAQAIFNLGYMHEHGHGLPLDLHLAKRYYDQAVEVDSAAKLPVMLALTSLWLRKNYADSFLIGRTLISDFKQSKCESVIPKTRHSTNIY

SEQ ID NO: 157615 - protein, 660 aa, Zea Mays
MPSPMARVLHRRLLLLAAVSFAVVASLLRPAAAVRPFVLVLSGEDFLKDSAAHPSLPSADSTDDDGWDDFADDSPAADPLLSPSSWVPLLDPASPPLSGDETDSSADALFVAGARAMLSAASDGDDAAFATAAAQIEAAAEAGHPGAQSALAFLTGAGMTRPASRSLAFLLHKFAADAGDLQSKMALAYSYFRQEMYEEAVILYAELAEAALTSSLISKEPPVIEPIRLHSGTEENKEALRKSRGEDDEDFQITEYQAQRGNAANMYKLGLLYYYGLRGLRRDYGKAFHWFSKAVEKGETRALELLGEIYARGAGVERNYTEAYKWLALAAKQQHYSAYNGLGYLYVKGYGVEKKNLTKAKELFELAAENKEAGGHYNLVNAGQPKAIYQVAKLFQKGIGLKRNLHMATMLYKSVAERGPWSSLSRWALESYLKGDVGKALLLYSRMADLGYEVAQSNAAWILDRYGDQSICMGESSFCTDMERHLRAHALWWQASEQGNEHAALLIGDAYYYGRGVARDYERAAEAYMHARSQSNAQAIFNLGYMHEHGHGLPLDLHLAKRYYDQAVEVDSAAKLPVMLALTSLWLRKNYADSFLVRFIDSLPEIYPVVNKWVEDVLLDEGNATILTLFACLVTVLYLRERQRRQVAAANPQQPDDVVM

SEQ ID NO: 157616 - protein, 610 aa, Zea Mays
MPKKGHMGTPKQAYATDGGKGDVAAGSTVTASAIASSYDDQIRPLLDAVDRLRHLKVTQEGIQLPTIVVVGDQSSGKSSVLESLAGISLPRGQGICTRVPLVMRLQDDPSADSPKLQLEYSNGRVVTTTEADVADAINAATAEIAGSGKGISDAPITLVVRKRGVPDLTLVDLPGITRVPVHGQPEDIYDQVAKIIKEYIAPKESIILNVLSATVDFPTCESIRMSQQVDRSGERTLAVVTKVDKNPEGLLEKVTMDDVNIGLGYVCVRNRIGDETYDQARVEEERLFKYHPLLSKIDKDMVGIPVLANRLMQIQSTIIAKCLPDIVKQINDRLSRSSAELDQMPQDLNNVADAVRVFFHIVKQVCNSLEKLLVRGDFAEYPDAREFHGTARIADMLSGYAKELPAQCPINRNEPFLMEEMQSPCRRAVQTLMDKARLRSAHHVKELIAMELVADYTANPDYMKTWTEIMEGYEMFMEAVEDKSKPTRITLKGFGEVDVSHLRVYADFAGKAFDLRARLTAYWKSIVLRQVDGLALHVLLSVKLLVEKDLEEELGNELLSNKLAGVEKMLAPSPGTGTKRERLKKSIVLLRQSKEVVANIMDRISAAGDI

SEQ ID NO: 157617 - protein, 211 aa, Zea Mays
MGSSEADEDQLLKSFLAEVSEAERDNEVLRILGCFKLNPFEHLKLSFDSSPDEVKKQYRKLSLLVHPDKCKHPQAQEAFAALAKAQQLLLDPQERGYILDQVTAAKEELRAKRKKELKKDSASKIKSLVDEGKYEEQFERSDGFQQQLIIKVREILTDKEWRRRKMQMRISEEEGRLKKDEEETKEMWKRKREHEEKWEETRDKRGPCHLV

SEQ ID NO: 157618 - protein, 219 aa, Zea Mays
MGSSEADEDQLLKSFLAEVSEAERDNEVLRILGCFKLNPFEHLKLSFDSSPDEVKKQYRKLSLLVHPDKCKHPQAQEAFAALAKAQQLLLDPQERGYILDQVTAAKEELRAKRKKELKKDSASKIKSLVDEGKYEEQFERSDGFQQQLIIKVREILTDKEWRRRKMQMRISEEEGRLKKDEEETKEMWKRKREHEEKWEETRDKRLEGFHEDRKEGTER

SEQ ID NO: 157619 - protein, 277 aa, Zea Mays
MLRSYYEHVCRYKSTLLTRFYGTHCIKQAGCPKVRFIIMGNFCCSEYKIHRRFDLKGSSHGRTIDKAEEKIDEATTLKDLDLDYAFHLQRFWYDELMRQIQMDCTFLETQGIMDYSLLLGVHFRDDFSMSKIGVSQFIGLPKSTGKRKSFEGGGDVCELCFTESGCKDRDFIVDSRKPLVQLGKNMPAQAERRSKRVLDKFLLNERHLFITTSSGGFQDVYLFFGIIDILQDYDITKKLEHAYKSFQVNPGCISAVDPKLYSRRFQEFSRRVFIREH

SEQ ID NO: 157620 - protein, 244 aa, Zea Mays
MATSSDGGGDQRRLLSIPKEGERIIAPTRRPDGTLRKAIRIRAGYVPQEEVAIYQSKGALMRKSGPDVPPGYDPALVADAKPKTKAAKRNERRKEKRQQQASLANDKGKSMNIEGTDAGETDKVLSSKTDKQKDSVESVTKQMSGIAISESHAMPSTNTINNSQPESSAPDIDKKIRALKKKVYSCSFLRLHIFYEKKMNIRLAEAQVQGDPEKLKSETLEKIKKIDGWCMELKLLEDSRAPAA

SEQ ID NO: 157621 - protein, 129 aa, Zea Mays
MECRGLNSPSKQHSVRTFIDSVGADIVCLQETKMQNISRGTGLAILGVNFEEFLFLPTSGASGGILLAWKRHVQATGHNRMDTYSVSVQFQQSNGQPWWLTGVYGPQDIDDKILFLQELRQIRTMGCCG

SEQ ID NO: 157622 - protein, 231 aa, Zea Mays
MTSRDKVGCSSIPLPLDRVLAALVASTQQLGRGWEAAFRVRCGKAAGAAVGEAEGKGEVIEMHTPLFYATCALGGVLSTGLTHLAVTPLDLVKCNMQVDPSKYRDITSAFGVMLHEQGPRGLFRGWMATLVGYSCQGACKFGFYEFFKKCYSDISGPENVERLRTLIYLAASASAEVIADVALCPMEAVKIRVQTQPGFARCLVDGLPKIVQSEGFTKVYFLFGAAKFPTL

SEQ ID NO: 157623 - protein, 86 aa, Zea Mays
MAYVERGVVKDKRTIWRLSIISDFFRAIVNFIRIFFDTLFSVDKTDSYKKGYGAGKKWDGGPGGGGGRGPYGGGGGSLPACGSCCG

SEQ ID NO: 157624 - protein, 135 aa, Zea Mays
MAAAAATPPWASIGPDTTPPLDKQLVSSYNIQQTICNDLTYHRKMNLLHLGSSFNYSRYTATASIIMCPKETLHNEEGGASWNHGGKDTTAFRGGPVEANIGVPCSKWIPCSAALMAPWPPVRRGWCSQSRWWRR

SEQ ID NO: 157625 - protein, 185 aa, Zea Mays
MGSSVGCLGGGSKSRQDQNGQVVAGSSPRSGHELSRPGNNVHVFSLNELKTATRNFHMLNCIGRGGFGAVYKGVTDYWCTNMQRIIVWRMLCLDQRTNVSHWTGRKELLYVLELLLALLFFMRKHNHGLSTVISRLATFYLIRSCCRKLEILDWRNSFLILSLTLARVLQEQWVIWHQSMPCWDN

SEQ ID NO: 157626 - protein, 336 aa, Zea Mays
MLNCIGRGGFGAVYKGNLKNGTPIAIKKLAAESKQGISEFLTEINVISNVRHPNLIKLIGCCVEGSNRLLVYEYAENNSLANALLGPKNKCIPLDWQKRVAICIGTASGLAFLHEEAQPRIVHRDIKASNILLDKKLLPKIGDFGLAKLFPDTVTHISTRVAGTMGYLAPEYALLGQLTKKADIYSFGVLLLEMISGESSSKSTWGPNMHVLVEWTWKLREEGRLLEIVDPELEKYPEEQMLRFIKVALLCTQATSQQRPSMKQVVNMLSNQTEIDLQNVAPPGVLKEPRQRTGGFGGLIADTSSSQSTKGNPAESYSTQTNMNSSQFSTTDVSPR

SEQ ID NO: 157627 - protein, 260 aa, Zea Mays
MQRIIVWRMLCLNKCIPLDWQKRVAICIGTASGLAFLHEEAQPRIVHRDIKASNILLDKKLLPKIGDFGLAKLFPDTVTHISTRVAGTMGYLAPEYALLGQLTKKADIYSFGVLLLEMISGESSSKSTWGPNMHVLVEWTWKLREEGRLLEIVDPELEKYPEEQMLRFIKVALLCTQATSQQRPSMKQVVNMLSNQTEIDLQNVAPPGVLKEPRQRTGGFGGLIADTSSSQSTKGNPAESYSTQTNMNSSQFSTTDVSPR

SEQ ID NO: 157628 - protein, 386 aa, Zea Mays
MGARGKIPTPTPARRTTSTSYISGYKNRFQNFIKHLREMGDEVLVVTTHKGAPEEFHGAKVIGSWSFPCPLYQNVPLSLALSPRIFSEVNKFKPDIIHATSPGIMVLGALAISKMISVPMVMSYHTHLPAYIPRYNLNWLLEPTWSFIRCLHRSADLTLVPSVAIAEDFETAKVVPANRIRLWNKGVDSESFHTKYRRHEMRVRLSGGEPEKPLVIHVGRFGREKNLDFLKRVMERLPGARIAFVGDGPYRSELEKMFTGMPAVFTGMLQGEELSQAYASGDVFAMPSESETLGQVVLESMASGVPVVAARAGGIPDIIPKDKEGKPLEWLPEKRWRSVTGGQPRRKSATSTTAPRYRTGGRRWARLTRPPCFRILLSLPSPTSCC

SEQ ID NO: 157629 - protein, 263 aa, Zea Mays
MGARGKIPTPTPARRTTSTSYISGYKNRFQNFIKHLREMGDEVLVVTTHKGAPEEFHGAKVIGSWSFPCPLYQNVPLSLALSPRIFSEVNKFKPDIIHATSPGIMVLGALAISKMISVPMVMSYHTHLPAYIPRYNLNWLLEPTWSFIRCLHRSADLTLVPSVAIAEDFETAKVVPANRIRLWNKGVDSESFHTKYRRHEMRVRLSGGEPEKPLVIHVGRFGREKNLDFLKRVMERLPGARIAFVGDGPYRCTIPQSLAICFF

SEQ ID NO: 157630 - protein, 230 aa, Zea Mays
MSQTGEAQVPLLQTQEADAEWSSKPRRIALFVEPSPFAYISGYKNRFQNFIKHLREMGDEVLVVTTHKGAPEEFHGAKVIGSWSFPCPLYQNVPLSLALSPRIFSEVNKFKPDIIHATSPGIMVLGALAISKMISVPMVMSYHTHLPAYIPRYNLNWLLEPTWSFIRLWRGSQEQGLPLLETGHTGPSWKKCSRACLQFLPECSKVRSSHKRTPVEMYLQCLQNPRPSGK

SEQ ID NO: 157631 - protein, 130 aa, Zea Mays
MFTGMPAVFTGMLQGEELSQAYASGDVFAMPSESETLGQVVLESMASGVPVVAARAGGIPDIIPKDKEGKPLEWLPEKRWRSVTGGQPRRKSATSTTAPRYRTGGRRWARLTRPPCFRILLSLPSPTSCC

SEQ ID NO: 157632 - protein, 209 aa, Zea Mays
MSDALINGLAGAGGGIIAQLLTYPLQTVNARQQTERDPSKPAFKDGAARQLYLVVKNEGWERLYGGLMPSLVGTAASQGVYYYFYQIFRNRAEARALERSRRGLGDGSVGMLQSLTVAALSGCVNVLLTNPIWVVVTRMQTHRKANKQQRPQGLNCALDKPLEAATAENAPYKTIDVFQELYKESGVLGFWKGVIPALIMQSRNSVHAI

SEQ ID NO: 157633 - protein, 274 aa, Zea Mays
MGGEAEGGERRLGRVLSFGIPDTALGLVMGYVEDPWDRDAISLVCRHWCRVDALSRKHVTVAMAYSTTPERLFGRFPCLESLKLKAKPRAAMFNLISDDWGGSASPWIRQLSATFHSLKKLHLRRMIVSNDDINTLVRAKAHMLVSLKLDRCSGFSTPSIALIARSCRKLETLFLEESMIDEKENDEWIRELATSNSVLETLNFFQTDLRASPEYLTLLVRNCQRLKTLKISECFMPDLVSLFRTAQTLQEFAGGSFEDQGQPVADTVSICCCT

SEQ ID NO: 157634 - protein, 543 aa, Zea Mays
MGGEAEGGERRLGRVLSFGIPDTALGLVMGYVEDPWDRDAISLVCRHWCRVDALSRKHVTVAMAYSTTPERLFGRFPCLESLKLKAKPRAAMFNLISDDWGGSASPWIRQLSATFHSLKKLHLRRMIVSNDDINTLVRAKAHMLVSLKLDRCSGFSTPSIALIARSCRKLETLFLEESMIDEKENDEWIRELATSNSVLETLNFFQTDLRASPEYLTLLVRNCQRLKTLKISECFMPDLVSLFRTAQTLQEFAGGSFEDQGQPVAEDHCQIVQRCPNLETLEVRDVIGDRGLQVVAETCKKLQRLRVERGDDDQGGLEDEQGRISQVGVMAIAQGCPELTYWAIYVSDITNAALEAVGTCSRNLNDFRLVLLDREAHITELPLDNGVRALLRGCTKLRRFAFYVRPGVLSDVGLGYVGEFSKSIRYMLLGNVGESDNGIIQLSKGCPSLQKLELRGCLFSEHALAMAALELKSLRYLWVQGFRSSPTGTDLMAMVRPFWNIEYILPDQDEPCPEYKKQILAYYSLAGRRTDCPPSVTPLYPAV

SEQ ID NO: 157635 - protein, 707 aa, Zea Mays
MRRLESSFRSFSRPVLHAAARVVQEMGKSRAAAFALGAYDEGASLDVGSLDSDFENPMAEGTRKQNPLSNGHGGTDTIAGLLASLMEVVRTTVACECVYVRAMVIKALIWMQNPHESFEELKSIIACELSDPAWPSSLLNDVLLTLHARFKATPDMAVTLLEIARIFATKVPGKIDADVLQLLWKTCLVGAGPDGKHTALEAVTIVLDLPPPQPGSMSGLTSVDMVSASDPKSAMALQRLVQAAVWFLGENANYAASEYAWESATPPGTALMMLDADKMVAAASSRNPTLASALTRLQRCAFSGSWEIRIAAVQALTTIAIRSGEPYRLQIYEFLHALALGGVQSNFSELQLSNGENQGASGTGLGSLISPMLKVLDEMYRGQDDLARDIRQHDNSKQEWSDEELKKLYETHERLLDFVSLFCFVPRAKYLPLGPTSAKLIEIYRNRHNISASGGLSDPAVATGISDLMYESKEVHKETNTVQSGIDPDLAMAWAAGLEDDVWANNAPAVDKVKDFLAGAGTDAPDVDDEEYMNSRPSVGYDDMWAKTILETYDAEEDDGRYSGGSSPESTGSVETSISSHFGGMNYPSLFSSKPSSHGASQQTIREEPPSYSTSVLQRKESFENPLGGGGGRSFGSHEDEDKSSGNPQSGKALYDFTAGGDDELSLNSGEEVEIEYEVDGWYYVKKRRPGRDGKMAGLVPVLYVSS

SEQ ID NO: 157636 - protein, 1004 aa, Zea Mays
MKGSARQFPCQFKTINVSILSLLIPLLNHVSLFLIVLNYGCWSFEVHARRLAALKALTSCSTSSSEMMEKLNEIVFGILEKVADTKQKRKKGIFTKQGGDKESIIRGNLQYASLSALRRFPLDPGNQAFLHRAVQGIEFSDPVAVRHALSIISEIAAKDPYSVAMALGKSAQPGGALQDILHLHDVLARVYLAKLCHSISRARVLDQRPDIKSQYSSLLYQLLLDPSDRVCFEAINCVLGKVDNTESTEDRAGGWIQLTREILKLPEAPSVASKGVLAKSSEKSSKARRPQPLIKLVMRRLESSFRSFSRPVLHAAARVVQEMGKSRAAAFALGAYDEGASLDVGSLDSDFENPMAEGTRKQNPLSNGHGGTDTIAGLLASLMEVVRTTVACECVYVRAMVIKALIWMQNPHESFEELKSIIACELSDPAWPSSLLNDVLLTLHARFKATPDMAVTLLEIARIFATKVPGKIDADVLQLLWKTCLVGAGPDGKHTALEAVTIVLDLPPPQPGSMSGLTSVDMVSASDPKSAMALQRLVQAAVWFLGENANYAASEYAWESATPPGTALMMLDADKMVAAASSRNPTLASALTRLQRCAFSGSWEIRIAAVQALTTIAIRSGEPYRLQIYEFLHALALGGVQSNFSELQLSNGENQGASGTGLGSLISPMLKVLDEMYRGQDDLARDIRQHDNSKQEWSDEELKKLYETHERLLDFVSLFCFVPRAKYLPLGPTSAKLIEIYRNRHNISASGGLSDPAVATGISDLMYESKEVHKETNTVQSGIDPDLAMAWAAGLEDDVWANNAPAVDKVKDFLAGAGTDAPDVDDEEYMNSRPSVGYDDMWAKTILETYDAEEDDGRYSGGSSPESTGSVETSISSHFGGMNYPSLFSSKPSSHGASQQTIREEPPSYSTSVLQRKESFENPLGGGGGRSFGSHEDEDKSSGNPQSGKALYDFTAGGDDELSLNSGEEVEIEYEVDGWYYVKKRRPGRDGKMAGLVPVLYVSS

SEQ ID NO: 157637 - protein, 840 aa, Zea Mays
MALGKSAQPGGALQDILHLHDVLARVYLAKLCHSISRARVLDQRPDIKSQYSSLLYQLLLDPSDRVCFEAINCVLGKVDNTESTEDRAGGWIQLTREILKLPEAPSVASKGVLAKSSEKSSKARRPQPLIKLVMRRLESSFRSFSRPVLHAAARVVQEMGKSRAAAFALGAYDEGASLDVGSLDSDFENPMAEGTRKQNPLSNGHGGTDTIAGLLASLMEVVRTTVACECVYVRAMVIKALIWMQNPHESFEELKSIIACELSDPAWPSSLLNDVLLTLHARFKATPDMAVTLLEIARIFATKVPGKIDADVLQLLWKTCLVGAGPDGKHTALEAVTIVLDLPPPQPGSMSGLTSVDMVSASDPKSAMALQRLVQAAVWFLGENANYAASEYAWESATPPGTALMMLDADKMVAAASSRNPTLASALTRLQRCAFSGSWEIRIAAVQALTTIAIRSGEPYRLQIYEFLHALALGGVQSNFSELQLSNGENQGASGTGLGSLISPMLKVLDEMYRGQDDLARDIRQHDNSKQEWSDEELKKLYETHERLLDFVSLFCFVPRAKYLPLGPTSAKLIEIYRNRHNISASGGLSDPAVATGISDLMYESKEVHKETNTVQSGIDPDLAMAWAAGLEDDVWANNAPAVDKVKDFLAGAGTDAPDVDDEEYMNSRPSVGYDDMWAKTILETYDAEEDDGRYSGGSSPESTGSVETSISSHFGGMNYPSLFSSKPSSHGASQQTIREEPPSYSTSVLQRKESFENPLGGGGGRSFGSHEDEDKSSGNPQSGKALYDFTAGGDDELSLNSGEEVEIEYEVDGWYYVKKRRPGRDGKMAGLVPVLYVSS

SEQ ID NO: 157638 - protein, 159 aa, Zea Mays
MAAAARPSNATLLARLRDGTAKFELLDDSAFALAHAPPAWPRLHCFARIAPSLRGGWSAALNKVEHYGVQRVTGDGRCMFRALAKGMAKNKGIPLAPREEVEDADDLRMAVKEIICDSETGRQEYEEAVIAITVEQSLKRYCQRIRRPDFWGGESEFLV

SEQ ID NO: 157639 - protein, 113 aa, Zea Mays
MAVKEIICDSETGRQEYEEAVIAITVEQSLKRYCQRIRRPDFWGGESEFLVLSRLCRQPIIIYIPEREYHGRGNGFIPIAEYGLEFTKNTKQWKKKTPVRLLYSGRNHYDLLV

SEQ ID NO: 157640 - protein, 120 aa, Zea Mays
MEEDDLRMAVKEIICDSETGRQEYEEAVIAITVEQSLKRYCQRIRRPDFWGGESEFLVLSRLCRQPIIIYIPEREYHGRGNGFIPIAEYGLEFTKNTKQWKKKTPVRLLYSGRNHYDLLV

SEQ ID NO: 157641 - protein, 230 aa, Zea Mays
MALVREGWPCGRTGRRIRLSPSLSPTRTLVTPYCKRTRPGRKATRRPWVFPLPVSSPLRAPSRADPSGLGHAATIHSSVQGPPGVETPTLPRFLHAPFHTAGPIRFGFRLTHLTWPPRRDLAVEAMPLGDGAEATDFVLPDELLAALPQDPYEQLDLARHITALAVSGRVSGLEREAGRLRAEGAGKDRENAELRERVNEIIGRSVLAHGPYGKLEKHLKTQKLLMLTIQ

SEQ ID NO: 157642 - protein, 179 aa, Zea Mays
MEALKKQASKLREHVAKQQQAVLKQFSTRYSQDPSLVDEAELECHQNLQRLYSTTRAAKHFQRNIVRGVEGFIAVSTKQMEIVKKLAGDCCKYGDDNQHFGFALARASEEFGKSHKQIEKEREDLLKILGEQIFEPLREMIMSAPLEDARLLTYRYQRIRQDMESQNRNYQIFELHWQR

SEQ ID NO: 157643 - protein, 238 aa, Zea Mays
MEALKKQASKLREHVAKQQQAVLKQFSTRYSQDPSLVDEAELECHQNLQRLYSTTRAAKHFQRNIVRGVEGFIAVSTKQMEIVKKLAGDCCKYGDDNQHFGFALARASEEFGKSHKQIEKEREDLLKILGEQIFEPLREMIMSAPLEDARLLTYRYQRIRQDMESQIADVMRKQLKSKESSGNTDNSVKLQHAESKLSDLRTTLAALGREATAAMEAVEAQQQQVTYERLLAMSMLTG

SEQ ID NO: 157644 - protein, 313 aa, Zea Mays
MEALKKQASKLREHVAKQQQAVLKQFSTRYSQDPSLVDEAELECHQNLQRLYSTTRAAKHFQRNIVRGVEGFIAVSTKQMEIVKKLAGDCCKYGDDNQHFGFALARASEEFGKSHKQIEKEREDLLKILGEQIFEPLREMIMSAPLEDARLLTYRYQRIRQDMESQVDAERTYHQNAADILNKLHDEMLYAKHHNESANHYDEQSSEPESDAGPAQVHSRSTSEDPVLTKPSESTGNSQEVQFLGEVIHPFDAQADGELSLAVGEYVVVRQVAANGWSEGECKGKAGWFPSAYVEQRDRAPASKVIEPGLLTT

SEQ ID NO: 157645 - protein, 241 aa, Zea Mays
MIMSAPLEDARLLTYRYQRIRQDMESQIADVMRKQLKSKESSGNTDNSVKLQHAESKLSDLRTTLAALGREATAAMEAVEAQQQQVTYERLLAMVDAERTYHQNAADILNKLHDEMLYAKHHNESANHYDEQSSEPESDAGPAQVHSRSTSEDPVLTKPSESTGNSQEVQFLGEVIHPFDAQADGELSLAVGEYVVVRQVAANGWSEGECKGKAGWFPSAYVEQRDRAPASKVIEPGLLTT

SEQ ID NO: 157646 - protein, 268 aa, Zea Mays
MEALKKQASKLREHVAKQQQIFEPLREMIMSAPLEDARLLTYRYQRIRQDMESQIADVMRKQLKSKESSGNTDNSVKLQHAESKLSDLRTTLAALGREATAAMEAVEAQQQQVTYERLLAMVDAERTYHQNAADILNKLHDEMLYAKHHNESANHYDEQSSEPESDAGPAQVHSRSTSEDPVLTKPSESTGNSQEVQFLGEVIHPFDAQADGELSLAVGEYVVVRQVAANGWSEGECKGKAGWFPSAYVEQRDRAPASKVIEPGLLTT

SEQ ID NO: 157647 - protein, 355 aa, Zea Mays
MEALKKQASKLREHVAKQQQAVLKQFSTRYSQDPSLVDEAELECHQNLQRLYSTTRAAKHFQRNIVRGVEGFIAVSTKQMEIVKKLAGDCCKYGDDNQHFGFALARASEEFGKSHKQIEKEREDLLKILGEQIFEPLREMIMSAPLEDARLLTYRYQRIRQDMESQIADVMRKQLKSKESSGNTDNSVKLQHAESKLSDLRTTLAALGREATAAMEAVEAQQQQVTYERLLAMVDAERTYHQNAADILNKLHDEMLYAKHHNESANHYDEQSSEPESDAGPAQVHSRSTSEDPVLTKPSESTGNSQEVQFLGEVAANGWSEGECKGKAGWFPSAYVEQRDRAPASKVIEPGLLTT

SEQ ID NO: 157648 - protein, 371 aa, Zea Mays
MEALKKQASKLREHVAKQQQAVLKQFSTRYSQDPSLVDEAELECHQNLQRLYSTTRAAKHFQRNIVRGVEGFIAVSTKQMEIVKKLAGDCCKYGDDNQHFGFALARASEEFGKSHKQIEKEREDLLKILGEQIFEPLREMIMSAPLEDARLLTYRYQRIRQDMESQIADVMRKQLKSKESSGNTDNSVKLQHAESKLSDLRTTLAALGREATAAMEAVEAQQQQVDAERTYHQNAADILNKLHDEMLYAKHHNESANHYDEQSSEPESDAGPAQVHSRSTSEDPVLTKPSESTGNSQEVQFLGEVIHPFDAQADGELSLAVGEYVVVRQVAANGWSEGECKGKAGWFPSAYVEQRDRAPASKVIEPGLLTT

SEQ ID NO: 157649 - protein, 210 aa, Zea Mays
MRKQLKSKESSGNTDNSVKLQHAESKLSDLRTTLAALGREATAAMEAVEAQQQQVTYERLLAMVDAERTYHQNAADILNKLHDEMLYAKHHNESANHYDEQSSEPESDAGPAQVHSRSTSEDPVLTKPSESTGNSQEVQFLGEVIHPFDAQADGELSLAVGEYVVVRQVAANGWSEGECKGKAGWFPSAYVEQRDRAPASKVIEPGLLTT

SEQ ID NO: 157650 - protein, 255 aa, Zea Mays
MNFLTGAIPSSGSLVNFNETSFVGNLGLCGKQINLVCKDALQSSSNGLQSPSPDDMINKRNGKNSTRLVISAVATVGALLLVALMCFWGCFLYKNFGKKDMRGFRVELCGGSSVVMFHGDLPYSSKDILKKLETIDEENIIGAGGFGTVYKLAMDDGNVFALKRIVKTNEGLDRFFDRELEILGSVKHRYLVNLRGYCNSPSSKLLIYDYLQGGSLDEVLHEKSEQLDWDARINIILGAAKVSRPVYQTLDLQSF

SEQ ID NO: 157651 - protein, 235 aa, Zea Mays
MNFLTGAIPSSGSLVNFNETSFVGNLGLCGKQINLVCKDALQSSSNGLQSPSPDDMINKRNGKNSTRLVISAVATVGALLLVALMCFWGCFLYKNFGKKDMRGFRVELCGGSSVVMFHGDLPYSSKDILKKLETIDEENIIGAGGFGTVYKLAMDDGNVFALKRIVKTNEGLDRFFDRELEILGSVKHRYLVNLRGYCNSPSSKLLIYDYLQGGSLDEVLHVSRPVYQTLDLQSF

SEQ ID NO: 157652 - protein, 402 aa, Zea Mays
MGSFLWKQPSYLFILIILHLVAHEARTLSSDGEALLAFKKAVTNSDGVFLNWREQDADPCNWKGVRCDSHSKRVIDLILAYHRLVGPIPPEIGKLNQLQTLSLQGNSLYGSLPPELGNCTKLQQLYLQGNYLSGYIPSEFGDLVELEALDLSSNTLSGSVPHSLDKLSKLTLFNVSMNFLTGAIPSSGSLVNFNETSFVGNLGLCGKQINLVCKDALQSSSNGLQSPSPDDMINKRNGKNSTRLVISAVATVGALLLVALMCFWGCFLYKNFGKKDMRGFRVELCGDFSGSSVVMFHGDLPYSSKDILKKLETIDEENIIGAGGFGTVYKLAMDDGNVFALKRIVKTNEGLDRFFDRELEILGSVKHRYLVNLRGYCNSPSSKLLIYDYLQGGSLDEVLHGF

SEQ ID NO: 157653 - protein, 291 aa, Zea Mays
MGSFLWKQPSYLFILIILHLVAHEARTLSSDGEALLAFKKAVTNSDGVFLNWREQDADPCNWKGVRCDSHSKRVIDLILAYHRLVGPIPPEIGKLNQLQTLSLQGNSLYGSLPPELGNCTKLQQLYLQGNYLSGYIPSEFGDLVELEALDLSSNTLSGSVPHSLDKLSKLTLFNVSMNFLTGAIPSSGSLVNFNETSFVGNLGLCGKQINLVCKDALQSSSNGLQSPSPDDMINKRNGKNSTRLVISAVATVGALLLVALMCFWGCFLYKNFGKKDMRGFRVELCGGNRGM

SEQ ID NO: 157654 - protein, 238 aa, Zea Mays
MNFLTGAIPSSGSLVNFNETSFVGNLGLCGKQINLVCKDALQSSSNGLQSPSPDDMINKRNGKNSTRLVISAVATVGALLLVALMCFWGCFLYKNFGKKDMRGFRVELCGDFSGSSVVMFHGDLPYSSKDILKKLETIDEENIIGAGGFGTVYKLAMDDGNVFALKRIVKTNEGLDRFFDRELEILGSVKHRYLVNLRGYCNSPSSKLLIYDYLQGGSLDEVLHVSRPVYQTLDLQSF

SEQ ID NO: 157655 - protein, 276 aa, Zea Mays
MLRVADRRLSPMTLTSPLHRPWSELQTGDIHGQYSDLLRLFEYGGFPPEANYLFLGDYVDRGKQSLETICLLLAYKIKYPENFFLLRGNHECASINRIYGFYDECKRRFNVRLWKVFTECFNTLPVAALIDDKILCMHGGLSPDLAHLDEIKNLQRPTDVPDQGLLCDLLWSDPGKDAQGWGMNDRGVSYTFGADKVSEFLQKHDLDLICRAHQVVEDGYEFFADRQLVTIFSAPNYCGEFDNAGAMMSVDETLMCSFQILKPAERKNKFMGSNKM

SEQ ID NO: 157656 - protein, 449 aa, Zea Mays
MGCDAMQCNAMQGPLVIWIWRPRFTPGSHDDLGLEDAGFDLLVREHDAAVAVDLVADVDVLAEDGHVLDARPLADGGVPADDAAGDAGVLLDARGPGGRLLPQRVQVQAQARDVVPRLPDVHPETRENHGEEGPVRRDAREHLLLDGRRLQLDAAEHGRVEQVDAGVDLVAHERLGLLHEPLHLAGALLHDHHAVLGRLVDLGHHDRGLAAVGPVELNELGERVLADHVAVEHEERVAGSVGELVAGQGQRACGPEGLRLLRAGDLDAKLALEVLEKVEHDLRLVIDGQDNLCNTNFLQSLDLVQDHGLVAEIHERLGHAERERAQAGAEASDENEGLHGCSSSPPPNSAPTPSAPSLCKKRGARTLNPWRDGRPFLPRRRETGEGGGLSTAPRTSAARAAARKKTRRRKRRRLRLRATQDAAADERRRGFIPLPPPPPSPLEHYYGWG

SEQ ID NO: 157657 - protein, 310 aa, Zea Mays
MLHKWKAADGGGCAGVAGGVDQRRRCVAASLSTLIAATLAFLAYVAFFPDGGAHGLYRLWTCQDCAGDLGEFPGDEAAAADGPSAARAARSPTTLSHVAFGIGASARTWDQRRGYAELWWRPGQMRGHVWLEEQPASPWPAATCPPYRVSADASRFGDRAPASRMARIVVDSFLAVAGELGNGTAREEARWFVMGDDDTVFFPDNLVAVLSKYDHEEMYYVGAPSESVEQDVMHSYGTAFGGGGFAVSYPAAAALATAIDGCLDRYRYFFGSDERVKACLSELGVPLTREPGFHQDSVVSPLAGPRSTCP

SEQ ID NO: 157658 - protein, 522 aa, Zea Mays
MLHKWKAADGGGCAGVAGGVDQRRRCVAASLSTLIAATLAFLAYVAFFPDGGAHGLYRLWTCQDCAGDLGEFPGDEAAAADGPSAARAARSPTTLSHVAFGIGASARTWDQRRGYAELWWRPGQMRGHVWLEEQPASPWPAATCPPYRVSADASRFGDRAPASRMARIVVDSFLAVAGELGNGTAREEARWFVMGDDDTVFFPDNLVAVLSKYDHEEMYYVGAPSESVEQDVMHSYGTAFGGGGFAVSYPAAAALATAIDGCLDRYRYFFGSDERVKACLSELGVPLTREPGFHQVDIRGDAYGMLAAHPVAPLVSLHHLDHVAPISPQGKTALDAVRPLVGASRFDPARALQQSFCYQRGPGYVWSVSISWGYTVQVYPWAVAPHELEVPLQTFRTWRSWADGPFVFNTRPLSPHDACARPAMFFLGRVRNGTARTTVTEYARRAGPSKECDKASFRAASTVHTVRVIAPRMSESDWRHRGGSAARRSGRGGAPCWRCGYGVAAEESSRRRRIETTGPFSL

SEQ ID NO: 157659 - protein, 209 aa, Zea Mays
MLAAHPVAPLVSLHHLDHVAPISPQGKTALDAVRPLVGASRFDPARALQQSFCYQRGPGYVWSVSISWGYTVQVYPWAVAPHELEVPLQTFRTWRSWADGPFVFNTRPLSPHDACARPAMFFLGRVRNGTARTTVTEYARRAGPSKECDKASFRAASTVHTVRVIAPRMSESDWRRAPRRQCCKTKRTRWGSVLEVRIRRCGRGELTSP

SEQ ID NO: 157660 - protein, 434 aa, Zea Mays
MALASQGITLRSPPAGSGGHSGRRSSSVPAAAAPRGWGQPHAGQALSISPARYEPAARPPWRGSLAAAIRAAASAGAHHGSDPVPAEPRIELPAIFTVFSEAAKTGAAFFIASSSAAFLLGSFGGFGGGAGGLFGGGGGGGGWGAGGGGAGGGGGGDFWSWLFSAGAANADDKSSGDWDAHGLPVNMTVPLTKLSGLKRYKLSELKFFDRAAAGGGAYTGPEDSFFEMVTLQPGGVYTKSQLLKELETLVSCGMFERVDLEVKPKPDNTIGLTVSFVESVWSAAKQFKCINVGLMSQSGQVDFDQDMTEREKMDYLRKQERDYQQRVRGAKPCILPENVRGEVLGMMKKQEKVSARMLQKIRDHVQKWYHNEGFVCAQVVNFGNLNTNEVVCEVVEGDITKVEYQFQDKLGNIVEGNTQLQIIDRELPQQGNRL

SEQ ID NO: 157661 - protein, 705 aa, Zea Mays
MALASQGITLRSPPAGSGGHSGRRSSSVPAAAAPRGWGQPHAGQALSISPARYEPAARPPWRGSLAAAIRAAASAGAHHGSDPVPAEPRIELPAIFTVFSEAAKTGAAFFIASSSAAFLLGSFGGFGGGAGGLFGGGGGGGGWGAGGGGAGGGGGGDFWSWLFSAGAANADDKSSGDWDAHGLPVNMTVPLTKLSGLKRYKLSELKFFDRAAAGGGAYTGPEDSFFEMVTLQPGGVYTKSQLLKELETLVSCGMFERVDLEVKPKPDNTIGLTVSFVESVWSAAKQFKCINVGLMSQSGQVDFDQDMTEREKMDYLRKQERDYQQRVRGAKPCILPENVRGEVLGMMKKQEKVSARMLQKIRDHVQKWYHNEGFVCAQVVNFGNLNTNEVVCEVVEGDITKVEYQFQDKLGNIVEGNTQLQIIDRELPQQLRPGHIFNIGAGKQALKNINSLALFSNIEVNPRPDETKEGGIVVEIKLKELEPKSAEVSTEWSIVPGREGRPTLASIQPGGTVSFEHRNIYGLNRSIVGSVTSSNLLNPQDDLSFKLEYVHPYLDGVDDRSKNRTFKTSCFNTRKLSPVFVAGPNMDEAPPVWIDRVGFKANITESFTRQSKFTYGLVVEEITTRDETNTICTHGSRAMPSGGLSMDGPPTTLSGTGVDRMAFLQANITRDNTEFVNGAIVGDRYIFQTKVLASGAKTHSSTVIN

SEQ ID NO: 157662 - protein, 229 aa, Zea Mays
MVLNSHQISPNLLLWLVLGVFLMATSLRMYATCQQLAHAAAANSFLGHTELRVHVPPSITLATRGRLQSLRLQLALLDREFDDLDYDTLRALDADNSPHAPSMSEEEINSLPVFKYKVQAQQRHPPARKSDGPSQLSVSSTGSGNEEKQDGLKADGTSKPSEDELTCSVCLEQVTVGDLLRSLPCLHQFHVNCIDPWLRQQGTCPICKHQVSDGWHATGNGEEDASYMV

SEQ ID NO: 157663 - protein, 263 aa, Zea Mays
MSFVFRGSRTDIEAGGFPGFAPERRAMRIHAGSRPVNSNSLAFLLTVLVLFMVLNSHQISPNLLLWLVLGVFLMATSLRMYATCQQLAHAAAANSFLGHTELRVHVPPSITLATRGRLQSLRLQLALLDREFDDLDYDTLRALDADNSPHAPSMSEEEINSLPVFKYKVQAQQRHPPARKSDGPSQLSVSSTGSGNEEKQDGLKADGTSKPSEDELTCSVCLEQVTVGDLLRSLPCLHQFHVNCIDPWLRQQGTCPICKHQRH

SEQ ID NO: 157664 - protein, 586 aa, Zea Mays
MAEVVDKLKDYDIKKEGEAEILLHKKNSVFFNPVQVHNRDMSIAVLRTFVAKRKEEHEALVDKRNTSHKKNKQSETSSQNGEDASTGQQDEMDVVCEKELNKAEDQIDDLSKEATEPSWKVTRELKPPLVLEALAATGLRSLRYAREVEGLGKVVALDNDKASIEDCKRNIKFNGASATSKVEAYLVDARIHMLTHPKEFDVAVADGGLLMCTATDLAVLCGTNGEVCYAKYGSFPTKGKYCHEMALRILLASIESHANRYKRYIVPVLSVFMDFYIRVFVRVFTSASEIKNTPLKLSYIYQCVGCDSFHLQCLARTVQKKNNGVKHAPAIGPVVPQECSDCGKKFNVGGPIWSAPIHDQDWVLSTLTGVKSMKDRYPAYDKITSVLNTMSEELHDVPLFFSLHNIAGTVKCTSPSLVMFRSAVLNAGYRISSTHVNPLGIKSDAPWDVIWDIMRCWVKNHPIKEQPRDSPGTVILSKSPKLEANFSRAVAALSKAQTNKIKRFLPNPERHWGPKVRAGRKITSKHVSLLGPDAIKGAVNGGDCQKEGNGAEPDSTASEPEGIKDVEDEPSNKRQKTSDGEPASEP

SEQ ID NO: 157665 - protein, 467 aa, Zea Mays
MAEVVDKLKDYDIKKEGEAEILLHKKNSVFFNPVQVHNRDMSIAVLRTFVAKRKEEHEALVDKRNTSHKKNKQSETSSQNGEDASTGQQDEMDVVCEKELNKAEDQIDDLSKEATEPSWKVTRELKPPLVLEALAATGLRSLRYAREVEGLGKVVALDNDKASIEDCKRNIKFNGASATSKVEAYLVDARIHMLTHPKEFDVVDLDPYGSPSIFLDSAVQAVADGGLLMCTATDLAVLCGTNGEVCYAKYGSFPTKGKYCHEMALRILLASIEELHDVPLFFSLHNIAGTVKCTSPSLVMFRSAVLNAGYRISSTHVNPLGIKSDAPWDVIWDIMRCWVKNHPIKEQPRDSPGTVILSKSPKLEANFSRAVAALSKAQTNKIKRFLPNPERHWGPKVRAGRKITSKHVSLLGPDAIKGAVNGGDCQKEGNGAEPDSTASEPEGIKDVEDEPSNKRQKTSDGEPASEP

SEQ ID NO: 157666 - protein, 357 aa, Zea Mays
MWYGSFPTKGKYCHEMALRILLASIESHANRYKRYIVPVLSVFMDFYIRVFVRVFTSASEIKNTPLKLSYIYQCVGCDSFHLQCLARTVQKKNNGVKHAPAIGPVVPQECSDCGKKFNVGGPIWSAPIHDQDWVLSTLTGVKSMKDRYPAYDKITSVLNTMSEELHDVPLFFSLHNIAGTVKCTSPSLVMFRSAVLNAGYRISSTHVNPLGIKSDAPWDVIWDIMRCWVKNHPIKEQPRDSPGTVILSKSPKLEANFSRAVAALSKAQTNKIKRFLPNPERHWGPKVRAGRKITSKHVSLLGPDAIKGAVNGGDCQKEGNGAEPDSTASEPEGIKDVEDEPSNKRQKTSDGEPASEP

SEQ ID NO: 157667 - protein, 549 aa, Zea Mays
MAEVVDKLKDYDIKKEGEAEILLHKKNSVFFNPVQVHNRDMSIAVLRTFVAKRKEEHEALVDKRNTSHKKNKQSETSSQNGEDASTGQQDEMDVVCEKELNKAEDQIDDLSKEATEPSWKVTRELKPPLVLEALAATGLRSLRYAREVEGLGKVVALDNDKASIEDCKRNIKFNGASATSKVEAYLVDARIHMLTHPKEFDVVDLDPYGSPSIFLDSAVQAVADGGLLMCTATDLAVLCGTNGEVCYAKYGSFPTKGKYCHEMALRILLASIESHANRYKRYIVPVLSVFMDFYIRVFVRVFTSASEIKNTPLKLSYIYQCVGCDSFHLQCLARTVQKKNNGVKHAPAIGPVVPQECSDCGKKFNVGGPIWSAPIHDQDWVLSTLTVLNAGYRISSTHVNPLGIKSDAPWDVIWDIMRCWVKNHPIKEQPRDSPGTVILSKSPKLEANFSRAVAALSKAQTNKIKRFLPNPERHWGPKVRAGRKITSKHVSLLGPDAIKGAVNGGDCQKEGNGAEPDSTASEPEGIKDVEDEPSNKRQKTSDGEPASEP

SEQ ID NO: 157668 - protein, 384 aa, Zea Mays
MAEVVDKLKDYDIKKEGEAEILLHKKNSVFFNPVQVHNRDMSIAVLRTFVAKRKEEHEALVDKRNTSHKKNKQSETSSQNGEDASTGQQDEMDVVCEKELNKAEDQIDDLSKEATEPSWKVTRELKPPLVLEALAATGLRSLRYAREVEGLGKVVALDNDKASIEDCKRNIKFNGASATSKVEAYLVDARIHMLTHPKEFDVVDLDPYGSPSIFLDSAVQAVADGGLLMCTATDLAVLCGTNGEVCYAKYGSFPTKGKYCHEMALRILLASIESHANRYKRYIVPVLSVFMDFYIRVFVRVFTSASEIKNTPLKLSYIYQCVGCDSFHLQCLARTVQKKNNGVKHAPAIGPVVPQECSDCGKKFNVGGPIWSYMTFHCFSVSIT

SEQ ID NO: 157669 - protein, 301 aa, Zea Mays
MNVRIHTCVWFMLLHGLFLCTLHINAHGSLLIRSLERLMRWLTTRALHFLLSRTRVTLKKSGVVLDLVPPLTKVNNLIFGRTWVDSPGEMVMTNLTTGDKVVLYFQPCGWFGAGRYEVDGYVYSAAEEPKIMITGKWNKSLSCQPCDQEGDPLPGTELKEIWRVAPAPQGDKYQYTHFAHKINSFDTAPKKLLASDSRLRPDRYALEKGDMSKSGAEKSRLEEQQRAEKRTREAKGEQFTPRWFNLTDVVSPTPWGDLEIYEYNGKYTEHRAAIDRSDVTDETDVTSVKFSPWQYGSSSSQ

SEQ ID NO: 157670 - protein, 144 aa, Zea Mays
MDNIWRVAPAPQGDKYQYTHFAHKINSFDTAPKKLLASDSRLRPDRYALEKGDMSKSGAEKSRLEEQQRAEKRTREAKGEQFTPRWFNLTDVVSPTPWGDLEIYEYNGKYTEHRAAIDRSDVTDETDVTSVKFSPWQYGSSSSQ

SEQ ID NO: 157671 - protein, 397 aa, Zea Mays
MVFQKRSSSELEASGGGQVAEMPRVPKSARGKRSVRKKEAQNPPQMSAFDLLATVAGKLLDEGVGSLGNMSAGAPALTACAKDVRVKKEQCDEEMKQFKHEVTDQDSCNESAILPHIVFQRAVNNARNEDPKAKSEAQDKESSMISCTKAELGCNFGVIADRWSPESVESGAFTGDAVASLMPPAPAGFHKNAPEMYNLLDSMDVDVKPPPLVSSDSTGEMPLYGDKVHRSTSLPRVSKGVGFFAVDRDDDDDKSSGCTHPSTTTNKDFRSNCTAEYSRVRKLLTSKYRKVAPARVYKSDLSYSDVDRKPSFRNKKMHYTRQRTQRSTFKRRKLFDRHSVLASEFGTAHGKGNTKKVTGRDSHAVSLEANKGTSSTPFQKSRGSNDCHVKLKIKSFK

SEQ ID NO: 157672 - protein, 232 aa, Zea Mays
MLTKSNLLSCTYDQPPTTNNMPCFISATASREDEPPPQPPPAYNIIPIHDVVMQGEHPSLRFPEVRAAVEALAHAADLPPPPLARGWDAFRADLFDWLGATCGFQLDNVRNQREHLVLLLANAQLRAGGTLPTDHPADVLHHSIARDIRRKLLKNYKTWCSYLGKRPHVHVPSGGRRVAQGVGPDTRRDLLYTALYLLIWGEAANLRFMPECLCYIFHYMGTRSQPCHRPVD

SEQ ID NO: 157673 - protein, 246 aa, Zea Mays
MSHRILFCVPTKLPMLTKSNLLSCTYDQPPTTNNMPCFISATASREDEPPPQPPPAYNIIPIHDVVMQGEHPSLRFPEVRAAVEALAHAADLPPPPLARGWDAFRADLFDWLGATCGFQLDNVRNQREHLVLLLANAQLRAGGTLPTDHPADVLHHSIARDIRRKLLKNYKTWCSYLGKRPHVHVPSGGRRVAQGVGPDTRRDLLYTALYLLIWGEAANLRFMPECLCYIFHYMGTRSQPCHRPVD

SEQ ID NO: 157674 - protein, 83 aa, Zea Mays
MHISIRNKGCSFLKIHRGVSTLLMFSTQFYTLNPLKPVFVNSVFSSLGCVFSFIRVCVFLPCEEPLNSLGHLHQCEFFFITRN

SEQ ID NO: 157675 - protein, 185 aa, Zea Mays
MQSVHFFCGDSTGFYLVILVLLLVILHIWKKLAARILWKLYTRKLPMLSRVRQCTWCKANIRGYDHHCPAFGTCIGQKNHRLFMALLTGFVVAESTYTMCSTKYITRCISSGTIRSENPVSLNIVISTTLFSILQVLWQIVFLMWHIYCICFNIKTDEWVISNFPCFGVFVHQLQVVFSLAVSCS

SEQ ID NO: 157676 - protein, 302 aa, Zea Mays
MSRLASGLQRLRRSSSQWEVLWSALASCGLVLFSQLAVAMVPRLFPFLSLLAMLPIAGLVFIAAIVLGRLWRRFIGVAASAPLFVLFNILLLWGVYVFVIRRETSSLLDMLINAECALLLWGFYRILSGDPGIVACDSSYLEEAGCKDFVEAIYSSEKLPMLSRVRQCTWCKANIRGYDHHCPAFGTCIGFVVAESTYTMCSTKYITRCISSGTIRSENPVSLNIVISTTLFSILQVLWQIVFLMWHIYCICFNIKTDEWINWKKYPEFQMKEQPRSDSEVKFVNPYDKGMLCNIREFLKPE

SEQ ID NO: 157677 - protein, 210 aa, Zea Mays
MRPSAFLAARRGDGSPSLPFPLPPRDAPHRGSVLSGCSLPFWFSAQLHCTRLREFLFFKRQSDSDLPSTACCIGLVFIAAIVLGRLWRRFIGVAASAPLFVLFNILLLWGVYVFVIRRETSSLLDMLINAECALLLWGFYRILSGDPGIVACDSSYLEEAGCKDFVEAIYSSEKLPMLSRVRQCTWCKANIRGYDHHCPAFGTCIGICCC

SEQ ID NO: 157678 - protein, 189 aa, Zea Mays
MRPSAFLAARRGDGSPSLPFPLPPRDAPHRGSVLSGCSLPFWFSAQLHCTRLREFLFFKRQSDSDLPSTACCIGLVFIAAIVLGRLWRRFIGVAASAPLFVLFNILLLWGVYVFVIRRETSSLLDMLINAECALLLWGFYRILSGDPGIVACDSSYLEEAGCKDFVEAIYSKTPNALKGQAVYLVQSKH

SEQ ID NO: 157679 - protein, 261 aa, Zea Mays
MSRLASGLQRLRRSSSQWEVLWSALASCGLVLFSQLAVAMVPRLVFIAAIVLGRLWRRFIGVAASAPLFVLFNILLLWGVYVFVIRRETSSLLDMLINAECALLLWGFYRILSGDPGIVACDSSYLEEAGCKDFVEAIYSSEKLPMLSRVRQCTWCKANIRGYDHHCPAFGTCIGQKNHRLFMALLTGFVVAESTYTMCSTKYITRCISSGTIRSEVSMPISYSLCMNCKAILFGKCMSVPLSQLVFRFLPVFSEPFTWMK

SEQ ID NO: 157680 - protein, 221 aa, Zea Mays
MRPSAFLAARRGDGSPSLPFPLPPRDAPHRGSVLSGCSLPFWFSAQLHCTRLREFLFFKRQSDSDLPSTACCIGLVFIAAIVLGRLWRRFIGVAASAPLFVLFNILLLWGVYVFVIRRETSSLLDMLINAECALLLWGFYRILSGDPGIVACDSSYLEEAGCKDFVEAIYSSEKLPMLSRVRQCTWCKANIRGYDHHCPAFGTCIEKSSSIYGPFDRICCC

SEQ ID NO: 157681 - protein, 90 aa, Zea Mays
MDIYLGLEGVLHKLVIVLFLIDPPCCYQIVFLMWHIYCICFNIKTDEWINWKKYPEFQMKEQPRSDSEVKFVNPYDKGMLCNIREFLKPE

SEQ ID NO: 157682 - protein, 695 aa, Zea Mays
MDDESKSAPKSDVNTDAGAEAAAAAAPLPPSSSETAETEARVEAADGESQVVERLVELVSEIAAISDFRNSYRRQFCNLSRRIRLLVPMLEEAKEAPTPLTVASEAALRRLREALHAARDLLQLGSSGSKIFLVLDREKIMKTFQDVTARLEQALAGISFDELNISDEVREQVELVHTQFKRAKERLSEKLQLVTIYDLNHESLTLHEMASGGDPGAVVEKMSMLLKRIKDFVQTEDPEMGAQASTATISTKDNSACPVIPDDFRCPISLDLMKDPVIVATGQTYERGYIEMWLEAGHDTCPKTQQKLANKSLTPNYVLRSLITQWCEANGIEPPKRPAQLRDAPLSCSAAEHSNVLELLQKLSSQNLEDQRGSAGMLRQLAKRSAENRACIGDAGAIPILVSLLSTTDVSTQEHVVTALLNLSIYEENKARIISSGAVPGIVHVLKRGSMEARENSAATLFSLSIVDENKVTIGCSGAIPALVQLLSNGSQRGKKDAATALFNLCIYQGNKGKAVRAGLVPILLELLMETESGMVDEALAILAILSGHPEGKTAIGAASAIPVLVGVIRNGSPRNKENAAAVMVHLCSGEQQQQHLAEAQEQGIVSLLEELAESGTDRGKRKAVQLLERMNRFLKQQSQAEAEAEAMAQAHAQAQAQAQAQAQAQPQILVQAQAHADMQAERSLLPTSSDISDR

SEQ ID NO: 157683 - protein, 84 aa, Zea Mays
MPKFWVGLERLSQDLGFCGFVGSQAGWGSGVSCWLENMYMNRILLLRLLLCVSFKVQIPNLLESFRYSREQLARRLILVISSGE

SEQ ID NO: 157684 - protein, 854 aa, Zea Mays
MAKPGGSDESWEYSLRKYLLLLATLVATVTYGAGFNPPGGVWQTADPAVDRIAGDPIIRDTNYARYLSFFYSNATAFASSLVVIVLVLILSVLHDNGGITMLAPLLGVLRAVMVLDLLSLMGAYAAGTFRDTLTAVYSLVLSAGVVAYLVAHLALASRAPAAEDKRGQSAPERLRKVLMLLATFAASVTYVAGLSAPGGFWDHSEDGHRPGDAILKGGPHDARLKAFFVCNTTAFVASLLILVMLLEKKLCFSQKVRSYEIYGFIAVTLISLLGAYAAGSSRQIDTTIYVSALVGAVAVCILIQVVFVLLFQANSTEGQQTRTQGPLTNNGNGSDERQQTQGPQTSMDSNDRDEQQQQTHGLQTSDDNVSDHHQQQQQTQSPQTSNGNGNASDEHEKQQNPALEKARSLVLLLATLAAAITYQAGLNPPGGLWQSNGRLYKIGDPILLTTNPRRYKAFYYCNSVAFVASLVAVMLVRKKTLHHHNALEAAMVLDLFGLIGAYAAGSCRDVSTSIYAMALAGAVLVYVVIHVVFLTLDEKDGSSARRNDDASFEEREKKEAGLVEKRRKRLLLFAILAATITYQAGLTPPGGFLVQDDNRTGRHAGDAVLLNNYPRRYTAFFYCNSHQQSSSKRGTWGRTRSQCWCWGAKCHGGRAKRSPRSQSSPKRKEGTRQAQVSDAAWNPRGERDLPGRAGAAGRGVAVQRRHPHRGRPCDARLPEGPVPCLLLQQLHLLRGVRGRRRASAAGVAAQEVVVARGHERDDRAGPAGPLDRLCRRVQQDVEDFCGCFRSRSRCARLFRHTCAAVKLRQEREEDSPRLSVSAPGPGEQRGKRSGNERGRAPGSSLLKLECTVRS

SEQ ID NO: 157685 - protein, 378 aa, Zea Mays
MAKPGGSDESWEYSLRKYLLLLATLVATVTYGAGFNPPGGVWQTADPAVDRIAGDPIIRDTNYARYLSFFYSNATAFASSLVVIVLVLILSVLHDNGGITMLAPLLGVLRAVMVLDLLSLMGAYAAGTFRDTLTAVYSLVLSAGVVAYLVAHLALASRAPAAEDKRGQSAPERLRKVLMLLATFAASVTYVAGLSAPGGFWDHSEDGHRPGDAILKGGPHDARLKAFFVCNTTAFVASLLILVMLLEKKLCFSQKVRSYEIYGFIAVTLISLLGAYAAGSSRQIDTTIYVSALVGAVAVCILIQVVFVLLFQANSTEGQQTRTQGPLTNNGNGSDERQQTQGPQTSMDSNDRDEQQQQTHGLQTSDDNVSSKLLPLQF

SEQ ID NO: 157686 - protein, 102 aa, Zea Mays
MRSSRVHLLLSGGSLKCAFVLLCAAKVVTDRVSGRSKGFGFVRYATIEEAERARQEMNAKFLDGWVIFVDPAKPRQPKPAPQQDTGSSHAGFTTNKTVGWCG

SEQ ID NO: 157687 - protein, 349 aa, Zea Mays
MNKSLLTLGRVINALVEHSVHVPYRDSKLTRLLRESLGGKAKTCIIATVSPSAHSLEETLVTLDYAARAKSIRNKPEANKKTCKTVVLKELYQEMERMKQDVKAAREKNGIYISHERFAQDETKRKTMKEKIEHLELSLEKQNKEVQKFKALYLAEQECHWDFESQNNDLKVNLESLKGKFIDLEEAHCRAHMSLREKDFIISNLLHSEHLIIERAKDMRNTLENATEDISVLLNKQERQSKTEAENKRLLSGFRAELDRSLGVLHATVVGSVCEQSKILESINEQTKLYFLARNESENQLERRIARAKDMYVSGVQCMKELANTMRQQSIIDSEQMRQNISTNANAIG

SEQ ID NO: 157688 - protein, 1057 aa, Zea Mays
MAQTPNPSRRSWVGPAPMPFLTPRPERRHLEMRWADGVSQSAARRSGVGAVARDGCERDQEVNVQVMLRCRPLSEEEQRVNAQSAISCNESKREVTVLHSLFKQADKTFTFDKVFGPQSQQRSIYNHAVAPLVTEVLEGYNCTVFVFGQTGTGKTYTMEGEMRQKVSELPDTAGVIPRAVCHIFEILTARKADYSMKVTFLELYNEDITDLLSLEDQSRFPEGRQKRPITLMEDGKGGAVIRGLEEIVVYSPSDIYSLLEHGSARRRTADTALNKQSSRSHAVFSINIQVKETTVGNEELIKYGRLNLVDLAGSENIARSGAREGRARETGEMNKSLLTLGRVINALVEHSVHVPYRDSKLTRLLRESLGGKAKTCIIATVSPSAHSLEETLVTLDYAARAKSIRNKPEANKKTCKTVVLKELYQEMERMKQDVKAAREKNGIYISHERFAQDETKRKTMKEKIEHLELSLEKQNKEVQKFKALYLAEQECHWDFESQNNDLKVNLESLKGKFIDLEEAHCRAHMSLREKDFIISNLLHSEHLIIERAKDMRNTLENATEDISVLLNKQERQSKTEAENKRLLSGFRAELDRSLGVLHATVVGSVCEQSKILESINEQTKLYFLARNESENQLERRIARAKDMYVSGVQCMKELANTMRQQSIIDSEQMRQNISTNANAIGNFLEVMFSEAEQVLNDVLKSTSDLKELLAFSAELQNTGLRRNLASVQAMSKQSIDFFEDIRIHVSQLMTLMEQNQMERSSKLVKFENEFKETCVKDEQAALNKIAAILSELTAKKTTMVSSYMGQLNERYSEDQKNLKLEISNLQQVSDNGKNESVACVGVIESQFQEDMSSHTKSNDQMEGILKQYSEKGSHFVSYWSHIQSSLHDLVKSSIMETDDFIEESRNKNENIFQEGLLFSSQNDAEFHGITSDVLTVSKNSLLLDHETCKMVETNTTIFSDHLELLNEKHSEGVESTRNMMSDCLEKDYMANSPVRNHPRELLTSANSLESIDKLRASLPDLVAKFRLENKLNEMDKGKQYSDQRTRTPRSPLTPVNQ

SEQ ID NO: 157689 - protein, 578 aa, Zea Mays
MAQTPNPSRRSWVGPAPMPFLTPRPERRHLEMRWADGVSQSAARRSGVGAVARDGCERDQEVNVQVMLRCRPLSEEEQRVNAQSAISCNESKREVTVLHSLFKQADKTFTFDKVFGPQSQQRSIYNHAVAPLVTEVLEGYNCTVFVFGQTGTGKTYTMEGEMRQKVSELPDTAGVIPRAVCHIFEILTARKADYSMKVTFLELYNEDITDLLSLEDQSRFPEGRQKRPITLMEDGKGGAVIRGLEEIVVYSPSDIYSLLEHGSARRRTADTALNKQSSRSHAVFSINIQVKETTVGNEELIKYGRLNLVDLAGSENIARSGAREGRARETGEMNKSLLTLGRVINALVEHSVHVPYRDSKLTRLLRESLGGKAKTCIIATVSPSAHSLEETLVTLDYAARAKSIRNKPEANKKTCKTVVLKELYQEMERMKQDVKAAREKNGIYISHERFAQDETKRKTMKEKIEHLELSLEKQNKEVQKFKALYLAEQECHWDFESQNNDLKVNLESLKGKFIDLEEAHCRAHMSLREKDFIISNLLHSEHLIIERAKDMRNTLENATEDISVLLNKQVSRSDVFRS

SEQ ID NO: 157690 - protein, 1243 aa, Zea Mays
MAQTPNPSRRSWVGPAPMPFLTPRPERRHLEMRWADGVSQSAARRSGVGAVARDGCERDQEVNVQVMLRCRPLSEEEQRVNAQSAISCNESKREVTVLHSLFKQADKTFTFDKVFGPQSQQRSIYNHAVAPLVTEVLEGYNCTVFVFGQTGTGKTYTMEGEMRQKVSELPDTAGVIPRAVCHIFEILTARKADYSMKVTFLELYNEDITDLLSLEDQSRFPEGRQKRPITLMEDGKGGAVIRGLEEIVVYSPSDIYSLLEHGSARRRTADTALNKQSSRSHAVFSINIQVKETTVGNEELIKYGRLNLVDLAGSENIARSGAREGRARETGEMNKSLLTLGRVINALVEHSVHVPYRDSKLTRLLRESLGGKAKTCIIATVSPSAHSLEETLVTLDYAARAKSIRNKPEANKKTCKTVVLKELYQEMERMKQDVKAAREKNGIYISHERFAQDETKRKTMKEKIEHLELSLEKQNKVNLESLKGKFIDLEEAHCRAHMSLREKDFIISNLLHSEHLIIERAKDMRNTLENATEDISVLLNKQERQSKTEAENKRLLSGFRAELDRSLGVLHATVVGSVCEQSKILESINEQTKLYFLARNESENQLERRIARAKDMYVSGVQCMKELANTMRQQSIIDSEQMRQNISTNANAIGNFLEVMFSEAEQVLNDVLKSTSDLKELLAFSAELQNTGLRRNLASVQAMSKQSIDFFEDIRIHVSQLMTLMEQNQMERSSKLVKFENEFKETCVKDEQAALNKIAAILSELTAKKTTMVSSYMGQLNERYSEDQKNLKLEISNLQQVSDNGKNESVACVGVIESQFQEDMSSHTKSNDQMEGILKQYSEKGSHFVSYWSHIQSSLHDLVKSSIMETDDFIEESRNKNENIFQEGLLFSSQNDAEFHGITSDVLTVSKNSLLLDHETCKMVETNTTIFSDHLELLNEKHSEGVESTRNMMSDCLEKDYMANSPVRNHPRELLTSANSLESIDKLRASLPDLVAKFRLENKLNEMDKGKQYSDQRTRVHGKFKTIISAIERRVLEEQLGWARLERQKILALSAEADDAIWHLATLARRRMQERDEARNQARMLLADLQARNARMKAAVPGASCSRVARPDAFAATGYEHIQAQAQAQAQALAPAAFGPRGQRARAGTGYYCVASSSGFGHRSIDSSLDTCAVQPSLLGFASSSSSQEHFDPDMFLVDVAESPQDVVPVPATADSSQGRSSGSGSGTYGHSLASKRPCSERK

SEQ ID NO: 157691 - protein, 51 aa, Zea Mays
MAPGDDSNPAASYIHTCGRSWRRRTRSSSTSTRSGYRRSEAQAPPSAVALN

SEQ ID NO: 157692 - protein, 150 aa, Zea Mays
MAVNWELRGCCDHDQRIFIAAVGVSTVVILLLWRTFLLTPFKLITVFLHETSHALACKLTCGDVEGMQVHANEGGVTQTRGGIYWIILPAGYLGSSFWGMVFILASTNLLTTRIAAGCFILALFIVLFVAENWFLRWLCLGMHQHDLVSI

SEQ ID NO: 157693 - protein, 150 aa, Zea Mays
MGCYMGIHLVYLSLRFNIPWTGHIVLRVRHFDLTIDSGWLFRSFVARGFGSSLQGSGGCTVYMCRVNMYIHYKLIWWGLFMGFFDFSGSIEYHFTYHYQLHLWSVASSIYVPVYHILLIYPFQNVFRDAILCILIWRRFAITIDGLMCYQ

SEQ ID NO: 157694 - protein, 320 aa, Zea Mays
MAVKGTSPEVVQALVNADPAIVMLPDRNGNLALHVATRKKRSEIVNVLLLLPDMNVNALTRDRKTAFDIAEGLPLSEESQEIKECLSRAGAVRANDLNQPRDELRKTVTEIKKDVHTQLEQARKTNKNVYGIAKELRKLHREGINNATNSVTVVAVLFATVAFAAIFTVPGGNANDGVAVAVHATAFKVFFIFNAVALFTSLAVVVVQITLVRGETKAERRVVEIINKLMWLASVCTTVAFISSSYIVVGRHFRWAALLVTLIGGVIMAGVLGTMTYYVVKSKRTRKIRKKVKSTRRSGSSSWQHNSEFSDSEIDRIYAI

SEQ ID NO: 157695 - protein, 836 aa, Zea Mays
MGAAALDFEYKRDAYGFAVRPQHLQRFREYAKIYKEEEEERAHRWRDFLDRLADAANVPTTPSVSPYASTGDPASGAGQAQENSGIGIHCDDEEEGSENAEHNNNLESPKESDASAESREANGKSEDLKDVTNLDKLQEKTGSSSSTEAIKALEGLMETNGDFEELKDLNGSSEELEEENNGNMEKLVELFLDKGLLDELKPIKVESQRRVRAALSIIDKMMSSRVVKGGNGANGIHGNDGAQLTSIEEEGRTAEASDDGDPAEVESCVAEKVELGQETTHDSTGTALDGGNDGSYFPWREELESLVRGGVPMALRGEIWQAFVGVGARRIPGYYNKLLDDRTETLDEKDLVDPVVNEQGSAPRKVTQPEKWKGQIEKDLPRTFPGHPALDEDGRNALRRLLTAYARHNPSVGYCQAMNFFAGLFLLFMPEENAFWALVGVIDDYFDGYYTEEMIESQVDQLVLEEVVRERFPKLAKHMEFLGVQVGWITGPWFLSIFINMLPWESVLRIWDVILFEGNRIMLFRTTLALLDLYGPALVTTKDAGDAITLLQSLAGSTFDSSQLVLTACMGFQSVREMGLQELRKKYRPEILTAMEERSKDRGSWKDKKGLATKLYSFKHDPSYVCSPVKSKEGLDGSKVNGETGPANLETYLSTSSILDNDLDQGVDLQDQVSWLKVELCKLLEEKRSADLRSEELETALMEMVEHDNRRMLSAKVEKLETEAYELRKAFSDKQEQEQVMLQILLRMEQEQKVAEDARIAAERDAAEQKHAAHLLQEKYEAAMTALSQMEKRAVMAETMLEATKQYQFTSCRPCSCEDKSRTKPNCTYQENRPAF

SEQ ID NO: 157696 - protein, 522 aa, Zea Mays
MGAAALDFEYKRDAYGFAVRPQHLQRFREYAKIYKEEEEERAHRWRDFLDRLADAANVPTTPSVSPYASTGDPASGAGQAQENSGIGIHCDDEEEGSENAEHNNNLESPKESDASAESREANGKSEDLKDVTNLDKLQEKTGSSSSTEAIKALEGLMETNGDFEELKDLNGSSEELEEENNGNMEKLVELFLDKGLLDELKPIKVESQRRVRAALSIIDKMMSSRVVKGGNGANGIHGNDGAQLTSIEEEGRTAEASDDGDPAEVESCVAEKVELGQETTHDSTGTALDGGNDGSYFPWREELESLVRGGVPMALRGEIWQAFVGVGARRIPGYYNKLLDDRTETLDEKDLVDPVVNEQGSAPRKVTQPEKWKGQIEKDLPRTFPGHPALDEDGRNALRRLLTAYARHNPSVGYCQAMNFFAGLFLLFMPEENAFWALVGVIDDYFDGYYTEEMIESQVDQLVLEEVVRERFPKLAKHMEFLGVQVGWITGPWFLSIFINMLPWESGQYFAFGMSSFLKEIA

SEQ ID NO: 157697 - protein, 865 aa, Zea Mays
MDAESPRDAYGFAVRPQHLQRFREYAKIYKEEEEERAHRWRDFLDRLADAANVPTTPSVSPYASTGDPASGAGQAQENSGIGIHCDDEEEGSENAEHNNNLESPKESDASAESREANGKSEDLKDVTNLDKLQEKTGSSSSTEAIKALEGLMETNGDFEELKDLNGSSEELEEENNGNMEKLVELFLDKGLLDELKPIKVESQRRVRAALSIIDKMMSSRVVKGGNGANGIHGNDGAQLTSIEEEGRTAEASDDGDPAEVESCVAEKVELGQETTHDSTGTALDGGNDGSYFPWREELESLVRGGVPMALRGEIWQAFVGVGARRIPGYYNKLLDDRTETLDEKDLVDPVVNEQGSAPRKVTQPEKWKGQIEKDLPRTFPGHPALDEDGRNALRRLLTAYARHNPSVGYCQAMNFFAGLFLLFMPEENAFWALVGVIDDYFDGYYTEEMIESQVDQLVLEEVVRERFPKLAKHMEFLGVQVGWITGPWFLSIFINMLPWESVLRIWDVILFEGNRIMLFRTTLALLDLYGPALVTTKDAGDAITLLQSLAGSTFDSSQLVLTACMGFQSVREMGLQELRKKYRPEILTAMEERSKDRGSWKDKKGLATKLYSFKHDPSYVCSPVKSKEGLDGSKVNGETGPANLETYLSTSSILDNDLDQGVDLQDQVSWLKVELCKLLEEKRSADLRSEELETALMEMVEHDNRRMLSAKVEKLETEAYELRKAFSDKQEQEQVMLQILLRMEQEQKVAEDARIAAERDAAEQKHAAHLLQEKYEAAMTALSQMEKRAVMAETMLEATKQYQVGQVKANQSFTSSSPRADHVPAKINQEPNQTAPIRRIGLLSRGLGWLDKGKGRQNSNETSGA

SEQ ID NO: 157698 - protein, 513 aa, Zea Mays
MDAESPRDAYGFAVRPQHLQRFREYAKIYKEEEEERAHRWRDFLDRLADAANVPTTPSVSPYASTGDPASGAGQAQENSGIGIHCDDEEEGSENAEHNNNLESPKESDASAESREANGKSEDLKDVTNLDKLQEKTGSSSSTEAIKALEGLMETNGDFEELKDLNGSSEELEEENNGNMEKLVELFLDKGLLDELKPIKVESQRRVRAALSIIDKMMSSRVVKGGNGANGIHGNDGAQLTSIEEEGRTAEASDDGDPAEVESCVAEKVELGQETTHDSTGTALDGGNDGSYFPWREELESLVRGGVPMALRGEIWQAFVGVGARRIPGYYNKLLDDRTETLDEKDLVDPVVNEQGSAPRKVTQPEKWKGQIEKDLPRTFPGHPALDEDGRNALRRLLTAYARHNPSVGYCQAMNFFAGLFLLFMPEENAFWALVGVIDDYFDGYYTEEMIESQVDQLVLEEVVRERFPKLAKHMEFLGVQVGWITGPWFLSIFINMLPWESGQVLYSVLVLSL

SEQ ID NO: 157699 - protein, 315 aa, Zea Mays
MLFRTTLALLDLYGPALVTTKDAGDAITLLQSLAGSTFDSSQLVLTACMGFQSVREMGLQELRKKYRPEILTAMEERSKDRGSWKDKKGLATKLYSFKHDPSYVCSPVKSKEGLDGSKVNGETGPANLETYLSTSSILDNDLDQGVDLQDQVSWLKVELCKLLEEKRSADLRSEELETALMEMVEHDNRRMLSAKVEKLETEAYELRKAFSDKQEQEQVMLQILLRMEQEQKVAEDARIAAERDAAEQKHAAHLLQEKYEAAMTALSQMEKRAVMAETMLEATKQYQFTSCRPCSCEDKSRTKPNCTYQENRPAF

SEQ ID NO: 157700 - protein, 385 aa, Zea Mays
MDNWTMVSFNFHQYASMGKWSVLRIWDVILFEGNRIMLFRTTLALLDLYGPALVTTKDAGDAITLLQSLAGSTFDSSQLVLTACMGFQSVREMGLQELRKKYRPEILTAMEERSKDRGSWKDKKGLATKLYSFKHDPSYVCSPVKSKEGLDGSKVNGETGPANLETYLSTSSILDNDLDQGVDLQDQVSWLKVELCKLLEEKRSADLRSEELETALMEMVEHDNRRMLSAKVEKLETEAYELRKAFSDKQEQEQVMLQILLRMEQEQKVAEDARIAAERDAAEQKHAAHLLQEKYEAAMTALSQMEKRAVMAETMLEATKQYQVGQVKANQSFTSSSPRADHVPAKINQEPNQTAPIRRIGLLSRGLGWLDKGKGRQNSNETSGA

SEQ ID NO: 157701 - protein, 849 aa, Zea Mays
MDAESPRDAYGFAVRPQHLQRFREYAKIYKEEEEERAHRWRDFLDRLADAANVPTTPSVSPYASTGDPASGAGQAQENSGIGIHCDDEEEGSENAEHNNNLESPKESDASAESREANGKSEDLKDVTNLDKLQEKTGSSSSTEAIKALEGLMETNGDFEELKDLNGSSEELEEENNGNMEKLVELFLDKGLLDELKPIKVESQRRVRAALSIIDKMMSSRVVKGGNGANGIHGNDGAQLTSIEEEGRTAEASDDGDPAEVESCVAEKVELGQETTHDSTGTALDGGNDGSYFPWREELESLVRGGVPMALRGEIWQAFVGVGARRIPGYYNKLLDDRTETLDEKDLVDPVVNEQGSAPRKVTQPEKWKGQIEKDLPRTFPGHPALDEDGRNALRRLLTAYARHNPSVGYCQAMNFFAGLFLLFMPEENAFWALVGVIDDYFDGYYTEEMIESQVDQLVLEEVVRERFPKLAKHMEFLGVQVGWITGPWFLSIFINMLPWESVLRIWDVILFEGNRIMLFRTTLALLDLYGPALVTTKDAGDAITLLQSLAGSTFDSSQLVLTACMGFQSVREMGLQELRKKYRPEILTAMEERSKDRGSWKDKKGLATKLYSFKHDPSYVCSPVKSKEGLDGSKVNGETGPANLETYLSTSSILDNDLDQGVDLQDQVSWLKVELCKLLEEKRSADLRSEELETALMEMVEHDNRRMLSAKVEKLETEAYELRKAFSDKQEQEQVMLQILLRMEQEQKVAEDARIAAERDAAEQKHAAHLLQEKYEAAMTALSQMEKRAVMAETMLEATKQYQVGQVKANQSFTSRLTSTFQASRSLRLSPADFLSHSLSNSSLQTVHL

SEQ ID NO: 157702 - protein, 831 aa, Zea Mays
MDAESPRDAYGFAVRPQHLQRFREYAKIYKEEEEERAHRWRDFLDRLADAANVPTTPSVSPYASTGDPASGAGQAQENSGIGIHCDDEEEGSENAEHNNNLESPKESDASAESREANGKSEDLKDVTNLDKLQEKTGSSSSTEAIKALEGLMETNGDFEELKDLNGSSEELEEENNGNMEKLVELFLDKGLLDELKPIKVESQRRVRAALSIIDKMMSSRVVKGGNGANGIHGNDGAQLTSIEEEGRTAEASDDGDPAEVESCVAEKVELGQETTHDSTGTALDGGNDGSYFPWREELESLVRGGVPMALRGEIWQAFVGVGARRIPGYYNKLLDDRTETLDEKDLVDPVVNEQGSAPRKVTQPEKWKGQIEKDLPRTFPGHPALDEDGRNALRRLLTAYARHNPSVGYCQAMNFFAGLFLLFMPEENAFWALVGVIDDYFDGYYTEEMIESQVDQLVLEEVVRERFPKLAKHMEFLGVQVGWITGPWFLSIFINMLPWESVLRIWDVILFEGNRIMLFRTTLALLDLYGPALVTTKDAGDAITLLQSLAGSTFDSSQLVLTACMGFQSVREMGLQELRKKYRPEILTAMEERSKDRGSWKDKKGLATKLYSFKHDPSYVCSPVKSKEGLDGSKVNGETGPANLETYLSTSSILDNDLDQGVDLQDQVSWLKVELCKLLEEKRSADLRSEELETALMEMVEHDNRRMLSAKVEKLETEAYELRKAFSDKQEQEQVMLQILLRMEQEQKVAEDARIAAERDAAEQKHAAHLLQEKYEAAMTALSQMEKRAVMAETMLEATKQYQFTSCRPCSCEDKSRTKPNCTYQENRPAF

SEQ ID NO: 157703 - protein, 350 aa, Zea Mays
MLFRTTLALLDLYGPALVTTKDAGDAITLLQSLAGSTFDSSQLVLTACMGFQSVREMGLQELRKKYRPEILTAMEERSKDRGSWKDKKGLATKLYSFKHDPSYVCSPVKSKEGLDGSKVNGETGPANLETYLSTSSILDNDLDQGVDLQDQVSWLKVELCKLLEEKRSADLRSEELETALMEMVEHDNRRMLSAKVEKLETEAYELRKAFSDKQEQEQVMLQILLRMEQEQKVAEDARIAAERDAAEQKHAAHLLQEKYEAAMTALSQMEKRAVMAETMLEATKQYQVGQVKANQSFTSSSPRADHVPAKINQEPNQTAPIRRIGLLSRGLGWLDKGKQGRQNSNETSGA

SEQ ID NO: 157704 - protein, 175 aa, Zea Mays
MGSEELETALMEMVEHDNRRMLSAKVEKLETEAYELRKAFSDKQEQEQILLRMEQEQKVAEDARIAAERDAAEQKHAAHLLQEKYEAAMTALSQMEKRAVMAETMLEATKQYQVGQVKANQSFTSSSPRADHVPAKINQEPNQTAPIRRIGLLSRGLGWLDKGKGRQNSNETSGA

SEQ ID NO: 157705 - protein, 242 aa, Zea Mays
MAARAPLIMPRAASSAGPVPAAATTVARRQSAQCLHARGAVGGLFFDQRTARPVHHLLPGAKFGAIGSTAEAAPSEGLAQKLQGVDVFDLSGKTVPIVDLWKERKAVVAFARHFGCVLCRKRADLLAAKQDDMQAAGVALVLIGPEVYADPTHSSYDALEFAFGLFSTFTPAAGLKIIQLYREGYRQDWELSFEKNTRTKGGWYQGGLIVAGPGIDNILYIHKDKEAGDDPDMQDVLRACCS

SEQ ID NO: 157706 - protein, 102 aa, Zea Mays
MGLSDQDIVALSGGHTLGRCHKERSGFEGAWTTNPLVFDNSYFKELLSGDKEGLLQLPSDKALLSDPVFRPLVEKYAADEKAFFDDYKEAHLKLSELGFADA

SEQ ID NO: 157707 - protein, 339 aa, Zea Mays
MAPTACLRTPFFPARARSTNATPFSPHRRFSLKCSASNGDNSNPNSISISPTSPPRLTVSDGVESVDVNGLRRPPAPASVPAARDPHWLPRPLTSADVMEVDGKGLKVAYQGCAGAYSEAAAKKAYPNCETVPCEHFDTAFQAVQNWVADRAVLPLENSLGGSIHRNYDLLLRHSLHIVGEVRLAVRHCLLANPGVKIENLKSAMSHPQALAQCEHTLTSLGIEHREAVDDTAGAAKIVAEHMLQDTGAIASSLAAKLYGLDVLAENIQDDKDNVTRFMMLAREPIIPRTDKPFKTSIVFSLEEGPGQLFKALAVFALRDINLTKIESRPHKERPLREL

SEQ ID NO: 157708 - protein, 255 aa, Zea Mays
MAPTACLRTPFFPARARSTNATPFSPHRRFSLKCSASNGDNSNPNSISISPTSPPRLTVSDGVESVDVNGLRRPPAPASVPAARDPHWLPRPLTSADVMEVDGKGLKVAYQGCAGAYSEAAAKKAYPNCETVPCEHFDTAFQAVQNWVADRAVLPLENSLGGSIHRNYDLLLRHSLHIVGEVRLAVRHCLLANPGVKIENLKSAMSHPQALAQCEHTLTSLGIEHREAVDDTAGAAKHSFLDCCRTYAPGHWCYC

SEQ ID NO: 157709 - protein, 88 aa, Zea Mays
MFPCLGDWAGVPQKSYLLSLRAPCTYIWRWSRWPSIAKLSFCRRKSFGASYFFLLMERILVLLDCLDQCQVKFGSSSFEQVSRFGSGS

SEQ ID NO: 157710 - protein, 437 aa, Zea Mays
MSQYGKLHGHEGCVNTVSFNPAGDLLVSGSDDTNIILWDWLSKTKKLVYPSGHQDNVFHARVMPFTDDSTIVTVAADGQVRVGRLKEGGEVTTKLVGEHDSRVHKMAIEPGNPYIFYSCGEDGLVQHFDLRSDSATKLFTCCSFLNDRRRVKLNSIVIDPQNPYYFSIGGSDEYARLYDMRKFQLDGSRNTNQPVDTFCPKHLIKGASARVHITSIAYSYAREILVSYNDELIYLFQHNIGLGPNPVSAEPEFFNMLDQPQAYRGHRNFRTVKGVSFFGQHDEYVVSGSDCGNVFIWRKKGGELIRMMNGDKSVVNCIEPHPHFPFMATSGIDNTVKLWTPAAKKLIMPLPKNAKQIIAANELERTVHISQATATLSSDVMMHVLRLLRRRDSEMNIENEPASADLASDDDEAFDFGFDDAERNERENSDPRECNMT

SEQ ID NO: 157711 - protein, 401 aa, Zea Mays
MAAAAIEAAGRRKGSCFLEVGRREIGSSFPRVSSRRISGSEHIVSSMSQYGKLHGHEGCVNTVSFNPAGDLLVSGSDDTNIILWDWLSKTKKLVYPSGHQDNVFHARVMPFTDDSTIVTVAADGQNPYYFSIGGSDEYARLYDMRKFQLDGSRNTNQPVDTFCPKHLIKGASARVHITSIAYSYAREILVSYNDELIYLFQHNIGLGPNPVSAEPEFFNMLDQPQAYRGHRNFRTVKGVSFFGQHDEYVVSGSDCGNVFIWRKKGGELIRMMNGDKSVVNCIEPHPHFPFMATSGIDNTVKLWTPAAKKLIMPLPKNAKQIIAANELERTVHISQATATLSSDVMMHVLRLLRRRDSEMNIENEPASADLASDDDEAFDFGFDDAERNERENSDPRECNMT

SEQ ID NO: 157712 - protein, 355 aa, Zea Mays
MSQYGKLHGHEGCVNTVSFNPAGDLLVSGSDDTNIILWDWLSKTKKLVYPSGHQDNVFHARVMPFTDDSTIVTVAADGQNPYYFSIGGSDEYARLYDMRKFQLDGSRNTNQPVDTFCPKHLIKGASARVHITSIAYSYAREILVSYNDELIYLFQHNIGLGPNPVSAEPEFFNMLDQPQAYRGHRNFRTVKGVSFFGQHDEYVVSGSDCGNVFIWRKKGGELIRMMNGDKSVVNCIEPHPHFPFMATSGIDNTVKLWTPAAKKLIMPLPKNAKQIIAANELERTVHISQATATLSSDVMMHVLRLLRRRDSEMNIENEPASADLASDDDEAFDFGFDDAERNERENSDPRECNMT

SEQ ID NO: 157713 - protein, 117 aa, Zea Mays
MGSSTDHAAGARGKKQGSQLWKKALLHSSLCFVMGFFTGFAPSSVSDWTSAAAAAGGRVGSSHVVRALPAGGERHHQRNVALGHIEHHRLAGVVLFAGLGDVFDLRFFDELRGIRTP

SEQ ID NO: 157714 - protein, 121 aa, Zea Mays
MRRGERKVVVRGPACSSAAVTGWFSQDLGGSGTAAASASTARPGELDVHGFAFNSSVLWDPERWGRYPTSEPDKSQDSMKFVQQVVLEDFSKVKGIPSDCSEVMVWHVDTAAPSLQNKKRR

SEQ ID NO: 157715 - protein, 259 aa, Zea Mays
MEEYAALLANHTWDLVQRPPGTNVVTGKWLFRHKLTSDGSLNRYKARWVLRGLHPSAPKWITTRPSAPVVKFATVRAVLSLALSRDWAIHQLDVKNAFLHGTLTETVYCNQPTGFVDADRPDLVCRLNRSLYGLKQAPRAWYSRFASYLASIGFVEAKSDTSLLIYRRGNDTVYLLLYVDDIVLTASTADLLHRTIVALQREFAMKDLGPLHHFLGITAERRPQGLFLHQRQYAIDILKRAGMSDCKPCSTPVDTQAKL

SEQ ID NO: 157716 - protein, 288 aa, Zea Mays
MLYLANALNIPEKFWVVGYSGGGMHAWSALHYIPDRIAGAAMFAPMANPYDSKMTKDERSKTWDSWSTKRKLMHILARRFPSLLPFFYRQTFLSGKQGQLESWLSLSLGKKDKTLLEGPVFNAFWERNVAEAVRQGDARPFVEEAVLQVSDWGFSLSDIQMQKKEAGGFFELIKSLFNQAEREWVGFLGPIHIWQGMDDRVVSPAVAEFVRRVVPGATVHKLLDEGHFSYFCFCDECHRQIFSTLFGIPQGPINPAPPQPGEVVSELTEETTVPDNATDEEQGKSGLP

SEQ ID NO: 157717 - protein, 499 aa, Zea Mays
MTAAATMTWHEDLATLVGDTDVHLTGAGGHAPAPADVTPAGAGWYGEEEEVRAEEGWAQQAKGFAESTAEMLRELGRGLWDVAAQSLAGAEDSELGRRLRKRAAATGERLSFMNEYLPEERDPVRCWLIVAAVSFVTLLVLGAGNGNETPVELPKKLTICPPSADRIQLPDGRHLAYEEQGVSANRARFSLIAPHSFLSSRLTGIPGISASLLEEFGVRLVTYDLPGFGESDPHIGRNLNSSALDMLYLANALNIPEKFWVVGYSGGGMHAWSALHYIPDRIAGAAMFAPMANPYDSKMTKDERSKTWDSWSTKRKLMHILARRFPSLLPFFYRQTFLSGKQGQLESWLSLSLGKKDKTLLEGPVFNAFWERNVAEAVRQGDARPFVEEAVLQVSDWGFSLSDIQMQKKEAGGFFELIKSLFNQAEREWVGFLGPIHIWQGMDDRVVSPAVAEFVRRVVPGATVHKLLDEGPYQPCTAAARRGGFRAHRGNNSARQCHR

SEQ ID NO: 157718 - protein, 254 aa, Zea Mays
MLYLANALNIPEKFWVVGYSGGGMHAWSALHYIPDRIAGAAMFAPMANPYDSKMTKDERSKTWDSWSTKRKLMHILARRFPSLLPFFYRQTFLSGKQGQLESWLSLSLGKKDKTLLEGPVFNAFWERNVAEAVRQGDARPFVEEAVLQVSDWGFSLSDIQMQKKEAGGFFELIKSLFNQAEREWVGFLGPIHIWQGMDDRVVSPAVAEFVRRVVPGATVHKLLDEGPYQPCTAAARRGGFRAHRGNNSARQCHR

SEQ ID NO: 157719 - protein, 229 aa, Zea Mays
MAAAAAETQMGDGAPPPGALYSFGTPWPELNQGLTYTDTFRCADADAATTLIEFYSTNHKSSAPLPGWIKRIRNGQITVDGEVVTDPDMTLEPFAPYLLEVLYEDDDMVALNKPSGLQVLPKGLFQQRTVLAQLQLKDWKMASSCRFKRKDVQSHPVPVHRLGRGTSGLLLCAKTKVAKVRLASYFAEGAINAAKKRDKSEFSEERKISKFYRALVTGILDDDEVLSLI

SEQ ID NO: 157720 - protein, 199 aa, Zea Mays
MAAAAAETQMGDGAPPPGALYSFGTPWPELNQGLTYTDTFRCADADAATTLIEFYSTNHKSSAPLPGWIKRIRNGQITVDGEVVTDPDMTLEPFAPYLLEVLYEDDDMVALNKPSGLQVLPKGLFQQRTVLAQLQLKDWKMASSCRFKRKDVQSHPVPVHRLGRGTSGLLLCAKTKVAKVRLASYFAEGAINAAKKRVQ

SEQ ID NO: 157721 - protein, 285 aa, Zea Mays
MVALNKPSGLQVLPKGLFQQRTVLAQLQLKDWKMASSCRFKRKDVQSHPVPVHRLGRGTSGLLLCAKTKVAKVRLASYFAEGAINAAKKRDKSEFSEERKISKFYRALVTGILDDDEVVVTQPIGLVHYPGVAEGLYAACSSGKPAMSKVCVLERLAHQNHTLVQVEIHSGRPHQIRIHLAYIGHPLVDDPLYGIGGHPNFVEPESTGTDSSFASDGGYERPLQPVPGDCGYHLHAHWLVLCHPTTNKVIKHIYNLGQMVKITAPLPQILQTREERRAAAEQTGG

SEQ ID NO: 157722 - protein, 396 aa, Zea Mays
MAAAAAETQMGDGAPPPGALYSFGTPWPELNQGLTYTDTFRCADADAATTLIEFYSTNHKSSAPLPGWIKRIRNGQITVDGEVVTDPDMTLVDGSKLVYHRFPWQEPFAPYLLEVLYEDDDMVALNKPSGLQVLPKGLFQQRTVLAQLQLKDWKMASSCRFKRKDVQSHPVPVHRLGRGTSGLLLCAKTKVAKVRLASYFAEGAINAAKKRDKSEFSEERKISKFYRALVTGILDDDEVVVTQPIGLVHYPGVAEGLYAACSSGKPAMSKVCVLERLAHQNHTLVQVEIHSGRPHQIRIHLAYIGHPLVDDPLYGIGGHPNFVEPESTGTDSSFASDGGYERPLQPVPGDCGYHLHAHWLVLCHPTTNKMVKITAPLPQILQTREERRAAAEQTGG

SEQ ID NO: 157723 - protein, 333 aa, Zea Mays
MCLTGCVSLPCFNVLLSGEGSLKENRASEQVGAPSDQKGSGEPKRKVIKHSKLEKDKELFQLAQQYHKVVAERDQAIAVKDRLESLCREFQRQNKMLKEECQRVSTEGQNMRTELSEKFDHAIKGVSAKLEEQRVERISQLEENNTLRSKLKDLADQYNITQQKYAHQLKEKMLELELADLRLQQHQEKAAQEHTQMQLYAEQVSQLMTTEKNLRLQLASDGERFQHFQDALSKSNEVFETYKQEMEKMISVIKNLKKENEFLKGKCENSDIAIVKLIEERELTKKQIEKLKNQREKLESLCRTLQAERKQGPSASIPDAPSSQEVSATSQES

SEQ ID NO: 157724 - protein, 60 aa, Zea Mays
MCKSVYYDYLPRLYFRIIVVVSFLLMHFGRDNCSIFRYHVRYLIIINQRDVSFLFICYKL

SEQ ID NO: 157725 - protein, 238 aa, Zea Mays
MPPPQPPSTTQGLQRESRARRRPCIVATHSVPPFHHRSIAVSSHSFLRWHSFPSSIPPAPAPASLIRSFLLAVPPPPYSTTSSSAPNVDASSAMPSDRPSSPNISLPHMPAAAASHPARTPPPCTRAWMPLHAYYGRGTPTIEAPIHDPIPNPASNLPQSAVNLPPNIFPLYIVVSAIKDLTEARPPNHYHSPPIHWSRETLEALRRSSLICSLLQRGLQMIMQQILIHAFLYCVEAI

SEQ ID NO: 157726 - protein, 833 aa, Zea Mays
MPEELIRGNIRPMCPHQALQVSHASYGLCVDALIESSYWEGVIADHAEGSMERKVLFPDEGDECIIEVDQLRLTQDWDEATGEWKPRGIWSFLQILLSHEERDGLPVSIRQIWFDLRSKPSFKTDAKMWMCGTEDFWERSLADVIAELWSLCDKPTLDGYQVEAVQKDTVETTVLDRLDPFQALSEYISCYRNNRKNALIKKEWAKQHLKSSGWTFLDDRPKNKFYISPDGKRFPSFLGACQACLAAKEANGYQYDHTENLHLDSMSLVHKNACYNQTHMDLALVKNKSNDKWITSPSRSWELVQLDAEFSPQIVSLLASYQDGTTVLQRTIDRTLSVKLKKHLLALGWSIKFKKDEIQENGHHKHTTRYRYESPYGKTYVSIIQVICSLIVGGVKQDDRPSYRTAAKGAHLTVSTGLARLNKRKRRDKTDALEKYIDYMKTDKQNSRRRKLLRSNAQKFLKSAGWNFWLKKKSRNKLELRYGAPHGKSYSSLVAACKGYLENGYQEDSDADIKIANHGSADGSMRPSKLIALSGGLKDSSKIQGMPVVDRCSNMFTLSAHHGKCRKRKPSSVSLNSARVLCSHGQIFPCRHHVKTVLSLLVEKNIVVPRDKVTYKRSDGPGIKEGSISRDGIKCMCCNELFTVENFEVHAGSSTPLPSAHMFLKDGRSLSQCLVEFMGGNKPRDPLHVRLKGSSSDLESDSICSVCHDGGDLLLCDNCPSSYHYDCVGLEVEAIPEGSWYCPSCRCGICNLSDYDPDISQFTEKTIVYCDQCEREYHVGCTRNSDHQLICRPEGCWFCSRGCSNGISTFARSHWETSSNSNRRLILHYLEIL

SEQ ID NO: 157727 - protein, 303 aa, Zea Mays
MPPPQPPSTTQGLQRESRARRRPCIVATHSVPPFHHRSIAVSSHSFLRWHSFPSSIPPAPAPASLIRSFLLAVPPPPYSTTSSSAPNVDASSAMPSDRPSSPNISLPHMPAAAASHPARTPPPCTRAWMPLHAYYGRGTPTIEAPIHDPIPNPASNLPQSAVNLPPNIFPLYIVVSAIKDLTEARPPNHYHSPPIHWSRETLEALRRSSLICSLLQRVTEPFFFALPPTPWHLAELRIETALLPSPCSALKTCSASVAASSRPPLDARRQEDAARAVPLDPTPNALSPPSTTSSSCPSPTSLQ

SEQ ID NO: 157728 - protein, 229 aa, Zea Mays
MPPPQPPSTTQGLQRESRARRRPCIVATHSVPPFHHRSIAVSSHSFLRWHSFPSSIPPAPAPASLIRSFLLAVPPPPYSTTSSSAPNVDASSAMPSDRPSSPNISLPHMPAAAASHPARTPPPCTRAWMPLHAYYGRGTPTIEAPIHDPIPNPASNLPQSAVNLPPNIFPLYIVVSAIKDLTEARPPNHYHSPPIHWSRETLEALRRSSLICSLLQRGFFQQQWPHYFF

SEQ ID NO: 157729 - protein, 1244 aa, Zea Mays
MASGAARKRRRKSSPPAAAAAARDGRKLLVGEVVEVLSCDQGLRGSWHKAIVIGILENARAVRYTDFIDENGSPLVENVQVSDAIDGKSSMPEELIRGNIRPMCPHQALQVSHASYGLCVDALIESSYWEGVIADHAEGSMERKVLFPDEGDECIIEVDQLRLTQDWDEATGEWKPRGIWSFLQILLSHEERDGLPVSIRQIWFDLRSKPSFKTDAKMWMCGTEDFWERSLADVIAELWSLCDKPTLDGYQVEAVQKDTVETTVLDRLDPFQALSEYISCYRNNRKNALIKKEWAKQHLKSSGWTFLDDRPKNKFYISPDGKRFPSFLGACQACLAAKEANGYQYDHTENLHLDSMSLVHKNACYNQTHMDLALVKNKSNDKWITSPSRSWELVQLDAEFSPQIVSLLASYQDGTTVLQRTIDRTLSVKLKKHLLALGWSIKFKKDEIQENGHHKHTTRYRYESPYGKTYVSIIQVICSLIVGGVKQDDRPSYRTAAKGAHLTVSTGLARLNKRKRRDKTDALEKYIDYMKTDKQNSRRRKLLRSNAQKFLKSAGWNFWLKKKSRNKLELRYGAPHGKSYSSLVAACKGYLENGYQEDSDADIKIANHGSADGSMRPSKLIALSGGLKDSSKIQGMPVVDRCSNMFTLSAHHGKCRKRKPSSVSLNSARVLCSHGQIFPCRHHVKTVLSLLVEKNIVVPRDKVTYKRSDGPGIKEGSISRDGIKCMCCNELFTVENFEVHAGSSTPLPSAHMFLKDGRSLSQCLVEFMGGNKPRDPLHVRLKGSSSDLESDSICSVCHDGGDLLLCDNCPSSYHYDCVGLEVEAIPEGSWYCPSCRCGICNLSDYDPDISQFTEKTIVYCDQCEREYHVGCTRNSDHQLICRPEGCWFCSRGCSNVFQHLQEVIGKQVPTPIEGLSCTILKFCRANGSDHGDYDDEIMAEHYGKLCIAVDILHECFVTIIEPRTQSDISEDIVFNREICGQKFAELPLIGTRSLYRRQGMCRLLINELEKLLLDLGVERLLLPAVPELLQTWTCSFGFTVMSNSERLELAGNSILSFQGTTMCQKILNVAHNISQDRSIPSMSNSERMGLAENMVVKKAFIPLTVEPDHHVDLIVEPELVMKIENNSSEEGISSIDPLTSMPDPQVGLAVGPEMVPVSRENKDKEGICFIDAPTCPPDPQVDLTTGIHEQSFVSAGADQCNENCTLNITPNTASGLEYKFSGKCYERVKKGARPRNVWLRISTK

SEQ ID NO: 157730 - protein, 725 aa, Zea Mays
MASGAARKRRRKSSPPAAAAAARDGRKLLVGEVVEVSAIRAVVCDEVHRIAAKGDGPRVMGRVLSCDQGLRGSWHKAIVIGILENARAVRYTDFIDENGSPLVENVQVSDAIDGKSSMPEELIRGNIRPMCPHQALQVSHASYGLCVDALIESSYWEGVIADHAEGSMERKVLFPDEGDECIIEVDQLRLTQDWDEATGEWKPRGIWSFLQILLSHEERDGLPVSIRQIWFDLRSKPSFKTDAKMWMCGTEDFWERSLADVIAELWSLCDKPTLDGYQVEAVQKDTVETTVLDRLDPFQALSEYISCYRNNRKNALIKKEWAKQHLKSSGWTFLDDRPKNKFYISPDGKRFPSFLGACQACLAAKEANGYQYDHTENLHLDSMSLVHKNACYNQTHMDLALVKNKSNDKWITSPSRSWELVQLDAEFSPQIVSLLASYQDGTTVLQRTIDRTLSVKLKKHLLALGWSIKFKKDEIQENGHHKHTTRYRYESPYGKTYVSIIQVICSLIVGGVKQDDRPSYRTAAKGAHLTVSTGLARLNKRKRRDKTDALEKYIDYMKTDKQNSRRRKLLRSNAQKFLKSAGWNFWLKKKSRNKLELRYGAPHGKSYSSLVAACKGYLENGYQEDSDADIKIANHGSADGSMRPSKLIALSGGLKDSSKIQDLSLSASREDSFVFVGREKYCVISAQVLSIYTCFRKDISVAFCFCRPFQKEAGIVHPADAVFVT

SEQ ID NO: 157731 - protein, 1038 aa, Zea Mays
MASGAARKRRRKSSPPAAAAAARDGRKLLVGEVVEVSAIRAVVCDEVHRIAAKGDGPRVMGRVLSCDQGLRGSWHKAIVIGILENARAVRYTDFIDENGSPLVENVQVSDAIDGKSSMPEELIRGNIRPMCPHQALQVSHASYGLCVDALIESSYWEGVIADHAEGSMERKVLFPDEGDECIIEVDQLRLTQDWDEATGEWKPRGIWSFLQILLSHEERDGLPVSIRQIWFDLRSKPSFKTDAKMWMCGTEDFWERSLADVIAELWSLCDKPTLDGYQVEAVQKDTVETTVLDRLDPFQALSEYISCYRNNRKNALIKKEWAKQHLKSSGWTFLDDRPKNKFYISPDGKRFPSFLGACQACLAAKEANGYQYDHTENLHLDSMSLVHKNACYNQTHMDLALVKNKSNDKWITSPSRSWELVQLDAEFSPQIVSLLASYQDGTTVLQRTIDRTLSVKLKKHLLALGWSIKFKKDEIQENGHHKHTTRYRYESPYGKTYVSIIQVICSLIVGGVKQDDRPSYRTAAKGAHLTVSTGLARLNKRKRRDKTDALEKYIDYMKTDKQNSRRRKLLRSNAQKFLKSAGWNFWLKKKSRNKLELRYGAPHGKSYSSLVAACKGYLENGYQEDSDADIKIANHGSADGSMRPSKLIALSGGLKDSSKIQDLSLSASREDSFVFVGREKYCVISAQVLSIYTCFRKDISVAFCFCRPFQKEAGIVHPADAIMSVALEIVTISLSADQKVVGFAAGDAQIANGSDHGDYDDEIMAEHYGKLCIAVDILHECFVTIIEPRTQSDISEDIVFNREICGQKFAELPLIGTRSLYRRQGMCRLLINELEKLLLDLGVERLLLPAVPELLQTWTCSFGFTVMSNSERLELAGNSILSFQGTTMCQKILNVAHNISQDRSIPSMSNSERMGLAENMVVKKAFIPLTVEPDHHVDLIVEPELVMKIENNSSEEGISSIDPLTSMPDPQVGLAVGPEMVPVSRENKDKEGICFIDAPTCPPDPQVDLTTGIHEQSFVSLTQLQDWNTSSQENAMSG

SEQ ID NO: 157732 - protein, 1266 aa, Zea Mays
MASGAARKRRRKSSPPAAAAAARDGRKLLVGEVVEVSAIRAVVCDEVHRIAAKGDGPRVMGRVLSCDQGLRGSWHKAIVIGILENARAVRYTDFIDENGSPLVENVQVSDAIDGKSSMPEELIRGNIRPMCPHQALQVSHASYGLCVDALIESSYWEGVIADHAEGSMERKVLFPDEGDECIIEVDQLRLTQDWDEATGEWKPRGIWSFLQILLSHEERDGLPVSIRQIWFDLRSKPSFKTDAKMWMCGTEDFWERSLADVIAELWSLCDKPTLDGYQVEAVQKDTVETTVLDRLDPFQALSEYISCYRNNRKNALIKKEWAKQHLKSSGWTFLDDRPKNKFYISPDGKRFPSFLGACQACLAAKEANGYQYDHTENLHLDSMSLVHKNACYNQTHMDLALVKNKSNDKWITSPSRSWELVQLDAEFSPQIVSLLASYQDGTTVLQRTIDRTLSVKLKKHLLALGWSIKFKKDEIQENGHHKHTTRYRYESPYGKTYVSIIQVICSLIVGGVKQDDRPSYRTAAKGAHLTVSTGLARLNKRKRRDKTDALEKYIDYMKTDKQNSRRRKLLRSNAQKFLKSAGWNFWLKKKSRNKLELRYGAPHGKSYSSLVAACKGYLENGYQEDSDADIKIANHGSADGSMRPSKLIALSGGLKDSSKIQGMPVVDRCSNMFTLSAHHGKCRKRKPSSVSLNSARVLCSHGQIFPCRHHVKTVLSLLVEKNIVVPRDKVTYKRSDGPGIKEGSISRDGIKCMCCNELFTVENFEVHAGSSTPLPSAHMFLKDGRSLSQCLVEFMGGNKPRDPLHVRLKGSSSDLESDSICSVCHDGGDLLLCDNCPSSYHYDCVGLEAIPEGSWYCPSCRCGICNLSDYDPDISQFTEKTIVYCDQCEREYHVGCTRNSDHQLICRPEGCWFCSRGCSNVFQHLQEVIGKQVPTPIEGLSCTILKFCRANGSDHGDYDDEIMAEHYGKLCIAVDILHECFVTIIEPRTQSDISEDIVFNRESELRRLNFRGFYIILLQKGGELVSVGTFRICGQKFAELPLIGTRSLYRRQGMCRLLINELEKLLLDLGVERLLLPAVPELLQTWTCSFGFTVMSNSERLELAGNSILSFQGTTMCQKILNVAHNISQDRSIPSMSNSERMGLAENMVVKKAFIPLTVEPDHHVDLIVEPELVMKIENNSSEEGISSIDPLTSMPDPQVGLAVGPEMVPVSRENKDKEGICFIDAPTCPPDPQVDLTTGIHEQSFVSLTQLQDWNTSSQENAMSG

SEQ ID NO: 157733 - protein, 842 aa, Zea Mays
MASGAARKRRRKSSPPAAAAAARDGRKLLVGEVVEVLSCDQGLRGSWHKAIVIGILENARAVRYTDFIDENGSPLVENVQVSDAIDGKSSMPEELIRGNIRPMCPHQALQVSHASYGLCVDALIESSYWEGVIADHAEGSMERKVLFPDEGDECIIEVDQLRLTQDWDEATGEWKPRGIWSFLQILLSHEERDGLPVSIRQIWFDLRSKPSFKTDAKMWMCGTEDFWERSLADVIAELWSLCDKPTLDGYQVEAVQKDTVETTVLDRLDPFQALSEYISCYRNNRKNALIKKEWAKQHLKSSGWTFLDDRPKNKFYISPDGKRFPSFLGACQACLAAKEANGYQYDHTENLHLDSMSLVHKNACYNQTHMDLALVKNKSNDKWITSPSRSWELVQLDAEFSPQIVSLLASYQDGTTVLQRTIDRTLSVKLKKHLLALGWSIKFKKDEIQENGHHKHTTRYRYESPYGKTYVSIIQVICSLIVGGVKQDDRPSYRTAAKGAHLTVSTGLARLNKRKRRDKTDALEKYIDYMKTDKQNSRRRKLLRSNAQKFLKSAGWNFWLKKKSRNKLELRYGAPHGKSYSSLVAACKGYLENGYQEDSDADIKIANHGSADGSMRPSKLIALSGGLKDSSKIQGMPVVDRCSNMFTLSAHHGKCRKRKPSSVSLNSARVLCSHGQIFPCRHHVKTVLSLLVEKNIVVPRDKVTYKRSDGPGIKEGSISRDGIKCMCCNELFTVENFEVHAGSSTPLPSAHMFLKDGRSLSQCLVEFMGGNKPRDPLHVRLKGSSSDLESDSICSVCHDGGDLLLCDNCPSSYHYDCVGLEVEVPFQKEAGIVHPADAVFVT

SEQ ID NO: 157734 - protein, 747 aa, Zea Mays
MASGAARKRRRKSSPPAAAAAARDGRKLLVGEVVEVLSCDQGLRGSWHKAIVIGILENARAVRYTDFIDENGSPLVENVQVSDAIDGKSSMPEELIRGNIRPMCPHQALQVSHASYGLCVDALIESSYWEGVIADHAEGSMERKVLFPDEGDECIIEVDQLRLTQDWDEATGEWKPRGIWSFLQILLSHEERDGLPVSIRQIWFDLRSKPSFKTDAKMWMCGTEDFWERSLADVIAELWSLCDKPTLDGYQVEAVQKDTVETTVLDRLDPFQALSEYISCYRNNRKNALIKKEWAKQHLKSSGWTFLDDRPKNKFYISPDGKRFPSFLGACQACLAAKEANGYQYDHTENLHLDSMSLVHKNACYNQTHMDLALVKNKSNDKWITSPSRSWELVQLDAEFSPQIVSLLASYQDGTTVLQRTIDRTLSVKLKKHLLALGWSIKFKKDEIQENGHHKHTTRYRYESPYGKTYVSIIQVICSLIVGGVKQDDRPSYRTAAKGAHLTVSTGLARLNKRKRRDKTDALEKYIDYMKTDKQNSRRRKLLRSNAQKFLKSAGWNFWLKKKSRNKLELRYGAPHGKSYSSLVAACKGYLENGYQEDSDADIKIANHGSADGSMRPSKLIALSGGLKDSSKIQDLSLSASREDSFVFVGREKYCVISAQVLSIYTCFRKDISVAFCFCRPFQKEAGIVHPADAIMSVALEIVTISLSADQKVVGFAAGDAQMYFNICKKSLGNKFQLQSKAYLALS

SEQ ID NO: 157735 - protein, 388 aa, Zea Mays
MDSDAGGSSSAPPPPSAAIGAGAGAGAETKGDERGRKQVMVVLVGPPGSGKSTFADAVVGGSTAGRHWVRVCQDTIGNGKAGTKIQCLKAASDALKEGKSVLVDRCNLEREQRADFVKLGGTLRADVHAVSLDLPAKVCISRAVSRKGHEGNLQGGKAALVVNRMLQKKETPLLTEGFSRIMCCNDDGDIKKAVDLYNGLGPSDSLPSGVFGQKSKRPVQVGIMKFLKKTDASVVETSSGPKQALTEIKPAQQNPLPKQENVEAGFACSMEVEKGLNDKMENEEHAKGSDYCDVGSRTLAFPSISTADFQFDLDRASDIIVDTAANFLQKFDNIRLVLVDLSEKSRILSLVKQKAAKKSIDSNRFFTYVGDITQLHTKGGLQCSVIGG

SEQ ID NO: 157736 - protein, 450 aa, Zea Mays
MDSDAGGSSSAPPPPSAAIGAGAGAETKGDERGRKQVMVVLVGPPGSGKSTFADAVVGGSTAGRHWVRVCQDTIGNGKAGTKIQCLKAASDALKEGKSVLVDRCNLEREQRADFVKLGGTLRADVHAVSLDLPAKVCISRAVSRKGHEGNLQGGKAALVVNRMLQKKETPLLTEGFSRIMCCNDDGDIKKAVDLYNGLGPSDSLPSGVFGQKSKRPVQVGIMKFLKKTDASVVETSSGPKQALTEIKPAQQNPLPKQENVEAGFACSMEVEKGLNDKMENEEHAKGSDYCDVGSRTLAFPSISTADFQFDLDRASDIIVDTAANFLQKFDNIRLVLVDLSEKSRILSLVKQKAAKKSIDSNRFFTYVGDITQLHTKGGLQCSVIGNAANWRLKPGGGGVNTAIYSAAGESLQHATKKCADALRPGTSVVVPLPSTSPLHQREELHGKAEQ

SEQ ID NO: 157737 - protein, 716 aa, Zea Mays
MDSDAGGSSSAPPPPSAAIGAGAGAETKGDERGRKQVMVVLVGPPGSGKSTFADAVVGGSTAGRHWVRVCQDTIGNGKAGTKIQCLKAASDALKEGKSVLVDRCNLEREQRADFVKLGGTLRADVHAVSLDLPAKVCISRAVSRKGHEGNLQGGKAALVVNRMLQKKETPLLTEGFSRIMCCNDDGDIKKAVDLYNGLGPSDSLPSGVFGQKSKRPVQVGIMKFLKKTDASVVETSSGPKQALTEIKPAQQNPLPKQENVEAGFACSMEVEKGLNDKMENEEHAKGSDYCDVGSRTLAFPSISTADFQFDLDRASDIIVDTAANFLQKFDNIRLVLVDLSEKSRILSLVKQKAAKKSIDSNRFFTYVGDITQLHTKGGLQCSVIGNAANWRLKPGGGGVNTAIYSAAGESLQHATKKCADALRPGTSVVVPLPSTSPLHQREGVTHVIHVLGPNMNPMRPDCLKNDYTRGSKILREAYTSLFENFASIVQSYMGKQNNESGAEKSASGRISPNDTKMKREDNHESERMKKHKLFQPIMTAKRQHECTKAKRHVLVIARMDGLDSLADVKKEHLPLLRRMHSAGVKWAHKFLEEDAALEFRLGYHSVPSMRQLHLHIISQDFNSASLKNKKHWNSFTTSFFRDSVDVIEEIEQNGSTTTSSDEKVLAMELRCHRCRSAHPNIPKLKSHIAICKSPFPSHLLQKNRLLLSSTMHMDRT

SEQ ID NO: 157738 - protein, 390 aa, Zea Mays
MDSDAGGSSSAPPPPSAAIGAGAGAETKGDERGRKQVMVVLVGPPGSGKSTFADAVVGGSTAGRHWVRVCQDTIGNGKAGTKIQCLKAASDALKEGKSVLVDRCNLEREQRADFVKLGGTLRADVHAVSLDLPAKVCISRAVSRKGHEGNLQGGKAALVVNRMLQKKETPLLTEGFSRIMCCNDDGDIKKAVDLYNGLGPSDSLPSGVFGQKSKRPVQVGIMKFLKKTDASVVETSSGPKQALTEIKPAQQNPLPKQENVEAGFACSMEVEKGLNDKMENEEHAKGSDYCDVGSRTLAFPSISTADFQFDLDRASDIIVDTAANFLQKFDNIRLVLVDLSEKSRILSLVKQKAAKKSIDSNRFFTYVGDITQLHTKGGLQCSVIGNAANW

SEQ ID NO: 157739 - protein, 423 aa, Zea Mays
MMREGDARVTLLRSKLHGLVERNRDLEEENKQLRHQVSQLKGQISSLEGQETNKRMLWKKLENSATGISYSKEKQFVQSNDGAKEAVDLNSSLSHSRQQFSSVNQVRSRAPRVPNQPPNPTSTQPKATVRKEGCMAPPPPPPPLPSKLQRSTKAIQRVPEVVELYRSLVRREGKNNAKSGSVGIPAATNSREMIGEIENRSAYVLAIKSDVENQGNFVNFLASEVQNAAYKKIADVEEFVKWLDGELSYLVDERAVLKQFPNWPEKKADALREAAFNYRDLKNIESEASSFHDDRRVATPMALKRMQALQDKIEQGIHNTERVRDSASGRYKDLKIPWEWMLDSGVISQVCLPFTLKMASLKLAKEYMNRIVKTLKSDPFANEEELLLQGVRFAFRIHQLAGGFDEGCRKAFQELNTNASKSE

SEQ ID NO: 157740 - protein, 619 aa, Zea Mays
MGNALFKLNEGKEVLECKVQVETEMLSPIDLAASWRAHQEYFQPSRVRGTHDVTINPGLEGRAKNGFASGLELDLDKYVVPTPNMGSGVVYAASLTENPRSLLQTGSSSNNDTTKDILHNSTKGDSSLNHYVNTMKSTIGGHASSLEEQRAMFVDRGVGSPNFARPTMETFSMSNFKLDSESKGMPAAEGAVAAAAVADQMYGPKEDRKLAIVLVGLPARGKTFTAAKLTRYLRWLGHETKHFNVGKYRRLKHGTNQTADFFRGDNREGVEARNEVAALAMEDMLSWMQEGGQVGIFDATNSTRIRRNMLMKMAEGKCKIIFLETLCNDQDVLERNIRLKVQQSPDYAEQTDFEAGVQDFKERLTYYEKVYEPVEEGSYIKMIDMVSGKGGQLKINDISGYLPGRIVFFLVNCHLTPRPILLTRHGESMDNVRGRIGGDSSLSEAGELYSRKLASFVEKRLKSERTASIWTSTLQRTILTAHPIIGFPKIQWRALDEINAGVCDGMTYDEIKKSKPEEYESRRKDKLRYRYPRGESYLDVIQRLEPVIIELERQRAPVVVIAHQAVLRALYAYFADKPLEEVPNIEIPLHTIIEIQMGVAGVQEKRYKLMDAIHPTAGL

SEQ ID NO: 157741 - protein, 662 aa, Zea Mays
MASSGGISDQLFVSVKLESPHLAELDLAPHLFGSHPVAGSWDPCKALPLERAATAVWEFSCVVPSQHESLDFKFVLKRKGDNPQYIIEEGPNRPLGCQRNEFEMGNALFKLNEGKEPSRVRGTHDVTINPGLEGRAKNGFASGLELDLDNSSNNDTTKDILHNSTKGDSSLNHYVNTMKSTIGGHASSLEEQRAMFVDRGVGSPNFARPTMETFSMSNFKLDSESKGMPAAEGAVAAAAVADQMYGPKEDRKLAIVLVGLPARGKTFTAAKLTRYLRWLGHETKHFNVGKYRRLKHGTNQTADFFRGDNREGVEARNEVAALAMEDMLSWMQEGGQVGIFDATNSTRIRRNMLMKMAEGKCKIIFLETLCNDQDVLERNIRLKVQQSPDYAEQTDFEAGVQDFKERLTYYEKVYEPVEEGSYIKMIDMVSGKGGQLKINDISGYLPGRIVFFLVNCHLTPRPILLTRHGESMDNVRGRIGGDSSLSEAGELYSRKLASFVEKRLKSERTASIWTSTLQRTILTAHPIIGFPKIQWRALDEINAGVCDGMTYDEIKKSKPEEYESRRKDKLRYRYPRGESYLDVIQRLEPVIIELERQRAPVVVIAHQAVLRALYAYFADKPLEEVPNIEIPLHTIIEIQMGVAGVQEKRYKLMDAIHPTAGL

SEQ ID NO: 157742 - protein, 661 aa, Zea Mays
MASSGGISDQLFVSVKLESPHLAELDLAPHLFGSHPVAGSWDPCKALPLERAATAVWEFSCVVPSQHESLDFKFVLKRKGDNPQYIIEEGPNRPLGCQRNEFEMGNALFKLNEGKEVLECKVQVETEMLSPIDLAASWRAHQEYFQPSRVRGTHDVTINPGLEGRAKNGFASGLELDLDNSSNNDTTKDILHNSTKGDSSLNHYVNTMKSTIGGHASSLEEQRAMFVDRGVGSPNFARPTMETFSMSNFKLDSESKVGLPARGKTFTAAKLTRYLRWLGHETKHFNVGKYRRLKHGTNQTADFFRGDNREGVEARNEVAALAMEDMLSWMQEGGQVGIFDATNSTRIRRNMLMKMAEGKCKIIFLETLCNDQDVLERNIRLKVQQSPDYAEQTDFEAGVQDFKERLTYYEKVYEPVEEGSYIKMIDMVSGKGGQLKINDISGYLPGRIVFFLVNCHLTPRPILLTRHGESMDNVRGRIGGDSSLSEAGELYSRKLASFVEKRLKSERTASIWTSTLQRTILTAHPIIGFPKIQWRALDEINAGVCDGMTYDEIKKSKPEEYESRRKDKLRYRYPRGESYLDVIQRLEPVIIELERQRAPVVVIAHQAVLRALYAYFADKPLEEVPNIEIPLHTIIEIQMGVAGVQEKRYKLMDAIHPTAGL

SEQ ID NO: 157743 - protein, 428 aa, Zea Mays
MASSGGISDQLFVSVKLESPHLAELDLAPHLFGSHPVAGSWDPCKALPLERAATAVWEFSCVVPSQHESLDFKFVLKRKGDNPQYIIEEGPNRPLGCQRNEFEMGNALFKLNEGKEVLECKVQVETEMLSPIDLAASWRAHQEYFQPSRVRGTHDVTINPGLEGRAKNGFASGLELDLDKYVVPTPNMGSGVVYAASLTENPRSLLQTGSSSNNDTTKDILHNSTKGDSSLNHYVNTMKSTIGGHASSLEEQRAMFVDRGVGSPNFARPTMETFSMSNFKLDSESKGMPAAEGAVAAAAVADQMYGPKEDRKLAIVLVGLPARGKTFTAAKLTRYLRWLGHETKHFNVGKYRRLKHGTNQTADFFRGDNREGVEARNEVAALAMEDMLSWMQEGGQVGIFDATNSTRIRRNMLMKMAEGKYHLFGNIM

SEQ ID NO: 157744 - protein, 650 aa, Zea Mays
MASSGGISDQLFVSVKLESPHLAELDLAPHLFGSHPVAGSWDPCKALPLERAATAVWEFSCVVPSQHESLDFKFVLKRKGDNPQYIIEEGPNRPLGCQRNEFEMGNALFKLNEGKEVLECKVQVETEMLSPIDLAASWRAHQEYFQPSRVRGTHDVTINPGLEGRAKSTIGGHASSLEEQRAMFVDRGVGSPNFARPTMETFSMSNFKLDSESKGMPAAEGAVAAAAVADQMYGPKEDRKLAIVLVGLPARGKTFTAAKLTRYLRWLGHETKHFNVGKYRRLKHGTNQTADFFRGDNREGVEARNEVAALAMEDMLSWMQEGGQVGIFDATNSTRIRRNMLMKMAEGKCKIIFLETLCNDQDVLERNIRLKVQQSPDYAEQTDFEAGVQDFKERLTYYEKVYEPVEEGSYIKMIDMVSGKGGQLKINDISGYLPGRIVFFLVNCHLTPRPILLTRHGESMDNVRGRIGGDSSLSEAGELYSRKLASFVEKRLKSERTASIWTSTLQRTILTAHPIIGFPKIQWRALDEINAGVCDGMTYDEIKKSKPEEYESRRKDKLRYRYPRGESYLDVIQRLEPVIIELERQRAPVVVIAHQAVLRALYAYFADKPLEEVPNIEIPLHTIIEIQMGVAGVQEKRYKLMDAIHPTAGL

SEQ ID NO: 157745 - protein, 723 aa, Zea Mays
MASSGGISDQLFVSVKLESPHLAELDLAPHLFGSHPVAGSWDPCKALPLERAATAVWEFSCVVPSQHESLDFKFVLKRKGDNPQYIIEEGPNRPLGCQRNEFEMGNALFKLNEGKEVLECKVQVETEMLSPIDLAASWRAHQEYFQPSRVRGTHDVTINPGLEGRAKNGFASGLELDLDKYVVPTPNMGSGVVYAASLTENPRSLLQTGSSSNNDTTKDILHNSTKGDSSLNHYVNTMKSTIGGHASSLEEQRAMFVDRGVGSPNFARPTMETFSMSNFKLDSESKQGMPAAEGAVAAAAVADQMYGPKEDRKLAIVLVGLPARGKTFTAAKLTRYLRWLGHETKHFNVGKYRRLKHGTNQTADFFRGDNREGVEARNEVAALAMEDMLSWMQEGGQVGIFDATNSTRIRRNMLMKMAEGKCKIIFLETLCNDQDVLERNIRLKVQQSPDYAEQTDFEAGVQDFKERLTYYEKVYEPVEEGSYIKMIDMVSGKGGQLKINDISGYLPGRIVFFLVNCHLTPRPILLTRHGESMDNVRGRIGGDSSLSEAGELYSRKLASFVEKRLKSERTASIWTSTLQRTILTAHPIIGFPKIQWRALDEINAGVCDGMTYDEIKKSKPEEYESRRKDKLRYRYPRGESYLDVIQRLEPVIIELERQRAPVVVIAHQAVLRALYAYFADKPLEEVPNIEIPLHTIIEIQMGVAGVQEKRYKLMDAIHPTAGL

SEQ ID NO: 157746 - protein, 419 aa, Zea Mays
MYGPKEDRKLAIVLVGLPARGKTFTAAKLTRYLRWLGHETKHFNVGKYRRLKHGTNQTADFFRGDNREGVEARNEVAALAMEDMLSWMQEGGQVGIFDATNSTRIRRNMLMKMAEGKCKIIFLETLCNDQDVLERNIRLKVQQSPDYAEQTDFEAGVQDFKERLTYYEKVYEPVEEGSYIKMIDMVSGKGGQLKINDISGYLPGRIVFFLVNCHLTPRPILLTRHGESMDNVRGRIGGDSSLSEAGELYSRKLASFVEKRLKSERTASIWTSTLQRTILTAHPIIGFPKIQWRALDEINAGVCDGMTYDEIKKSKPEEYESRRKDKLRYRYPRGESYLDVIQRLEPVIIELERQRAPVVVIAHQAVLRALYAYFADKPLEEVPNIEIPLHTIIEIQMGVAGVQEKRYKLMDAIHPTAGL

SEQ ID NO: 157747 - protein, 729 aa, Zea Mays
MASSGGISDQLFVSVKLESPHLAELDLAPHLFGSHPVAGSWDPCKALPLERAATAVWEFSCVVPSQHESLDFKFVLKRKGDNPQYIIEEGPNRPLGCQRNEFEMGNALFKLNEGKEVLECKVQVETEMLSPIDLAASWRAHQEYFQPSRVRGTHDVTINPGLEGRAKNGFASGLELDLDKYVVPTPNMGSGVVYAASLTENPRSLLQTGSSSNNDTTKDILHNSTKGDSSLNHYVNTMKSTIGGHASSLEEQRAMFVDRGVGSPNFARPTMETFSMSNFKLDSESKGMPAAEGAVAAAAVADQMYGPKEDRKLAIVLVGLPARGKTFTAAKLTRYLRWLGHETKHFNVGKYRRLKHGTNQTADFFRGDNREGVEARNEIVTMLFQVAALAMEDMLSWMQEGGQVGIFDATNSTRIRRNMLMKMAEGKCKIIFLETLCNDQDVLERNIRLKVQQSPDYAEQTDFEAGVQDFKERLTYYEKVYEPVEEGSYIKMIDMVSGKGGQLKINDISGYLPGRIVFFLVNCHLTPRPILLTRHGESMDNVRGRIGGDSSLSEAGELYSRKLASFVEKRLKSERTASIWTSTLQRTILTAHPIIGFPKIQWRALDEINAGVCDGMTYDEIKKSKPEEYESRRKDKLRYRYPRGESYLDVIQRLEPVIIELERQRAPVVVIAHQAVLRALYAYFADKPLEEVPNIEIPLHTIIEIQMGVAGVQEKRYKLMDAIHPTAGL

SEQ ID NO: 157748 - protein, 397 aa, Zea Mays
MASSGGISDQLFVSVKLESPHLAELDLAPHLFGSHPVAGSWDPCKALPLERAATAVWEFSCVVPSQHESLDFKFVLKRKGDNPQYIIEEGPNRPLGCQRNEFEMGNALFKLNEGKEVLECKVQVETEMLSPIDLAASWRAHQEYFQPSRVRGTHDVTINPGLEGRAKNGFASGLELDLDKYVVPTPNMGSGVVYAASLTENPRSLLQTGSSSNNDTTKDILHNSTKGDSSLNHYVNTMKSTIGGHASSLEEQRAMFVDRGVGSPNFARPTMETFSMSNFKLDSESKVGLPARGKTFTAAKLTRYLRWLGHETKHFNVGKYRRLKHGTNQTADFFRGDNREGVEARNEVAALAMEDMLSWMQEGGQVGIFDATNSTRIRRNMLMKMAEGKYHLFGNIM

SEQ ID NO: 157749 - protein, 339 aa, Zea Mays
MEDMLSWMQEGGQVGIFDATNSTRIRRNMLMKMAEGKCKIIFLETLCNDQDVLERNIRLKVQQSPDYAEQTDFEAGVQDFKERLTYYEKVYEPVEEGSYIKMIDMVSGKGGQLKINDISGYLPGRIVFFLVNCHLTPRPILLTRHGESMDNVRGRIGGDSSLSEAGELYSRKLASFVEKRLKSERTASIWTSTLQRTILTAHPIIGFPKIQWRALDEINAGVCDGMTYDEIKKSKPEEYESRRKDKLRYRYPRGESYLDVIQRLEPVIIELERQRAPVVVIAHQAVLRALYAYFADKPLEEVPNIEIPLHTIIEIQMGVAGVQEKRYKLMDAIHPTAGL

SEQ ID NO: 157750 - protein, 437 aa, Zea Mays
MFVDRGVGSPNFARPTMETFSMSNFKLDSESKVGLPARGKTFTAAKLTRYLRWLGHETKHFNVGKYRRLKHGTNQTADFFRGDNREGVEARNEVAALAMEDMLSWMQEGGQVGIFDATNSTRIRRNMLMKMAEGKCKIIFLETLCNDQDVLERNIRLKVQQSPDYAEQTDFEAGVQDFKERLTYYEKVYEPVEEGSYIKMIDMVSGKGGQLKINDISGYLPGRIVFFLVNCHLTPRPILLTRHGESMDNVRGRIGGDSSLSEAGELYSRKLASFVEKRLKSERTASIWTSTLQRTILTAHPIIGFPKIQWRALDEINAGVCDGMTYDEIKKSKPEEYESRRKDKLRYRYPRGESYLDVIQRLEPVIIELERQRAPVVVIAHQAVLRALYAYFADKPLEEVPNIEIPLHTIIEIQMGVAGVQEKRYKLMDAIHPTAGL

SEQ ID NO: 157751 - protein, 485 aa, Zea Mays
MKSTIGGHASSLEEQRAMFVDRGVGSPNFARPTMETFSMSNFKLDSESKGMPAAEGAVAAAAVADQMYGPKEDRKLAIVLVGLPARGKTFTAAKLTRYLRWLGHETKHFNVGKYRRLKHGTNQTADFFRGDNREGVEARNEVAALAMEDMLSWMQEGGQVGIFDATNSTRIRRNMLMKMAEGKCKIIFLETLCNDQDVLERNIRLKVQQSPDYAEQTDFEAGVQDFKERLTYYEKVYEPVEEGSYIKMIDMVSGKGGQLKINDISGYLPGRIVFFLVNCHLTPRPILLTRHGESMDNVRGRIGGDSSLSEAGELYSRKLASFVEKRLKSERTASIWTSTLQRTILTAHPIIGFPKIQWRALDEINAGVCDGMTYDEIKKSKPEEYESRRKDKLRYRYPRGESYLDVIQRLEPVIIELERQRAPVVVIAHQAVLRALYAYFADKPLEEVPNIEIPLHTIIEIQMGVAGVQEKRYKLMDAIHPTAGL

SEQ ID NO: 157752 - protein, 61 aa, Zea Mays
MKKKTPVEADMCILCHMLKELHQKCPKEMDEYAGCMYYYTNEFDFCRKEQQAFEEACPISE

SEQ ID NO: 157753 - protein, 198 aa, Zea Mays
MEDSVGADERREQSETMPHKKARQEVAEAGGVGGGGGGKPAEEGGFLSAVASKIGATMSGANGGSGGEVGAAMASDGEEGKRDGDGEPGEEGGFLSAVASKIGAAMSGANGGSGGGGNAAAASGGEDKEADGFTGGVIFRKLLHSSPPAPPHVSGKDQGVSCSPASESELRECYGPVRLYRNKTGFIPDHQNLYKLEK

SEQ ID NO: 157754 - protein, 211 aa, Zea Mays
MPSADAEAEQTPKWFPNSYSPTPTVQLQARASGRRHRGFPFRRSGRLLVSRPQAEKLTRSRSSSVALPLRMPPPGPRLPLLLLILLLLGAACSCGLTVTGAGEGGSCEFSVARGSELYSFDLAAPTPAHRHGVLSEDGFYKVAVNDSILWFQLCDEMLFNFDPPMCLNCEDCGGPLRCGTQCSALVSNNIGGYDVCTTIGGLSKSHISLVE

SEQ ID NO: 157755 - protein, 335 aa, Zea Mays
MPSADAEAEQTPKWFPNSYSPTPTVQLQARASGRRHRGFPFRRSGRLLVSRPQAEKLTRSRSSSVALPLRMPPPGPRLPLLLLILLLLGAACSCGLTVTGAGEGGSCEFSVARGSELYSFDLAAPTPAHRHGVLSEDGFYKVAVNDSILWFQLCDEMLFNFDPPMCLNCEDCGGPLRCGTQCSALVSNNIGGYDVCTTIGGLSKSHISLVDEGNPRKGIIVKMFSSKCSISVSVICDSNAIQVPDKFVLSGLCDYATTLEHPSGCPRILCLLGGYILIGAVYRYYFLGIHSVEAIPNLEFWIGLPQRIKTVFVPATRSHVSYSRDGLGTDAPVYH

SEQ ID NO: 157756 - protein, 273 aa, Zea Mays
MPPPGPRLPLLLLILLLLGAACSCGLTVTGAGEGGSCEFSVARGSELYSFDLAAPTPAHRHGVLSEDGFYKVAVNDSILWFQLCDEMLFNFDPPMCLNCEDCGGPLRCGTQCSALVSNNIGGYDVCTTIGGLSKSHISLVDEGNPRKGIIVKMFSSKCSISVSVICDSNAIQVPDKFVLSGLCDYATTLEHPSGCPRSVSASGSGWGWLSTLFITYVILSCIQSCESGTCYIRQLICSRKKLSLAQLLEGVGIHPNLPGSSLFYLESGCLFAL

SEQ ID NO: 157757 - protein, 93 aa, Zea Mays
MRRRSSRMRLLVILVPKSCQRLTEICLTKICLCHCVPFQIIRCIYFSQPRGEEITLEYFFFQFDQSASLSVLLYGLLLCARFFYIIQRLWFRC

SEQ ID NO: 157758 - protein, 67 aa, Zea Mays
MYTARKKIQKEKGLEPSEFEDSVAQAFFDLENGNQELKSDLKDLYINNAIQMDVTGSRKAVWERCGL

SEQ ID NO: 157759 - protein, 60 aa, Zea Mays
MASLTNSIVSWEQRPMTRWDRILLRPEGNKDDGANLRDPNIAREVSGASARGAGQFSAVS

SEQ ID NO: 157760 - protein, 427 aa, Zea Mays
MMHAFLLLQTSTPPQLTTNSFALFMHACVTQPNNAETSIIPVVAGETSLLRIINAAMNTELFVSLAGHRMTVVAADAMYTKPFETDVVLLGPGQTTDVLVTAHAAPGRYYLAARAYASAQGVPFDNTTATAIFQYKNAPGCPTTSGAGAGAGAGAGTFSGPVGRSSRSSGYLGRAGPQPMLPFLPAFNDTNTATAFSNRLRSPVPVKVPGPVTQEVFTTVGFGLFNCRPGPFCQGPNNTRFGASMNNVSFQLPDTVSLLQAHYHHIPGVFTDDFPALPPVFFDFTSQNVPRALWQPVKGTRLYRVRYGAVVQIVFQDTGIFAAEEHPMHIHGYHFYVLATGFGNYDPRRDAARFNLVDPPSRNTIGVPVGGWAVVRFVADNPGVWLVHCHIDAHLTGGLAMALLVEDGESELEATVAPPLDLPICVL

SEQ ID NO: 157761 - protein, 445 aa, Zea Mays
MAAAPAGAPAITASSSFVSSSPFCLKASMTSQRRPAGRVSIVIRCVSSPPAVDTSFKTNVPRNANMAKLQAGYLFPEIARRRAAHLLKFPDAKIISLGIGDTTEPIPNVITNAMAERAHALSTIDGYSGYGAEQGEKKLRAAIAATYYADLGIEDSDIFVSDGAKCDISRLQAYVDSSVIMGQTDLYQQDVQKYGNIEYMRCGPENGFFPDLSTVPRTDIIFFCSPNNPTGAAASRDQLTKLVKFAKDNGSIIVYDSAYAMYISDDSPKSIFEIPGAKEVAIETASFSKYAGFTGVRLGWTVVPKELLFSDGHPVAKDFNRIVCTCFNGASNIAQAGGLACLSPDGLKAMQDVVGFYKENTEIIVETFTSLGFNVYGAKNAPYVWVHFPGRNSWDVFAEILEKANVVTTPGTGFGPGGEGFVRVSAFGHRENIIEAARRLKQLYK

SEQ ID NO: 157762 - protein, 228 aa, Zea Mays
MAAAPAGAPAITASSSFVSSSPFCLKASMTSQRRPAGRVSIVIRCVSSPPAVDTSFKTNVPRNANMAKLQAGYLFPEIARRRAAHLLKFPDAKIISLGIGDTTEPIPNVITNAMAERAHALSTIDGYSGYGAEQGEKKLRAAIAATYYADLGIEDSDIFVSDGAKCDISRLQVLFGSNVTIAVQDPSYPAYVDSSVIMGQTDLYQQDVQKLLLRQPHSRNTLGSQVSV

SEQ ID NO: 157763 - protein, 85 aa, Zea Mays
MCLGPTVSSRPIDLETLKPLLPISETLVPKGGTYLQTVPVNSLAIQESITEVSKDSLVMQVDMVAGMRVVPSRRNNVDPTTEWPT

SEQ ID NO: 157764 - protein, 103 aa, Zea Mays
MLRRCALHSLAPHPDATSFLDWWEKSSDIVPRMIKKGLDSLIILGAWMVWKHRNRVVFDGATPDLTLLLRSAEEERHKWQLALLLGGANAKCLGEVLSVVADY

SEQ ID NO: 157765 - protein, 554 aa, Zea Mays
MAPVAAPIRDLLTSFSPGADFLALSSGDGRIKVWDAVRGRLQTEFADIPAVEAVAVAESKRGHLALDYTCMKWVQLSSKKKRKAGSSLIVLGTGSGDVLALDVAAGHWKWKVSDCHPGGVTAVEYSKHGRNVYTAGADGMVCRIDASNGAVVGKFKSSSKAISALAVSSDGNMLATAAGQLRTFDTSSNKKIKKFSGHPVAVRSMVFSNDSQYVLSSGVGERYIAIWKLGSGKTQSSNCILSMEHPAMFVDCKCSDKGEIHILAISEIGVCYFWSANVVDDLRNKKPTKIILSESSVSTTHQALSIFAAKLQGVDGPNSAHVLLAYGSVVKPSFDKLLVCYGTDISLGISQDGVLLPNTQTTMAKKGQSVKKHETVIALDRANAEDAILPLPKLHTQEKKRKHGVTKPSGDVEPEIHSDLTTTRSIHKRVPVQRIEDDSTCIEDMMRECGIIETRVDESMKGHAGIPFNILSCLFGDGSIKVDANLPSKKIRGHLRSLKPGDACKLLDKLVSAWKTRSGSTELVLRWIYCLLVIHGRFICSEESINNLEKAGTN

SEQ ID NO: 157766 - protein, 388 aa, Zea Mays
MAPVAAPIRDLLTSFSPGADFLALSSGDGRIKVWDAVRGRLQTEFADIPAVEAVAVAESKRGHLALDYTCMKWVQLSSKKKRKAGSSLIVLGTGSGDVLALDVAAGHWKWKVSDCHPGGVTAVEYSKHGRNVYTAGADGMVCRIDASNGAVVGKFKSSSKAISALAVSSDGNMLATAAGQLRTFDTSSNKKIKKFSGHPVAVRSMVFSNDSQYVLSSGVGERYIAIWKLGSGKTQSSNCILSMEHPAMFVDCKCSDKGEIHILAISEIGVCYFWSANVVDDLRNKKPTKIILSESSVSTTHQALSIFAAKLQGVDGPNSAHVLLAYGSVVKPSFDKLLVCYGTDISLGISQDGVLLPNTQTTMAKKGQSVKKHGKEKETWCNKTQWRC

SEQ ID NO: 157767 - protein, 462 aa, Zea Mays
MSDGNMLATAAGQLRTFDTSSNKKIKKFSGHPVAVRSMVFSNDSQYVLSSGVGERYIAIWKLGSGKTQSSNCILSMEHPAMFVDCKCSDKGEIHILAISEIGVCYFWSANVVDDLRNKKPTKIILSESSVSTTHQALSIFAAKLQGVDGPNSAHVLLAYGSVVKPSFDKLLVCYGTDISLGISQDGVLLPNTQTTMAKKGQSVKKHETVIALDRANAEDAILPLPKLHTQEKKRKHGVTKPSGDVEPEIHSDLTTTRSIHKRVPVQRIEDDSTCIEDMMRECGIIETRVDESMKGHAGIPFNILSCLFGDGSIKVDANLPSKKIRGHLRSLKPGDACKLLDKLVSAWKTRSGSTELVLRWIYCLLVIHGRFICSEESINNLEKMCAERYTVTEDLLKLSGRLRLITAQVDKAASNMSEPTSGEMQDAAFQSDEEEEDEDVDETVFGQDSDSSQNSGTDDDAK

SEQ ID NO: 157768 - protein, 504 aa, Zea Mays
MAPVAAPIRDLLTSFSPGADFLALSSGDGRIKVWDAVRGRLQTEFADIPAVEAVAVAESKRGHLALDYTCMKWVQLSSKKKRKAGSSLIVLGTGSGDVLALDVAAGHWKWKVSDCHPGGVTAVEYSKHGRNVYTAGADGMVCRIDASNGAVVGKFKSSSKAISALAVSSDGNMLATAAGQLRTFDTSSNKKIKKFSGHPVAVRSMVFSNDSQYVLSSGVGERYIAIWKLGSGKTQSSNCILSMEHPAMFVDCKCSDKGEIHILAISEIGVCYFWSANVVDDLRNKKPTKIILSESSVSTTHQALSIFAAKLQGVDGPNSAHVLLAYGSVVKPSFDKLLVCYGTDISLGISQDGVLLPNTQTTMAKKGQSVKKHETVIALDRANAEDAILPLPKLHTQEKKRKHGVTKPSGDVEPEIHSDLTTTRSIHKRVPVQRIEDDSTCIEDMMRECGIIETRVDESMKGHAGIPFNILSCLFGDGSIKVDANLPNSRSSKIIKTWRCLQTS

SEQ ID NO: 157769 - protein, 456 aa, Zea Mays
MVCRIDASNGAVVGKFKSSSKAISALAVSSDGNMLATAAGQLRTFDTSSNKKIKKFSGHPVAVRSMVFSNDSQYVLSSGVGERYIAIWKLGSGKTQSSNCILSMEHPAMFVDCKCSDKGEIHILAISEIGVCYFWSANVVDDLRNKKPTKIILSESSVSTTHQALSIFAAKLQGVDGPNSAHVLLAYGSVVKPSFDKLLVCYGTDISLGISQDGVLLPNTQTTMAKKGQSVKKHETVIALDRANAEDAILPLPKLHTQEKKRKHGVTKPSGDVEPEIHSDLTTTRSIHKRVPVQRIEDDSTCIEDMMRECGIIETRVDESMKGHAGIPFNILSCLFGDGSIKVDANLPSKKIRGHLRSLKPGDACKLLDKLVSAWKTRSGSTELVLRWIYCLLVIHGRFICSEESINNLEKAGTNLTPAQSREVNTANSFVNNAWQVSTRHSQICVQKDTQLLKIC

SEQ ID NO: 157770 - protein, 490 aa, Zea Mays
MVCRIDASNGAVVGKFKSSSKAISALAVSSDGNMLATAAGQLRTFDTSSNKKIKKFSGHPVAVRSMVFSNDSQYVLSSGVGERYIAIWKLGSGKTQSSNCILSMEHPAMFVDCKCSDKGEIHILAISEIGVCYFWSANVVDDLRNKKPTKIILSESSVSTTHQALSIFAAKLQGVDGPNSAHVLLAYGSVVKPSFDKLLVCYGTDISLGISQDGVLLPNTQTTMAKKGQSVKKHETVIALDRANAEDAILPLPKLHTQEKKRKHGVTKPSGDVEPEIHSDLTTTRSIHKRVPVQRIEDDSTCIEDMMRECGIIETRVDESMKGHAGIPFNILSCLFGDGSIKVDANLPSKKIRGHLRSLKPGDACKLLDKLVSAWKTRSGSTELVLRWIYCLLVIHGRFICSEESINNLEKMCAERYTVTEDLLKLSGRLRLITAQVDKAASNMSEPTSGEMQDAAFQSDEEEEDEDVDETVFGQDSDSSQNSGTDDDAK

SEQ ID NO: 157771 - protein, 1808 aa, Zea Mays
MEGEGHHGVVLACSICGFLFAVLSPFSFWVLWAVNWRPWRLYSWIYARKWPTYVQGPQLSTLCSLLTLCAWLVVISPIAVLLVWGSVLIALMERNIIGLAVIMAGVALLLSFYSIMLWWRTQWQSSQAVAYLLLLAVCLLCAYDFCAIYVTAGASASELNSPSGFFFGVSVISLAINMLFICKILFNVSGFDVDEYVRRSYKFAYSDCVEVAPVSCSPEPPDPSELYMTKSSRVKHLGLLYISSLLVLVGYSILYGLTSKEARWLGALTSVAVVILDWNLGLCSFRFELLKSRMIVLFVAGTSRAFLVSFGVHYWYLGHCISYAFVASVLLSAAVSSWLSISNPSVARIDALRSTVIKLREGFRRKGQNSSSNSSEGCGSSVKRSSGSVEAGQNGNAMDSMYRSNSQSDGVNWSSIPFDRSNSCQEGRSSDKNIDSARASLAHRSNSCLSAVQDSETAVVSVDRHGDPITSLVCSSSGLESHGCEPSGSATTSGNQQLLDLNLAAIFQDRLNDPRISSMLKKNGGLGDVELANLLQDKGLDPNFSYMLKDKVMDPRILALLQRSSLDADREHQDDVDVTATDSDRLDTTIANQISLSEELRRSGLEKWLNISRLIFHHLAGSPIRAFIVFTVMFIIETATVAIYRPETIKVINATHEQFEFGFSILLLSPVVCSIMAFIWSLRAEEMLMTSKPQKYGFIAWLLSTCVGLFLSFLSKSSVILGLSLTVPLMVACLSFAVPIWIRNGYSFWIPGREFANRENRALFVITIAVFTASIIGLGAIVSAKPLDALGYKGWDADKNSSYSPYATSMYLGWALSSTIAVITTGLIPIVAWFATYRFSPSSAICVGLFATVLVSFCGASYWGVVNSREDGVPLKADFLAALLPLLCIPAFFSLFTGLYKWKDDDWKISRGVYLFVGMGMLLLFGAVAAVIVTIRPWTVGVACLVAILFLVFVIGVIHYWTSNNFYLTRTQMLLVCSIAFLLALAAFLMGLFHGKPFVGASIGYFSFIFLLTGRALTVLLSPPIVVYSPRVLPVYVYDAHADSAKNVSYAFLILYGIALATEVWGVIASLIMNPPFVGAGVSATTLVIAFSFAVSRPCLTLKMMEDAVHFLSKDTVVQAMSRSANKTRNAISGTYSAPQRSASSAALLVGDPALTLDRAGNFVLPRADVMKLRDRLRNEEIAAGSFLCGVKDCLLICPQSLSNIDYRRNMCAHARILALEEAIDTEWVYMWDKFGGYLLLLLGLTAKAEQIQDEVRLRLFLDSIGLSDLSAKEIKKWMPEDRRQFELIQESYIREKEMEEEALMQRREEEGKGRERRRALLEREERKWKELEISLLSSIPNTGSRDAAAMAAAVRAVGGDSALEDSFARDRVSSIANHIRKAQLARRAEQTGIPGTICILDDEPRSTGRHCGELDLCLCQSQKVTLSIAVMVQPVSGPVCLFGSEFQKVCWEILVAGSEQGMEAGQVGLRLVTKGERMTTVAKEWNIGASSIADGRWHLVTVTLDADLGEATSFIDGVYDGYQNGLPLPTDNGIWEPGTDIWVGARPPMDLDAFGRSDSEGSDSKMQIMDAFLWGRCLSEDEVTVLHTAMSPAEYGFFDLAPGDAWHGSYSARVDDWESEEAYELYDQGDVEWDGQYSSGRKRPVHDAVAIDLDSFARRPRKPRFETRDEVNQRMLSVERAVRDALIAKGERNFTDQEFPPEDRSLFVDPMNPPLKLQVVSEWMRPSDIAKDISISCQPCLFSGSVNSSDVCQGRLGDCWFLSAVAVLTEMSRISEVIITPEYNDEGIYTVRFCIQVPNIPMFKPFD

SEQ ID NO: 157772 - protein, 1189 aa, Zea Mays
MEGEGHHGVVLACSICGFLFAVLSPFSFWVLWAVNWRPWRLYSWIYARKWPTYVQGPQLSTLCSLLTLCAWLVVISPIAVLLVWGSVLIALMERNIIGLAVIMAGVALLLSFYSIMLWWRTQWQSSQAVAYLLLLAVCLLCAYDFCAIYVTAGASASELNSPSGFFFGVSVISLAINMLFICKILFNVSGFDVDEYVRRSYKFAYSDCVEVAPVSCSPEPPDPSELYMTKSSRVKHLGLLYISSLLVLVGYSILYGLTSKEARWLGALTSVAVVILDWNLGLCSFRFELLKSRMIVLFVAGTSRAFLVSFGVHYWYLGHCISYAFVASVLLSAAVSSWLSISNPSVARIDALRSTVIKLREGFRRKGQNSSSNSSEGCGSSVKRSSGSVEAGQNGNAMDSMYRSNSQSDGVNWSSIPFDRSNSCQEGRSSDKNIDSARASLAHRSNSCLSAVQDSETAVVSVDRHGDPITSLVCSSSGLESHGCEPSGSATTSGNQQLLDLNLAAIFQDRLNDPRISSMLKKNGGLGDVELANLLQDKGLDPNFSYMLKDKVMDPRILALLQRSSLDADREHQDDVDVTATDSDRLDTTIANQISLSEELRRSGLEKWLNISRLIFHHLAGSPIRAFIVFTVMFIIETATVAIYRPETIKVINATHEQFEFGFSILLLSPVVCSIMAFIWSLRAEEMLMTSKPQKYGFIAWLLSTCVGLFLSFLSKSSVILGLSLTVPLMVACLSFAVPIWIRNGYSFWIPGREFANRENVSQAPGEKERALFVITIAVFTASIIGLGAIVSAKPLDALGYKGWDADKNSSYSPYATSMYLGWALSSTIAVITTGLIPIVAWFATYRFSPSSAICVGLFATVLVSFCGASYWGVVNSREDGVPLKADFLAALLPLLCIPAFFSLFTGLYKWKDDDWKISRGVYLFVGMGMLLLFGAVAAVIVTIRPWTVGVACLVAILFLVFVIGVIHYWTSNNFYLTRTQMLLVCSIAFLLALAAFLMGLFHGKPFVGASIGYFSFIFLLTGRALTVLLSPPIVVYSPRVLPVYVYDAHADSAKNVSYAFLILYGIALATEVWGVIASLIMNPPFVGAGVSATTLVIAFSFAVSRPCLTLKMMEDAVHFLSKDTVVQAMSRSANKTRNAISGTYSAPQRIFLMWSKRLFTNLPPVPVKHRLSEEYVCPCTYFGFGRSN

SEQ ID NO: 157773 - protein, 1906 aa, Zea Mays
MEGEGHHGVVLACSICGFLFAVLSPFSFWVLWAVNWRPWRLYSWIYARKWPTYVQGPQLSTLCSLLTLCAWLVVISPIAVLLVWGSVLIALMERNIIGLAVIMAGVALLLSFYSIMLWWRTQWQSSQAVAYLLLLAVCLLCAYDFCAIYVTAGASASELNSPSGFFFGVSVISLAINMLFICKILFNVSGFDVDEYVRRSYKFAYSDCVEVAPVSCSPEPPDPSELYMTKSSRVKHLGLLYISSLLVLVGYSILYGLTSKEARWLGALTSVAVVILDWNLGLCSFRFELLKSRMIVLFVAGTSRAFLVSFGVHYWYLGHCISYAFVASVLLSAAVSSWLSISNPSVARIDALRSTVIKLREGFRRKGQNSSSNSSEGCGSSVKRSSGSVEAGQNGNAMDSMYRSNSQSDGVNWSSIPFDRSNSCQEGRSSDKNIDSARASLAHRSNSCLSAVQDSETAVVSVDRHGDPITSLVCSSSGLESHGCEPSGSATTSGNQQLLDLNLAAIFQDRLNDPRISSMLKKNGGLGDVELANLLQDKGLDPNFSYMLKDKVMDPRILALLQRSSLDADREHQDDVDVTATDSDRLDTTIANQISLSEELRRSGLEKWLNISRLIFHHLAGSPIRAFIVFTVMFIIETATVAIYRPETIKVINATHEQFEFGFSILLLSPVVCSIMAFIWSLRAEEMLMTSKPQKYGFIAWLLSTCVGLFLSFLSKSSVILGLSLTVPLMVACLSFAVPIWIRNGYSFWIPGREFANRENVSQAPGEKERALFVITIAVFTASIIGLGAIVSAKPLDALGYKGWDADKNSSYSPYATSMYLGWALSSTIAVITTGLIPIVAWFATYRFSPSSAICVGLFATVLVSFCGASYWGVVNSREDGVPLKADFLAALLPLLCIPAFFSLFTGLYKWKDDDWKISRGVYLFVGMGMLLLFGAVAAVIVTIRPWTVGVACLVAILFLVFVIGVIHYWTSNNFYLTRTQMLLVCSIAFLLALAAFLMGLFHGKPFVGASIGYFSFIFLLTGRALTVLLSPPIVVYSPRVLPVYVYDAHADSAKNVSYAFLILYGIALATEVWGVIASLIMNPPFVGAGVSATTLVIAFSFAVSRPCLTLKMMEDAVHFLSKDTVVQAMSRSANKTRNAISGTYSAPQRSASSAALLVGDPALTLDRAGNFVLPRADVMKLRDRLRNEEIAAGSFLCGVKDCLLICPQSLSNIDYRRNMCAHARILALEEAIDTEWVYMWDKFGGYLLLLLGLTAKAEQIQDEVRLRLFLDSIGLSDLSAKEIKKWMPEDRRQFELIQESYIREKEMEEEALMQRREEEGKGRERRRALLEREERKWKELEISLLSSIPNTGSRDAAAMAAAVRAVGGDSALEDSFARDRVSSIANHIRKAQLARRAEQTGIPGTICILDDEPRSTGRHCGELDLCLCQSQKVTLSIAVMVQPVSGPVCLFGSEFQKVCWEILVAGSEQGMEAGQVGLRLVTKGERMTTVAKEWNIGASSIADGRWHLVTVTLDADLGEATSFIDGVYDGYQNGLPLPTDNGIWEPGTDIWVGARPPMDLDAFGRSDSEGSDSKMQIMDAFLWGRCLSEDEVTVLHTAMSPAEYGFFDLAPGDAWHGSYSARVDDWESEEAYELYDQGDVEWDGQYSSGRKRPVHDAVAIDLDSFARRPRKPRFETRDEVNQRMLSVERAVRDALIAKGERNFTDQEFPPEDRSLFVDPMNPPLKLQVVSEWMRPSDIAKDISISCQPCLFSGSVNSSDVCQGRLGDCWFLSAVAVLTEMSRISEVIITPEYNDEGIYTVRFCIQGEWVAVVVDDWIPCESPGKPAFATSRKQNELWVSILEKAYAKLHGSYEALEGGLVQDALVDLTGGAGEEIDMRSPQAQLDLASGRLWSQLLHFKQEGKRS

SEQ ID NO: 157774 - protein, 1810 aa, Zea Mays
MEGEGHHGVVLACSICGFLFAVLSPFSFWVLWAVNWRPWRLYSWIYARKWPTYVQGPQLSTLCSLLTLCAWLVVISPIAVLLVWGSVLIALMERNIIGLAVIMAGVALLLSFYSIMLWWRTQWQSSQAVAYLLLLAVCLLCAYDFCAIYVTAGASASELNSPSGFFFGVSVISLAINMLFICKILFNVSGFDVDEYVRRSYKFAYSDCVEVAPVSCSPEPPDPSELYMTKSSRVKHLGLLYISSLLVLVGYSILYGLTSKEARWLGALTSVAVVILDWNLGLCSFRFELLKSRMIVLFVAGTSRAFLVSFGVHYCYAFVASVLLSAAVSSWLSISNPSVARIDALRSTVIKLREGFRRKGQNSSSNSSEGCGSSVKRSSGSVEAGQNGNAMDSMYRSNSQSDGVNWSSIPFDRSNSCQEGRSSDKNIDSARASLAHRSNSCLSAVQDSETAVVSVDRHGDPITSLVCSSSGLESHGCEPSGSATTSGNQQLLDLNLAAIFQDRLNDPRISSMLKKNGGLGDVELANLLQDKGLDPNFSYMLKDKVMDPRILALLQRSSLDADREHQDDVDVTATDSDRLDTTIANQISLSEELRRSGLEKWLNISRLIFHHLAGSPIRAFIVFTVMFIIETATVAIYRPETIKVINATHEQFEFGFSILLLSPVVCSIMAFIWSLRAEEMLMTSKPQKYGFIAWLLSTCVGLFLSFLSKSSVILGLSLTVPLMVACLSFAVPIWIRNGYSFWIPGREFANRENVSQAPGEKERALFVITIAVFTASIIGLGAIVSAKPLDALGYKGWDADKNSSYSPYATSMYLGWALSSTIAVITTGLIPIVAWFATYRFSPSSAICVGLFATVLVSFCGASYWGVVNSREDGVPLKADFLAALLPLLCIPAFFSLFTGLYKWKDDDWKISRGVYLFVGMGMLLLFGAVAAVIVTIRPWTVGVACLVAILFLVFVIGVIHYWTSNNFYLTRTQMLLVCSIAFLLALAAFLMGLFHGKPFVGASIGYFSFIFLLTGRALTVLLSPPIVVYSPRVLPVYVYDAHADSAKNVSYAFLILYGIALATEVWGVIASLIMNPPFVGAGVSATTLVIAFSFAVSRPCLTLKMMEDAVHFLSKDTVVQAMSRSANKTRNAISGTYSAPQRSASSAALLVGDPALTLDRAGNFVLPRADVMKLRDRLRNEEIAAGSFLCGVKDCLLICPQSLSNIDYRRNMCAHARILALEEAIDTEWVYMWDKFGGYLLLLLGLTAKAEQIQDEVRLRLFLDSIGLSDLSAKEIKKWMPEDRRQFELIQESYIREKEMEEEALMQRREEEGKGRERRRALLEREERKWKELEISLLSSIPNTGSRDAAAMAAAVRAVGGDSALEDSFARDRVSSIANHIRKAQLARRAEQTGIPGTICILDDEPRSTGRHCGELDLCLCQSQKVTLSIAVMVQPVSGPVCLFGSEFQKVCWEILVAGSEQGMEAGQVGLRLVTKGERMTTVAKEWNIGASSIADGRWHLVTVTLDADLGEATSFIDGVYDGYQNGLPLPTDNGIWEPGTDIWVGARPPMDLDAFGRSDSEGSDSKMQIMDAFLWGRCLSEDEVTVLHTAMSPAEYGFFDLAPGDAWHGSYSARVDDWESEEAYELYDQGDVEWDGQYSSGRKRPVHDAVAIDLDSFARRPRKPRFETRDEVNQRMLSVERAVRDALIAKGERNFTDQEFPPEDRSLFVDPMNPPLKLQVVSEWMRPSDIAKDISISCQPCLFSGSVNSSDVCQGRLGDCWFLSAVAVLTEMSRISEVIITPEYNDEGIYTVRFCIQVPNIPMFKPFD

SEQ ID NO: 157775 - protein, 1503 aa, Zea Mays
MEGEGHHGVVLACSICGFLFAVLSPFSFWVLWAVNWRPWRLYSWIYARKWPTYVQGPQLSTLCSLLTLCAWLVVISPIAVLLVWGSVLIALMERNIIGLAVIMAGVALLLSFYSIMLWWRTQWQSSQAVAYLLLLAVCLLCAYDFCAIYVTAGASASELNSPSGFFFGVSVISLAINMLFICKILFNVSGFDVDEYVRRSYKFAYSDCVEVAPVSCSPEPPDPSELYMTKSSRVKHLGLLYISSLLVLVGYSILYGLTSKEARWLGALTSVAVVILDWNLGLCSFRFELLKSRMIVLFVAGTSRAFLVSFGVHYWYLGHCISYAFVASVLLSAAVSSWLSISNPSVARIDALRSTVIKLREGFRRKGQNSSSNSSEGCGSSVKRSSGSVEAGQNGNAMDSMYRSNSQSDGVNWSSIPFDRSNSCQEGRSSDKNIDSARASLAHRSNSCLSAVQDSETAVVSVDRHGDPITSLVCSSSGLESHGCEPSGSATTSGNQQLLDLNLAAIFQDRLNDPRISSMLKKNGGLGDVELANLLQDKGLDPNFSYMLKDKVMDPRILALLQRSSLDADREHQDDVDVTATDSDRLDTTIANQISLSEELRRSGLEKWLNISRLIFHHLAGSPIRAFIVFTVMFIIETATVAIYRPETIKVINATHEQFEFGFSILLLSPVVCSIMAFIWSLRAEEMLMTSKPQKYGFIAWLLSTCVGLFLSFLSKSSVILGLSLTVPLMVACLSFAVPIWIRNGYSFWIPGREFANRENVSQAPGEKERALFVITIAVFTASIIGLGAIVSAKPLDALGYKGWDADKNSSYSPYATSMYLGWALSSTIAVITTGLIPIVAWFATYRFSPSSAICVGLFATVLVSFCGASYWGVVNSREDGVPLKADFLAALLPLLCIPAFFSLFTGLYKWKDDDWKISRGVYLFVGMGMLLLFGAVAAVIVTIRPWTVGVACLVAILFLVFVIGVIHYWTSNNFYLTRTQMLLVCSIAFLLALAAFLMGLFHGKPFVGASIGYFSFIFLLTGRALTVLLSPPIVVYSPRVLPVYVYDAHADSAKNVSYAFLILYGIALATEVWGVIASLIMNPPFVGAGVSATTLVIAFSFAVSRPCLTLKMMEDAVHFLSKDTVVQAMSRSANKTRNAISGTYSAPQRSASSAALLVGDPALTLDRAGNFVLPRADVMKLRDRLRNEEIAAGSFLCGVKDCLLICPQSLSNIDYRRNMCAHARILALEEAIDTEWVYMWDKFGGYLLLLLGLTAKAEQIQDEVRLRLFLDSIGLSDLSAKEIKKWMPEDRRQFELIQESYIREKEMEEEALMQRREEEGKGRERRRALLEREERKWKELEISLLSSIPNTGSRDAAAMAAAVRAVGGDSALEDSFARDRVSSIANHIRKAQLARRAEQTGIPGTICILDDEPRSTGRHCGELDLCLCQSQKVTLSIAVMVQPVSGPVCLFGSEFQKVCWEILVAGSEQGMEAGQVGLRLVTKGERMTTVAKEWNIGGILSL

SEQ ID NO: 157776 - protein, 393 aa, Zea Mays
MDYFDARRKPHNVGKIIAALVLTTLCIFVLKQSPGFGGNSVFSRHEHGVTHVLVTGGAGYIGSHAALRLLKDNYRVTIVDNLSRGNMGAVKVLQGLFPQPGRLQFIFADLGNQKSVNKIFAENAFDAVMHFAAVAYVGESTLEPLRYYHNITSNTLLILEAMASHGVQTLIYSSTCATYGEPDKMPITEATPQFPINPYGKAKKMAEDIIIDFSNSKGADMAVMILRYFNVIGSDPEGRLGEAPRPELREHGRISGACFDAALGVIPGLKVKGTDYPTADGTCIRDYIDVTDLVDAHVKALNKAEPRKVGIYNVGTGRGRSVNEFVDACKKATGVNIKIEYLNRRPGDYAEVYSDPTKINKELNWTAHYTDLKESLSVAWRWQKSHPRGYGPN

SEQ ID NO: 157777 - protein, 72 aa, Zea Mays
MLLAAGFLTQKRAHRAWAARDGPACLVTHAVWANLGARTIQPFCLFFYRKSCKLIQKSKKNGKIVEPPLVGV

SEQ ID NO: 157778 - protein, 744 aa, Zea Mays
MEALPPRSAKHLPMSHHRLLSPIKNPGFSSARNAAQIMEEAAKILQPRAQASSREKICSFSPARIPLRVSEPRESIPPSQRTVPLKPQSSRTAPELPDVRFSRAQQMNRSWNSEEDIVIFRPSIDSYEINNPSCSKNKGKSISLAVQAKNNVQKREGVTGSGRNSGVQKEHDEQRANQPFRTQSNLQRKKPSSSGTSSPVLRQNNQKQNSLVTRGKVPANKTVSTQQGRKLMAGDSSSGKIKSGSKVSKVGGRKDIVESISGDREGSSSNNKDFPQKKRLIERNSTNEKGTFVPEKPVGKLKKQVQPNVVMDEHIKWNKESKDTTDVVSFTFTSPLVKPSAGLSRLVGKWDTRSNLDMDAGCDKDDSDNKVEGLSSVGLNFVNGDALSLLLEKKLKELTSKIDPSITFTRGDTFVPATFTLEEPPTSSCSNWGSESGVFDCSPSEVKPSQYDYCPSAKGQIFRGSKIKVEEQECSSISNARKEHENEELSPLSVLEPTSLSESCWSSECSGSSGGGKSYSSIFDVKNAKGNFLIDPASVDIEAKTTTDSASSASVDTSDISDVTQCSKTSRHTELDYIADVLSSVNLTTDELGPLFVDQDRPALDSSLFQKLENMHVYNKQGKEPFCRGGYRRLLFDCVNECLETRRTAYFRAGYAAWSKGAAALIRGVEAQVCSEITSWKSMGDWTEDELVDKDMSSGLGTWVDFLVEEFEAGVEVENHVLGSLLDEVVADMVVGRHGRSVNL

SEQ ID NO: 157779 - protein, 650 aa, Zea Mays
MGSEKGGAKVIGGGGIFNLFDWKRKSRKKLFSNSPEGSKLVKRSEETLLSGRLHLGDDDEGIGVSSFKGSSDYSCASSVTDEEVREMKAPGVVARLMGLDAMPTSGVPEPYCTPFRDTRLFRDSHSLKRSPEYSMNDQFSHVPQRVDGYIRKPLDLRAPKMPSSPIERFQMEALPPRSAKHLPMSHHRLLSPIKNPGFSSARNAAQIMEEAAKILQPRAQASSREKICSFSPARIPLRVSEPRESIPPSQRTVPLKPQSSRTAPELPDVRFSRAQQMNRSWNSEEDIVIFRPSIDSYEINNPSCSKNKGKSISLAVQAKNNVQKREGVTGSGRNSGVQKEHDEQRANQPFRTQSNLQRKKPSSSGTSSPVLRQNNQKQNSLVTRGKVPANKTVSTQQGRKLMAGDSSSGKIKSGSKVSKVGGRKDIVESISGDREGSSSNNKDFPQKKRLIERNSTNEKGTFVPEKPVGKLKKQVQPNVVMDEHIKWNKESKDTTDVVSFTFTSPLVKPSAGLSRLVGKWDTRSNLDMDAGCDKDDSDNKVEGLSSVGLNFVNGDALSLLLEKKLKELTSKIDPSITFTRGDTFVPATFTLEEPPTSSCSNWGSESGVFDCSPSEVKPSQYDYCPSAKGQIFRGSKIKRPCLLNPSRRKN

SEQ ID NO: 157780 - protein, 67 aa, Zea Mays
MRLDALHRLVYQDRLQERLRKSKCLGLEEAAKNKGFDLGNEQGAARSSPEGDYGRNREVPSDTTISG

SEQ ID NO: 157781 - protein, 1476 aa, Zea Mays
MTRPSTGRRWCGAAAPTPGRRATGAHTWSCGTASTMTRRAWPSGRKGRRSSAGCGWRTAWIAGCLLMPIGLFQVLYWPMRHLKGIPGAQSLLICLTGYQKRYREDMMKMVSLMGARFSKPLIANAVTHLVCYKFEGEKYEVAKKVNIKLVNHQWLEDCLKAWKILPVSDYSKSSWELELMDTHAIDSEHEAEASEPRSLNNRPSVSGNREVVVGRNSNTPVHIVNTEDDNSKTHGIRGRISANSTVAVSANVDVFGPIQSPSVHIMNIEDADINTHDITGQDNPDSSLLPISAKVDILAPIQSSGEKRDTVRTTNSPNLQEVKEKYVGARTQDLASGVLGPQSTSKMPVFRNHVDTLNGTLDVLKGHTDHVSRKYSASHDQTDVAEVLLTSPLRGNQSVDELDSSKVDRWQHQEKDRPSGSHITAAGYLNADAKLNNHEFNPKPRSDSMSNYIKNTNNYKKTSRNSFLQEGYSVNHMVSPQRAEESTLRGYSNLSTLETRQQKVIQPADVQSIAGNENPKREDGLDGACAQKRKSLVSPASINLQTEDLASETGPLDSPFVSRVSDASERIINLVEANAVNLGKERSSFSTSRQARSRKTSLKHGGPINGIKLSEYSSSDKNVKSLQKGRMSFKAMTESKCAMSSSATVQDGKTSAGFPFQDKDGESTHSSGNAANQDCLNEIGNAFTKDPAHDKSVHSSNNSQVVPSYRNASSRIEDPVKVNGNEMAVASNSELEKVVSDATVKESTKQFQDTSRNVQAETSYSKKAPTTIRRNAGVKRHRSADIEAEGSVINSAKKVVPESWPAKGSVINSAKKVVPESWPAKVIHGEHADPASKNGYSTSCAAELKTNRPKKALICRVTNTVAKRTRGACAKKDDARVSSSLEFSKVTSQENFEIISPKKLDTANADEQRRNSPKKIQNTRVRNRATKRSWKSDTNMSNDTVMDKAETVAAGALSDDLLPTDNVEDWPKKLSSHGSVSDCETLSPKTISKARIRNAASNRKIRTVDHKSGDKFGKIGSAVKSETKAFSSNRTEGISCNISKVIADPDSEKSNKDVVREVSGLFCQDSCTIDKQGSYNSKLRSSTRNKAPTPDHEKENRLGSSDLNSKPNRTGSLRSKSDAKSIKKNTRVLSKHQRGNRSEPCTLITSKPALFILSGNSEQRRGYRSILRRLKGRVCRDSHHWSYQATHFIAPDPLRRTEKFFAAAAAGRWILKREYLTACIEAGKFVDEEPFEWFGTGFNDGRTISFDAPRKWRNIRQQMGHGAFYGMQIVAYGQFILPTLDTVKRAVKAGDGAVLATSPPYTRFLDSGVDFAVVSESISRTDAWVQEFISHGIPCVSADYLVEYVCKPGQPLDRHVLFETNCVASKSLEKLTKKQVEMATAEKSEPSEDDDPEDLSCSACGRRDRGDVMLICGDEAGEAGCGIGMHIDCCDPPLDAVPDDDWMCPRCAVPEPETETKHARGTERRGRGSRRR

SEQ ID NO: 157782 - protein, 1211 aa, Zea Mays
MNIEDADINTHDITGQDNPDSSLLPISAKVDILAPIQSSGEKRDTVRTTNSPNLQEVKEKYVGARTQDLASGVLGPQSTSKMPVFRNHVDTLNGTLDVLKGHTDHVSRKYSASHDQTDVAEVLLTSPLRGNQSVDELDSSKVDRWQHQEKDRPSGSHITAAGYLNADAKLNNHEFNPKPRSDSMSNYIKNTNNYKKTSRNSFLQEGYSVNHMVSPQRAEESTLRGYSNLSTLETRQQKVIQPADVQSIAGNENPKREDGLDGACAQKRKSLVSPASINLQTEDLASETGPLDSPFVSRVSDASERIINLVEANAVNLGKERSSFSTSRQARSRKTSLKHGGPINGIKLSEYSSSDKNVKSLQKGRMSFKAMTESKCAMSSSATVQDGKTSAGFPFQDKDGESTHSSGNAANQDCLNEIGNAFTKDPAHDKSVHSSNNSQVVPSYRNASSRIEDPVKVNGNEMAVASNSELEKVVSDATVKESTKQFQDTSRNVQAETSYSKKAPTTIRRNAGVKRHRSADIEAEGSVINSAKKVVPESWPAKGSVINSAKKVVPESWPAKVIHGEHADPASKNGYSTSCAAELKTNRPKKALICRVTNTVAKRTRGACAKKDDARVSSSLEFSKVTSQENFEIISPKKLDTANADEQRRNSPKKIQNTRVRNRATKRSWKSDTNMSNDTVMDKAETVAAGALSDDLLPTDNVEDWPKKLSSHGSVSDCETLSPKTISKARIRNAASNRKIRTVDHKSGDKFGKIGSAVKSETKAFSSNRTEGISCNISKVIADPDSEKSNKDVVREVSGLFCQDSCTIDKQGSYNSKLRSSTRNKAPTPDHEKENRLGSSDLNSKPNRTGSLRSKSDAKSIKKNTRVLSKHQRGNRSEPCTLITSKPALFILSGNSEQRRGYRSILRRLKGRVCRDSHHWSYQATHFIAPDPLRRTEKFFAAAAAGRWILKREYLTACIEAGKFVDEEPFEWFGTGFNDGRTISFDAPRKWRNIRQQMGHGAFYGMQIVAYGQFILPTLDTVKRAVKAGDGAVLATSPPYTRFLDSGVDFAVVSESISRTDAWVQEFISHGIPCVSADYLVEYVCKPGQPLDRHVLFETNCVASKSLEKLTKKQVEMATAEKSEPSEDDDPEDLSCSACGRRDRGDVMLICGDEAGEAGCGIGMHIDCCDPPLDAVPDDDWMCPRCAVPEPETETKHARGTERRGRGSRRR

SEQ ID NO: 157783 - protein, 88 aa, Zea Mays
MYSTNRCNGTLAKSTSKQRLRSFPISKHHSVTLDKAKRVMVAAAQGFLLHWQMANDSELVGWPSNTFLDKLDHKIPKQAATILKYSEQ

SEQ ID NO: 157784 - protein, 206 aa, Zea Mays
MNCFDMGSGSLACTAKEGVKLYVNNIRSAHLEMVRQRAMEKALADAVTEGLTPSEAAKQAQKISAKATKLAARQAKRILGPIISCGWDFFEAMYFGGSMTEGFLRGTGTLFGTYMGGFHGEERFGKLGYLAGSHLGSWGGGRIGLMIYDIISGLKFMFQSIQPEYESSSYAEDGPEYAESYTNQEDSTYYETSEEKQEESKWFGLF

SEQ ID NO: 157785 - protein, 894 aa, Zea Mays
MSSISILHRSCLRLGLLPFSPLRARATTLRLPLPLPQPRRHLHLPRRSAMSSAASRLSHIAAATGGGGGAAGESNESPPAASAATQEDDGLSSGDMGYRLPPKEIQDIVDAPPLPVLSFSPNKDKILFLKRRALPPLSDIAKPEEKLAGLRIDGNSNTRSRMSFYTGISIHKLLDDGTLGPEKEVHGYPVGARINFVTWSQDGRHISFSIRVDEEDSKSGKLRVWIADVESGEARPLFKSPEIYLNAIFDSFVWVNDCTLLVCTIPATRGDPPHKPSVPSGPKIQSNESKNVVQARTFQDLLKDEYDAKLFDYYATSQLVLASLDGTVKPIGPPAIYTSVDPSPDDKYIMLSSIHRPYSYIVPCGRFPKKVELWTVDGKFIRELCDLPLAEDIPITMSSVRKGKRSINWRPDKPSMLYWVETQDGGDAKVEVSPRDIVYMENAEPINGEHPEILHKLDLRYAGTSWCDESLALVYESWFKTRKIRTWVLSPDKKDVSPRVLFDRSSEDVYSDPGSPMMRRTVMGTYVIAKIKKEDGNIYVLLNGMGATPEGNIPFLDLFDINTGSKERIWESDREKYYETVVALMSDKTDGELLLDQLKILTSKESKTENTQYYLQTWPEKNQVKITNFPHPYPQLASLYKEMIRYQRKDGVQLTANLYLPPGYDSSKDGPLPCLVWSYPGEFKSKDAAGQVRGSPNEFPGIGATSPLLWLARGFVILSGPTIPIIGEGDEEANDRYVEQLVTSAEAAVEEVVKRGVAHPDKIAVGGHSYGAFMTANLLAHAPHLFCCGIARSGAYNRTLTPFGFQNEDRTLWEATNTYVEMSPFMSANKIKKPILLIHGEQDNNSGTLTMQSDRFFNALKGHGALSRLVILPFESHGYSARESIMHVLWETDS

SEQ ID NO: 157786 - protein, 871 aa, Zea Mays
MSSISILHRSCLRLGLSSGDMGYRLPPKEIQDIVDAPPLPVLSFSPNKDKILFLKRRALPPLSDIAKPEEKLAGLRIDGNSNTRSRMSFYTGISIHKLLDDGTLGPEKEVHGYPVGARINFVTWSQDGRHISFSIRVDEEDSKSGKLRVWIADVESGEARPLFKSPEIYLNAIFDSFVWVNDCTLLVCTIPATRGDPPHKPSVPSGPKIQSNESKNVVQARTFQDLLKDEYDAKLFDYYATSQLVLASLDGTVKPIGPPAIYTSVDPSPDDKYIMLSSIHRPYSYIVPCGRFPKKVELWTVDGKFIRELCDLPLAEDIPITMSSVRKGKRSINWRPDKPSMLYWVETQDGGDAKVEVSPRDIVYMENAEPINGEHPEILHKLDLRYAGTSWCDESLALVYESWFKTRKIRTWVLSPDKKDVSPRVLFDRSSEDVYSDPGSPMMRRTVMGTYVIAKIKKEDGNIYVLLNGMGATPEGNIPFLDLFDINTGSKERIWESDREKYYETVVALMSDKTDGELLLDQLKILTSKESKTENTQYYLQTWPEKNQVKITNFPHPYPQLASLYKEMIRYQRKDGVQLTANLYLPPGYDSSKDGPLPCLVWSYPGEFKSKDAAGQVRGSPNEFPGIGATSPLLWLARGFVILSGPTIPIIGEGDEEANDRYVEQLVTSAEAAVEEVVKRGVAHPDKIAVGGHSYGAFMTANLLAHAPHLFCCGIARSGAYNRTLTPFGFQNEDRTLWEATNTYVEMSPFMSANKIKKPILLIHGEQDNNSGTLTMQSDRFFNALKGHGALSRLVILPFESHGYSARESIMHVLWETDRWLQNYCVNGTSKVDSVSEADSKNKTLSASGGSAAREGLNPEELSSLPRSLLW

SEQ ID NO: 157787 - protein, 869 aa, Zea Mays
MKLTMGVVTGHTAGLSSGDMGYRLPPKEIQDIVDAPPLPVLSFSPNKDKILFLKRRALPPLSDIAKPEEKLAGLRIDGNSNTRSRMSFYTGISIHKLLDDGTLGPEKEVHGYPVGARINFVTWSQDGRHISFSIRVDEEDSKSGKLRVWIADVESGEARPLFKSPEIYLNAIFDSFVWVNDCTLLVCTIPATRGDPPHKPSVPSGPKIQSNESKNVVQARTFQDLLKDEYDAKLFDYYATSQLVLASLDGTVKPIGPPAIYTSVDPSPDDKYIMLSSIHRPYSYIVPCGRFPKKVELWTVDGKFIRELCDLPLAEDIPITMSSVRKGKRSINWRPDKPSMLYWVETQDGGDAKVEVSPRDIVYMENAEPINGEHPEILHKLDLRYAGTSWCDESLALVYESWFKTRKIRTWVLSPDKKDVSPRVLFDRSSEDVYSDPGSPMMRRTVMGTYVIAKIKKEDGNIYVLLNGMGATPEGNIPFLDLFDINTGSKERIWESDREKYYETVVALMSDKTDGELLLDQLKILTSKESKTENTQYYLQTWPEKNQVKITNFPHPYPQLASLYKEMIRYQRKDGVQLTANLYLPPGYDSSKDGPLPCLVWSYPGEFKSKDAAGQVRGSPNEFPGIGATSPLLWLARGFVILSGPTIPIIGEGDEEANDRYVEQLVTSAEAAVEEVVKRGVAHPDKIAVGGHSYGAFMTANLLAHAPHLFCCGIARSGAYNRTLTPFGFQNEDRTLWEATNTYVEMSPFMSANKIKKPILLIHGEQDNNSGTLTMQSDRFFNALKGHGALSRLVILPFESHGYSARESIMHVLWETDRWLQNYCVNGTSKVDSVSEADSKNKTLSASGGSAAREGLNPEELSSLPRSLL

SEQ ID NO: 157788 - protein, 456 aa, Zea Mays
MENAEPINGEHPEILHKLDLRYAGTSWCDESLALVYESWFKTRKIRTWVLSPDKKDVSPRVLFDRSSEDVYSDPGSPMMRRTVMGTYVIAKIKKEDGNIYVLLNGMGATPEGNIPFLDLFDINTGSKERIWESDREKYYETVVALMSDKTDGELLLDQLKILTSKESKTENTQYYLQTWPEKNQVKITNFPHPYPQLASLYKEMIRYQRKDGVQLTANLYLPPGFVILSGPTIPIIGEGDEEANDRYVEQLVTSAEAAVEEVVKRGVAHPDKIAVGGHSYGAFMTANLLAHAPHLFCCGIARSGAYNRTLTPFGFQNEDRTLWEATNTYVEMSPFMSANKIKKPILLIHGEQDNNSGTLTMQSDRFFNALKGHGALSRLVILPFESHGYSARESIMHVLWETDRWLQNYCVNGTSKVDSVSEADSKNKTLSASGGSAAREGLNPEELSSLPRSLLW

SEQ ID NO: 157789 - protein, 50 aa, Zea Mays
MGGLNKFHGQHALRERARKLDQGILIIRMHMVCKWRICYCSMKWRHAPKS

SEQ ID NO: 157790 - protein, 50 aa, Zea Mays
MMDKNAYGLQMENLLLLNEVAACSKILVRPLHLWSDPRPRMSMLCVCTNS

SEQ ID NO: 157791 - protein, 77 aa, Zea Mays
MMDKVHHHNNRIFLHPGYLVLIHPFCAPIILNAYGLQMENLLLLNEVAACSKILVRPLHLWSDPRPRMSMLCVCTNS

SEQ ID NO: 157792 - protein, 250 aa, Zea Mays
MAGSSFPRIIHSSRRPSCYSRGRFEIQKKICLSISNYHPEHWQPSWSVRTALVALIAFMPTNPGGALGSLDYKKEDRRALGIKSREAPPKFGSPERQKLIDEIHEQMLSKAPPVPQTLPNVPNEESNELPASDPSGEHADKVDEGDNTSGSVSDSSSGLPVPESESGVTENTGETSAVEVANHHVPEASHRENIPRVSSSHQNPAVAIQKPNHDRLLTLAAFGLTLAIMALVIKKFLKINGLGGFIEGKF

SEQ ID NO: 157793 - protein, 251 aa, Zea Mays
METMAKYNRSNPAVKRILQEVKEMQSNPSPDFMALPLEEDIFEWQFAILGPRDSEFEGGIYHGRIQLPSDYPFKPPSFMLLTPSGRFEIQKKICLSISNYHPEHWQPSWSVRTALVALIAFMPTNPGGALGSLDYKKEDRRALGIKSREAPPKFGSPERQKLIDEIHEQMLSKAPPVPQTLPNVPNEESNELPASDPSGEHADKKTLVKPQQLRLPTIMCLKQATERTFQELVRLTRILLLRSRSQIMTGC

SEQ ID NO: 157794 - protein, 89 aa, Zea Mays
MLLTPSGRFEIQKKICLSISNYHPEHWQPSWSVRTALVALIAFMPTNPGGALGSLDYKKEDRRALGIKSREAPPKFGSPERQKLIDETR

SEQ ID NO: 157795 - protein, 226 aa, Zea Mays
MSSESSSNTSRSSTSKTSGSISSSSSTSLHSEDIVEKGSCTSARHRTKRGHAKCKKLEKGGPRRLTFDKNGIAQSPVKHVNEFSSYYGYIAHMRVDIRIKDWRKVPKVVKANLWEDVSKKFVMPREETHTLNVKKVALKSMSHAWKDFKWKLNINYVKKDKTPFEDYPELKKEWWPNFVEWVTSDDYIALGEKGKKSQSMNPSKTRSPKLYCTKEKMGKGRCTSIN

SEQ ID NO: 157796 - protein, 357 aa, Zea Mays
MFIWSSTSKTSGSISSSSSTSLHSEDIVEKGSCTSARHRTKRGHAKCKKLEKGGPRRLTFDKNGIAQSPVKHVNEFSSYYGYIAHMRVDIRIKDWRKVPKVVKANLWEDVSKKFVMPREETHTLNVKKVALKSMSHAWKDFKWKLNINYVKKDKTPFEDYPELKKEWWPNFVEWVTSDDYIALGEKGKKSQSMNPSKTRSPKLYYMPDGHHKDWASARNPSGDVKITESHPIIKKIVDLNEKSVAGTFTPLDNMDILATTIGSNHPGRTTGEAMKCKLVAQIGLHSVVVARGQAYPPKDVVTVHGIERRDDHTKCRLILCLKTSWIFRSLNQSLVVICSLLGKPKIHLCYGLSQAYN

SEQ ID NO: 157797 - protein, 219 aa, Zea Mays
MFIWSSTSKTSGSISSSSSTSLHSEDIVEKGSCTSARHRTKRGHAKCKKLEKGGPRRLTFDKNGIAQSPVKHVNEFSSYYGYIAHMRVDIRIKDWRKVPKVVKANLWEDVSKKFVMPREETHTLNVKKVALKSMSHAWKDFKWKLNINYVKKDKTPFEDYPELKKEWWPNFVEWVTSDDYIALGEKGKKSQSMNPSKTRSPKLYCTKEKMGKGRCTSIN

SEQ ID NO: 157798 - protein, 222 aa, Zea Mays
MGRAPSGAWNMALLGLAVAVVLAVAAEARSLEKQNLCGGCGLGGGGGYGSGGGLGHGVGFGGGKGGGFGGGAGGGAGGGLGGGGGLGGGEGGGYGGGAGRGAGGGGGLGGGEGGGYGGGAGGGAGGGGGLGGGSGGGLGGGEGGGGGLGGGGGAGAGGGYGGGAGAGSGSGGGYGGGAGGGYGGGAGAGSGSGLGSGGGGGYGGGAGGGGGGGGGGGIGGGV

SEQ ID NO: 157799 - protein, 741 aa, Zea Mays
MGPPFFLLFLVLTAAAVVSSAPRREAFRRDPGHPHWHHGAFHDVEDSVRADVRRMLHTRAEVPFQVPLEVNVVLIGFNGDGGYRYSLDGHKLEEFLKMGFPLHRPSCFETGEPIDIEHHIMYNVISAGQPELISLEKSLKEAMQPAGIARDSEYGRELPLFEVEATAVESIFQRLYSFIFDMEPGYPANDMDRPVPVAIFIVNFDKVRMDPRNKEVNLDSLMYGTIGGLTEQELKKQEAEYIYRYRYNGGGATQVWLSSGRFVVIDLSAGPCTYGKIETEEGSVSYRSMPRLSQIIFPRGLAAPSASSTQDIFIGQLGGAIATTIEHVIAPDIRFETVDMAVRLLVPIIVLQNHNRYNILQEGHNYSIDVQAIEREEMERSADVLSAGLLEVANPSLSSRFFLKQHWTDGEDDVKDSIKHRPLWESYMPKNNKGRRGTGKKKHGSLYRTYGTRVIPVFVLSLAGVDAELLMEEESLVWTSKDVVIVLEHNNEKIPLSYVSETTRQFALPSIAQRHILAGLASAVGGLSAPYERASRIHERHVVNWLWAAGCHPFGPFSNSSQISQILQDVALRTTIYAQVDAALRKIRDTSEFVQSFASEHLKTPLGELVKGNKNKSTTELWVEKFYKKVTNLPEPFPHDLVEKLEEYLDKLEGQLVDLSSLLYDHRLVDAYQNSTDILQSTIFTQQYVERVLANERDKMKCCSIEYSHPKQSSQAFVYGGILLAGFLVYSLVIFFSSPVR

SEQ ID NO: 157800 - protein, 425 aa, Zea Mays
MVHPGQEVIIISGSHALHQHEKLAVAVSKATRSHSLHETKSDGRFHVRTKTYLDGAILKEEMERSADVLSAGLLEVANPSLSSRFFLKQHWTDGEDDVKDSIKHRPLWESYMPKNNKGRRGTGKKKHGSLYRTYGTRVIPVFVLSLAGVDAELLMEEESLVWTSKDVVIVLEHNNEKIPLSYVSETTRQFALPSIAQRHILAGLASAVGGLSAPYERASRIHERHVVNWLWAAGCHPFGPFSNSSQISQILQDVALRTTIYAQVDAALRKIRDTSEFVQSFASEHLKTPLGELVKGNKNKSTTELWVEKFYKKVTNLPEPFPHDLVEKLEEYLDKLEGQLVDLSSLLYDHRLVDAYQNSTDILQSTIFTQQYVERVLANERDKMKCCSIEYSHPKQSSQAFVYGGILLAGFLVYSLVIFFSSPVR

SEQ ID NO: 157801 - protein, 578 aa, Zea Mays
MTWIGLFLLRYLLLILIRMDPRNKEVNLDSLMYGTIGGLTEQELKKQEAEYIYRYRYNGGGATQVWLSSGRFVVIDLSAGPCTYGKIETEEGSVSYRSMPRLSQIIFPRGLAAPSASSTQDIFIGQLGGAIATTIEHVIAPDIRFETVDMAVRLLVPIIVLQNHNRYNILQEGHNYSIDVQAIEREVKKMVHPGQEVIIISGSHALHQHEKLAVAVSKATRSHSLHETKSDGRFHVRTKTYLDGAILKEEMERSADVLSAGLLEVANPSLSSRFFLKQHWTDGEDDVKDSIKHRPLWESYMPKNNKGRRGTGKKKHGSLYRTYGTRVIPVFVLSLAGVDAELLMEEESLVWTSKDVVIVLEHNNEKIPLSYVSETTRQFALPSIAQRHILAGLASAVGGLSAPYERASRIHERHVVNWLWAAGCHPFGPFSNSSQISQILQDVALRTTIYAQVDAALRKIRDTSEFVQSFASEHLKTPLGELVKGNKNKSTTELWVEKFYKKVTNLPEPFPHDLVEKLEEYLDKLEGQLVDLSSLLYDHRLVDAYQNSTDILQSTIFTQQYVYTEMLYSHLATLVLSF

SEQ ID NO: 157802 - protein, 724 aa, Zea Mays
MALSTMSRTVSAPTSAACSTPEQRPSCFETGEPIDIEHHIMYNVISAGQPELISLEKSLKEAMQPAGIARDSEYGRELPLFEVEATAVESIFQRLYSFIFDMEPGYPANDMDRPVPVAIFIVNFDKVRMDPRNKEVNLDSLMYGTIGGLTEQELKKQEAEYIYRYRYNGGGATQVWLSSGRFVVIDLSAGPCTYGKIETEEGSVSYRSMPRLSQIIFPRGLAAPSASSTQDIFIGQLGGAIATTIEHVIAPDIRFETVDMAVRLLVPIIVLQNHNRYNILQEGHNYSIDVQAIEREVKKMVHPGQEVIIISGSHALHQHEKLAVAVSKATRSHSLHETKSDGRFHVRTKTYLDGAILKEEMERSADVLSAGLLEVANPSLSSRFFLKQHWTDGEDDVKDSIKHRPLWESYMPKNNKGRRGTGKKKHGSLYRTYGTRVIPVFVLSLAGVDAELLMEEESLVWTSKDVVIVLEHNNEKIPLSYVSETTRQFALPSIAQRHILAGLASAVGGLSAPYERASRIHERHVVNWLWAAGCHPFGPFSNSSQISQILQDVALRTTIYAQVDAALRKIRDTSEFVQSFASEHLKTPLGELVKGNKNKSTTELWVEKFYKKVTNLPEPFPHDLVEKLEEYLDKLEGQLVDLSSLLYDHRLVDAYQNSTDILQSTIFTQQYVERVLANERDKMKCCSIEYSHPKQSSQAFVYGGILLAGFLVYSLVIFFSSPVR

SEQ ID NO: 157803 - protein, 804 aa, Zea Mays
MARHLAPSSGSLHRLLASCHYPPTSQAPPPRPLLLPKTRSAAMQLPRRGRRDVVAAAAASAPSPSSPGTEVAVWGKVSAVLFDMDGVLCNSEEPSRQAGVDVFAEMGVEVAVDDFVPFMGTGEANFLGGVARAKGVKDFNPESAKKRFFEIYLDKYAKPNSGIGFPGALELILECKNSGLKVAVASSADRIKVDANLAAAGLSVFLFDAIVSADAFEKLKPAPDIFLAASKSLGVDTNECIVIEDALAGVQAANAAEMRCIAVTTTLEEIALRQGSPSFIRKNIGDISINDILYGGSNARHNEGAGSTENSSSVGNALSESLNGATAAGHSDTKGFPISKNKGLLGSRREILRYGSLGIALSCLFVAVRNWKAMQFASPKGLLNFLMGGNSSVFARNEGESLSSRVQQIKKYLAEFESGGSATYVPEFPRKLDWLNTAPLQFGRDLKGRVVLLDFWTYCCINCMHVLPDLDFVEKKYKEKPFTVVGVHSAKFDNEKDLEAIRNAVLRYNITHPVVNDGDMYLWRELGVNSWPTFVLIGPNGKVLAQISGEGHRKDLDEVIGAALEFYEEKKLLQNDPLPLALEKDKDSRLLTSPLKFPGKLAVDVQNNRLFISDSNHNRIVVTNLEGQFIYQVGSSEEGLLDGPFDAALFNRPQGIAYNSKRNILYVADTENHALREINFVDETVRTLAGNGTKGSDYRGGGQGTNQVLNSPWDVCYDPAEEAVYIAMAGQHQIWKHNLHDGITKVISGDGYERNLNGSSATSTSFAQPSGISLAFEMHELLVADSESSSIRVVNLKTGGSRLL

SEQ ID NO: 157804 - protein, 415 aa, Zea Mays
MARHLAPSSGSLHRLLASCHYPPTSQAPPPRPLLLPKTRSAAMQLPRRGRRDVVAAAAASAPSPSSPGTEVAVWGKVSAVLFDMDGVLCNSEEPSRQAGVDVFAEMGVEVAVDDFVPFMGTGEANFLGGVARAKGVKDFNPESAKKRFFEIYLDKYAKPNSGIGFPGALELILECKNSGLKVAVASSADRIKVDANLAAAGLSVFLFDAIVSADAFEKLKPAPDIFLAASKSLGVDTNECIVIEDALAGVQAANAAEMRCIAVTTTLEEIALRQGSPSFIRKNIGDISINDILYGGSNARHNEGAGSTENSSSVGNALSESLNGATAAGHSDTKGFPISKNKGLLGSRREILRYGSLGIALSCLFVAVRNWKAMQFASPKGLLNFLMGGNSSVFARNEGFERKSGAAGFLDILLH

SEQ ID NO: 157805 - protein, 341 aa, Zea Mays
MHVLPDLDFVEKKYKEKPFTVVGVHSAKFDNEKDLEAIRNAVLRYNITHPVVNDGDMYLWRELGVNSWPTFVLIGPNGKVLAQISGEGHRKDLDEVIGAALEFYEEKKLLQNDPLPLALEKDKDSRLLTSPLKFPGKLAVDVQNNRLFISDSNHNRIVVTNLEGQFIYQVGSSEEGLLDGPFDAALFNRPQGIAYNSKRNILYVADTENHALREINFVDETVRTLAGNGTKGSDYRGGGQGTNQVLNSPWDVCYDPAEEAVYIAMAGQHQIWKHNLHDGITKVISGDGYERNLNGSSATSTSFAQPSGISLAFEMHELLVADSESSSIRVVNLKTGGSRLL

SEQ ID NO: 157806 - protein, 689 aa, Zea Mays
MVGSDNNPATMTAAEKLDFLVNQVTSLTDLGTKLSAQMETLNRRMDSHDMRLARLETSAGKQLLIPPASSGLGGLTQEDRDADEEDEATGDLEPCWSGAAPSWAGAVHGKVAETILAGRTATTASTTGTIDTRFLMVDYLTTTVTIMRRVMEGAQLTLEQRAAGAQQGSRRGGRRRWRRLCHRACLSCHAVQSGRHDCNRPRNAGREGGCAAGVEDEQRCQRRPTTWDRWPRWVQRQQQELLPEVRRSAGEGRRAFLGGTGKGRADPIVGSAPFALSSGGFPIGGFRASQGGVASSKGCALPICGCVIRRVVDVGVMGDDRIDGLNRERDLKGRVVLLDFWTYCCINCMHVLPDLDFVEKKYKEKPFTVVGVHSAKFDNEKDLEAIRNAVLRYNITHPVVNDGDMYLWRELGVNSWPTFVLIGPNGKVLAQISGEGHRKDLDEVIGAALEFYEEKKLLQNDPLPLALEKDKDSRLLTSPLKFPGKLAVDVQNNRLFISDSNHNRIVVTNLEGQFIYQVGSSEEGLLDGPFDAALFNRPQGIAYNSKRNILYVADTENHALREINFVDETVRTLAGNGTKGSDYRGGGQGTNQVLNSPWDVCYDPAEEAVYIAMAGQHQIWKHNLHDGITKVISGDGYERNLNGSSATSTSFAQPSGISLAFEMHELLVADSESSSIRVVNLKTGGSRLL

SEQ ID NO: 157807 - protein, 637 aa, Zea Mays
MTAAEKLDFLVNQVTSLTDLGTKLSAQMETLNRRMDSHDMRLARLETSAGKQLLIPPASSGLGGLTQEDRDADEEDEATGDLEPCWSGAAPSWAGAVHGKVAETILAGRTATTASTTGTIDTRFLMVDYLTTTVTIMRRVMEGAQLTLEQRAAGAQQGSRRGGRRRWRRLCHRACLSCHAVQSGRHDCNRPRNAGREGGCAAGVEDEQRCQRRPTTWDRWPRWVQRQQQELLPEVRRSAGEGRRAFLGGTGKGRADPIVGSAPFALSSGGFPIGGFRASQGGVASSKGCALPICGCVIRRVVDVGVMGDDRIDGLNRERDLKGRVVLLDFWTYCCINCMHVLPDLDFVEKKYKEKPFTVVGVHSAKFDNEKDLEAIRNAVLRYNITHPVVNDGDMYLWRELGVNSWPTFVLIGPNGKVLAQISGEGHRKDLDEVIGAALEFYEEKKLLQNDPLPLALEKDKDSRLLTSPLKFPGKLAVDVQNNRLFISDSNHNRIVVTNLEGQFIYQVGSSEEGLLDGPFDAALFNRPQGIAYNSKRNILYVADTENHALREINFVDETVRTLAGNGTKGSDYRGGGQGTNQVLNSPWDVCYDPAEEAVYIAMAGQHQIWKHNLHDGITKVISGDGYERNLNGSRNA

SEQ ID NO: 157808 - protein, 140 aa, Zea Mays
MLQIKKLDPVTRKVTTIAGTGSAGYRDGPGLTAQLSEPAGLVEVGDGRLLVADTNNNTIRYITLSDKGAEVKTLELIGVQPPSPKPKVLKRLRRRLSADTDVINVDGGSSKEGFLSLAVTVPDGYHFSKHSTVLVLKFFR

SEQ ID NO: 157809 - protein, 140 aa, Zea Mays
MFLRRILTGGGGLAALRAARAVKETTGIVGLEVVPNAREVLICQEEEDWKRIEDRIGCGQVEELIEEAEDELKLIAKMIEWDPWGVPDDYECEVIEDDTPIPKHVPQHRPVALPEEFFKALDAVKSDPALQGDAPPQVKA

SEQ ID NO: 157810 - protein, 326 aa, Zea Mays
MFPAMIDICTALCSLATQNSGYPMLARTHGQPASPTTVGKEMANFAARLSDIGKSFSEVKILGKFAGAVGNYNADVVAYPEVDWPKVAEEFVRSLGLQLNPYVTQIEPHDYISKLFNLFTQFNNVLTDFDRDMWSYISLGYFKQIPKAGEVGSSTMPHKINPIDFENSDGNLCLANSVLSGISMKLPISRMQRDLTDSTVLRNLGMGLGHSLLAYKATIRGISKVQVNEARLAEDLEQTWEVLAEPIQTVMRRYGIPEPYEKLKELTRGQAVTKDSMQQFIDGLDIPGEVRAKLSKLTPHSYTGLAEDLARYIEKWVDLESGFQIK

SEQ ID NO: 157811 - protein, 536 aa, Zea Mays
MGTERKRKVSLFDVVDETSVSAKLRAASNGAAATATGGNPSVNRWNGRPYTARYFDILEKRRTLPVWQQKEEFLRSLRDNQTLILVGETGSGKTTQIPQFVLETEGLGNRSMVACTQPRRVAAMSVSRRVAEEMDVTIGEEVGYSIRFEDCSSHKTVLKYLTDGMLLREAMADPLLEKYKVIVLDEAHERTLATDVLFGLLKEVLKNRPDLKLVVMSATLEAEKFQGYFNGAPLMKVPGRLHPVEIFYTQEPERDYLEAAIRTVMQIHMCEPAGDILVFLTGEEEIEDACRKINKETNNMGDQVGPVKVVPLYSTLPPAMQQKIFEPAPAPLKEGGPPGRKIVVSTNIAETSLTIDGIVYVIDPGFSKQKVYNPRIRVESLLVSPISKASAHQRAGRAGRTQPGKCFRLYTEKSFNEDLQPQTYPEILRSNLANTVLTLKKLGIDDLVHFDFMDPPAPETLMRALEVLNYLGALDDEGNLTQLGEMMSEFPLDPQMSKMLVISPKYNCSNEILSVSAMLSDNCCLLNGIVSPLCIC

SEQ ID NO: 157812 - protein, 372 aa, Zea Mays
MLLREAMADPLLEKYKVIVLDEAHERTLATDVLFGLLKEVLKNRPDLKLVVMSATLEAEKFQGYFNGAPLMKVPGRLHPVEIFYTQEPERDYLEAAIRTVMQIHMCEPAGDILVFLTGEEEIEDACRKINKETNNMGDQVGPVKVVPLYSTLPPAMQQKIFEPAPAPLKEGGPPGRKIVVSTNIAETSLTIDGIVYVIDPGFSKQKVYNPRIRVESLLVSPISKASAHQRAGRAGRTQPGKCFRLYTEKSFNEDLQPQTYPEILRSNLANTVLTLKKLGIDDLVHFDFMDPPAPETLMRALEVLNYLGALDDEGNLTQLGEMMSEFPLDPQMSKMLVISPKYNCSNEILSVSAMLSDNCCLLNGIVSPLCIC

SEQ ID NO: 157813 - protein, 528 aa, Zea Mays
MGTERKRKVSLFDVVDETSVSAKLRAASNGAAATATGGNPSVNRWNGRPYTARYFDILEKRRTLPVWQQKEEFLRSLRDNQTLILVGETGSGKTTQIPQFVLETEGLGNRSMVACTQPRRVAAMSVSRRVAEEMDVTIGEEVGYSIRFEDCSSHKTVLKYLTDGMLLREAMADPLLEKYKVIVLDEAHERTLATDVLFGLLKEVLKNRPDLKLVVMSATLEAEKFQGYFNGAPLMKVPGRLHPVEIFYTQEPERDYLEAAIRTVMQIHMCEPAGDILVFLTGEEEIEDACRKINKETNNMGDQVGPVKVVPLYSTLPPAMQQKIFEPAPAPLKEGGPPGRKIVVSTNIAETSLTIDGIVYVIDPGFSKQKVYNPRIRVESLLVSPISKASAHQRAGRAGRTQPGKCFRLYTEKSFNEDLQPQTYPEILRSNLANTVLTLKKLGIDDLVHFDFMDPPAPETLMRALEVLNYLGALDDEGNLTQLGEMMSEFPLDPQMSKMLVISPKYNCSNEILSVSAMLSGMLVVTEG

SEQ ID NO: 157814 - protein, 88 aa, Zea Mays
MNCSSGHFFAMVKRFQSFSQMSFSRMGQGCGDLVLTLLVRKLQNALTSLDNFPVIMSHHFKLRSSIADIYKALNNYSMYPSKIQEIRR

SEQ ID NO: 157815 - protein, 86 aa, Zea Mays
MNCSSGHFFAMVKRFQSFSQMSFSRMGQGCGDLVLTLLVRKLQNALTSLDNFPVIMSHHFKLRSSIADIYKALNNYSMYPNLVLLL

SEQ ID NO: 157816 - protein, 767 aa, Zea Mays
MHSRTVQFRKYRECFRRLQYCEVAIRRQRADFLCSFLSYLATMRLPPVRFLPSSSTPAVVDANARIARLARTGNMEGARATFEAMPLRTTASYNALLAGYFRNHLPDAALRVFHRMPTRDLASYNALISGLSLRRHTLPDAAAALATIPYPPSVVSFTSLLRGYVRHGLLADAIQLFRQMPERNHISYTVLLGGFLDAGRVDEARKLFDEMPAKDVVAWTAMLSGYCQVGRVDEARTLFDEMPKRNVVSWTAMVSGYAQNGQVNLARKLFEVMPERNEVSWTAMLFGYIQAGRIEDAEELFNAMPDHPLAACNGMIVGFGQQGMVDAAKSVFDRMCERDDGTWSAIIKAYEQNEFLMEALSTFREMLHIGIRPNYPSVISILTVCAALAVLDYGREVHGAMLRRSFDMDIYAVSALITMYIKCGNLDKAKRVFHMFEPKDVVMWNSMITGYAQHGLGEEALHIFDDMRLAGMVPDGITYIGALTACSYTGKVKEGRDIFNSMRTKSGIKPGLEHYACMVDLLGRAGLVDEALYLIKTMPVEPDAVIWGALMGACRMHKNAEIAEISAKKLLELEPGNAGPYVLLSHIYTSSGRWEDASNMRKFISSRHLNKSLGCSWIEYDKRVHLFKSGDVLAHQEHASILKMLEKLDGLLMESGYSADGSFVLHDIDDEQKTHSLRYHSERQAVAYGLLKIPEELPIRVMKNLRVCGTIGEVNAVVNSLLHIISLMSLSFGDTWRIIFPLKMRYIQDQHMVNCKSCCNTEPLIST

SEQ ID NO: 157817 - protein, 680 aa, Zea Mays
MRLPPVRFLPSSSTPAVVDANARIARLARTGNMEGARATFEAMPLRTTASYNALLAGYFRNHLPDAALRVFHRMPTRDLASYNALISGLSLRRHTLPDAAAALATIPYPPSVVSFTSLLRGYVRHGLLADAIQLFRQMPERNHISYTVLLGGFLDAGRVDEARKLFDEMPAKDVVAWTAMLSGYCQVGRVDEARTLFDEMPKRNVVSWTAMVSGYAQNGQVNLARKLFEVMPERNEVSWTAMLFGYIQAGRIEDAEELFNAMPDHPLAACNGMIVGFGQQGMVDAAKSVFDRMCERDDGTWSAIIKAYEQNEFLMEALSTFREMLHIGIRPNYPSVISILTVCAALAVLDYGREVHGAMLRRSFDMDIYAVSALITMYIKCGNLDKAKRVFHMFEPKDVVMWNSMITGYAQHGLGEEALHIFDDMRLAGMVPDGITYIGALTACSYTGKVKEGRDIFNSMRTKSGIKPGLEHYACMVDLLGRAGLVDEALYLIKTMPVEPDAVIWGALMGACRMHKNAEIAEISAKKLLELEPGNAGPYVLLSHIYTSSGRWEDASNMRKFISSRHLNKSLGCSWIEYDKRVHLFKSGDVLAHQEHASILKMLEKLDGLLMESGYSADGSFVLHDIDDEQKTHSLRYHSERQAVAYGLLKIPEELPIRVMKNLRVCGTIGEETHGGLYFR

SEQ ID NO: 157818 - protein, 424 aa, Zea Mays
MSDHVRTMRHLEEDDEIDDELDQIMALMMGQYKKRKNGQRKKRRGSVFGHKVHDRSRQEHDRKLFQDYFAENPTYPEKFFRRRFRMSSSLFKRIAKAVEKHDEYFVQDRNAAGVLGFSCLQKVTAAFRQLAYGVPADYVDEYLRIGESTAIESLRKFVKAVCEVFGPQYLRAPNEDDTARLLSIAEQRGFPGMLGSIDCMHWKWKNCPTAYQGTYCGHVKEPTIILEAVASHDLWIWHAFFGLPGSLNDINVLHRSHLFDRLVEGKAPAVNYTINGHKYDMGYYLADGIYPNWSAFVKSIKAPANEKDQNFTAAQESLRKDVERAFGVLQARFAIVRGPARFWDVATLRNIMKACIIMHNMIIEDERDAGRLEPPYEKSDAETNGWVSHVGTSNLSAFIDKHKDIAHSFFLWLHDPCTSTAKGC

SEQ ID NO: 157819 - protein, 424 aa, Zea Mays
MSAMKRTMRHLEEDDEIDDELDQIMALMMGQYKKRKNGQRKKRRGSVFGHKVHDRSRQEHDRKLFQDYFAENPTYPEKFFRRRFRMSSSLFKRIAKAVEKHDEYFVQDRNAAGVLGFSCLQKVTAAFRQLAYGVPADYVDEYLRIGESTAIESLRKFVKAVCEVFGPQYLRAPNEDDTARLLSIAEQRGFPGMLGSIDCMHWKWKNCPTAYQGTYCGHVKEPTIILEAVASHDLWIWHAFFGLPGSLNDINVLHRSHLFDRLVEGKAPAVNYTINGHKYDMGYYLADGIYPNWSAFVKSIKAPANEKDQNFTAAQESLRKDVERAFGVLQARFAIVRGPARFWDVATLRNIMKACIIMHNMIIEDERDAGRLEPPYEKSDAETNGWVSHVGTSNLSAFIDKHKDIAHSFFLWLHDPCTSTAKGC

SEQ ID NO: 157820 - protein, 343 aa, Zea Mays
MQPPQPQPEPAANRRAPSTCSPAQRRSGGIGCMAGLLRLISPYHRSHHRKRLTAKNAPAARASQAPPPPPSSSSPRKKAAAQQPSASPAASPTKPTVQQLMTTAVRRRRSCDAPRSPTIAPEHRRSSCDSPRAPPPAIIARLMGLEESAPSSPAATLLRPVVPSRPPPPPPAAAPETAAEKRRKLLGALEKCDEDLKTLRRIIAAVRAAEMRAASASEVCPAAAKTTAHAGKGATGTFARDNEHVEQSPSPSPSPPTQQQQHPSPDSVLDAISSPRFPCRKRPSPCTDLDVGGKGGACGAVGSKIVKPSRTLVFSGDYCKIKPGGELPLHAVHYYPVPRRRGG

SEQ ID NO: 157821 - protein, 63 aa, Zea Mays
MKQFSKCNMSLGLNINTHVLNIICIRLLKLTTFSFLPFGLLNPPSMRPCMDLKLLSSTIQPCI

SEQ ID NO: 157822 - protein, 101 aa, Zea Mays
MVKLRNFSLFGCLYIRYFHGKINLHLMSVLDLLKAWFGINFAIYLSRQSTPVFYTITLLGMNQLCLCKECLNGNLVSNMIYFLCFCTSSCSCSRRCTSICI

SEQ ID NO: 157823 - protein, 306 aa, Zea Mays
MHWSWNRCLHGISRSAPPPATSSRHMGQVVVFLVERPNWLVTWYPVHCASQQGPNKGIEGKRRQDWQEGNRGPRANAFKPISVAGERAAAEAMASPDPGHTPAQGEESASPSSWPPRKLQSFTPGLWSQYKAYEDAVVENIKGTIADALVLVREHQAEAIGCATVAGFILFRGPRRFLYRNTFGRLKTEKDLLNDAEQSMMEYQTSIQNLKKESKYTLDKVAIGESDVQRGRTDLRSTGKQIQSLIGSIYKAESTAAGLMDRLRTIPTRQSLELRAEVASMASDLKNQRCALQERINKISEYGVRV

SEQ ID NO: 157824 - protein, 141 aa, Zea Mays
MNIFILCLSFPNRECLLEFREAVSTLIFAAIWYPDLPKLCDLRHIFAERYGNFVEHFVGQEVFAKKTVKFSVLDAMGLSSKPLHRGVKHDISCLSQDSYGPYIAASCMDNIIYLYSVLHMNKGLIKVYTSIKIRVFFRQGH

SEQ ID NO: 157825 - protein, 158 aa, Zea Mays
MNIFILCLSFPNRECLLEFREAVSTLIFAAIWYPDLPKLCDLRHIFAERYGNFVEHFVGQEVFAKKTVKFSVLDAMGLSSKPLHRGVKHDISCLSQDSYGPYIAASCMDNILRHDFKFLKVENLGNQLVQQKGKPKIEVYEKDRKKGAGALTTHARVQ

SEQ ID NO: 157826 - protein, 79 aa, Zea Mays
MTSFMAACLVSIKKTKDLPPDQLQKALRKTFSAEKKKSKIRKALDGTKVIYNVASWGATAVGSIKLETICLVYADEFDC

SEQ ID NO: 157827 - protein, 1798 aa, Zea Mays
MEPAVATAGEGQRFKRIPRQAWSGNLELGPLLNESLDHWPHLNELVQCYKADFVKDDCKYGHYESVASPSFQNQIFEGPDTDIETELQLCNARHSKSEDATEDDTPSTSGRQIYETESSGSSSKVHCSLSPLPAYEAAFDWENERSLIFGQRVPESIPAISNSGLKITVKVLSLSFQAGLVEPFSGTICLYNRDRRERLSEDFYFHMLPTDMQDQGSLDRRGVFSLDAPSPSVCLLIQLEKAATEEGGVTPSVYSRKEPVHLAEKEKQKLQVWSRIMPYKESFAWAMIPLFESNRAGGLSDAASPSSPLAPSLSGSSSQDSIVDPISKLALDGKVNHYSSGSSVIVEISNLNKVKESYIEDSLQDPKRKVHKPVKGVLRLEVEKLHDDHNDVDNASEGGSMANDLNDAGDINNGRSNRSSFDGIHSSVNSIAIAKKDAHHNGHTSNAENVDNFQAFDFRVLTRSEPFSQLFHCLYVYPLTVSLSRKRNLFVRVELRKDDSDIRKPPLEAVHPRERNTMLQKWGHTQIAVGTRMASYHDEVKISLPALLTPQHHLVFTFFHVDLQMKLEAPKPVIIGYSVLPLSTHIQLLSDVSLPILRELVPHYLQESGKERMDYLEDGKTVFRLRLRLCSSLFPINERIRDFFVEYDRHTLHTSPPWGSELLEAINSLKNVESTALLQFLQPILNMLLHLIGDGGETLQVAAFRAMVNILTRVQQESSDGAERNRFLINYVDFAFDDFGDRQAPVYPGLTTVWGSLARSKAKGEDVPPLQLKEGVFRCIMQLFDCLLTEVHERCKKGLSLAKRLNSTLAFFCYDLLSIIEPRQVFELVSLYMDKFAGVCQSVLHDCKLTFLQIICDHDLFVEMPGRDPSDRNYLSSVLIQEIFLTLDHDDLSQRAKAARILVVLICKHEFDARYQKSEDKLYIAQLYFPLIGQILDEMPVFYNLNAIEKREVLVVILQIVRNLDDATLIKAWQQSIARTRLFFKLLEECIIHFEHNKTGDNMLLGASSRSPDVEHPASPKYSERLSPSVNTYLSEASRHEIRPQGTPENGYMWNRVSPQLSSPNQPYSLREALAQAQSSRIGSTARALRESLHPVLRQKMELWEENLSTAVSLEVLGITEKFSVAAGARSITTDYAKLDCVTSILMGLLSRNQSLAFWKAFLPVVYNIFNVHGATLMARENDRFLKQIAFHLLRLAVFRNDSIRKRAVVGLQILVRNSFNYFKNTTRLRVMLTITLSELMSDVQVTQMKFDGSLEESGEARRLRKSLEEMADVRSKDLLKDCGLPVTALEAAPEGSSDNRWSWVEVKHLSKCLVQALDAGLEHALLGSVVTVDRYAAAEGFYKLAMAYAPVPDLHIMWLLHLCDAHQEMQSWAEAAQCAVAVAGVIMQALVGRNDAVWSKEHVASLRKICPIVNTDVSAEASAAEVEGYGASKLTVDSAVKYLQLANKLFTQAELYHFCASIQELIIPVYKSRRAYGQLAKCHTSLTNIYESILEQEASPIPFIDATYYRVGFYGERFGKLNKKEYVFREPRDVRLGDIMEKLSHIYEAKIDGSHTLHIIPDSRQVNADELQPGFCYLQITAVDPVMEDEDLGSRRERIFSLSTGTVRARVFDRFLFDTPFTKNGKTQGGLEDQWKRRTVLQTEGSFPALVNRLPVIKSESLEFSPVENAIGMIETRTAALRNELEEPRSSEGDQLPRLQSLQRILQGSVAVQVNSGVLSVCTAFLSGEPATRLRSQELQQLIAALLEFMAVCKRAIRVHFRLIGEEDQEFHTQLVNGFQSLTAELSHYIPAILSEL

SEQ ID NO: 157828 - protein, 607 aa, Zea Mays
MEPAVATAGEGQRFKRIPRQAWSGNLELGPLLNESLDHWPHLNELVQCYKADFVKDDCKYGHYESVASPSFQNQIFEGPDTDIETELQLCNARHSKSEDATEDDTPSTSGRQIYETESSGSSSKVHCSLSPLPAYEAAFDWENERSLIFGQRVPESIPAISNSGLKITVKVLSLSFQAGLVEPFSGTICLYNRDRRERLSEDFYFHMLPTDMQDQGSLDRRGVFSLDAPSPSVCLLIQLEKAATEEGGVTPSVYSRKEPVHLAEKEKQKLQVWSRIMPYKESFAWAMIPLFESNRAGGLSDAASPSSPLAPSLSGSSSQDSIVDPISKLALDGKVNHYSSGSSVIVEISNLNKVKESYIEDSLQDPKRKVHKPVKGVLRLEVEKLHDDHNDVDNASEGGSMANDLNDAGDINNGRSNRSSFDGIHSSVNSIAIAKKDAHHNGHTSNAENVDNFQAFDFRVLTRSEPFSQLFHCLYVYPLTVSLSRKRNLFVRVELRKDDSDIRKPPLEAVHPRERNTMLQKWGHTQIAVGTRMASYHDEVKISLPALLTPQHHLVFTFFHVDLQMKLEAPKPVIIGYSVLPLSTHIHMQRYCGEFWISNSTWICFIL

SEQ ID NO: 157829 - protein, 1734 aa, Zea Mays
MEPAVATAGEGQRFKRIPRQAWSGNLELGPLLNESLDHWPHLNELVQCYKADFVKDDCKYGHYESVASPSFQNQIFEGPDTDIETELQLCNARHSKSEDATEDDTPSTSGRQIYETESSGSSSKVHCSLSPLPAYEAAFDWENERSLIFGQRVPESIPAISNSGLKITVKVLSLSFQAGLVEPFSGTICLYNRDRRERLSEDFYFHMLPTDMQDQGSLDRRGVFSLDAPSPSVCLLIQLEKAATEEGGVTPSVYSRKEPVHLAEKEKQKLQVWSRIMPYKESFAWAMIPLFESNRAGGLSDAASPSSPLAPSLSGSSSQDSIVDPISKLALDGKVNHYSSGSSVIVEISNLNKVKESYIEDSLQDPKRKVHKPVKGVLRLEVEKLHDDHNDVDNASEGGSMANDLNDAGDINNGRSNRSSFDGIHSSVNSIAIAKKDAHHNGHTSNAENVDNFQAFDFRVLTRSEPFSQLFHCLYVYPLTVSLSRKRNLFVRVELRKDDSDIRKPPLEVIIGYSVLPLSTHIQLLSDVSLPILRELVPHYLQESGKERMDYLEDGKTVFRLRLRLCSSLFPINERIRDFFVEYDRHTLHTSPPWGSELLEAINSLKNVESTALLQFLQPILNMLLHLIGDGGETLQVAAFRAMVNILTRVQQESSDGAERNRFLINYVDFAFDDFGDRQAPVYPGLTTVWGSLARSKAKGEDVPPLQLKEGVFRCIMQLFDCLLTEVHERCKKGLSLAKRLNSTLAFFCYDLLSIIEPRQVFELVSLYMDKFAGVCQSVLHDCKLTFLQIICDHDLFVEMPGRDPSDRNYLSSVLIQEIFLTLDHDDLSQRAKAARILVVLICKHEFDARYQKSEDKLYIAQLYFPLIGQILDEMPVFYNLNAIEKREVLVVILQIVRNLDDATLIKAWQQSIARTRLFFKLLEECIIHFEHNKTGDNMLLGASSRSPDVEHPASPKYSERLSPSVNTYLSEASRHEIRPQGTPENGYMWNRVSPQLSSPNQPYSLREALAQAQSSRIGSTARALRESLHPVLRQKMELWEENLSTAVSLEVLGITEKFSVAAGARSITTDYAKLDCVTSILMGLLSRNQSLAFWKAFLPVVYNIFNVHGATLMARENDRFLKQIAFHLLRLAVFRNDSIRKRAVVGLQILVRNSFNYFKNTTRLRVMLTITLSELMSDVQVTQMKFDGSLEESGEARRLRKSLEEMADVRSKDLLKDCGLPVTALEAAPEGSSDNRWSWVEVKHLSKCLVQALDAGLEHALLGSVVTVDRYAAAEGFYKLAMAYAPVPDLHIMWLLHLCDAHQEMQSWAEAAQCAVAVAGVIMQALVGRNDAVWSKEHVASLRKICPIVNTDVSAEASAAEVEGYGASKLTVDSAVKYLQLANKLFTQAELYHFCASIQELIIPVYKSRRAYGQLAKCHTSLTNIYESILEQEASPIPFIDATYYRVGFYGERFGKLNKKEYVFREPRDVRLGDIMEKLSHIYEAKIDGSHTLHIIPDSRQVNADELQPGFCYLQITAVDPVMEDEDLGSRRERIFSLSTGTVRARVFDRFLFDTPFTKNGKTQGGLEDQWKRRTVLQTEGSFPALVNRLPVIKSESLEFSPVENAIGMIETRTAALRNELEEPRSSEGDQLPRLQSLQRILQGSVAVQVNSGVLSVCTAFLSGEPATRLRSQELQQLIAALLEFMAVCKRAIRVHFRLIGEEDQEFHTQLVNGFQSLTAELSHYIPAILSEL

SEQ ID NO: 157830 - protein, 615 aa, Zea Mays
MEPAVATAGEGQRFKRIPRQAWSGNLELGPLLNESLDHWPHLNELVQCYKADFVKDDCKYGHYESVASPSFQNQIFEGPDTDIETELQLCNARHSKSEDATEDDTPSTSGRQIYETESSGSSSKVHCSLSPLPAYEAAFDWENERSLIFGQRVPESIPAISNSGLKITVKVLSLSFQAGLVEPFSGTICLYNRDRRERLSEDFYFHMLPTDMQVDQGSLDRRGVFSLDAPSPSVCLLIQLEKAATEEGGVTPSVYSRKEPVHLAEKEKQKLQVWSRIMPYKESFAWAMIPLFESNRAGGLSDAASPSSPLAPSLSGSSSQDSIVDPISKLALDGKVNHYSSGSSVIVEISNLNKVKESYIEDSLQDPKRKVHKPVKGVLRLEVEKLHDDHNDVDNASEGGSMANDLNDAGDINNGRSNRSSFDGIHSSVNSIAIAKKDAHHNGHTSNAENVDNFQAFDFRVLTRSEPFSQLFHCLYVYPLTVSLSRKRNLFVRVELRKDDSDIRKPPLEAVHPRERNTMLQKWGHTQIAVGTRMASYHDEVKISLPALLTPQHHLVFTFFHVDLQMKLEAPKPVIIGYSVLPLSTHIHMQRYCGEFWISNSTWICFILTEHCSDS

SEQ ID NO: 157831 - protein, 720 aa, Zea Mays
MEPAVATAGEGQRFKRIPRQAWSGNLELGPLLNESLDHWPHLNELVQCYKADFVKDDCKYGHYESVASPSFQNQIFEGPDTDIETELQLCNARHSKSEDATEDDTPSTSGRQIYETESSGSSSKVHCSLSPLPAYEAAFDWENERSLIFGQRVPESIPAISNSGLKITVKVLSLSFQAGLVEPFSGTICLYNRDRRERLSEDFYFHMLPTDMQVDQGSLDRRGVFSLDAPSPSVCLLIQLEKAATEEGGVTPSVYSRKEPVHLAEKEKQKLQVWSRIMPYKESFAWAMIPLFESNRAGGLSDAASPSSPLAPSLSGSSSQDSIVDPISKLALDGKVNHYSSGSSVIVEISNLNKVKESYIEDSLQDPKRKVHKPVKGVLRLEVEKLHDDHNDVDNASEGGSMANDLNDAGDINNGRSNRSSFDGIHSSVNSIAIAKKDAHHNGHTSNAENVDNFQAFDFRVLTRSEPFSQLFHCLYVYPLTVSLSRKRNLFVRVELRKDDSDIRKPPLEAVHPRERNTMLQKWGHTQIAVGTRMASYHDEVKISLPALLTPQHHLVFTFFHVDLQMKLEAPKPVIIGYSVLPLSTHIQLLSDVSLPILRELVPHYLQESGKERMDYLEDGKTVFRLRLRLCSSLFPINERIRDFFVEYDRHTLHTSPPWGSELLEAINSLKNVESTALLQFLQPILNMLLHLIGDGGETLQVAAFRAMVNILTRSVAFTT

SEQ ID NO: 157832 - protein, 742 aa, Zea Mays
MEPAVATAGEGQRFKRIPRQAWSGNLELGPLLNESLDHWPHLNELVQCYKADFVKDDCKYGHYESVASPSFQNQIFEGPDTDIETELQLCNARHSKSEDATEDDTPSTSGRQIYETESSGSSSKVHCSLSPLPAYEAAFDWENERSLIFGQRVPESIPAISNSGLKITVKVLSLSFQAGLVEPFSGTICLYNRDRRERLSEDFYFHMLPTDMQVDQGSLDRRGVFSLDAPSPSVCLLIQLEKAATEEGGVTPSVYSRKEPVHLAEKEKQKLQVWSRIMPYKESFAWAMIPLFESNRAGGLSDAASPSSPLAPSLSGSSSQDSIVDPISKLALDGKVNHYSSGSSVIVEISNLNKVKESYIEDSLQDPKRKVHKPVKGVLRLEVEKLHDDHNDVDNASEGGSMANDLNDAGDINNGRSNRSSFDGIHSSVNSIAIAKKDAHHNGHTSNAENVDNFQAFDFRVLTRSEPFSQLFHCLYVYPLTVSLSRKRNLFVRVELRKDDSDIRKPPLEVIIGYSVLPLSTHIQLLSDVSLPILRELVPHYLQESGKERMDYLEDGKTVFRLRLRLCSSLFPINERIRDFFVEYDRHTLHTSPPWGSELLEAINSLKNVESTALLQFLQPILNMLLHLIGDGGETLQVAAFRAMVNILTRVQQESSDGAERNRFLINYVDFAFDDFGDRQAPVYPGLTTVWGSLARSKAKGYRVGPVYDDVLAMAWFFLELIVKSMGLEQKFVFFLPQSSTR

SEQ ID NO: 157833 - protein, 1799 aa, Zea Mays
MEPAVATAGEGQRFKRIPRQAWSGNLELGPLLNESLDHWPHLNELVQCYKADFVKDDCKYGHYESVASPSFQNQIFEGPDTDIETELQLCNARHSKSEDATEDDTPSTSGRQIYETESSGSSSKVHCSLSPLPAYEAAFDWENERSLIFGQRVPESIPAISNSGLKITVKVLSLSFQAGLVEPFSGTICLYNRDRRERLSEDFYFHMLPTDMQVDQGSLDRRGVFSLDAPSPSVCLLIQLEKAATEEGGVTPSVYSRKEPVHLAEKEKQKLQVWSRIMPYKESFAWAMIPLFESNRAGGLSDAASPSSPLAPSLSGSSSQDSIVDPISKLALDGKVNHYSSGSSVIVEISNLNKVKESYIEDSLQDPKRKVHKPVKGVLRLEVEKLHDDHNDVDNASEGGSMANDLNDAGDINNGRSNRSSFDGIHSSVNSIAIAKKDAHHNGHTSNAENVDNFQAFDFRVLTRSEPFSQLFHCLYVYPLTVSLSRKRNLFVRVELRKDDSDIRKPPLEAVHPRERNTMLQKWGHTQIAVGTRMASYHDEVKISLPALLTPQHHLVFTFFHVDLQMKLEAPKPVIIGYSVLPLSTHIQLLSDVSLPILRELVPHYLQESGKERMDYLEDGKTVFRLRLRLCSSLFPINERIRDFFVEYDRHTLHTSPPWGSELLEAINSLKNVESTALLQFLQPILNMLLHLIGDGGETLQVAAFRAMVNILTRVQQESSDGAERNRFLINYVDFAFDDFGDRQAPVYPGLTTVWGSLARSKAKGEDVPPLQLKEGVFRCIMQLFDCLLTEVHERCKKGLSLAKRLNSTLAFFCYDLLSIIEPRQVFELVSLYMDKFAGVCQSVLHDCKLTFLQIICDHDLFVEMPGRDPSDRNYLSSVLIQEIFLTLDHDDLSQRAKAARILVVLICKHEFDARYQKSEDKLYIAQLYFPLIGQILDEMPVFYNLNAIEKREVLVVILQIVRNLDDATLIKAWQQSIARTRLFFKLLEECIIHFEHNKTGDNMLLGASSRSPDVEHPASPKYSERLSPSVNTYLSEASRHEIRPQGTPENGYMWNRVSPQLSSPNQPYSLREALAQAQSSRIGSTARALRESLHPVLRQKMELWEENLSTAVSLEVLGITEKFSVAAGARSITTDYAKLDCVTSILMGLLSRNQSLAFWKAFLPVVYNIFNVHGATLMARENDRFLKQIAFHLLRLAVFRNDSIRKRAVVGLQILVRNSFNYFKNTTRLRVMLTITLSELMSDVQVTQMKFDGSLEESGEARRLRKSLEEMADVRSKDLLKDCGLPVTALEAAPEGSSDNRWSWVEVKHLSKCLVQALDAGLEHALLGSVVTVDRYAAAEGFYKLAMAYAPVPDLHIMWLLHLCDAHQEMQSWAEAAQCAVAVAGVIMQALVGRNDAVWSKEHVASLRKICPIVNTDVSAEASAAEVEGYGASKLTVDSAVKYLQLANKLFTQAELYHFCASIQELIIPVYKSRRAYGQLAKCHTSLTNIYESILEQEASPIPFIDATYYRVGFYGERFGKLNKKEYVFREPRDVRLGDIMEKLSHIYEAKIDGSHTLHIIPDSRQVNADELQPGFCYLQITAVDPVMEDEDLGSRRERIFSLSTGTVRARVFDRFLFDTPFTKNGKTQGGLEDQWKRRTVLQTEGSFPALVNRLPVIKSESLEFSPVENAIGMIETRTAALRNELEEPRSSEGDQLPRLQSLQRILQGSVAVQVNSGVLSVCTAFLSGEPATRLRSQELQQLIAALLEFMAVCKRAIRVHFRLIGEEDQEFHTQLVNGFQSLTAELSHYIPAILSEL

SEQ ID NO: 157834 - protein, 1762 aa, Zea Mays
MEPAVATAGEGQRFKRIPRQAWSGNLELGPLLNESLDHWPHLNELVQCYKADFVKDDCKYGHYESVASPSFQNQIFEGPDTDIETELQLCNARHSKSEDATEDDTPSTSGRQIYETESSGSSSKVHCSLSPLPAYEAAFDWENERSLIFGQRVPESIPAISNSGLKITVKVLSLSFQAGLVEPFSGTICLYNRDRRERLSEDFYFHMLPTDMQDQGSLDRRGVFSLDAPSPSVCLLIQLEKAATEEGGVTPSVYSRKEPVHLAEKEKQKLQVWSRIMPYKESFAWAMIPLFESNRAGGLSDAASPSSPLAPSLSGSSSQDSIVDPISKLALDGKVNHYSSGSSVIVEISNLNKVKESYIEDSLQDPKRKVHKPVKGVLRLEVEKLHDDHNDVDNASEGGSMANDLNDAGDINNGRSNRSSFDGIHSSVNSIAIAKKDAHHNGHTSNAENVDNFQAFDFRVLTRSEPFSQLFHCLYVYPLTVSLSRKRNLFVRVELRKDDSDIRKPPLEAVHPRERNTMLQKWGHTQIAVGTRMASYHDEVKISLPALLTPQHHLVFTFFHVDLQMKLEAPKPVIIGYSVLPLSTHIQLLSDVSLPILRELVPHYLQESGKERMDYLEDGKTVFRLRLRLCSSLFPINERIRDFFVEYDRHTLHTSPPWGSELLEVAAFRAMVNILTRVQQESSDGAERNRFLINYVDFAFDDFGDRQAPVYPGLTTVWGSLARSKAKGEDVPPLQLKEGVFRCIMQLFDCLLTEVHERCKKGLSLAKRLNSTLAFFCYDLLSIIEPRQVFELVSLYMDKFAGVCQSVLHDCKLTFLQIICDHDLFVEMPGRDPSDRNYLSSVLIQEIFLTLDHDDLSQRAKAARILVVLICKHEFDARYQKSEDKLYIAQLYFPLIGQILDEMPVFYNLNAIEKREVLVVILQIVRNLDDATLIKAWQQSIARTRLFFKLLEECIIHFEHNKTGDNMLLGASSRSPDVEHPASPKYSERLSPSVNTYLSEASRHEIRPQGTPENGYMWNRVSPQLSSPNQPYSLREALAQAQSSRIGSTARALRESLHPVLRQKMELWEENLSTAVSLEVLGITEKFSVAAGARSITTDYAKLDCVTSILMGLLSRNQSLAFWKAFLPVVYNIFNVHGATLMARENDRFLKQIAFHLLRLAVFRNDSIRKRAVVGLQILVRNSFNYFKNTTRLRVMLTITLSELMSDVQVTQMKFDGSLEESGEARRLRKSLEEMADVRSKDLLKDCGLPVTALEAAPEGSSDNRWSWVEVKHLSKCLVQALDAGLEHALLGSVVTVDRYAAAEGFYKLAMAYAPVPDLHIMWLLHLCDAHQEMQSWAEAAQCAVAVAGVIMQALVGRNDAVWSKEHVASLRKICPIVNTDVSAEASAAEVEGYGASKLTVDSAVKYLQLANKLFTQAELYHFCASIQELIIPVYKSRRAYGQLAKCHTSLTNIYESILEQEASPIPFIDATYYRVGFYGERFGKLNKKEYVFREPRDVRLGDIMEKLSHIYEAKIDGSHTLHIIPDSRQVNADELQPGFCYLQITAVDPVMEDEDLGSRRERIFSLSTGTVRARVFDRFLFDTPFTKNGKTQGGLEDQWKRRTVLQTEGSFPALVNRLPVIKSESLEFSPVENAIGMIETRTAALRNELEEPRSSEGDQLPRLQSLQRILQGSVAVQVNSGVLSVCTAFLSGEPATRLRSQELQQLIAALLEFMAVCKRAIRVHFRLIGEEDQEFHTQLVNGFQSLTAELSHYIPAILSEL

SEQ ID NO: 157835 - protein, 977 aa, Zea Mays
MQLFDCLLTEVHERCKKGLSLAKRLNSTLAFFCYDLLSIIEPRQVFELVSLYMDKFAGVCQSVLHDCKLTFLQIICDHDLFVEMPGRDPSDRNYLSSVLIQEIFLTLDHDDLSQRAKAARILVVLICKHEFDARYQKSEDKLYIAQLYFPLIGQILDEMPVFYNLNAIEKREVLVVILQIVRNLDDATLIKAWQQSIARTRLFFKLLEECIIHFEHNKTGDNMLLGASSRSPDVEHPASPKYSERLSPSVNTYLSEASRHEIRPQGTPENGYMWNRVSPQLSSPNQPYSLREALAQAQSSRIGSTARALRESLHPVLRQKMELWEENLSTAVSLEVLGITEKFSVAAGARSITTDYAKLDCVTSILMGLLSRNQSLAFWKAFLPVVYNIFNVHGATLMARENDRFLKQIAFHLLRLAVFRNDSIRKRAVVGLQILVRNSFNYFKNTTRLRVMLTITLSELMSDVQVTQMKFDGSLEESGEARRLRKSLEEMADVRSKDLLKDCGLPVTALEAAPEGSSDNRWSWVEVKHLSKCLVQALDAGLEHALLEMQSWAEAAQCAVAVAGVIMQALVGRNDAVWSKEHVASLRKICPIVNTDVSAEASAAEVEGYGASKLTVDSAVKYLQLANKLFTQAELYHFCASIQELIIPVYKSRRAYGQLAKCHTSLTNIYESILEQEASPIPFIDATYYRVGFYGERFGKLNKKEYVFREPRDVRLGDIMEKLSHIYEAKIDGSHTLHIIPDSRQVNADELQPGFCYLQITAVDPVMEDEDLGSRRERIFSLSTGTVRARVFDRFLFDTPFTKNGKTQGGLEDQWKRRTVLQTEGSFPALVNRLPVIKSESLEFSPVENAIGMIETRTAALRNELEEPRSSEGDQLPRLQSLQRILQGSVAVQVNSGVLSVCTAFLSGEPATRLRSQELQQLIAALLEFMAVCKRAIRVHFRLIGEEDQEFHTQLVNGFQSLTAELSHYIPAILSEL

SEQ ID NO: 157836 - protein, 1016 aa, Zea Mays
MQLFDCLLTEVHERCKKGLSLAKRLNSTLAFFCYDLLSIIEPRQVFELVSLYMDKFAGVCQSVLHDCKLTFLQIICDHDLFVEMPGRDPSDRNYLSSVLIQEIFLTLDHDDLSQRAKAARILVVLICKHEFDARYQKSEDKLYIAQLYFPLIGQILDEMPVFYNLNAIEKREVLVVILQIVRNLDDATLIKAWQQSIARTRLFFKLLEECIIHFEHNKTGDNMLLGASSRSPDVEHPASPKYSERLSPSVNTYLSEASRHEIRGTPENGYMWNRVSPQLSSPNQPYSLREALAQAQSSRIGSTARALRESLHPVLRQKMELWEENLSTAVSLEVLGITEKFSVAAGARSITTDYAKLDCVTSILMGLLSRNQSLAFWKAFLPVVYNIFNVHGATLMARENDRFLKQIAFHLLRLAVFRNDSIRKRAVVGLQILVRNSFNYFKNTTRLRVMLTITLSELMSDVQVTQMKFDGSLEESGEARRLRKSLEEMADVRSKDLLKDCGLPVTALEAAPEGSSDNRWSWVEVKHLSKCLVQALDAGLEHALLGSVVTVDRYAAAEGFYKLAMAYAPVPDLHIMWLLHLCDAHQEMQSWAEAAQCAVAVAGVIMQALVGRNDAVWSKEHVASLRKICPIVNTDVSAEASAAEVEGYGASKLTVDSAVKYLQLANKLFTQAELYHFCASIQELIIPVYKSRRAYGQLAKCHTSLTNIYESILEQEASPIPFIDATYYRVGFYGERFGKLNKKEYVFREPRDVRLGDIMEKLSHIYEAKIDGSHTLHIIPDSRQVNADELQPGFCYLQITAVDPVMEDEDLGSRRERIFSLSTGTVRARVFDRFLFDTPFTKNGKTQGGLEDQWKRRTVLQTEGSFPALVNRLPVIKSESLEFSPVENAIGMIETRTAALRNELEEPRSSEGDQLPRLQSLQRILQGSVAVQVNSGVLSVCTAFLSGEPATRLRSQELQQLIAALLEFMAVCKRAIRVHFRLIGEEDQEFHTQLVNGFQSLTAELSHYIPAILSEL

SEQ ID NO: 157837 - protein, 576 aa, Zea Mays
MQLFDCLLTEVHERCKKGLSLAKRLNSTLAFFCYDLLSIIEPRQVFELVSLYMDKFAGVCQSVLHDCKLTFLQIICDHDLFVEMPGRDPSDRNYLSSVLIQEIFLTLDHDDLSQRAKAARILVVLICKHEFDARYQKSEDKLYIAQLYFPLIGQILDEMPVFYNLNAIEKREVLVVILQIVRNLDDATLIKAWQQSIARTRLFFKLLEECIIHFEHNKTGDNMLLGASSRSPDVEHPASPKYSERLSPSVNTYLSEASRHEIRPQGTPENGYMWNRVSPQLSSPNQPYSLREALAQAQSSRIGSTARALRESLHPVLRQKMELWEENLSTAVSLEVLGITEKFSVAAGARSITTDYAKLDCVTSILMGLLSRNQSLAFWKAFLPVVYNIFNVHGATLMARENDRFLKQIAFHLLRLAVFRNDSIRKRAVVGLQILVRNSFNYFKNTTRLRVMLTITLSELMSDVQVTQMKFDGSLEESGEARRLRKSLEEMADVRSKDLLKDCGLPVTALEAAPEGSSDNRWSWVEVKHLSKCLVQALDAGLEHALLIFTLCGCFICVMHTRRCNHGLKQHNVQLL

SEQ ID NO: 157838 - protein, 455 aa, Zea Mays
MAKPRKTRTSAPDPPVAAVRLPWHTPAPAVPTAVLISLAALLIRVLVSVGPYSGQGAAPKFGDYEAQRHWMELTLHLTPADWYRNTSDNDLAYWGLDYPPLSAYQSLLHGRIINTSLPEAVALRSSRGYESMESKLLMRWTVLSSDLLVFFPSALWFVWAYMKLGVGISGEERREGWMWLLALVLISPCLVLIDHGHFQYNCISLGLTLGAIAGVLSKNELVGASLFTLAINHKQMSLYFAPAFFSHLLGKCLKQKYPIVEVTKLAFVVLGTFALVWWPFLHSYEAVQQVLSRLAPFERGIYEDYVANFWCSTSVIIKWKKLFAIKPLKLMSLSATILAFLPSFVQQVKSPSNLGFLYSLMNNSFSFYLFSYQVHEKSILLPLLPASLLALEEPRMYGWFVYFALFSMYPLICRDQLLLQYIAVLSLFFLIYYSPGGSYGKRSNISCKANCVHQL

SEQ ID NO: 157839 - protein, 465 aa, Zea Mays
MAKPRKTRTSAPDPPVAAVRLPWHTPAPAVPTAVLISLAALLIRVLVSVGPYSGQGAAPKFGDYEAQRHWMELTLHLTPADWYRNTSDNDLAYWGLDYPPLSAYQSLLHGRIINTSLPEAVALRSSRGYESMESKLLMRWTVLSSDLLVFFPSALWFVWAYMKLGVGISGEERREGWMWLLALVLISPCLVLIDHGHFQYNCISLGLTLGAIAGVLSKNELVGASLFTLAINHKQVLSRLAPFERGIYEDYVANFWCSTSVIIKWKKLFAIKPLKLMSLSATILAFLPSFVQQVKSPSNLGFLYSLMNNSFSFYLFSYQVHEKSILLPLLPASLLALEEPRMYGWFVYFALFSMYPLICRDQLLLQYIAVLSLFFLIYYSPGGSYGKRSNISCKAKLVLSLPFLCSLLLHITYLQIEPPKRYPFLFDALIMFVCFSQFVILAVYTNYKQWMLDSNSRSIGVKKDL

SEQ ID NO: 157840 - protein, 189 aa, Zea Mays
MSLSATILAFLPSFVQQVKSPSNLGFLYSLMNNSFSFYLFSYQVHEKSILLPLLPASLLALEEPRMYGWFVYFALFSMYPLICRDQLLLQYIAVLSLFFLIYYSPGGSYGKRSNISCKAKLVLSLPFLCSLLLHITYLQIEPPKRYPFLFDALIMFVCFSQFVILAVYTNYKQWMLDSNSRSIGVKKDL

SEQ ID NO: 157841 - protein, 249 aa, Zea Mays
MAKPRKTRTSAPDPPVAAVRLPWHTPAPAVPTAVLISLAALLIRVLVSVGPYSGQGAAPKFGDYEAQRHWMELTLHLTPADWYRNTSDNDLAYWGLDYPPLSAYQSLLHGRIINTSLPEAVALRSSRGYESMESKLLMRWTVLSSDLLVFFPSALWFVWAYMKLGVGISGEERREGWMWLLALVLISPCLVLIDHGHFQYNCISLGLTLGAIAGVLSKNELVGASLFTLAINHKQVCLMSRKLCSFGHS

SEQ ID NO: 157842 - protein, 217 aa, Zea Mays
MRWTPELHECFVDAVNQLGGSEKATPKGVLKLMKVDGLTIYHVKSHLQKYRTARYKPDLSEGTSEKRTATEELVLDLKTSMDLTEALRLQMEVQKRLHEQLEIQRKLQLRIEEQGKYLQMMFEKQSQSSTEKVQDPSSRDTTAKPSSNQSQSTNKDCGATMDPNGTGGIVRTAELGERSSELGVKQKLVEIEESGTEVATGDRSKISQEKRRKLQDS

SEQ ID NO: 157843 - protein, 72 aa, Zea Mays
MRAYLFIHGIKHYINQHLLPVISFSLITQCSTMDQAVSLAARSRRFESSFKTLQGKPKHTTCQGTPSPHMST

SEQ ID NO: 157844 - protein, 53 aa, Zea Mays
MNIYMFIIRTEHFNNYSKTINSITQLVPQTYLTYLKCLLEFVSTITHYMRSII

SEQ ID NO: 157845 - protein, 126 aa, Zea Mays
MLDEEEHFQEQLAEKLRNYAERDKEQDFWLVVEPKFLDRFPNITKRLKRPAVALVSTDGNWITFMKLRLDRVLQDQFDAESVEEALASNPVELKFEKPEKWTAPYPKYGFGWWEPFLPPKFSNGTA

SEQ ID NO: 157846 - protein, 737 aa, Zea Mays
MRPCSRILAARHFVRSFRFDPSQTTSPAAGFRRLTGANRPFVPKPLFGILLGGFRSNCGVLPGKGVPLGSLGSFLPDSAYQLHGARLQRDTRGNAFSTSANAVTVKKPVGDKVQKDASKKDIDEEIADSQILKNLGKYLLLNDSPDFRFRVALSLVLLVGAKVINVQVPFLFKLAIDWLAALGGAEASLASFTETNATLLALFASPAAVLIGYGIARSGVSACTELRNAVFSKVTLRAIRSVSRKVFSHLHELDLRYHLSRQTGAINRVIDRGSRAINYILTVMVFNVVPTILEIGMVSSILAYKFGSTFAWITSVSVATYIAFTLAVTQWRTKFRMAMNKADNASSTVAVDSLLNYETVKYFNNEQFEVEKYDKYLRNYEDAALKTQSSLAYLNFGQNVIFSSALSTAMVLSSYGIMSGALTVGDLVMVNGLLFQLSLPLNFLGSVYRESRQSLIDMKSMFQLLEEKPAIKDEPHAQPLQFKGGCIEFENVHFGYVPERKILDGATFTVPAGKSVAIVGTSGSGKSTILRLLFRFFDSTSGSIRIDGQDIRGVTLGSLRKCLGVVPQDTVLFNDTIKHNIQYGRLSAKDEEVFDAARRAAIHDTIMNFPDKYDTVVGERGLKLSGGEKQRVSIARVFLKEPSILLCDEATSALDSTTEASILNSLKSLSSDRTSIFIAHRLTTAMQCDQIIVLEDGKVVEQGPHDFLLSQGGRYAELWYQQNSTDAMDSAAASVEV

SEQ ID NO: 157847 - protein, 879 aa, Zea Mays
MSAQPQHFVERLAYLREHGAVEHGRPTGRWLRFRRSILPSIRACLLARPPRGAPCCLLASDPLNRGASTSMRDPRAVAEDEGARRGMEGERRGDRGCGMSGCAEDGRRRMKVRAAGWKKRGGKLEKTQFSTARGSPTPPPALTLRLLTLPIAAAAGSPLLPGAMRPCSRILAARHFVRSFRPFVPKPLFGILLGGFRSNCGVLPGKGVPLGSLGSFLPDSAYQLHGARLQRDTRGNAFSTSANAVTVKKPVGDKVQKDASKKDIDEEIADSQILKNLGKYLLLNDSPDFRFRVALSLVLLVGAKVINVQVPFLFKLAIDWLAALGGAEASLASFTETNATLLALFASPAAVLIGYGIARSGVSACTELRNAVFSKVTLRAIRSVSRKVFSHLHELDLRYHLSRQTGAINRVIDRGSRAINYILTVMVFNVVPTILEIGMVSSILAYKFGSTFAWITSVSVATYIAFTLAVTQWRTKFRMAMNKADNASSTVAVDSLLNYETVKYFNNEQFEVEKYDKYLRNYEDAALKTQSSLAYLNFGQNVIFSSALSTAMVLSSYGIMSGALTVGDLVMVNGLLFQLSLPLNFLGSVYRESRQSLIDMKSMFQLLEEKPAIKDEPHAQPLQFKGGCIEFENVHFGYVPERKILDGATFTVPAGKSVAIVGTSGSGKSTILRLLFRFFDSTSGSIRIDGQDIRGVTLGSLRKCLGVVPQDTVLFNDTIKHNIQYGRLSAKDEEVFDAARRAAIHDTIMNFPDKYDTVVGERGLKLSGGEKQRVSIARVFLKEPSILLCDEATSALDSTTEASILNSLKSLSSDRTSIFIAHRLTTAMQCDQIIVLEDGKVVEQGPHDFLLSQGGRYAELWYQQNSTDAMDSAAASVEV

SEQ ID NO: 157848 - protein, 788 aa, Zea Mays
MEGNQKKRGGKLEKTQFSTARGSPTPPPALTLRLLTLPIAAAAGSPLLPGAMRPCSRILAARHFVRSFRFDPSQTTSPAAGFRRLTGANRPFVPKPLFGILLGGFRSNCGVLPGKGVPLGSLGSFLPDSAYQLHGARLQRDTRGNAFSTSANAVTVKKPVGDKVQKDASKKDIDEEIADSQILKNLGKYLLLNDSPDFRFRVALSLVLLVGAKVINVQVPFLFKLAIDWLAALGGAEASLASFTETNATLLALFASPAAVLIGYGIARSGVSACTELRNAVFSKVTLRAIRSVSRKVFSHLHELDLRYHLSRQTGAINRVIDRGSRAINYILTVMVFNVVPTILEIGMVSSILAYKFGSTFAWITSVSVATYIAFTLAVTQWRTKFRMAMNKADNASSTVAVDSLLNYETVKYFNNEQFEVEKYDKYLRNYEDAALKTQSSLAYLNFGQNVIFSSALSTAMVLSSYGIMSGALTVGDLVMVNGLLFQLSLPLNFLGSVYRESRQSLIDMKSMFQLLEEKPAIKDEPHAQPLQFKGGCIEFENVHFGYVPERKILDGATFTVPAGKSVAIVGTSGSGKSTILRLLFRFFDSTSGSIRIDGQDIRGVTLGSLRKCLGVVPQDTVLFNDTIKHNIQYGRLSAKDEEVFDAARRAAIHDTIMNFPDKYDTVVGERGLKLSGGEKQRVSIARVFLKEPSILLCDEATSALDSTTEASILNSLKSLSSDRTSIFIAHRLTTAMQCDQIIVLEDGKVVEQGPHDFLLSQGGRYAELWYQQNSTDAMDSAAASVEV

SEQ ID NO: 157849 - protein, 791 aa, Zea Mays
MKVRAAGWKKRGGKLEKTQFSTARGSPTPPPALTLRLLTLPIAAAAGSPLLPGAMRPCSRILAARHFVRSFRFDPSQTTSPAAGFRRLTGANRPFVPKPLFGILLGGFRSNCGVLPGKGVPLGSLGSFLPDSAYQLHGARLQRDTRGNAFSTSANAVTVKKPVGDKVQKDASKKDIDEEIADSQILKNLGKYLLLNDSPDFRFRVALSLVLLVGAKVINVQVPFLFKLAIDWLAALGGAEASLASFTETNATLLALFASPAAVLIGYGIARSGVSACTELRNAVFSKVTLRAIRSVSRKVFSHLHELDLRYHLSRQTGAINRVIDRGSRAINYILTVMVFNVVPTILEIGMVSSILAYKFGSTFAWITSVSVATYIAFTLAVTQWRTKFRMAMNKADNASSTVAVDSLLNYETVKYFNNEQFEVEKYDKYLRNYEDAALKTQSSLAYLNFGQNVIFSSALSTAMVLSSYGIMSGALTVGDLVMVNGLLFQLSLPLNFLGSVYRESRQSLIDMKSMFQLLEEKPAIKDEPHAQPLQFKGGCIEFENVHFGYVPERKILDGATFTVPAGKSVAIVGTSGSGKSTILRLLFRFFDSTSGSIRIDGQDIRGVTLGSLRKCLGVVPQDTVLFNDTIKHNIQYGRLSAKDEEVFDAARRAAIHDTIMNFPDKYDTVVGERGLKLSGGEKQRVSIARVFLKEPSILLCDEATSALDSTTEASILNSLKSLSSDRTSIFIAHRLTTAMQCDQIIVLEDGKVVEQGPHDFLLSQGGRYAELWYQQNSTDAMDSAAASVEV

SEQ ID NO: 157850 - protein, 597 aa, Zea Mays
MEGNQKKRGGKLEKTQFSTARGSPTPPPALTLRLLTLPIAAAAGSPLLPGAMRPCSRILAARHFVRSFRFDPSQTTSPAAGFRRLTGANRPFVPKPLFGILLGGFRSNCGVLPGKGVPLGSLGSFLPDSAYQLHGARLQRDTRGNAFSTSANAVTVKKPVGDKVQKDASKKDIDEEIADSQILKNLGKYLLLNDSPDFRFRVALSLVLLVGAKVINVQVPFLFKLAIDWLAALGGAEASLASFTETNATLLALFASPAAVLIGYGIARSGVSACTELRNAVFSKVTLRAIRSVSRKVFSHLHELDLRYHLSRQTGAINRVIDRGSRAINYILTVMVFNVVPTILEIGMVSSILAYKFGSTFAWITSVSVATYIAFTLAVTQWRTKFRMAMNKADNASSTVAVDSLLNYETVKYFNNEQFEVEKYDKYLRNYEDAALKTQSSLAYLNFGQNVIFSSALSTAMVLSSYGIMSGALTVGDLVMVNGLLFQLSLPLNFLGSVYRESRQSLIDMKSMFQLLEEKPAIKDEPHAQPLQFKGGCIEFENVHFGYVPERKILDGATFTVPAGKSVAIVGTSGSGKSTILRLLFRFFDSTSGSVRI

SEQ ID NO: 157851 - protein, 874 aa, Zea Mays
MSAQPQHFVERLAYLREHGAVEHGRPTGRWLRFRRSILPSIRACLLARPPRGAPCCLLASDPLNRGASTSMRDPRAVAEDEGARRGMEGNQKKRGGKLEKTQFSTARGSPTPPPALTLRLLTLPIAAAAGSPLLPGAMRPCSRILAARHFVRSFRFDPSQTTSPAAGFRRLTGANRPFVPKPLFGILLGGFRSNCGVLPGKGVPLGSLGSFLPDSAYQLHGARLQRDTRGNAFSTSANAVTVKKPVGDKVQKDASKKDIDEEIADSQILKNLGKYLLLNDSPDFRFRVALSLVLLVGAKVINVQVPFLFKLAIDWLAALGGAEASLASFTETNATLLALFASPAAVLIGYGIARSGVSACTELRNAVFSKVTLRAIRSVSRKVFSHLHELDLRYHLSRQTGAINRVIDRGSRAINYILTVMVFNVVPTILEIGMVSSILAYKFGSTFAWITSVSVATYIAFTLAVTQWRTKFRMAMNKADNASSTVAVDSLLNYETVKYFNNEQFEVEKYDKYLRNYEDAALKTQSSLAYLNFGQNVIFSSALSTAMVLSSYGIMSGALTVGDLVMVNGLLFQLSLPLNFLGSVYRESRQSLIDMKSMFQLLEEKPAIKDEPHAQPLQFKGGCIEFENVHFGYVPERKILDGATFTVPAGKSVAIVGTSGSGKSTILRLLFRFFDSTSGSIRIDGQDIRGVTLGSLRKCLGVVPQDTVLFNDTIKHNIQYGRLSAKDEEVFDAARRAAIHDTIMNFPDKYDTVVGERGLKLSGGEKQRVSIARVFLKEPSILLCDEATSALDSTTEASILNSLKSLSSDRTSIFIAHRLTTAMQCDQIIVLEDGKVVEQGPHDFLLSQGGRYAELWYQQNSTDAMDSAAASVEV

SEQ ID NO: 157852 - protein, 867 aa, Zea Mays
MSAQPQHFVERLAYLREHGAVEHGRPTGRWLRFRRSILPSIRACLLARPPRGAPCCLLASDPLNRGASTSMRDPRAVAEDEGNQKKRGGKLEKTQFSTARGSPTPPPALTLRLLTLPIAAAAGSPLLPGAMRPCSRILAARHFVRSFRFDPSQTTSPAAGFRRLTGANRPFVPKPLFGILLGGFRSNCGVLPGKGVPLGSLGSFLPDSAYQLHGARLQRDTRGNAFSTSANAVTVKKPVGDKVQKDASKKDIDEEIADSQILKNLGKYLLLNDSPDFRFRVALSLVLLVGAKVINVQVPFLFKLAIDWLAALGGAEASLASFTETNATLLALFASPAAVLIGYGIARSGVSACTELRNAVFSKVTLRAIRSVSRKVFSHLHELDLRYHLSRQTGAINRVIDRGSRAINYILTVMVFNVVPTILEIGMVSSILAYKFGSTFAWITSVSVATYIAFTLAVTQWRTKFRMAMNKADNASSTVAVDSLLNYETVKYFNNEQFEVEKYDKYLRNYEDAALKTQSSLAYLNFGQNVIFSSALSTAMVLSSYGIMSGALTVGDLVMVNGLLFQLSLPLNFLGSVYRESRQSLIDMKSMFQLLEEKPAIKDEPHAQPLQFKGGCIEFENVHFGYVPERKILDGATFTVPAGKSVAIVGTSGSGKSTILRLLFRFFDSTSGSIRIDGQDIRGVTLGSLRKCLGVVPQDTVLFNDTIKHNIQYGRLSAKDEEVFDAARRAAIHDTIMNFPDKYDTVVGERGLKLSGGEKQRVSIARVFLKEPSILLCDEATSALDSTTEASILNSLKSLSSDRTSIFIAHRLTTAMQCDQIIVLEDGKVVEQGPHDFLLSQGGRYAELWYQQNSTDAMDSAAASVEV

SEQ ID NO: 157853 - protein, 328 aa, Zea Mays
MVLSSYGIMSGALTVGDLVMVNGLLFQLSLPLNFLGSVYRESRQSLIDMKSMFQLLEEKPAIKDEPHAQPLQFKGGCIEFENVHFGYVPERKILDGATFTVPAGKSVAIVGTSGSGKSTILRLLFRFFDSTSGSIRIDGQDIRGVTLGSLRKCLGVVPQDTVLFNDTIKHNIQYGRLSAKDEEVFDAARRAAIHDTIMNFPDKYDTVVGERGLKLSGGEKQRVSIARVFLKEPSILLCDEATSALDSTTEASILNSLKSLSSDRTSIFIAHRLTTAMQCDQIIVLEDGKVVEQGPHDFLLSQGGRYAELWYQQNSTDAMDSAAASVEV

SEQ ID NO: 157854 - protein, 131 aa, Zea Mays
MNFPDKYDTVVGERGLKLSGGEKQRVSIARVFLKEPSILLCDEATSALDSTTEASILNSLKSLSSDRTSIFIAHRLTTAMQCDQIIVLEDGKVVEQGPHDFLLSQGGRYAELWYQQNSTDAMDSAAASVEV

SEQ ID NO: 157855 - protein, 557 aa, Zea Mays
MQIDALHCHHRSTSLSLSPFRSEEGSTTGPAEMSGKGKRRSARLLKLEEQKNDGGAVCFLDPWQIIRNSISGPSARGKRKRNEGIQPQGEASCSRQEPLYAGNSNSLPSQTSVGQIIEYILDELEMRDRHELFAMPDDIQVTDYAELVSRPGDFATLRQKNRDGMYTALEQFENDVYMVFQKAITMNSQDTVPFREGMALLDQAKLVFMSLRSNQMFSESELAAWRQRHADQMQQPITPEGREGGGRGPPRHTAAAPLLQPSAATPRKRSAAETKKQEDARTGGNATGNQRGRPRGARETKATAPTPPGKRARKAATAGFNGGRGLVARRRLTYNDEAAADQGWREIAATPVFQGRHVTLRDQPQEQTFRGSLQRFVRHAGLKARVAAEFRSLECVARARHCPVPQCWNGFAPSAGFLPPSPRPPGAAAAEPGTSSDQQAAAPECKLETDEVLKLFVLMGTPAAFLSRAKKMFGQDEPEKSAQPAKAADDARARAGAATTAETGHGKKSSASEPSAAACGPFAPPKLVPGRLGFGQFAASSARPFKLNSKPSASNDS

SEQ ID NO: 157856 - protein, 156 aa, Zea Mays
MYPRARLPARPSPERQRVVRTELLGLVVEQVGEAGIVDVEDPGVEAVGVGGHPVGVGARLLCHAGHVPLVLAPGHVPADVPDALRGHRAPPAGVVGLHHDAPAEAPGVVGRLARPETLPRDDGGGAEEQVRQQGEEREPPPRGDADRQHVYRSIRF

SEQ ID NO: 157857 - protein, 596 aa, Zea Mays
MGDRNHGRSLPLLLYLHLLLPILPFAMADIASEKQALFAFASAVYHGNKLNWSQNIPVCSWHGVTCSLDRSCILALRVPGAGLIGTIPADTLGRLVSLQVLSMRSNRLSGSLPYDVVSLPYLQAIFVQHNELSGDLPPFLSPNLNTLDLSYNSFTGQIPSGLQNLTKLSVLNLAENSLSGPIPDLKLPSLRQLNLSNNELNVPSPPKLPNHEKKAGNGLVIVAVAGSFVIFLLAAVMFTMCISKRKEKKDEAGYNGKVTDGGRVEKRKEDLSSGVQMAHKNKLVFLEGCSYNFDLEDLLRASAEVLGKGSYGTAYKAILEDGSTVVVKRLKDVVAGKKEFEQQMELIGRVGKHANIAPIRAYYYSKDEKLVVYEYIGRGSFSALLHGIKGVCEKTPLDWNTRMKIILGTARGLEHIHSEGGSRLAHGNIKSTNVLLDGDHNPYVSDYGLSSLTSLPITTSRAVAGYRAQETFESRKFTHKSDVYGFGVLLMETLTGKAPLQSQGQDDAVDLPRWVHSVVREEWTAEVFDVQLMKYPNIEDELVQMLRIAMACTAWSPDRRPTMAQVVRMVEELRHSASGSRALSVGSPKESSPLSA

SEQ ID NO: 157858 - protein, 398 aa, Zea Mays
MGDRNHGRSLPLLLYLHLLLPILPFAMADIASEKQALFAFASAVYHGNKLNWSQNIPVCSWHGVTCSLDRSCILALRVPGAGLIGTIPADTLGRLVSLQVLSMRSNRLSGSLPYDVVSLPYLQAIFVQHNELSGDLPPFLSPNLNTLDLSYNSFTGQIPSGLQNLTKLSVLNLAENSLSGPIPDLKLPSLRQLNLSNNELNGSIPPFFQIFSNSSFLGNSGLCGPPLTECSFLSSPTPSQVPSPPKLPNHEKKAGNGLVIVAVAGSFVIFLLAAVMFTMCISKRKEKKDEAGYNGKVTDGGRVEKRKEDLSSGVQMAHKNKLVFLEGCSYNFDLEDLLRASAEVLGKGSYGTAYKAILEDGSTVVVKRLKDVVAGKKEFEQQMELIGRVSRACVRRPH

SEQ ID NO: 157859 - protein, 56 aa, Zea Mays
MDAKDSYDGGKEQLIFLLAASTAFSTVLFHPFGHWYLNYSTPCFLPCWLNGITHGF

SEQ ID NO: 157860 - protein, 1150 aa, Zea Mays
MAPADGGGEQPHKAHRQHKSGAKARKKKGKGKGDAGDDAGGQQKNPKAFAFQSAAKAKRLQARSAEIEQRRLHVPIMDRSIGEPPPFVVVVQGPPQVGKSLLIKCLVKHYTKQNLPEVRGPITVVSGKSRRVQFVECPNDINGMIDAAKIADLALLLIDGSYGFEMDTFEFLNIMQVHGFPKVMGVLTHLDKFKDVKKLRKTKQRLKHRFWAEIKEGAKLFYLSGLIHGKYTKREVHNLARFISVIKPIQLSWRMAHPYLLVDRFEDVTPTESVRLNRKCDRTITLYGYLRGCNMKRGTKVHITGAGDFSLSGVTGLGDPCPLPSSAKKRGLRDKEKLFYAPMSGLGDLLYDKDAVYININDHLVQFSKSDENDAPKKQGKGKDVGVALVKTLQNPRYSLDEKLEQSFINFFGGRPAAQSKDSDAQGNVISASQDNQSDTNILQQVDDGNNSNAVTMESNEHSEGSSDSEGDNDDIQLRDRDVDLREEVEVCNGRLRRRAVSANFRDDFDDEGTDEDANDDEDSGDDQLSGDSASSADDSGEASDPEDELENTSKWKESLLARTMSRRSDNLMQLVYGLPSTKLGSVAEENDDSEANSSDDEFFRPKGQKQQAKNESPSFGDIDGEDCSKFFKAELKDWSNEDLIKSIRDRFVTGNWSKATLRGQDTDDRGEDDEEMYGDFEDLETGEVHMAQTDENVEAKDDPEVEERRLKKLAQRAKFDAQYDGSELSDDEVDDVKKKSRREQSNEGGYFDKLKEEMELRKQMNISELNDLDEETRVDIEGFRTGTYVRLEVHGVPFELVEHFDPCHPILVGGIGLGEENTGFMQASLKRHRWHRKVLKTKDPIIVSIGWRRFQTTPVYAIEDRNGRHRMLKYTPEHMHCFAMFWGPLAPPKSGVLAVQNLSNNQVPFRITATGWVQEFNNTARIVKKIKLTGTPCKIFKKTALIKGMFTSDLEVARFEGAAIRTVSGIRGQVKKAAKIEPGDMLKRKGENTEGIARCTFEDRILMSDIVFLRAWVNVEVPTYSNPVTTALQPREQTWQGMRTTAELRKAHNIPTPHNKDSVYKPIERKPRKFNPVEIPAKLQQLLPFKSKPKDTAKQKKAPVENRVPVIMQPSEKKTHAAIQQQRRRKLRNNRRKKHTRQRKPRPSY

SEQ ID NO: 157861 - protein, 992 aa, Zea Mays
MAPADGGGEQPHKAHRQHKSGAKARKKKGKGKGDAGDDAGGQQKNPKAFAFQSAAKAKRLQARSAEIEQRRLHVPIMDRSIGEPPPFVVVVQGPPQVGKSLLIKCLVKHYTKQNLPEVRGPITVVSGKSRRVQFVECPNDINGMIDAAKIADLALLLIDGSYGFEMDTFEFLNIMQVHGFPKVMGVLTHLDKFKDVKKLRKTKQRLKHRFWAEIKEGAKLFYLSGLIHGKYTKREVHNLARFISVIKPIQLSWRMAHPYLLVDRFEDVTPTESVRLNRKCDRTITLYGYLRGCNMKRGTKVHITGAGDFSLSGVTGLGDPCPLPSSAKKRGLRDKEKLFYAPMSGLGDLLYDKDAVYININDHLVQFSKSDENDAPKKQGKGKDVGVALVKTLQNPRYSLDEKLEQSFINFFGGRPAAQSKDSDAQGNVISASQDNQSDTNILQQVDDGNNSNAVTMESNEHSEGSSDSEGDNDDIQLRDRDVDLREEVEVCNGRLRRRAVSANFRDDFDDEGTDEDANDDEDSGDDQLSGDSASSADDSGEASDPEDELENTSKWKESLLARTMSRRSDNLMQLVYGLPSTKLGSVAEENDDSEANSSDDEFFRPKGQKQQAKNESPSFGDIDGEDCSKFFKAELKDWSNEDLIKSIRDRFVTGNWSKATLRGQDTDDRGEDDEEMYGDFEDLETGEVHMAQTDENVEAKDDPEVEERRLKKLAQRAKFDAQYDGSELSDDEVDDVKKKSRREQSNEGGYFDKLKEEMELRKQMNISELNDLDEETRVDIEGFRTGTYVRLEVHGVPFELVEHFDPCHPILVGGIGLGEENTGFMQASLKRHRWHRKVLKTKDPIIVSIGWRRFQTTPVYAIEDRNGRHRMLKYTPEHMHCFAMFWGPLAPPKSGVLAVQNLSNNQVPFRITATGWVQEFNNTARIVKKIKLTGTPCKIFKKTALIKGMFTSDLEVARFEGAAIRTVSGIRGQVKKFLVHYRQQRLSQEIC

SEQ ID NO: 157862 - protein, 816 aa, Zea Mays
MQVHGFPKVMGVLTHLDKFKDVKKLRKTKQRLKHRFWAEIKEGAKLFYLSGLIHGKYTKREVHNLARFISVIKPIQLSWRMAHPYLLVDRFEDVTPTESVRLNRKCDRTITLYGYLRGCNMKRGTKVHITGAGDFSLSGVTGLGDPCPLPSSAKKRGLRDKEKLFYAPMSGLGDLLYDKDAVYININDHLVQFSKSDENDAPKKQGKGKDVGVALVKTLQNPRYSLDEKLEQSFINFFGGRPAAQSKDSDAQGNVISASQDNQSDTNILQQVDDGNNSNAVTMESNEHSEGSSDSEGDNDDIQLRDRDVDLREEVEVCNGRLRRRAVSANFRDDFDDEGTDEDANDDEDSGDDQLSGDSASSADDSGEASDPEDELENTSKWKESLLARTMSRRSDNLMQLVYGLPSTKLGSVAEENDDSEANSSDDEFFRPKGQKQQAKNESPSFGDIDGEDCSKFFKAELKDWSNEDLIKSIRDRFVTGNWSKATLRGQDTDDRGEDDEEMYGDFEDLETGEVHMAQTDENVEAKDDPEVEERRLKKLAQRAKFDAQYDGSELSDDEVDDVKKKSRREQSNEGGYFDKLKEEMELRKQMNISELNDLDEETRVDIEGFRTGTYVRLEVHGVPFELVEHFDPCHPILVGGIGLGEENTGFMQASLKRHRWHRKVLKTKDPIIVSIGWRRFQTTPVYAIEDRNGRHRMLKYTPEHMHCFAMFWGPLAPPKSGVLAVQNLSNNQVPFRITATGWVQEFNNTARIVKKIKLTGTPCKIFKKTALIKGMFTSDLEVARFEGAAIRTVSGIRGQVKKVMSKYHALIVYHG

SEQ ID NO: 157863 - protein, 1115 aa, Zea Mays
MAPADGGGEQPHKAHRQHKSGAKARKKKGKGKGDAGDDAGGQQKNPKAFAFQSAAKAKRLQARSAEIEQRRLHVPIMDRSIGEPPPFVVVVQGPPQVGKSLLIKCLVKHYTKQNLPEVRGPITVVSGKSRRVQFVECPNDINGMIDAAKIADLALLLIDGSYGFEMDTFEFLNIMQVHGFPKVMGVLTHLDKFKDVKKLRKTKQRLKHRFWAEIKEGAKLFYLSGLIHGKYTKREVHNLARFISVIKPIQLSWRMAHPYLLVDRFEDVTPTESVRLNRKCDRTITLYGYLRGCNMKRGTKVHITGAGDFSLSGVTGLGDPCPLPSSAKKRGLRDKEKLFYAPMSGLGDLLYDKDAVYININDHLVQFSKSDENDAPKKQGKGKDVGVALVKTLQNPRYSLDEKLEQSFINFFGGRPAAQSKDSDAQGNVISASQDNQSDTNILQQVDDGNNSNAVTMESNEHSEGSSDSEGDNDDIQLRDRDVDLREEVEVCNGRLRRRAVSANFRDDFDDEGTDEDANDDEDSGDDQLSGDSASSADDSGEAKDELENTSKWKESLLARTMSRRSDNLMQLVYGLPSTKLGSVAEENDDSEANSSDDEFFRPKGQKQQAKNESPSFGDIDGEDCSKFFKAELKDWSNEDLIKSIRDRFVTGNWSKATLRGQDTDDRGEDDEEMYGDFEDLETGEVHMAQTDENVEAKDDPEVEERRLKKLAQRAKFDAQYDGSELSDDEVDDVKKKSRREQSNEGGYFDKLKEEMELRKQMNISELNDLDEETRVDIEGFRTGTYVRLEVHGVPFELVEHFDPCHPILVGGIGLGEENTGFMQASLKRHRWHRKVLKTKDPIIVSIGWRRFQTTPVYAIEDRNGRHRMLKYTPEHMHCFAMFWGPLAPPKSGVLAVQNLSNNQVPFRITATGWVQEFNNTARIVKKIKLTGTPCKIFKKTALIKGMFTSDLEVARFEGAAIRTVSGIRGQVKKAAKIEPGDMLKRKGENTEGIARCTFEDRILMSDIVFLRAWVNVEVPTYSNPVTTALQPREQTWQGMRTTAELRKAHNIPTPHNKDSVYKPIERKPRKFNPVEIPAKLQQLLPFKSKPKDTAKQKKAPVENRVPVITQLYNS

SEQ ID NO: 157864 - protein, 852 aa, Zea Mays
MRAVLLLALLLSACAAAAAQGANSTAFVPRDDIRLDCGAKGQGNDTDGRVWTGDAGSKYAPPDNLASVASASGQDPSVPQVPYLTARVSASPFTYSFPLGPGRKFLRLHFYPANYTDRDAADGLFSVSVAAPGGNLTLLSNFSAYQTAAAITYSYLIREFSVNVSSPTLDLTFTPEKAHPNAYAFVNGIETMYRLNVGGQAISPSKDTGGYRSWDDDSSYIFGASFGVSYPKDSKVTITYPSNVPEYVAPEDVYGTARSMGPDKNVNMNYNLTWMLEVDAGFMYLIRMHFCEIQYPITKINQRVFNIYINNQTAVKGADVNAWAAVSGATTLIGTPVYQDYVVSTTGLGAMDLWVALHPNPDSKPQIYDAILNGMEVFKLQLTNGSLAGLNPVPSVAPVPDGTTKKKSSVGPIVGGVVGGLVVLALGYCCFVICKRRRNAGKDAGMSDGHSGWLPLSLYGNSHTSSSAKSHTTGSYASSLPSNLCRHFSFAEIKAATNNFDESLILGVGGFGKVYRGEVDGGTTKVAIKRGNPLSEQGVHEFQTEIEMLSKLRHRHLVSLIGYCEEKNEMILVYDYMAHGTLREHLYKTQKPPLTWRQRLDICIGAARGLHYLHTGAKHTIIHRDVKTTNILLDEKWVAKVSDFGLSKTGPSMDHTHVSTVVKGSFGYLDPEYFRRQQLTEKSDVYSFGVVLFEVLCARPALNPTLPKEEVSLAEWALHCQKKGILDQIVDPYLKGKIAPQCFKKFAETAEKCVSDQGIDRPSMGDVLWNLEFALQMQEGAEESGSLGCGMSDEGAPLMVGKKDPNDPSIESSTTTTTTTSISMGDQSVASIDSDGLTPSAVFSQIMNPKGR

SEQ ID NO: 157865 - protein, 143 aa, Zea Mays
MADDEQAEKKEEVPELAPFDPTKKKKKKKVVIQEPSDEVDNLAEKTESLTVTESSEPSFAGMKKKKKKHVELDSSLTETGDVDDTGDDQVREDEEGEGIVLAGAAATRYPWEGTDRDYNCLAEYSTFCVRTTRILLVIEEELL

SEQ ID NO: 157866 - protein, 196 aa, Zea Mays
MKKKKKKHVELDSSLTETGDVDDTGDDQVREDEEGEGIVLAGAAATRYPWEGTDRDYKYEELLGRVFNILRENNPDLAGDRRRTVMRPPQVLREGTKKTVFVNFMDLCKTMHRQPEHVMMFLLAEMGTSGSLDGQQRLVIKGRFAPKNFEAILRRYINEYVICNGCKSPDTILSKENRLFFLRCEQHSVMGKSLLQ

SEQ ID NO: 157867 - protein, 211 aa, Zea Mays
MKKKKKKHVELDSSLTETGDVDDTGDDQVREDEEGEGIVLAGAAATRYPWEGTDRDYKYEELLGRVFNILRENNPDLAGDRRRTVMRPPQVLREGTKKTVFVNFMDLCKTMHRQPEHVMMFLLAEMGTSGSLDGQQRLVIKGRFAPKNFEAILRRYINEYVICNGCKSPDTILSKENRLFFLRCEQCGSSRSVAPIKAGFVAQVGRRKAGS

SEQ ID NO: 157868 - protein, 599 aa, Zea Mays
MASTEGFRLVRCPKCLNILPEPPNVTVYKCGGCGTTLRAKTRASGGQQVAATAKQGRQDSDSYSVATAVSSGVPRQNRDQGSIGAVTESSFDADVASAEHGSNGARSGENGGGMLAGQNVHFEGQDNNTSSRMEGPAGQTRLNANATYLDSGGTENHTVQQTAEKCRVSGHVDDTECHLNTSEDEMFPSETSKAAVGMQDPGQKKEAGGTEHAANKKSHLVRALSRSCDLGSSMNLTDFHSARASLQSKSFRASAPLQSKIMSTVDELKGDLSEMFSKPADCKPRPHPHPPRPSKRDGGRTARAAVTSSAPLAAYRPPAEHSGYVSRSRLSRSAQVLPPPRRGLPSLRSCEQEPSAMHRAPVEQVKRRPPPRNHCLPVLSGAPFVICSSCVSLVQLPADFAVPSRGARRLRCGACSELLSYSYRDPAGRKKPRSPFEGDECSTDGYDEIRHQAAGAGFERAGPAVSYSEEYGLSFGIGHSTSSSTEDGQPLYVSRNSSFNTADDGRMGRDGKLHRLMGYSSASELLRHSPDLFESFDRRAPSARAHVDGKGKGVCVAGNDAAGARDGAAKRSKARSGGLPLHGILKKGIHGLESLKLRS

SEQ ID NO: 157869 - protein, 307 aa, Zea Mays
MDNPEEGKEHLENITIPSVLITKKLGESLKKSAENGDMLSVLLDWRESLPHPDERVEYEFWTNSNDECGPKCDMQMDFVKSFRGTAQILEKKGYTQFTPHYITWYCPEAFVDSKQCKSQCINHGRYCAPDPEQDFSQGYDGRNVVVQNLHQICVFKIANETGKPWLWWDYVHDFALRCPMKDKKYNHDCASDVIKSLGLDIEKINKCVGDPEANEENVILKAEQDAQIGHGKRGDVTILPTLVINNRQYRGKLDKVAVLKAICSGFEETTEPAVCLSEEVQTNECLENNGGCWLDKANNVTACKVQF

SEQ ID NO: 157870 - protein, 568 aa, Zea Mays
MHAGTRPSHRHEYGTLAHPTSHTSPIQRPPASRRTLSASDPRVVVQRLHPSPLSSLHPEHKQAAADRTRLVSPAASNWSSAGREGSFSRPVDLRCCALVVVKITIRLLDRAILPFAASPHTSRSKEPKFPARPAGAGGTGIRALPCFYQQLHWPLRFVVEKNSIQVTSPDELKGKYECAIGNFGVPQYGGTLHGLVEYPKSNRKACQSFDISFKPKQAGGRPTFVLVDRGECFFTTKAWNAQNAGAAAVLVVDDKSEPLITMDNPEEGKEHLENITIPSVLITKKLGESLKKSAENGDMLSVLLDWRESLPHPDERVEYEFWTNSNDECGPKCDMQMDFVKSFRGTAQILEKKGYTQFTPHYITWYCPEAFVDSKQCKSQCINHGRYCAPDPEQDFSQGYDGRNVVVQNLHQICVFKIANETGKPWLWWDYVHDFALRCPMKDKKYNHDCASDVIKSLGLDIEKINKCVGDPEANEENVILKAEQDAQIGHGKRGDVTILPTLVINNRQYRGKLDKVAVLKAICSGFEETTEPAVCLSEEVQTNECLENNGGCWLDKANNVTACKVQF

SEQ ID NO: 157871 - protein, 233 aa, Zea Mays
MPGQNADPCCAFHPMSRAATRFFLTRCLLPLPLLSPRWRQRRRGSICATRAFAMAASGFGGGEAFRLSAAPGAGLLKLHKGDITLWSVDCATDAIVNAANERMLGGGGVDGAIHQAAGPELVQACRKVPEVKPGVRCPTGEARITPAFELPASRVIHTVGPIYDLDKHPEVSLKKAYENSLKLAKDNGIQYIAFPAISCGVYRYPPKEASKIAVSTAQKFSEDIKELLSQFEK

SEQ ID NO: 157872 - protein, 667 aa, Zea Mays
MKISDGEDENITCHLSKSLGDKNLYVGMNGHTHLSNYFPGVRNTALSTGLSTRASHFVHNAPKLHSSFCHDNSHGDSEKCYLNHGMEQVSHYTAKAFCIDDKTTIQSQVFVSNPSLLSTSAAVTASELATKQKKWSTAYVEKQHFSPSPSSLPDLSGDLDSQFRCLRQVQYHLEYLFDGFLQSVQGASSADKFHKDPFHISACSILLDRDTGSPRLQLLSPARSNGRDPSPVSCSQSTECVSQHSQNGSPWDMASQRSVSVPSGIDIPPNGVSPCSSCADSEVSSVSWFHGSGDSAMMHGSGKDTYFTRKSCYTRWERLASSRKNGKILPNQSVKYKSNQKSAPGARFVSHKEQAAIDSRTKEITIDQALKIHEYIESDMKIVEKLSCHNQKEVRHDNEARQLPNNNQDVCLNKNFLQNRYHVESTRAPRATHQIPKYQPFKIQNTTECDRASLSKNMPRKHSCGTWKEYEILDRPTKQRPICGPLKLENRHVWDCTKKISAGNQKCNNHKDYLSFVRGAVPRSHAASTPNGLEKEAANSNKSADNGSPVRPILPELLLSCHDINSQERSPSSSAHQSYFPAANDRPLETIEFGSLGPFALPLSSLKSNGTTNTEATSKVFTDASPFVLQRSRAAATENRPPGLCKVGDEDEFPPLRAGIRVFLGAS

SEQ ID NO: 157873 - protein, 661 aa, Zea Mays
MKISDGEDENITCHLSKSLGDKNLYVGMNGHTHLSNYFPGVRNTALSTGLSTRASHFVHNAPKLHSSFCHDNSHGDSEKCYLNHGMEQVSHYTAKAFCIDDKTTIQSQVFVSNPSLLSTSAAVTASELATKQKKWSTAYVEKQHFSPSPSSLPDLSGDLDSQFRCLRQVQYHLEYLFDGFLQSVQGASSADKFHKDPFHISACSILLDRDTGSPRLQLLSPARSNGRDPSPVSCSQSTECVSQHSQNGSPWDMASQRSVSVPSGIDIPPNGVSPCSSCADSEVSSVSWFHGSGDSAMMHGSGKDTYFTRKSCYTRWERLASSRKNGKILPNQSVKYKSNQKSAPGARFVSHKEQAAIDSRTKEITIDQALKIHEYIESDMKIVEKLSCHNQKEVRHDNEARQLPNNNQDVCLNKNFLQNRYHVESTRAPRATHQIPKYQPFKIQNTTECDRASLSKNMPRKHSCGTWKEYEILDRPTKQRPICGPLKLENRHVWDCTKKISAGNQKCNNHKDYLSFVRGAVPRSHAASTPNGLEKEAANSNKSADNGSPVRPILPELLLSCHDINSQERSPSSSAHQSYFPAANDRPLETIEFGSLGPFALPLSSLKSNGTTNTEATSKVFTDASPFVLQRSRAAATENRPPGLCKVGDEDEFPPLRAGIR

SEQ ID NO: 157874 - protein, 757 aa, Zea Mays
MDKATVPPKNSDSCYPRFRPKHLNIVDPLKEYNNLGRSVNRASFNRIRTAFLYGARKLGHIVTLPSEVIPDEIYEFFKNTLGRNELGARPDIDSNYAFHSSFGTAETILEDISSMKISDGEDENITCHLSKSLGDKNLYVGMNGHTHLSNYFPGVRNTALSTGLSTRASHFVHNAPKLHSSFCHDNSHGDSEKCYLNHGMEQVSHYTAKAFCIDDKTTIQSQVFVSNPSLLSTSAAVTASELATKQKKWSTAYVEKQHFSPSPSSLPDLSGDLDSQFRCLRQVQYHLEYLFDGFLQSVQGASSADKFHKDPFHISACSILLDRDTGSPRLQLLSPARSNGRDPSPVSCSQSTECVSQHSQNGSPWDMASQRSVSVPSGIDIPPNGVSPCSSCADSEVSSVSWFHGSGDSAMMHGSGKDTYFTRKSCYTRWERLASSRKNGKILPNQSVKYKSNQKSAPGARFVSHKEQAAIDSRTKEITIDQALKIHEYIESDMKIVEKLSCHNQKEVRHDNEARQLPNNNQDVCLNKNFLQNRYHVESTRAPRATHQIPKYQPFKIQNTTECDRASLSKNMPRKHSCGTWKEYEILDRPTKQRPICGPLKLENRHVWDCTKKISAGNQKCNNHKDYLSFVRGAVPRSHAASTPNGLEKEAANSNKSADNGSPVRPILPELLLSCHDINSQERSPSSSAHQSYFPAANDRPLETIEFGSLGPFALPLSSLKSNGTTNTEATSKVFTDASPFVLQRSRAAATENSAGG

SEQ ID NO: 157875 - protein, 775 aa, Zea Mays
MDKATVPPKNSDSCYPRFRPKHLNIVDPLKEYNNLGRSVNRASFNRIRTAFLYGARKLGHIVTLPSEVIPDEIYEFFKNTLGRNELGARPDIDSNYAFHSSFGTAETILEDISSMKISDGEDENITCHLSKSLGDKNLYVGMNGHTHLSNYFPGVRNTALSTGLSTRASHFVHNAPKLHSSFCHDNSHGDSEKCYLNHGMEQVSHYTAKAFCIDDKTTIQSQVFVSNPSLLSTSAAVTASELATKQKKWSTAYVEKQHFSPSPSSLPDLSGDLDSQFRCLRQVQYHLEYLFDGFLQSVQGASSADKFHKDPFHISACSILLDRDTGSPRLQLLSPARSNGRDPSPVSCSQSTECVSQHSQNGSPWDMASQRSVSVPSGIDIPPNGVSPCSSCADSEVSSVSWFHGSGDSAMMHGSGKDTYFTRKSCYTRWERLASSRKNGKILPNQSVKYKSNQKSAPGARFVSHKEQAAIDSRTKEITIDQALKIHEYIESDMKIVEKLSCHNQKEVRHDNEARQLPNNNQDVCLNKNFLQNRYHVESTRAPRATHQIPKYQPFKIQNTTECDRASLSKNMPRKHSCGTWKEYEILDRPTKQRPICGPLKLENRHVWDCTKKISAGNQKCNNHKDYLSFVRGAVPRSHAASTPNGLEKEAANSNKSADNGSPVRPILPELLLSCHDINSQERSPSSSAHQSYFPAANDRPLETIEFGSLGPFALPLSSLKSNGTTNTEATSKVFTDASPFVLQRSRAAATENRPPGLCKVGDEDEFPPLRAGIR

SEQ ID NO: 157876 - protein, 550 aa, Zea Mays
MIYQALNPSYMFKFLKKTRKYGWMSLGGILLCMTGSEAMFADLGHFSYSAIQLAFTCLVYPALILAYMGQAAYLSKHHDFYSSSQVGFYIAVPDKIRWPVLILAILASVVGSQAIISGTFSIINQSLSLSCFPRVKVVHTSEKIHGQIYIPEINWLLMILCIAVTVGFRDTKHMGNASGLAVITVMLVTTFLTSLVIVLCWHRPPLLALAFLLFFGSIEALYFSASLIKFLEGAWLPILLALILMAVMLIWHYTTIKKYEFDLHNKVTLEWLLALGDRLGMVRVPGIGLVYTDLTSGVPANFSRFVTNLPAFHQVLVFVCVKSVPVPYVFPAERYLIGRVGPPGHRSYRCIVRYGYRDVHQDVDSFETELVETLATFITLDASYRCSEASERELELDPGEQERRLTVIASNPLRRRASYDLQDSVQHSAASTVEVRATAADSLSPRDAEISSAAGPKQVRFFIDSHVVSPEAAENKQVADELEALAAAREAGTAFILGHSHVQCKPGSSVLKRLAVDVGYNFLRRNCRGPDVALRVPPASLLEVGMVYVL

SEQ ID NO: 157877 - protein, 467 aa, Zea Mays
MIYQALNPSYMFKFLKKTRKYGWMSLGGILLCMTGSEAMFADLGHFSYSAIQLAFTCLVYPALILAYMGQAAYLSKHHDFYSSSQVGFYIAVPDKIRWPVLILAILASVVGSQAIISGTFSIINQSLSLSCFPRVKVVHTSEKIHGQIYIPEINWLLMILCIAVTVGFRDTKHMGNASGLAVITVMLVTTFLTSLVIVLCWHRPPLLALAFLLFFGSIEALYFSASLIKFLEGAWLPILLALILMAVMLIWHYTTIKKYEFDLHNKVTLEWLLALGDRLGMVRVPGIGLVYTDLTSGVPANFSREASERELELDPGEQERRLTVIASNPLRRRASYDLQDSVQHSAASTVEVRATAADSLSPRDAEISSAAGPKQVRFFIDSHVVSPEAAENKQVADELEALAAAREAGTAFILGHSHVQCKPGSSVLKRLAVDVGYNFLRRNCRGPDVALRVPPASLLEVGMVYVL

SEQ ID NO: 157878 - protein, 487 aa, Zea Mays
MAAATAAAATASASCLLRRLKPTPSLSPPVTSANDGGGGMRWESARKKRVVLRIGYVGTDYRGLQKQQELGVDSTIESVLESAIFKSGGILESNYGKLQKIGWERSSRTDKGVHSLATMISLKMEIPDRAWEDDPDGIALASFINSNLPDNVRVFSILPAQRSFDVRRECLYREYFYLLPAEIIGIKDDYSSEEMQEHLSEFNKILKGFEGNHPFHNYTARAKYRKVLAGRHRRAKGASSALKSMSSDTGMAESSSEESTSPDHDEDLNISSIFDSGIPEDTRVNGILKLSEDRLQIQARWLHEPDESDRLNASHFRDIITCSCGDLQTSSGIQFVELTICGVSFMLHQIRKMVGTAVTVKRGLLPRDIIELSLAKFSRIVLPIAPSEVLVLKDNSFCTKSKGGRIVRPGIQSMNKSEATRKGVEEFYRAALLPEVAKFLDPSLPPWKEWLENLDRFSGIPGSQLDEVREAYRAWRDDYDRAKMARN

SEQ ID NO: 157879 - protein, 293 aa, Zea Mays
MQEHLSEFNKILKGFEGNHPFHNYTARAKYRKVLAGRHRRAKGASSALKSMSSDTGMAESSSEESTSPDHDEDLNISSIFDSGIPEDTRVNGILKLSEDRLQIQARWLHEPDESDRLNASHFRDIITCSCGDLQTSSGIQFVELTICGVSFMLHQIRKMVGTAVTVKRGLLPRDIIELSLAKFSRIVLPIAPSEVLVLKDNSFCTKSKGGRIVRPGIQSMNKSEATRKGVEEFYRAALLPEVAKFLDPSLPPWKEWLENLDRFSGIPGSQLDEVREAYRAWRDDYDRAKMARN

SEQ ID NO: 157880 - protein, 330 aa, Zea Mays
MQNARVRSAHQSSLVPCLLCILTLLSPRVPVSSTAPVLPISQPPRRHADLAEKHPPEMAMALRRLAGVSGSPSASSAAATVLLRSALTRPISTGFREERDTFGPIQVPNDKLWGAQTQRSLQNFDIGGERERMPVPIIRAFGVLKKCAAKVNMDYGLDPTIGKAIIQAAEEVAEGKLDDHFPLVIWQTGSGTQSNMNANEVIANRASEILGHKRGEKFVHPNDHVNRSQSSNDTFPTVMHIATAVEIHSRFIPSLQQLHDSLHSKTIEFKDIIKIGRTHTQDATPLTLGQEFSGYTTQILCRSNMELTALIVHYLGCTSLLKVELQLELA

SEQ ID NO: 157881 - protein, 308 aa, Zea Mays
MAMALRRLAGVSGSPSASSAAATVLLRSALTRPISTGFREERDTFGPIQVPNDKLWGAQTQRSLQNFDIGGERERMPVPIIRAFGVLKKCAAKVNMDYGLDPTIGKAIIQAAEEVAEGKLDDHFPLVIWQTGSGTQSNMNANEVIANRASEILGHKRGEKFVHPNDHVNRSQSSNDTFPTVMHIATAVEIHSRFIPSLQQLHDSLHSKTIEFKDIIKIGRTHTQDATPLTLGQEFSGYTTQVKYGIDRINCTLPRMYQLAQGGTAVGTGLNTKKGFDAKIAAAVAEETNLPFVTAENKFEALHSGGMH

SEQ ID NO: 157882 - protein, 176 aa, Zea Mays
MKIANDIRLLGSGPRCGLGELILPENEPGSSIMPGKVNPTQCEALTMVCAQVMGNHVGVTIGGANGHFELNVFKPMIAAGLLRSLRLLGDASVSFEKNCVRGIQANHKRISQLLHESLMLVTSLNPKIGYDNAAAVAKKAHKEGTTLKEAALDLGVLTEQEFHELVVPEKMIGPSD

SEQ ID NO: 157883 - protein, 58 aa, Zea Mays
MLVTSLNPKIGYDNAAAVAKKAHKEGTTLKEAALDLGVLTEQEFHELVVPEKMIGPSD

SEQ ID NO: 157884 - protein, 157 aa, Zea Mays
MAAASSVHGFTVKDASGEDVHLSTFKGKVLLIVNVASQCGLTNSNYTELAQLHEMYKDQDFEILACCVPVQPVRRAGARHERGDRPARLRSLQGQVPDSSQGRCERRGRCAHLQVSEVQQDRPHGRRHQVELRQVLGGQTGACRRAKDIKKLLGGSY

SEQ ID NO: 157885 - protein, 867 aa, Zea Mays
MRLRRAMQTSPPTVSASSLECVSSCRAASWKGGGRPYECSVLLCAWNAPRALTGALASTAQCSSCGHAEAGGGWRRRGRSRRSNNSLPRITLDEDINRGKFGYDPSRAYSTSFVRSWSTIVDRTWRSYCYSSSDSFISPETLWEDLKPAVSYLQPEELKFVHDALKLAYEAHSGQKRRSGEPFIIHPVEVARILGEHELDWESIAAGLLHDTVEDTNVVTFERIENEFGPTVRRIVEGETKVSKLGKLQCKSEGSTKQDIKAEDLRQMFLAMTEEVRVIIVKLADRLHNMRTLTHMPQHKQSELEYLSFMYVNPTGFAELRKRVEDLYKSHEQELEEANRILRQKIAEDEFLDLVSVETEVRSVYKELYSIYKTTLKSKSSINEVNQVAQLRIIIKPKSCNGVGPLCTAQQICYHVLGLVHGIWTPIPQAVEDYIATPKPNGYQSLHTTVIPFLNESMFHLEVQIRTEDMDLIAERGIAAHYSGRRVASGPVGLGISSGRNAKGKVICLNNTDFALRIGWLNAIREWQEEFVGNMSSREFVDTITRDLLGSRVFVFTPKGEIKNLPKGATVVDYAYLIHTEIGNKMIAAKVNGNLVSPIHVLANAEVVEIITYDKLSSKYAFQRHQQWLQHAKTRSARHKIMRFLREQAALSAAEITADAVNSFVADLEDESDSELSLPSTKKEDSKFNWEKILSSDKLFFVNKSSDGFLPVNNVYPKVNGKQNKTVKDLGIKINGHSTIRGDSFSELMHPSNSTCKEVFPGLDDWKSGKISGWHNTEGNSVQWLCIACVDRKGMMAEVTSALTACGITVCSCVAEVSKRRGMGAMLFHFEGSYENVVSACLSVDMIFGVLGWSVGCSWCPLGALEC

SEQ ID NO: 157886 - protein, 700 aa, Zea Mays
MRLRRAMQTSPPTVSASSLECVSSCRAASWKGGGRPYECSVLLCAWNAPRALTGALASTAQCSSCGHAEAGGGWRRRGRSRRSNNSLPRITLDEDINRGKFGYDPSRAYSTSFVRSWSTIVDRTWRSYCYSSSDSFISPETLWEDLKPAVSYLQPEELKFVHDALKLAYEAHSGQKRRSGEPFIIHPVEVARILGEHELDWESIAAGLLHDTVEDTNVVTFERIENEFGPTVRRIVEGETKVSKLGKLQCKSEGSTKQDIKAEDLRQMFLAMTEEVRVIIVKLADRLHNMRTLTHMPQHKQYAIAVETLQVFAPLAKLLGMYRIKSELEYLSFMYVNPTGFAELRKRVEDLYKSHEQELEEANRILRQKIAEDEFLDLVSVETEVRSVYKELYSIYKTTLKSKSSINEVNQVAQLRIIIKPKSCNGVGPLCTAQQICYHVLGLVHGIWTPIPQAVEDYIATPKPNGYQSLHTTVIPFLNESMFHLEVQIRTEDMDLIAERGIAAHYSGRRVASGPVGLGISSGRNAKGKVICLNNTDFALRIGWLNAIREWQEEFVGNMSSREFVDTITRDLLGSRVFVFTPKGEIKNLPKGATVVDYAYLIHTEIGNKMIAAKVNGNLVSPIHVLANAEVVEIITYDKLSSKYAFQRHQQWLQHAKTRSARHKIMRLIVLLLILKMKVIVSFHFQAPRKKIVNSTGRRY

SEQ ID NO: 157887 - protein, 529 aa, Zea Mays
MRTLTHMPQHKQYAIAVETLQVFAPLAKLLGMYRIKSELEYLSFMYVNPTGFAELRKRVEDLYKSHEQELEEANRILRQKIAEDEFLDLVSVETEVRSVYKELYSIYKTTLKSKSSINEVNQVAQLRIIIKPKSCNGVGPLCTAQQICYHVLGLVHGIWTPIPQAVEDYIATPKPNGYQSLHTTVIPFLNESMFHLEVQIRTEDMDLIAERGIAAHYSGRRVASGPVGLGISSGRNAKGKVICLNNTDFALRVNGNLVSPIHVLANAEVVEIITYDKLSSKYAFQRHQQWLQHAKTRSARHKIMRFLREQAALSAAEITADAVNSFVADLEDESDSELSLPSTKKEDSKFNWEKILSSDKLFFVNKSSDGFLPVNNVYPKVNGKQNKTVKDLGIKINGHSTIRGDSFSELMHPSNSTCKEVFPGLDDWKSGKISGWHNTEGNSVQWLCIACVDRKGMMAEVTSALTACGITVCSCVAEVSKRRGMGAMLFHFEGSYENVVSACLSVDMIFGVLGWSVGCSWCPLGALEC

SEQ ID NO: 157888 - protein, 551 aa, Zea Mays
MFLAMTEEVRVIIVKLADRLHNMRTLTHMPQHKQYAIAVETLQVFAPLAKLLGMYRIKSELEYLSFMYVNPTGFAELRKRVEDLYKSHEQELEEANRILRQKIAEDEFLDLVSVETEVRSVYKELYSIYKTTLKSKSSINEVNQVAQLRIIIKPKSCNGVGPLCTAQQICYHVLGLVHGIWTPIPQAVEDYIATPKPNGYQSLHTTVIPFLNESMFHLEVQIRTEDMDLIAERGIAAHYSGRRVASGPVGLGISSGRNAKGKVICLNNTDFALRVNGNLVSPIHVLANAEVVEIITYDKLSSKYAFQRHQQWLQHAKTRSARHKIMRFLREQAALSAAEITADAVNSFVADLEDESDSELSLPSTKKEDSKFNWEKILSSDKLFFVNKSSDGFLPVNNVYPKVNGKQNKTVKDLGIKINGHSTIRGDSFSELMHPSNSTCKEVFPGLDDWKSGKISGWHNTEGNSVQWLCIACVDRKGMMAEVTSALTACGITVCSCVAEVSKRRGMGAMLFHFEGSYENVVSACLSVDMIFGVLGWSVGCSWCPLGALEC

SEQ ID NO: 157889 - protein, 558 aa, Zea Mays
MYVNPTGFAELRKRVEDLYKSHEQELEEANRILRQKIAEDEFLDLVSVETEVRSVYKELYSIYKTTLKSKSSINEVNQVAQLRIIIKPKSCNGVGPLCTAQQICYHVLGLVHGIWTPIPQAVEDYIATPKPNGYQSLHTTVIPFLNESMFHLEVQIRTEDMDLIAERGIAAHYSGRRVASGPVGLGISSGRNAKGKVICLNNTDFALRIGWLNAIREWQEEFVGNMSSREFVDTITRDLLGSRVFVFTPKGEIKNLPKGATVVDYAYLIHTEIGNKMIAAKVNGNLVSPIHVLANAEVVEIITYDKLSSKYAFQRHQQWLQHAKTRSARHKIMRFLREQAALSAAEITADAVNSFVADLEDESDSELSLPSTKKEDSKFNWEKILSSDKLFFVNKSSDGFLPVNNVYPKVNGKQNKTVKDLGIKINGHSTIRGDSFSELMHPSNSTCKEVFPGLDDWKSGKISGWHNTEGNSVQWLCIACVDRKGMMAEVTSALTACGITVCSCVAEVSKRRGMGAMLFHFEGSYENVVSACLSVDMIFGVLGWSVGCSWCPLGALEC

SEQ ID NO: 157890 - protein, 221 aa, Zea Mays
MQTPFSLRLYIALSSPSVRVLVISPASILSSRRGKNGRPELPRRDRRERNLHPRLRVADSDVPAHREEQEHGGLQVAAVRHHPAQHQPLDLLRPPQARRPPRRHRQRRRRRARGRLRRALPRLRAKGDQGEDGQGGGGRERRLPCRGRRGGAAGAARRRPPVRGGPAVRRAHGRDVRGTARRDGQYTLYSPVGSISLPVLAVAVLQGTKPSFWLTNTPGQC

SEQ ID NO: 157891 - protein, 253 aa, Zea Mays
MGVTHFLILSNPQSLPHLRFAKSPQGPTFTFQIEEYSLAADIANSQKRPRCPPGIFKNSPLVVLGGLTGLGNPFRSLVEYFQHMFPSVDPTTVKLATCQRILLLKHDKEKDVIEFRHYSIKLQPVGVSRRIRKLMQNNQVPDLGEFEDVSEFVKKAGYGSESEADDEAAMVSLPSDIDKLNRASRKSAVRLQEIGPRMTMRLVKVEAGLCSGDVLYPWPVEKEVVGKKGTETGEVEGQEDDSEATDESEDEMV

SEQ ID NO: 157892 - protein, 227 aa, Zea Mays
MLPARWIEEYSLAADIANSQKRPRCPPGIFKNSPLVVLGGLTGLGNPFRSLVEYFQHMFPSVDPTTVKLATCQRILLLKHDKEKDVIEFRHYSIKLQPVGVSRRIRKLMQNNQVPDLGEFEDVSEFVKKAGYGSESEADDEAAMVSLPSDIDKLNRASRKSAVRLQEIGPRMTMRLVKVEAGLCSGDVLYPWPVEKEVVGKKGTETGEVEGQEDDSEATDESEDEMV

SEQ ID NO: 157893 - protein, 57 aa, Zea Mays
MLGVCVMYVASKSKYYSINVLLLTCSAHNLLWVDTVPIYYACWLLAGNEYIFRLYQL

SEQ ID NO: 157894 - protein, 66 aa, Zea Mays
MYTHIKIQILKYVTNKLFIPTIILHSFTNAGTVSNLPYFFMTLFQELISIPVSVSKMESRDEMVTS

SEQ ID NO: 157895 - protein, 62 aa, Zea Mays
MRCNQCTVSNLPYFFMTLFQELISIPVSVSKMESRDHWLLLLSSSAAAFEWCCCFQVEVSCC

SEQ ID NO: 157896 - protein, 63 aa, Zea Mays
MSKKATLHPFRVPSSCSPPPLACKFSPNLSAISLRSLLLPMWTDQVCSFASTRHVPRTVLSPP

SEQ ID NO: 157897 - protein, 77 aa, Zea Mays
MLPSAPGIRGRSATRTGRFACCRCGNSRDTCLRQQHVPNRLSVPGHRDTSFSKSLRLQQLCLPCSKYITLRLSRKSS

SEQ ID NO: 157898 - protein, 68 aa, Zea Mays
MGHLVHYKDHHNLVSLTLIASELETKIEEEEKQSKRKSSKEHKSLSLVTNLFGVIPDLGEDLISLFVS

SEQ ID NO: 157899 - protein, 186 aa, Zea Mays
MSSAPDIIGNTLHAHHDHGSSGHHHGIDLEHPVLALSMTTLAISIKEGLYWITKRAGEKEGSGLMKANAWHHRADAISSVVALVGVGGSILGLPLLDPLAGLVVSGMILKAGIKTGYERGVRQPSGIILRRSSHAGRENPRTPAPPIHSGTVAHVRSDRDGTAGPGPGLRPVLWRGTAGEIFVTTP

SEQ ID NO: 157900 - protein, 843 aa, Zea Mays
MGFGFVRLAARAAVSRRGMTPATSARRALAPPAVPAEPRCGPHWLVAARGHVGHSHHRGGEDEGETSERIFRLGLAADVVLTAGKAVTGYLSGSTAIAADAAHSLSDIVLSGVALLSYRAAKAPRDKEHPYGHGKFESLGALGISSMLLVTSGGIAWHAFEVLQGVMSSAPDIIGNTLHAHHDHGSSGHHHGIDLEHPVLALSMTTLAISIKEGLYWITKRAGEKEGSGLMKANAWHHRADAISSVVALVGVGGSILGLPLLDPLAGLVVSGMILKAGIKTGYESVLELVDAAVDPSLLEPIKETILRVHGVKGCHRLRGRKAGTSLYLDVHIEVYPFLSVSAAHDIGETVRHQIQKEHNQVAEVFIHIDPSYLVGPTMDLKRILKDSDGTNSEAIPRQQSAEAIVSNIISSHFSEAQRWSDDGGLASFAGASADSRPQASYKEVLLSSRPPIHHPAAEVDGDGWVRVKDRRACFRDHRACQRDLRHPGLSAPKATPIDLQGWCFNCFSSSHRAISCCRQDACPVAPSLSPQMAALDQSVSALRPCCVIKHSRRIIQAEENLRSALFVNVVGPEDSGRTAEVLNALTQRFGFEDDVIDLRRVAPNSFPSDDLANRVFNGVMAPFISFITPTPVHAAVEVHASVKSAWFQAPGVSSNALVEHLLGNLTVSAQDFGMPQIEKCVDGLGAVGAVVLHSPALPSVQVSRSGSSKILKVYHRRIRPKLQLQEVNTCDIANNFIEMVTKPLSTILSTPASPKPKTRKNISPNFVPRRSRRVAKLHPLVFGLKNKHGSLSSADLEHCAQEFSKSVSLKQVKVLSKVGLQALSPGIADIVFQDWWGGGGGG

SEQ ID NO: 157901 - protein, 425 aa, Zea Mays
MGFGFVRLAARAAVSRRGMTPATSARRALAPPAVPAEPRCGPHWLVAARGHVGHSHHRGGEDEGETSERIFRLGLAADVVLTAGKAVTGYLSGSTAIAADAAHSLSDIVLSGVALLSYRAAKAPRDKEHPYGHGKFESLGALGISSMLLVTSGGIAWHAFEVLQGVMSSAPDIIGNTLHAHHDHGSSGHHHGIDLEHPVLALSMTTLAISIKEGLYWITKRAGEKEGSGLMKANAWHHRADAISSVVALVGVGGSILGLPLLDPLAGLVVSGMILKAGIKTGYESVLELVDAAVDPSLLEPIKETILRVHGVKGCHRLRGRKAGTSLYLDVHIEVYPFLSVSAAHDIGETVRHQIQKEHNQVAEVFIHIDPSYLVGPTMDLKRILKDSDGTNSEAIPRQQSAEAIVSNIISSHFSEVLRSLFCPQ

SEQ ID NO: 157902 - protein, 255 aa, Zea Mays
MAPSCRCYFICRCPSRGGSILGLPLLDPLAGLVVSGMILKAGIKTGYESVLELVDAAVDPSLLEPIKETILRVHGVKGCHRLRGRKAGTSLYLDVHIEVYPFLSVSAAHDIGETVRHQIQKEHNQVAEVFIHIDPSYLVGPTMDLKRILKDSDGTNSEAIPRQQSAEAIVSNIISSHFSEKMALEHLMLHYVQGRVLLQVQVSMSPEILIRDAMEVAKQAEEEILRADASISQISLQLRLGQQIKQLQLASQERR

SEQ ID NO: 157903 - protein, 524 aa, Zea Mays
MHFGCATFLQWMLLLLPNPPFKPIYYTLVIIDLCKALPGAFPSVVVGAVHALFDRISNMDMECRTRLILWFSHHLSNFQFIWPWQEWSYVKDLPKWAPQRVFVQEVLEREVRLSYFEKIKQSIEDAAELEELLPPKAGPNFKFHSDESNESTDGLKLSKELIGLIRGKKSTYDIILWVEEQIIPKNGTEFALDVVSQTLLDMGSKSFTHLVTILERYNKIISKLCPNEEMQLLLMNGVSAYWKNSTQMTAIAIDRMMGYRLISNLAIVKWVFSPANVEQFHVSDRPWEILRNAVSKTYNRISDLRKEIQSLKKGLQVAKEASAKNRKELEEAKSVLEIVEGQPAPAERPGRIRRLESHVKNAEDEERTLEESLEAKGVLLARAHEESKDLLKLLFKSFVDVLTERLPPVSVDGEIPNLRSGDQNVNFAAQNSEAATMEIDNENGADNNSEPNERNTKNAYNVGELEQWCLCTLGYLKSFSRQYASEIWSNIAMLDEVFVGDVHPLIRKAAFSGLRRFTNEGSHP

SEQ ID NO: 157904 - protein, 194 aa, Zea Mays
MPWNRFMPFLSKCCTSTVQTSSSYSSFSSSFSPIQPWLFVGLGNPGEKYQSTRHNVGFDMIDAFAQSQGIPLTTHYFKALFGEGMVDGVPVLLAKPQTYMNLSGESVGPLAAYYKLPLNRVLVAFDDMDLPCGVLRLQPKGGSGRHNGLKSVIYHFRKNREFCRLRIGIGRPAGQMDPKAFVLQKFNRTGRERP

SEQ ID NO: 157905 - protein, 163 aa, Zea Mays
MPWNRFMPFLSKCCTSTVQTSSSYSSFSSSFSPIQPWLFVGLGNPGEKYQSTRHNVGFDMIDAFAQSQGIPLTTHYFKALFGEGMVDGVPVLLAKPQTYMNLSGESVGPLAAYYKLPLNRVLVVMNPCQNPAAELLKKALLHLPKGQLIPIKHTSVALNAPST

SEQ ID NO: 157906 - protein, 158 aa, Zea Mays
MPWNRFMPFLSKCCTSTVQTSSSYSSFSSSFSPIQPWLFVGLGNPGEKYQSTRHNVGFDMIDAFAQSQGIPLTTHYFKALFGEGMVDGVPVLLAKPQTYMNLSGESVGPLAAYYKLPLNRVLVAFDDMDLPCGVLRLQPKGGSGRHNGNWTASWPDGS

SEQ ID NO: 157907 - protein, 201 aa, Zea Mays
MPWNRFMPFLSKCCTSTVQTSSSYSSFSSSFSPIQPWLFVGLGNPGEKYQSTRHNVGFDMIDAFAQSQGIPLTTHYFKALFGEGMVDGVPVLLAKPQTYMNLSGESVGPLAAYYKLPLNRVLVAFDDMDLPCGVLRLQPKGGSGRHNGLKSVIYHFRKNREFCRLRIAGQMDPKAFVLQKFNRTGRERRGWCACTAFLLKA

SEQ ID NO: 157908 - protein, 222 aa, Zea Mays
MPWNRFMPFLSKCCTSTVQTSSSYSSFSSSFSPIQPWLFVGLGNPGEKYQSTRHNVGFDMIDAFAQSQGIPLTTHYFKALFGEGMVDGVPVLLAKPQTYMNLSGESAFDDMDLPCGVLRLQPKGGSGRHNGLKSVIYHFRKNREFCRLRIGIGRPAGQMDPKAFVLQKFNRTGRERIDSAVREGVDILKMVAARGLTEAAKLTNADQKYKHLRSHGIQTNDD

SEQ ID NO: 157909 - protein, 134 aa, Zea Mays
MPWNRFMPFLSKCCTSTVQTSSSYSSFSSSFSPIQPWLFVGLGNPGEKYQSTRHNVGFDMIDAFAQSQGIPLTTHYFKALFGEGMVDGVPVLLAKPQTYMNLSGESAFDDMDLPCGVLRLQPKGGSGRHNGLSG

SEQ ID NO: 157910 - protein, 54 aa, Zea Mays
MLCFIVYIYENGCCENPLNQRKSIIYQVIVIRGIHRRLNPKFADPFIFLCMQVL

SEQ ID NO: 157911 - protein, 600 aa, Zea Mays
MSLCVFLRRAGSLRRGAGTGLLSINTRAPTNWEGKYTTTTTKRTNQRSTLPDQRGEQDSSQQPMEAALTQQAAATATATPTRWRCVGDASLASHGQGQQRAGAVRLGAARRAVSGAVRASSSRHLGPVRALVSEAAGGERAAEGEGMDTAVRLFVGLPADAVVSDGRGVGRPRAVSAALRALKLLGVDGVELPVSWAVAQPGPGGWFEWAGYRAVAAMVRDAGLDLRVSLRTDGDALPGWVADAAAADPDVLFTDRSGHRRMGCLSFAVDELPVLVGKSPLQAYEAFFRSFAEEFDDLFGSTITDVTISLGPNGELQYPSYPPGNQGSRGFDGVGEFQCYDKYMLARLKRHAESSGQPLWGLSGPHDGPRYDDESPESSAFFRELGGSWKSAYGEFFLSWYTGELLAHGDRVLAAASSAFRGKPVELSAKVPLLRGPGTGPSPADATAGFHGGYGPVAEMFARHGCAVIAAGVEARPDATAEERLAQVKAACTEHGVHLAAESAPLAVARGSDGDGPTRVVWLSAGRTRPCQFTYQRMGAEFFSPGHWPLFVQFVRALECPEEAHEDDLPASADGGERLTVPSAAAAAPKDQATREVQTV

SEQ ID NO: 157912 - protein, 322 aa, Zea Mays
MVVKTLTELSLQDKDVTVQVEVNRRWEFRGIGDDGPVLHVDMILTDATGNAIYAEVPAKLLEQKGSLLQLNKVYYIRRFRVANAKSQYKVIDAPLMIYFTVYSIIEVCRDPPSTFPLYVYNLIPYEAIDANGPKSKDFHGSVYLSGGAACHWYFNPSINGAQPYYQRIHNENVTIKLPPLTNEQAAFVNPPETQHKDLKELLESEPLTLPEEGFKCTVTITRVLDDQPWWYKACNTCPNKPSMRSSVSSCPTCGSTDAILRKRTPNQVSHSFTWKRPIFAINQIEHSNASVNSNKTSIENKTGNFTLYDIVQPIYIHFSRAT

SEQ ID NO: 157913 - protein, 190 aa, Zea Mays
MVVKTLTELSLQDKDVTVQVEVNRRWEFRGIGDDGPVLHVDMILTDATGNAIYAEVPAKLLEQKGSLLQLNKVYYIRRFRVANAKSQYKVIDAPLMIYFTVYSIIEVCRDPPSTFPLYVYNLIPYEAIDANGPKSKDFHDILGMINEVSEINPIQLSGKSSIYRNVFIKNLRICISKWWCSLPLVFQSIH

SEQ ID NO: 157914 - protein, 179 aa, Zea Mays
MVVKTLTELSLQDKDVTVQVEVNRRWEFRGIGDDGPVLHVDMILTDATGNAIYAEVPAKLLEQKGSLLQLNKVYYIRRFRVANAKSQYKVIDAPLMIYFTVYSIIEVCRDPPSTFPLYVYNLIPYEAIDANGPKSKDFHDILGMINEVSEINPIQLSGKSSIYRNVFIKNLRRKVLNAL

SEQ ID NO: 157915 - protein, 171 aa, Zea Mays
MVVKTLTELSLQDKDVTVQVEVNRRWEFRGIGDDGPVLHVDMILTDATGNAIYAEVPAKLLEQKGSLLQLNKVYYIRRFRVANAKSQYKVIDAPLMIYFTVYSIIEVCRDPPSTFPLYVYNLIPYEAIDANGPKSKDFHGKNDIILLYFTSIIRTYYELSILRIAQSRNTM

SEQ ID NO: 157916 - protein, 114 aa, Zea Mays
MTAQTAEELATQIEQQKLEEQKTEAEEVVVEDEEEEDEDDDDDDKDDDELDGDASGKSKQSRSEKKSRKAMLKLGMKPITGVSRVTVKKNTLCHLQTRCVQEPEFRHVCHIRRG

SEQ ID NO: 157917 - protein, 199 aa, Zea Mays
MTAQTAEELATQIEQQKLEEQKTEAEEVVVEDEEEEDEDDDDDDKDDDELDEGDASGKSKQSRSEKKSRKAMLKLGMKPITGVSRVTILFVISKPDVFKSPNSDTYVIFGEAKIEDLSSQLQTQAAEQFKAPDLSQMILNPETSGPGQEDNDEEVDETGVEAKDIELVMTQASVSRPKAVKALKASNGDIVTAIMDLTT

SEQ ID NO: 157918 - protein, 234 aa, Zea Mays
MFEKGQSKRIWGELYKVIDSSDVVVQVLDARDPMGTRCYHLERHLKENCKHKHLVFLLNKCDLIPAWATKGWLRTLSKDYPTLAFHASINKSFGKGSLLSVLRQFARLKNDKQAISVGFVGYPNVGKSSVINTLRSKSVCKVAPIPGETKVWQYITLTKKIFLIDCPGVVYQNNDSETDIVLKGVVRVTNLADAAEHIGEVLRRVKKEHLQRAYKIQDCCAGPLENFSRAGSLI

SEQ ID NO: 157919 - protein, 820 aa, Zea Mays
MPEKSSVQTPELFKGVLKEYQLKGLQWLVNCYEQGLNGILADEMGLGKTVQAMAFLSHLAEDKNIWGPFLVVAPASVVNNWAEELIRFCPDLKILPYWGPERMILRKNINPKRLYRRDASFHILITNYQILVNEEKLLRRVKWQYMVLDEAQAIKSSSSQRWKTLLSFSCRNRLLLTGTPIQNNMAELWALLHFIMPTLFDSHEQFNEWFSKGIEGHAEHGGALNEHQLSRLHAILKPFMLRRVKIDVIAEMTKKKEEIVPCKLSSRQQIFYQAIKNKISLNELLDGSRGNLNDKKLLSLMNIVMQLRKVCNHPELFERNEGSSYFYFADIPNSLLSPPFGALQDVHYAGKRNPIIFEIPKLVYDGIICNTENSGSICGFQNGYLNRLFNIFLPSNIHRSAIPEVNSSNESVLSSGAFGFTRLSNLCPVEAFFLATSSFFEGLAFSVMRWNRNYTDEIMDAFLDSEDTDIQFSQNDSTRVRAVARLLLSSTKAKPSLLRTKIGTGPSEGPYEALVLSHHDRLASNIRVLRSAYTYIPPARAPPINVSCADRNFAYKFTDEMYDPWVMKLFLGFARTSEFNGPRQPVALHPLIQELNTDLPILEPMLQLPYRIFGSSPPMSNFDPAKMLTDSGKLHTLDMLLRRLRAEGHRVLLFAQMTKMLDILEDYMNFRKFKYFRLDGSSAISDRRDMVRAFQNRNDVFVFLLSTRAGGLGINLTAADTVIFYEIDWNPTQDQQAMDRTHRLGQTKEVTVYRLICKDTIEEKILQRAKQKNAVQELVMKGKHVQDDHLLRQEDVVSLLIDDTQIAHKLKEISMQVNIT

SEQ ID NO: 157920 - protein, 950 aa, Zea Mays
MDPRRAPPRGGGGLSYSTLFNLEPLQNLRVPVPENLARYGNSSSNGSPSSEGQGSLLDQYNGVHDASHGLHRKRKKHPDGAGDDDHADAYSNKMMEDHYRAMLSEHVQKYRRSKFKEGAFISDPSQVAIPQIKHKNGGKKVMKHISNFRDIAALNGIEASHEYNWIECIETHGGFNKLVASVDSTYLDMGDNIHYLVPEGYDKLALSLNLPISSDIRVEEHFLKGALDLCTLSAMLGTDQRFEASSHGGLSEPLPQFESLKERVKVQKFSLQVTEDPFAIPEGAAGRIRRSIISETGNLQVHYVKVLEKGDTYEIIERSLPKKQIVKKEPFVIVKEESEKTYKLWQYLATKSIPKHHRNFTSLMKKRQVDAKRFSDSCQREVKFKVRRSLKLMRCAAIRTRQLARDMLIFWKRVDKEQYELRKKEEREAAEALKREEELREAKRQQQRLNFLLSQTELYSHFMQNKAGGSAPPDEEDVPDEDEEEDPEEAQLKREALRAAQHAVSQQKMRTNAFDSETVRLRQTSESVLPTDDSSSMDPSKIDLLHPSTMPEKSSVQTPELFKGVLKEYQLKGLQWLVNCYEQGLNGILADEMGLGKTVQAMAFLSHLAEDKNIWGPFLVVAPASVVNNWAEELIRFCPDLKILPYWGPERMILRKNINPKRLYRRDASFHILITNYQILVNEEKLLRRVKWQYMVLDEAQAIKSSSSQRWKTLLSFSCRNRLLLTGTPIQNNMAELWALLHFIMPTLFDSHEQFNEWFSKGIEGHAEHGGALNEHQLSRLHAILKPFMLRRVKIDVIAEMTKKKEEIVPCKLSSRQQIFYQAIKNKISLNELLDGSRGNLNDKKLLSLMNIVMQLRKVCNHPELFERNEGSSYFYFADIPNSLLSPPFGALQDVHYAGKRNPIIFEIPKLVYDGIICNTENSGSICGFQNGYLNRLKLSSWPLHHSLRD

SEQ ID NO: 157921 - protein, 1364 aa, Zea Mays
MDPRRAPPRGGGGLSYSTLFNLEPLQNLRVPVPENLARYGNSSSNGSPSSQGSLLDQYNGVHDASHGLHRKRKKHPDGAGDDDHADAYSNKMMEDHYRAMLSEHVQKYRRSKFKEGAFISDPSQVAIPQIKHKNGGKKVMKHISNFRDIAALNGIEASHEYNWIECIETHGGFNKLVASVDSTYLDMGDNIHYLVPEGYDKLALSLNLPISSDIRVEEHFLKGALDLCTLSAMLGTDQRFEASSHGGLSEPLPQFESLKERVKVQKFSLQVTEDPFAIPEGAAGRIRRSIISETGNLQVHYVKVLEKGDTYEIIERSLPKKQIVKKEPFVIVKEESEKTYKLWQYLATKSIPKHHRNFTSLMKKRQVDAKRFSDSCQREVKFKVRRSLKLMRCAAIRTRQLARDMLIFWKRVDKEQYELRKKEEREAAEALKREEELREAKRQQQRLNFLLSQTELYSHFMQNKAGGSAPPDEEDVPDEDEEEDPEEAQLKREALRAAQHAVSQQKMRTNAFDSETVRLRQTSESVLPTDDSSSMDPSKIDLLHPSTMPEKSSVQTPELFKGVLKEYQLKGLQWLVNCYEQGLNGILADEMGLGKTVQAMAFLSHLAEDKNIWGPFLVVAPASVVNNWAEELIRFCPDLKILPYWGPERMILRKNINPKRLYRRDASFHILITNYQILVNEEKLLRRVKWQYMVLDEAQAIKSSSSQRWKTLLSFSCRNRLLLTGTPIQNNMAELWALLHFIMPTLFDSHEQFNEWFSKGIEGHAEHGGALNEHQLSRLHAILKPFMLRRVKIDVIAEMTKKKEEIVPCKLSSRQQIFYQAIKNKISLNELLDGSRGNLNDKKLLSLMNIVMQLRKVCNHPELFERNEGSSYFYFADIPNSLLSPPFGALQDVHYAGKRNPIIFEIPKLVYDGIICNTENSGSICGFQNGYLNRLFNIFLPSNIHRSAIPEVNSSNESVLSSGAFGFTRLSNLCPVEAFFLATSSFFEGLAFSVMRWNRNYTDEIMDAFLDSEDTDIQFSQNDSTRVRAVARLLLSSTKAKPSLLRTKIGTGPSEGPYEALVLSHHDRLASNIRVLRSAYTYIPPARAPPINVSCADRNFAYKFTDEMYDPWVMKLFLGFARTSEFNGPRQPVALHPLIQELNTDLPILEPMLQLPYRIFGSSPPMSNFDPAKMLTDSGKLHTLDMLLRRLRAEGHRVLLFAQMTKMLDILEDYMNFRKFKYFRLDGSSAISDRRDMVRAFQNRNDVFVFLLSTRAGGLGINLTAADTVIFYEIDWNPTQDQQAMDRTHRLGQTKEVTVYRLICKDTIEEKILQRAKQKNAVQELVMKGKHVQDDHLLRQEDVVSLLIDDTQIAHKLKEISMQP

SEQ ID NO: 157922 - protein, 1276 aa, Zea Mays
MMEDHYRAMLSEHVQKYRRSKFKEGAFISDPSQVAIPQIKHKNGGKKVMKHISNFRDIAALNGIEASHEYNWIECIETHGGFNKLVASVDSTYLDMGDNIHYLVPEGYDKLALSLNLPISSDIRVEEHFLKGALDLCTLSAMLGTDQRFEASSHGGLSEPLPQFESLKERVKVQKFSLQVTEDPFAIPEGAAGRIRRSIISETGNLQVHYVKVLEKGDTYEIIERSLPKKQIVKKEPFVIVKEESEKTYKLWQYLATKSIPKHHRNFTSLMKKRQVDAKRFSDSCQREVKFKVRRSLKLMRCAAIRTRQLARDMLIFWKRVDKEQYELRKKEEREAAEALKREEELREAKRQQQRLNFLLSQTELYSHFMQNKAGGSAPPDEEDVPDEDEEEDPEEAQLKREALRAAQHAVSQQKMRTNAFDSETVRLRQTSESVLPTDDSSSMDPSKIDLLHPSTMPEKSSVQTPELFKGVLKEYQLKGLQWLVNCYEQGLNGILADEMGLGKTVQAMAFLSHLAEDKNIWGPFLVVAPASVVNNWAEELIRFCPDLKILPYWGPERMILRKNINPKRLYRRDASFHILITNYQILVNEEKLLRRVKWQYMVLDEAQAIKSSSSQRWKTLLSFSCRNRLLLTGTPIQNNMAELWALLHFIMPTLFDSHEQFNEWFSKGIEGHAEHGGALNEHQLSRLHAILKPFMLRRVKIDVIAEMTKKKEEIVPCKLSSRQQIFYQAIKNKISLNELLDGSRGNLNDKKLLSLMNIVMQLRKVCNHPELFERNEGSSYFYFADIPNSLLSPPFGALQDVHYAGKRNPIIFEIPKLVYDGIICNTENSGSICGFQNGYLNRLFNIFLPSNIHRSAIPEVNSSNESVLSSGAFGFTRLSNLCPVEAFFLATSSFFEGLAFSVMRWNRNYTDEIMDAFLDSEDTDIQFSQNDSTRVRAVARLLLSSTKAKPSLLRTKIGTGPSEGPYEALVLSHHDRLASNIRVLRSAYTYIPPARAPPINVSCADRNFAYKFTDEMYDPWVMKLFLGFARTSEFNGPRQPVALHPLIQELNTDLPILEPMLQLPYRIFGSSPPMSNFDPAKMLTDSGKLHTLDMLLRRLRAEGHRVLLFAQMTKMLDILEDYMNFRKFKYFRLDGSSAISDRRDMVRAFQNRNDVFVFLLSTRAGGLGINLTAADTVIFYEIDWNPTQDQQAMDRTHRLGQTKEVTVYRLICKDTIEEKILQRAKQKNAVQELVMKGKHVQDDHLLRQEDVVSLLIDDTQIAHKLKEISMQVNIT

SEQ ID NO: 157923 - protein, 1235 aa, Zea Mays
MDPRRAPPRGGGGLSYSTLFNLEPLQNLRVPVPENLARYGNSSSNGSPSSEGQGSLLDQYNGVHDASHGLHRKRKKHPDGAGDDDHADAYSNKMMEDHYRAMLSEHVQKYRSHGGLSEPLPQFESLKERVKVQKFSLQVTEDPFAIPEGAAGRIRRSIISETGNLQVHYVKVLEKGDTYEIIERSLPKKQIVKKEPFVIVKEESEKTYKLWQYLATKSIPKHHRNFTSLMKKRQVDAKRFSDSCQREVKFKVRRSLKLMRCAAIRTRQLARDMLIFWKRVDKEQYELRKKEEREAAEALKREEELREAKRQQQRLNFLLSQTELYSHFMQNKAGGSAPPDEEDVPDEDEEEDPEEAQLKREALRAAQHAVSQQKMRTNAFDSETVRLRQTSESVLPTDDSSSMDPSKIDLLHPSTMPEKSSVQTPELFKGVLKEYQLKGLQWLVNCYEQGLNGILADEMGLGKTVQAMAFLSHLAEDKNIWGPFLVVAPASVVNNWAEELIRFCPDLKILPYWGPERMILRKNINPKRLYRRDASFHILITNYQILVNEEKLLRRVKWQYMVLDEAQAIKSSSSQRWKTLLSFSCRNRLLLTGTPIQNNMAELWALLHFIMPTLFDSHEQFNEWFSKGIEGHAEHGGALNEHQLSRLHAILKPFMLRRVKIDVIAEMTKKKEEIVPCKLSSRQQIFYQAIKNKISLNELLDGSRGNLNDKKLLSLMNIVMQLRKVCNHPELFERNEGSSYFYFADIPNSLLSPPFGALQDVHYAGKRNPIIFEIPKLVYDGIICNTENSGSICGFQNGYLNRLFNIFLPSNIHRSAIPEVNSSNESVLSSGAFGFTRLSNLCPVEAFFLATSSFFEGLAFSVMRWNRNYTDEIMDAFLDSEDTDIQFSQNDSTRVRAVARLLLSSTKAKPSLLRTKIGTGPSEGPYEALVLSHHDRLASNIRVLRSAYTYIPPARAPPINVSCADRNFAYKFTDEMYDPWVMKLFLGFARTSEFNGPRQPVALHPLIQELNTDLPILEPMLQLPYRIFGSSPPMSNFDPAKMLTDSGKLHTLDMLLRRLRAEGHRVLLFAQMTKMLDILEDYMNFRKFKYFRLDGSSAISDRRDMVRAFQNRNDVFVFLLSTRAGGLGINLTAADTVIFYEIDWNPTQDQQAMDRTHRLGQTKEVTVYRLICKDTIEEKILQRAKQKNAVQELVMKGKHVQDDHLLRQEDVVSLLIDDTQIAHKLKEISMQVNIT

SEQ ID NO: 157924 - protein, 324 aa, Zea Mays
MANLLAHQLVYELSSPRAWMLLLFCVLVAYARYSLATFSAKRARNRMQAQAQHHVHDDNYNNLLPPPSPPALPVLGHLHLVGSLPHVSLRRLARKHCSDVMLLRLGAMPVLVVSSPRAAEAVLRTHDRVCASRPYSLVGEVVMYGSSDVGFAPYGDYWRRTRKLITTHLLTVRRVQALRIAREEEVSAVMARIGEAAAAGAAVDMGELLGSYANDLSCRAVMGKSFRGEGRNKLFRELVSDTSPLLGGFNVEEFFPFLARFGVLSRAVRAKSEGLRRRWDEQLDRIIQDHESTATARSPSNDDEDDDFIHTLLTVRHETCSSGE

SEQ ID NO: 157925 - protein, 317 aa, Zea Mays
MENPRPQAPALTPPMAPLPVPIHPPIAPIPVPPPRVPAPAPAAAASMASTPTPSTGDGGEAEYEVSDDHRAARERHERAVQELLQRRRAYAMAVPTNDSAVRARLRRLGEPITLFGEREMERRDRLRALMVRLEADGQVDRLLRAQEDDQAARIGEEEEEEQIEYPFFTEGSQELLKARLDIARYSLPRAKARIERAKRRHEDPDEDPEAEAELVVKQAGEFVLECSEIGDDRPLTGCSFSRDASMLATRSGAAARAISLSHQVVGAKQFLCICGGRRIVTVYPFPRPHSCGSLQHWVCPCCNFFVGSPYQWRELSH

SEQ ID NO: 157926 - protein, 53 aa, Zea Mays
MKKATCKMLRIHGAVEAHNSMVPKRTCIDPNYRTQNELGCNWYYSGLHILKHY

SEQ ID NO: 157927 - protein, 288 aa, Zea Mays
MDKEKRRRSWIERIRRLFTTSSSDPKPAPKPAPDKEQQQASNKRWDSSIFSKEEMSAMTRSKEEAALKRVRALQYASLHNEKLGLRRPPSPSMSRDDEADALNNQRWSWLEEWVGSQPFDKDVPVAHQSPYTRSASRGEHDDVVDRLGCSARRSFARPTRTPPRGDCYGDAAQFPGYMASTASAKAKFRSMSTPKERSAAGYDAYSEHCFPFADRLLSPIPSMSPIPSVASDMGFARPPVAQRSPRVPAKSPMTPARARTRRSHGGHHSFGSEAALHQLQMEHYTPVR

SEQ ID NO: 157928 - protein, 473 aa, Zea Mays
MATSPPQNPSSGEPSDASSLAAAALEAPVRVWRSLVARFPPLPDSSSFLAGVSDLQLRYFGNSRPRRRRRSALPLPLRPVAAHSARIAGEMPKAFVILDDVVQHTLTNLHSIHKSLLFWQAKAEGTNSQKVYFMIFERGPRAFVDATYQTLTRLGSNGRPVQYILHSASDMVSTKLAALTSMQHCLAAFLAEVHSEVDKCREGLTENSDKSLHTLFIVLNTTFSKLEVSLRNACEGQDELFIDDGNLHELFGKLPEVDVESSEWTEALATDGTSLIYQNLQKLDSFLSSQLSSHKRPNKLTIYWLPYTCGAVGLSVCSLWLLRHSSLMGSPDIDNWIRDAKESVAGFWDEHVEKPIISIRDELFETFKQRDKGVMEKQEVQLTEDSLRRMLVAFCEQTEGQKLLEDLPVQAMLETLTKRYEKELIHPIQNLFSGELARAMLIQIQKLKLDLESASCFWSFTSVACVTASMGSA

SEQ ID NO: 157929 - protein, 290 aa, Zea Mays
MATSPPQNPSSGEPSDASSLAAAALEAPVRVWRSLVARFPPLPDSSSFLAGVSDLQLRYFGNSRPRRRRRSALPLPLRPVAAHSARIAGEMPKAFVILDDVVQHTLTNLHSIHKSLLFWQAKAEGTNSQKVYFMIFERGPRAFVDATYQTLTRLGSNGRPVQYILHSASDMVSTKLAALTSMQHCLAAFLAEVHSEVDKCREGLTENSDKSLHTLFIVLNTTFSKLEVSLRNACEGQDELFIDDGNLHELFGKLPEVDVESSEWTEALATDGTSLIYQNLQKLDSFLSSQ

SEQ ID NO: 157930 - protein, 600 aa, Zea Mays
MATSPPQNPSSGEPSDASSLAAAALEAPVRVWRSLVARFPPLPDSSSFLAGVSDLQLRYFGNSRPRRRRRSALPLPLRPVAAHSARIAGEMPKAFVILDDVVQHTLTNLHSIHKSLLFWQAKAEGTNSQKVYFMIFERGPRAFVDATYQTLTRLGSNGRPVQYILHSASDMVSTKLAALTSMQHCLAAFLAEVHSEVDKCREGLTENSDKSLHTLFIVLNTTFSKLEGQDELFIDDGNLHELFGKLPEVDVESSEWTEALATDGTSLIYQNLQKLDSFLSSQLSSHKRPNKLTIYWLPYTCGAVGLSVCSLWLLRHSSLMGSPDIDNWIRDAKESVAGFWDEHVEKPIISIRDELFETFKQRDKGVMEKQEVQLTEDSLRRMLVAFCEQTEGQKLLEDLPVQAMLETLTKRYEKELIHPIQNLFSGELARAMLIQIQKLKLDLESGLLEMDQILRANAINFAVLAALPAFGLSLLLLVLLRAWVQRDHGAEGRGNIARCQRRLLLVDVERRLMEFQHYRDNGMEEEARCKFGLVLYTLDRLCKAVESHAKETGEWLSLRQDIFDLSKLDMGMPDKMIVVSRLKWMYNCLLPFSSSRLPRL

SEQ ID NO: 157931 - protein, 497 aa, Zea Mays
MATSPPQNPSSGEPSDASSLAAAALEAPVRVWRSLVARFPPLPDSSSFLAGVSDLQLRYFGNSRPRRRRRSALPLPLRPVAAHSARIAGEMPKAFVILDDVVQHTLTNLHSIHKSLLFWQAKAEGTNSQKVYFMIFERGPRAFVDATYQTLTRLGSNGRPVQYILHSASDMVSTKLAALTSMQHCLAAFLAEVHSEVDKCREGLTENSDKSLHTLFIVLNTTFSKLEVSLRNACEGQDELFIDDGNLHELFGKLPEVDVESSEWTEALATDGTSLIYQNLQKLDSFLSSQLSSHKRPNKLTIYWLPYTCGAVGLSVCSLWLLRHSSLMGSPDIDNWIRDAKESVAGFWDEHVEKPIISIRDELFETFKQRDKGVMEKQEVQLTEDSLRRMLVAFCEQTEGQKLLEDLPVQAMLETLTKRYEKELIHPIQNLFSGELARAMLIQIQKLKLDLESGLLEMDQILRANAINFAVLAALPAFGLSLLLLVLLRAWVQRVCI

SEQ ID NO: 157932 - protein, 497 aa, Zea Mays
MATSPPQNPSSGEPSDASSLAAAALEAPVRVWRSLVARFPPLPDSSSFLAGVSDLQLRYFGNSRPRRRRRSALPLPLRPVAAHSARIAGEMPKAFVILDDVVQHTLTNLHSIHKSLLFWQAKAEGTNSQKVYFMIFERGPRAFVDATYQTLTRLGSNGRPVQYILHSASDMVSTKLAALTSMQHCLAAFLAEVHSEVDKCREGLTENSDKSLHTLFIVLNTTFSKLEVSLRNACEGQDELFIDDGNLHELFGKLPEVDVESSEWTEALATDGTSLIYQNLQKLDSFLSSQLSSHKRPNKLTIYWLPYTCGAVGLSVCSLWLLRHSSLMGSPDIDNWIRDAKESVAGFWDEHVEKPIISIRDELFETFKQRDKGVMEKQEVQLTEDSLRRMLVAFCEQTEGQKLLEDLPVQAMLETLTKRYEKELIHPIQNLFSGELARAMLIQIQKLKLDLESFTQGTTGNGSDSKGKCYKLCCSCSASCFWSFTSVACVTASMGSA

SEQ ID NO: 157933 - protein, 556 aa, Zea Mays
MATSPPQNPSSGEPSDASSLAAAALEAPVRVWRSLVARFPPLPDSSSFLAGVSDLQLRYFGNSRPRRRRRSALPLPLRPVAAHSARIAGEMPKAFVILDDVVQHTLTNLHSIHKSLLFWQAKAEGTNSQKVYFMIFERGPRAFVDATYQTLTRLGSNGRPVQYILHSASDMVSTKLAALTSMQHCLAAFLAEVHSEVDKCREGLTENSDKSLHTLFIVLNTTFSKLEVSLRNACEGQDELFIDDGNLHELFGKLPEVDVESSEWTEALATDGTSLIYQNLQKLDSFLSSQLSSHKRPNKLTIYWLPYTCGAVGLSVCSLWLLRHSSLMGSPDIDNWIRDAKESVAGFWDEHVEKPIISIRDELFETFKQRDKGVMEKQEVQLTEDSLRRMLVAFCEQTEGQKLLEDLPVQAMLETLTKRYEKELIHPIQNLFSGELARAMLIQIQKLKLDLESGLLEMDQILRANAINFAVLAALPAFGLSLLLLVLLRAWVQRDHGAEGRGNIARCQRRLLLVDVERRLMEFQHYRDNGMVYGVYLGAFGSAPRRREPAARLFDH

SEQ ID NO: 157934 - protein, 291 aa, Zea Mays
MATSPPQNPSSGEPSDASSLAAAALEAPVRVWRSLVARFPPLPDSSSFLAGVSDLQLRYFGNSRPRRRRRSALPLPLRPVAAHSARIAGEMPKAFVILDDVVQHTLTNLHSIHKSLLFWQAKAEGTNSQKVYFMIFERGPRAFVDATYQTLTRLGSNGRPVQYILHSASDMVSTKLAALTSMQHCLAAFLAEVHSEVDKCREGLTENSDKSLHTLFIVLNTTFSKLEVSLRNACEGQDELFIDDGNLHELFGKLPEVDVESSEWTEALATDGTSLIYQNLQKLDSFLSSQP

SEQ ID NO: 157935 - protein, 293 aa, Zea Mays
MATSPPQNPSSGEPSDASSLAAAALEAPVRVWRSLVARFPPLPDSSSFLAGVSDLQLRYFGNSRPRRRRRSALPLPLRPVAAHSARIAGEMPKAFVILDDVVQHTLTNLHSIHKSLLFWQAKAEGTNSQKVYFMIFERGPRAFVDATYQTLTRLGSNGRPVQYILHSASDMVSTKLAALTSMQHCLAAFLAEVHSEVDKCREGLTENSDKSLHTLFIVLNTTFSKLEVSLRNACEGQDELFIDDGNLHELFGKLPEVDVESSEWTEALATDGTSLIYQNLQKLDSFLSSQLKP

SEQ ID NO: 157936 - protein, 651 aa, Zea Mays
MRERARHATRVSPMPPPTGGEDPEADAAPSCSGSADEADPHEQVLPNGDIYTGQWRGAVPHGAGKYLWADGCMYEGEWRRGKATGRGRFSWPSGATYEGEFLDGFMHGAGTYVGASGDTYRGVWAKNLEHGAGEKRYANGDCYDGEWRAGLPDGCGRYAWRDGTEYAGGWRAGLIHGRGTLVWANGNRYDGGWEGGRPRGQGTFRWADGSLYVGFWGREAPSGAVHQKGVYYPSPAAMGNSPRARDPREVFARDLPECVRSGTEAQSALTSLRSLKWLMRSVSGRGSSSSGWSNGSGGSLVHFWGSDGEVKCDLGDDWRRRSVREGRGLPPPSPALVPYLPNGAPLRLSKKQGVTIAKGHKNYELMLNLQLGIRHAVGRQGQVLLDLKSSAFDPKEKVWTKFPPEGSKHTPPHNSCDFKWKDYCPKVFRTLRKLFKVDPADYMLSLCGDDALRELSSPGKSGSFFYLTNDDRYMIKTMKKGEVKMLLRMLQAYYNHVRAFEDTLVTKFFGLHCVKSGSHQKKVRFVIMGNLFCSDHTIHRRFDLKGSSLGRITDKPPAEIDEYTTLKDLDLNFIFRLQKQWYQEFQRQVDKDCEFLEQEKIMDYSLLVPLTLMVTNPQHLAFQDGTEIIFVLIQIGGQKLSLEQTCCQELN

SEQ ID NO: 157937 - protein, 524 aa, Zea Mays
MRERARHATRVSPMPPPTGGEDPEADAAPSCSGSADEADPHEQVLPNGDIYTGQWRGAVPHGAGKYLWADGCMYEGEWRRGKATGRGRFSWPSGATYEGEFLDGFMHGAGTYVGASGDTYRGVWAKNLEHGAGEKRYANGDCYDGEWRAGLPDGCGRYAWRDGTEYAGGWRAGLIHGRGTLVWANGNRYDGGWEGGRPRGQGTFRWADGSLYVGFWGREAPSGAVHQKGVYYPSPAAMGNSPRARDPREVFARDLPECVRSGTEAQSALTSLRSLKWLMRSVSGRGSSSSGWSNGSGGSLVHFWGSDGEVKCDLGDDWRRRSVREGRGLPPPSPALVPYLPNGAPLRLSKKQGVTIAKGHKNYELMLNLQLGIRHAVGRQGQVLLDLKSSAFDPKEKVWTKFPPEGSKHTPPHNSCDFKWKDYCPKVFRTLRKLFKVDPADYMLSLCGDDALRELSSPGKSGSFFYLTNDDRYMIKTMKKGEVKMLLRMLQAYYNHVRAFEDTLVTKFFGLHCVKSGSHQKKAI

SEQ ID NO: 157938 - protein, 534 aa, Zea Mays
MRERARHATRVSPMPPPTGGEDPEADAAPSCSGSADEADPHEQVLPNGDIYTGQWRGAVPHGAGKYLWADGCMYEGEWRRGKATGRGRFSWPSGATYEGEFLDGFMHGAGTYVGASGDTYRGVWAKNLEHGAGEKRYANGDCYDGEWRAGLPDGCGRYAWRDGTEYAGGWRAGLIHGRGTLVWANGNRYDGGWEGGRPRGQGTFRWADGSLYVGFWGREAPSGAVHQKGVYYPSPAAMGNSPRARDPREVFARDLPECVRSGTEAQSALTSLRSLKWLMRSVSGRGSSSSGWSNGSGGSLVHFWGSDGEVKCDLGDDWRRRSVREGRGLPPPSPALVPYLPNGAPLRLSKKQGVTIAKGHKNYELMLNLQLGIRHAVGRQGQVLLDLKSSAFDPKEKVWTKFPPEGSKHTPPHNSCDFKWKDYCPKVFRTLRKLFKVDPADYMLSLCGDDALRELSSPGKSGSFFYLTNDDRYMIKTMKKGEVKMLLRMLQAYYNHVRAFEDTLVTKFFGLHCVKSGSHQKKGSFCDNGKFVLL

SEQ ID NO: 157939 - protein, 311 aa, Zea Mays
MGTTRAALPRGGARATLLEKDEDDDEGARRDGPYAGGRRGPRRQGETIAKGHKNYELMLNLQLGIRHAVGKQGPITLDLKSSAFDPKEKVWTRFPPEGSKYTPPHSSCDFRWKDYCPQVFRTLRKLFKVDAADYMLSLCGDQALRELSSPGKSGSFFYLTSNDQYMIKTMKKSEVKIFLKMIRAYYNHVRAFESTLVTKFFGLHCVKLAGANQKKVRFVIMGNLFCSDYSIHRRFDLKGSSLGRTTDKPQTEIDEYTTLKDLDLNFVFRLQKHWYQEFQRSTGTASFWSRKISWTIVFWLVYILGTLGIGY

SEQ ID NO: 157940 - protein, 438 aa, Zea Mays
MGTTRAALPRGGARATLLEKDEDDDEGARRDGPYAGGRRGPRRQGETIAKGHKNYELMLNLQLGIRHAVGKQGPITLDLKSSAFDPKEKVWTRFPPEGSKYTPPHSSCDFRWKDYCPQVFRTLRKLFKVDAADYMLSLCGDQALRELSSPGKSGSFFYLTSNDQYMIKTMKKSEVKIFLKMIRAYYNHVRAFESTLVTKFFGLHCVKLAGANQKKVRFVIMGNLFCSDYSIHRRFDLKGSSLGRTTDKPQTEIDEYTTLKDLDLNFVFRLQKHWYQEFQRQVDRDCEFLEQENIMDYSLLVGVHFRDTRDRLLTGEGSFDSDCSRGSSPHLSRGDTDPNRLAKIKLGSNMPTRAERTIRKGDCEVQIMGEPTGELYDVILYFGIIDILQDYDISKKLEHAYKSFQYDPTSISAVDPKQYSRRFRDFVFKAFQEDRFDL

SEQ ID NO: 157941 - protein, 969 aa, Zea Mays
MSTAKVVLEPAFQGAGHKPGTEIWRIEDFKPVALPKSDYGKFYCGDSYIVLQTTCKGGAFIFDIHFWIGKDSSQDEAGTAAIKTVELDSMLGGRAVQHREPQCYESDKFLSYFKPCIIPMEGGFASGFKKPEVDKFETRLYICKGKRAIRVKEVPFSRSSLNHDDVFILDTENKIYQFNGANSNIQERAKALEVIQHLKEEYHDGVCAVAIVDDGKLQAESDSGEFWVLFGGFAPIGKKAISDDDVVLETTSPKLFSISNGQLKLEDAVLTKSILENTKCFLLDCGAELFVWVGRVTQVEDRKAASAAVEKYIIKENRPKTTRITQVIQGYENHTFKSKFESWPVSNTSGSASTEEGRGKVTALLKQKGVDVKGISKTSVPVNDEVPPLLDGGGKLEVWCIDGSAKTALPKEELGKFYSGDCYVVLYTYHSAEKKEEFYLAYWIGKNSVQEDQEAAFQIANTTFNSLKGRPVQGRIYQGKEPPQFVAIFQPMVILKGGTSSGYKKFVEEKGLKDETYCSDGTALIQISGTAVHNNKTLQVDAVATSLSSTDCFVLQAKNSMFIWNGNASSFEQQQWAAKVAEFLKIGLDLGQLETGVAVKHCKEGTESSIFWSSIGGKQSYTNRNAAPDVVIREPHLYTFSLRNVTLIFHFHFLASIAITSSPFVREAGDDLLTEDMMILDTHCEVFVWMGQCVETKEKQKAFDIGQKYVQHAVAFEGISPDVPLYKVNEGNEPCFFRTYFSWDSARSVGGNKGSGDGGPTQRASALAALSSALNPSSQGKQSDEKPTSSDDSEHTQRASAMAALSSALNPSTKPSSTQTQSHSGQGSQRAAAVAALSNVLTAEGSHSPRHSRSSPTADKTELVPTSPHQLETGTAEDVRTEPDVSQEQTAKENGGQTTFSYERLISKSTDPVSGINNKRREARLFTIKSKWTYLVDSEFETVFGMTKEEFYEQPRWKQELQKKKADLF

SEQ ID NO: 157942 - protein, 133 aa, Zea Mays
MVSRARAGASSAERERAGRCHGVEQQRETPGRREIRAREKRAGEKSGSAGAGKGSREMKPRRILRAGRRNRWPGDRAPWGTRSSRGRRRGPQERSRRGSCGAVWRAARQCREPDTALEVEEGYVRIKRTAGGG

SEQ ID NO: 157943 - protein, 309 aa, Zea Mays
MVLHGVDAKRMRFHTDLKNRRFDHIVFNFPRGGFRGKENDLRMIDLHKELVWGFFRNARHIVRQLGEVHVTHKSGEPYGSWDLEHLASESSFAMVDKVPFQREDYPGYNQKRGDGGIPPPLPMSRIPSPDLLAPREQPWYQQRTILDHLGVDDYFFAREHQMSLQREYEMKRQVIPLEHRHTDRESVEKLEWLHRMIALYDGKDTEEQSHCSPSWSSEGNLKYTLIFILELLPMAKLAKLWRELLTPTSKGGGGAGEGFDVTKSGDARVGLVGFPSIGKSTLLNKLTGTFSEVAAYEFTTLIMYKGAKI

SEQ ID NO: 157944 - protein, 79 aa, Zea Mays
MHLRQLHLSNPRYRYSLPCCQDLVCLLDLSSDWTNFPVADFTSINHYNRCDFTHCSGCPYLGGNGSNKGEVGGKRVVGG

SEQ ID NO: 157945 - protein, 68 aa, Zea Mays
MTSTCTLKKQDKYKDAEPSAIDLFKEMHCSKKKGFSKNVQKAIVSAYFPCMFVLTTCNLRYTILMNNL

SEQ ID NO: 157946 - protein, 221 aa, Zea Mays
MVQIAAPPRRRDGRAPSPSPGVMHATPPPRCHGALAFAPVNHGRQCRRRPQPRPHLPPPTLSHDLCRHVSAFGGPSSSSSALGGPSSSSGQICVWRPVLILIRAPPPAISAAASSPPSPVISVAVRTWVRERSRPPAAPHHRREATRGDAQAVTLFLLHPRPPLGPRGRAIQRGTVLPIKDTCGGEEGLLALALWATHWLKKYIYIYSPESEEEEKEEEGE

SEQ ID NO: 157947 - protein, 262 aa, Zea Mays
MVQIAAPPRRRDGRAPSPSPGVMHATPPPRCHGALAFAPVNHGRQCRRRPQPRPHLPPPTLSHDLCRHVSAFGGPSSSSSALGGPSSSSGQICVWRPVLILIRAPPPAISAAASSPPSPVISVAVRTWVRSDLRLVAIPVLILFLAPTPTLHPISDLGEDDKVIVERCARERSRPPAAPHHRREATRGDAQAVTLFLLHPRPPLGPRGRAIQRGTVLPIKMITEVQDYWELGHVWWRRRAAGLGFVGNTLAEEVYIYIFTRK

SEQ ID NO: 157948 - protein, 190 aa, Zea Mays
MSKASTTAPPPAPAHALPRSLPPRLRVWRPVLILIRAWRPVVILRSDLRLAARPHPHPRAPARDLRCRVFTTLARDLRRRPHLGQGTESPTGSSSPPTGSNSWRCSSGHPISSPPASTSRSAWASNPTRHRSPHQGNLDFLLFPQKIASVTYIAHGNRSNFFGFGRLRATGVLTLCMSKCSIVKILLGDV

SEQ ID NO: 157949 - protein, 250 aa, Zea Mays
MVQIAAPPRRRDGRAPSPSPGVMHATPPPRCHGALAFAPVNHGRQCRRRPQPRPHLPPPTLSHDLCRHVSAFGGPSSSSSALGGPSSSSGQICVWRPVLILIRAPPPAISAAASSPPSPVISVAVRTWVRSDLRLVAIPVLILFLAPTPTLHPISDLGEDDKVIVERCARERSRPPAAPHHRREATRGDAQAVTLFLLHPRPPLGPRGRAIQRGTVLPIKEQLLWVWSAESYWCAHLVYVEMLYSENIAW

SEQ ID NO: 157950 - protein, 210 aa, Zea Mays
MVQIAAPPRRRDGRAPSPSPGVMHATPPPRCHGALAFAPVNHGRQCRRRPQPRPHLPPPTLSHDLCRHVSAFGGPSSSSSALGGPSSSSGQICVWRPVLILIRAPPPAISAAASSPPSPVISVAVRTWVRERSRPPAAPHHRREATRGDAQAVTLFLLHPRPPLGPRGRAIQRGTVLPIKEQLLWVWSAESYWCAHLVYVEMLYSENIAW

SEQ ID NO: 157951 - protein, 218 aa, Zea Mays
MVQIAAPPRRRDGRAPSPSPGVMHATPPPRCHGALAFAPVNHGRQCRRRPQPRPHLPPPTLSHDLCRHVSAFGGPSSSSSALGGPSSSSGQICVWRPVLILIRAPPPAISAAASSPPSPVISVAVRTWVRERSRPPAAPHHRREATRGDAQAVTLFLLHPRPPLGPRGRAIQRGTVLPIKMITEVQDYWELGHVWWRRRAAGLGFVGNTLAEGTRVIL

SEQ ID NO: 157952 - protein, 212 aa, Zea Mays
MVQIAAPPRRRDGRAPSPSPGVMHATPPPRCHGALAFAPVNHGRQCRRRPQPRPHLPPPTLSHDLCRHVSAFGGPSSSSSALGGPSSSSGQICVWRPVLILIRAPPPAISAAASSPPSPVISVAVRTWVRERSRPPAAPHHRREATRGDAQAVTLFLLHPRPPLGPRGRAIQRGTVLPIKDTCGGEEGLLALALWATHWLKVRGSFCDLVET

SEQ ID NO: 157953 - protein, 334 aa, Zea Mays
MRWFDQIHLTPLSSLRLTTTEKKRNLRATGTMAATRTALALLGHEGMESGPRPAAPRRSRLRVVAVALRTRPTSLAAPGLPPAAPEPVLPSPPVAAGAAAVLLEAGVPPADLRRAAGMCPELLSVSAEAVEAALRFLTEEAGVAEADLPRVLRRRPRLLVSPVAARLRPTLYFLRALGVPDLHRRADLLSFSVEGKLLPRLEFLESLGLPARAARSMARRFPALFGYGVEGNMRPKADYLLGAMARRADELYDFPEYFSYALATRIVPRYEACAARGVSRLPLPAMLRPGDAKFRSTLTSCVGSMLPRRRSALWHATWVDDDAAAAAAAKETTV

SEQ ID NO: 157954 - protein, 281 aa, Zea Mays
MEDIYSGPASKREENPVCTVPDGPEGQKGKDGPSSTARQGDKLRRRRLELRDRDSFGAARLLLMEAMDFTVASADTGCQEPPNTLVDWALEILSTADPDEKARLGDLAASRWLRGDIPLPYDPSRPARPPPDRPARSAEVRLLPPSRMPKLGKGGSAQSRLAMLHSLAHTESWAVDLSWDIVARFGAAMRMPRDFFDDFARVAQDEGRHYTVLSARLRELGSHYGALPAHDGLWDSAMRTSHSLLARLAVEHCVHEIVHVSTMKISLKTGHRDFISKLIKK

SEQ ID NO: 157955 - protein, 98 aa, Zea Mays
MVQQVEDELPSRIAQDANGRSKVTEHVEDGLAKCKLDDSIEKYEELVIRTFHRVVREYFRGPLKPPFNTEARKAAGFEPAWYEPLAVKEACIEGETIE

SEQ ID NO: 157956 - protein, 169 aa, Zea Mays
MLLLRGARAASAWAASTAVSAGASSSRSISIRLAPVAALSSGGRKRKGQRRGEAKPPSPPPPPPLPRQGETPSSKKKSGARPSGEGKKSRLVELEEARGPRRPEGGEARKGNTQQQQQQEEKAKAKRLVKWKCASGCGACCKLDKGPDFPIPDEIFADHPDDLQEYDRL

SEQ ID NO: 157957 - protein, 184 aa, Zea Mays
MTGYRSRSPSRSYSPRRRYSRSPPRRKRYDDPRDRYRWAGAGGGGDRRGYGRPLAQSGLLIRNISLTARPEDIRATFEQFGPIKDVYLPRNFHTRELRGFGFVKFRYPEDAAVAKREMHHQVIGGREISIVYAEENRKTPQEMRMRTRTSGRYMDERYTRLSRSPRSRSHSYSPPPSPVRRDFS

SEQ ID NO: 157958 - protein, 250 aa, Zea Mays
MTGYRSRSPSRSYSPRRRYSRSPPRRKRYDDPRDRYRWAGAGGGGDRRGYGRPLAQSGLLIRNISLTARPEDIRATFEQFGPIKDVYLPRNFHTRELRGFGFVKFRYPEDAAVAKREMHHQVIGGREISIVYAEENRKTPQEMRMRTRTSGRYMDERYTRLSRSPRSRSHSYSPPPSPVRRDFRVEHVKGIIVKDKVVLSVKSLMIILAKIPDGKSMLKLSQRLNALHNCMFGSKWVAFIDMGQGQGAPG

SEQ ID NO: 157959 - protein, 194 aa, Zea Mays
MTGYRSRSPSRSYSPRRRYSRSPPRRKRYDDPRDRYRWAGAGGGGDRRGYGRPLAQSGLLIRNISLTARPEDIRATFEQFGPIKDVYLPRNFHTRELRGFGFVKFRYPEDAAVAKREMHHQVIGGREISIVYAEENRKTPQEMRMRTRTSGRYMDERYTRLSRSPRSRSHSYSPPPSPVRRDFRFELNFLFQID

SEQ ID NO: 157960 - protein, 257 aa, Zea Mays
MTGYRSRSPSRSYSPRRRYSRSPPRRKRYDDPRDRYRWAGAGGGGDRRGYGRPLAQSGLLIRNISLTARPEDIRATFEQFGPIKDVYLPRNFHTRELRGFGFVKFRYPEDAAVAKREMHHQVIGGREISIVYAEENRKTPQEMRMRTRTSGRYMDERYTRLSRSPRSRSHSYSPPPSPVRRDFRGRERPDSYSPQYSHSPRPRDSRHHRSDGRSPTPSLDDHKPKATPVNGGHGPAVASSPMAKISSEEKMVKSGFI

SEQ ID NO: 157961 - protein, 61 aa, Zea Mays
MATLPAVLFKLRDQQLIYWPCRFRLLTRNQYLKRLQYQHGIFVEKNAIERRRMPESYIEFS

SEQ ID NO: 157962 - protein, 561 aa, Zea Mays
MGLCLGKSAAVQEPAVAEDNSVADGAAAGCGDGPPVKAPRTPKQPKFSFYLPSPLQPSSYKGSPANSSAASTPARGGFKRPFPPPSPAKHIRALLARRHGSVKPNEASIPEGGELDLGLDKSFGYSRHFAAKYDLGREVGRGHFGFTCAAKCKKGELKGEDVAVKVLPKAKMTTAIAIEDVRREVRILSSLAGHINLVQFYDAFEDEENVYVVMELCKGGELLDRILARGGKYSEGDAKVIIHQILSVASFCHLQGVVHRDLKPENFLFMSKDENSALKVIDFGLSDFVKPEADMWSIGVIAYILLCGSRPFWARTESGIFRAVLKAEPSFDEIPWPTLSAEAKDFVRRLLNKDYRKRMTAAQALCHPWIRGTQEVKINLDMIIYRLMRAYISSSSLRKSALRALAKALTTDQLFYLREQFTLLGPNKSGHISLQNMKTALIKNSSGAMNDSRILDFVNSICNIQYGMIDFEEFSAAAISVYQMEGLETWEEHAQQAYELFDKEGNRPIVIEELASELGLGPSISLHVVLKDWIRHSDGNLSFLGFIKLLHGVSSRAITKV

SEQ ID NO: 157963 - protein, 569 aa, Zea Mays
MGLCLGKSAAVQEPAVAEDNSVADGAAAGCGDGPPVKAPRTPKQPKFSFYLPSPLQPSSYKGSPANSSAASTPARGGFKRPFPPPSPAKHIRALLARRHGSVKPNEASIPEGGELDLGLDKSFGYSRHFAAKYDLGREVGRGHFGFTCAAKCKKGELKGEDVAVKVLPKAKMTTAIAIEDVRREVRILSSLAGHINLVQFYDAFEDEENVYVVMELCKGGELLDRILARGGKYSEGDAKVIIHQILSVASFCHLQGVVHRDLKPENFLFMSKDENSALKVIDFGLSDFVKPVLHRSYGTEADMWSIGVIAYILLCGSRPFWARTESGIFRAVLKAEPSFDEIPWPTLSAEAKDFVRRLLNKDYRKRMTAAQALCHPWIRGTQEVKINLDMIIYRLMRAYISSSSLRKSALRALAKALTTDQLFYLREQFTLLGPNKSGHISLQNMKTALIKNSSGAMNDSRILDFVNSICNIQYGMIDFEEFSAAAISVYQMEGLETWEEHAQQAYELFDKEGNRPIVIEELASELGLGPSISLHVVLKDWIRHSDGNLSFLGFIKLLHGVSSRAITKV

SEQ ID NO: 157964 - protein, 287 aa, Zea Mays
MSKDENSALKVIDFGLSDFVKPDDRLNDIVGSAYYVAPEVLHRSYGTEADMWSIGVIAYILLCGSRPFWARTESGIFRAVLKAEPSFDEIPWPTLSAEAKDFVRRLLNKDYRKRMTAAQALCHPWIRGTQEVKINLDMIIYRLMRAYISSSSLRKSALRALAKALTTDQLFYLREQFTLLGPNKSGHISLQNMKTALIKNSSGAMNDSRILDFVNSICNIQYGMIDFEEFSAAAISVYQMEGLETWEEHAQQAYELFDKEGNRPIVIEELASIGSDIQMETSVSSGS

SEQ ID NO: 157965 - protein, 230 aa, Zea Mays
MVQLQNRVFCRWEESSCAMESLYDIDQISRTVPVILDNSKNWHDIVSRSMKLEVGGVAHVQGISRGELKQNSIYSTALIINRTASPLAWFMECKDRKNRSSVMLSYNFLPSMPAEKLRNAANKMKEILGDYDAIHVRRGDLLKNRKDRFGVERSLHPHLDRDTRPEYIRKRIAQWIPPGRTLFIASNERTPGFFSPLSDRFLPLCVLLYQEPLCAYRKCLLIHLATIQRG

SEQ ID NO: 157966 - protein, 630 aa, Zea Mays
MAHEVGDNGGELPPPAKKKSPAEEEAEKRRKKLTPGSLMKGIIRSGSGDATPAEGDQVILHCTTRTMDGIIVNSTRREHGGKGIPLRFVLGKSKMILGFAEGFPTMLKGEIAMFKMQPKIHYAEVDCPVAAPDGFPKDDELQFEIEMLDFFKAKVVAEDLGVVKKIVEEGKGWETPREPYEITARITVRTADGKEIIPSKEEAYFFTIGKSEVPKGLEMGIGTMARKEKAIVFVSNTYLTKSSLMPELEGLEEVHFYIELVQFIQVRDMLGDGRLIKRRVVDGKGEFPMDCPLHDSLLRVHYKGILLDEPKSVFYDTRADNDGEPLEFCSGEGLVPEGFEMCVRLMLPGEKSVVTCPPDFAYDKFPRPANVPEGAHVQWEIELLGFEMPKDWTGLTFEEIMDEADKIKNTGNRLFKEGKFELAKAKYDKVLREYNHVHPHDDEEGKIFANSRNSLHLNVAFCYQKMGEYRKSIETCNKVLDTNPVHAKALYRQGMSYMLLGEFDDARNDFEKMITVDKSSEPDATAALLKLKQKEQEAEKKARKQFKGLFDKKPGEISEVGVESEGGKDAGDARGSGEATSADRGANTMDSPTRESEYAFEEERPGLLGRLWPSARRIFSSVGINRCTIL

SEQ ID NO: 157967 - protein, 266 aa, Zea Mays
MLDFFKAKVVAEDLGVVKKIVEEGKGWETPREPYEITARITVRTADGKEIIPSKEEAYFFTIGKSEVPKGLEMGIGTMARKEKAIVFVSNTYLTKSSLMPELEGLEEVHFYIELVQFIQVRDMLGDGRLIKRRVVDGKGEFPMDCPLHDSLLRVHYKGILLDEPKSVFYDTRADNDGEPLEFCSGEGLVPEGFEMCVRLMLPGEKSVVTCPPDFAYDKFPRPANVPEGAHVQWEIELLGFEMPKDWTGLTFEEIMDEADKIKNTTV

SEQ ID NO: 157968 - protein, 461 aa, Zea Mays
MLDFFKAKVVAEDLGVVKKIVEEGKGWETPREPYEITARITVRTADGKEIIPSKEEAYFFTIGKSEVPKGLEMGIGTMARKEKAIVFVSNTYLTKSSLMPELEGLEEVHFYIELVQFIQVRDMLGDGRLIKRRVVDGKGEFPMDCPLHDSLLRVHYKGILLDEPKSVFYDTRADNDGEPLEFCSGEGLVPEGFEMCVRLMLPGEKSVVTCPPDFAYDKFPRPANVPEGAHVQWEIELLGFEMPKDWTGLTFEEIMDEADKIKNTGNRLFKEGKFELAKAKYDKNSLHLNVAFCYQKMGEYRKSIETCNKVLDTNPVHAKALYRQGMSYMLLGEFDDARNDFEKMITVDKSSEPDATAALLKLKQKEQEAEKKARKQFKGLFDKKPGEISEVGVESEGGKDAGDARGSGEATSADRGANTMDSPTRESEYAFEEERPGLLGRLWPSARRIFSSVGINRCTIL

SEQ ID NO: 157969 - protein, 362 aa, Zea Mays
MLGDGRLIKRRVVDGKGEFPMDCPLHDSLLRVHYKGILLDEPKSVFYDTRADNDGEPLEFCSGEGLVPEGFEMCVRLMLPGEKSVVTCPPDFAYDKFPRPANVPEGAHVQWEIELLGFEMPKDWTGLTFEEIMDEADKIKNTGNRLFKEGKFELAKAKYDKVLREYNHVHPHDDEEGKIFANSRNSLHLNVAFCYQKMGEYRKSIETCNKVLDTNPVHAKALYRQGMSYMLLGEFDDARNDFEKMITVDKSSEPDATAALLKLKQKEQEAEKKARKQFKGLFDKKPGEISEVGVESEGGKDAGDARGSGEATSADRGANTMDSPTRESEYAFEEERPGLLGRLWPSARRIFSSVGINRCTIL

SEQ ID NO: 157970 - protein, 348 aa, Zea Mays
MEGEFPMDCPLHDSLLRVHYKGILLDEPKSVFYDTRADNDGEPLEFCSGEGLVPEGFEMCVRLMLPGEKSVVTCPPDFAYDKFPRPANVPEGAHVQWEIELLGFEMPKDWTGLTFEEIMDEADKIKNTGNRLFKEGKFELAKAKYDKVLREYNHVHPHDDEEGKIFANSRNSLHLNVAFCYQKMGEYRKSIETCNKVLDTNPVHAKALYRQGMSYMLLGEFDDARNDFEKMITVDKSSEPDATAALLKLKQKEQEAEKKARKQFKGLFDKKPGEISEVGVESEGGKDAGDARGSGEATSADRGANTMDSPTRESEYAFEEERPGLLGRLWPSARRIFSSVGINRCTIL

SEQ ID NO: 157971 - protein, 142 aa, Zea Mays
MDTRGLPKGLVLGSCTVLEAAGQGALGPLYQLLESTVVSGRGRGMPAQERVILLHFGANSGSHRFALENRAVNEATFRCPDELGWKPQVCYNFTVALMYKHVNSLCHYIFLVSLHSRGRLSYHPMETSYTQDRYILTIVSKK

SEQ ID NO: 157972 - protein, 168 aa, Zea Mays
MDTRGLPKGLVLGSCTVLEAAGQGALGPLYQLLESTVVSGRGRGMPAQERVILLHFGANSGSHRFALENRAVNEATFRCPDELGWKPQTTLPLKEISKSLQQMGYDVMPSDDAGRFVCNYVYYHSLKFAEKHGITSLFVHFPLFLAIDEEVQMQFVASLLEVLASLNF

SEQ ID NO: 157973 - protein, 186 aa, Zea Mays
MESHSPQKKRKGRGITKLEDIFARGSEMAKIKIELNEFGQPIGNNSSKFSSAIGCHVRKKLSVSSVDRRLVDGEKKYEVWTDLKKIFDVDDAAFNWFLTTAGRKWKDFKSTLKAQYFNENLTEEDIKNKHSGRVSDEDLKFLSKYWVSPECEGKTKKPNLVVQRLGYFIHLVARALLALAMKCLRN

SEQ ID NO: 157974 - protein, 402 aa, Zea Mays
MVVLFKCDWVDNRVQHKWVKTDQLGITSVNFKHLFNTSDKLPDEPFILASQAVQVYYVPDPIDIEWAAVVQSKARDVYDLDNLENEHIDNDNQFFAPLVDLNGNVTIDIVNGIVPAVRRDIDGYLVDPKTSKTKSAKRQNGKQKKKRTHNTSGAATEGHNLRPRTQRNLSENANEQIDTNIGCDSIGDFLCDNDCNYSVVAYTFSPCYSTTNVFKLMESHSPQKKRKGRGITKLEDIFARGSEMAKIKIELNEFGQPIGNNSSKFSSAIGCHVRKKLSVSSVDRRLVDGEKKYEVWTDLKKIFDVDDAAFNWFLTTAGRKWKDFKSTLKAQYFNENLTEEDIKNKHSGRVSDEDLKFLSKYWVSPECEGKTKKPNLVVQRLGYFIHLVARALLALAMKCLRN

SEQ ID NO: 157975 - protein, 72 aa, Zea Mays
MHATTPINLVPPAHHPHGQTSPAAEETLVRKLHHDHRGDKPPLATPQTMMSSHSPDSDKTPPLHHDHTRKLR

SEQ ID NO: 157976 - protein, 251 aa, Zea Mays
MTTSLVVGRSKSGYGFPSTLSFKDVYHPCWGEGRAKSGPCPPRGLVTRFFLQHSREKGVHQPCRGGEPQLRGAGWLQAISCSVSGPLGWMASAPPPMLPPAALAGAWLCVHRTGDSRAVRGSATSTASPARRPYWGVVQDVVRRRSGGRVLGWSCPHSRERTGARTPSCVLRQPPPTSAEVVAAVGAEVVATAGEATRCRGGCLRQRDHRSHLPPSPRLFGFNGLVVAPRRGTGARTSLQWHTPWGDRHHW

SEQ ID NO: 157977 - protein, 228 aa, Zea Mays
MIKMIRVRHTNVVPAIALGVQQLKKDLGGPKAFPPGIHEIHQFLDRFYMSRIGIRMLIVARIASEDARAICMREYGSSPDVDIYGDPGFTFPYVTPHLHLMIFELVKNSLRAVQERYMDSDKLAPPVRIIVADGAEDVTIKISDEGGGIPRSGLSRIFTYLYSTAENPPDLDGHNEGVTMAGYGYGIPISRLYARYFGGDLQIISMEGYGTDAYLHLSRLGDSEEPLP

SEQ ID NO: 157978 - protein, 329 aa, Zea Mays
MASEPVARAVAEEVARWGAMRQTGVSLRYMMEFGARPTERTLLLAAQFLHKELPIRIARRALDLDSLPFGLSTKPAILKVKDWYVESFREIRSFPEVRNQKDELAFTQMIKMIRVRHTNVVPAIALGVQQLKKDLGGPKAFPPGIHEIHQFLDRFYMSRIGIRMLIDARAICMREYGSSPDVDIYGDPGFTFPYVTPHLHLMIFELVKNSLRAVQERYMDSDKLAPPVRIIVADGAEDVTIKISDEGGGIPRSGLSRIFTYLYSTAENPPDLDGHNEGVTMAGYGYGIPISRLYARYFGGDLQIISMEGYGTDAYLHLSRLGDSEEPLP

SEQ ID NO: 157979 - protein, 352 aa, Zea Mays
MASEPVARAVAEEVARWGAMRQTGVSLRYMMEFGARPTERTLLLAAQFLHKELPIRIARRALDLDSLPFGLSTKPAILKVKDWYVESFREIRSFPEVRNQKDELAFTQMIKMIRVRHTNVVPAIALGVQQLKKDLGGPKAFPPGIHEIHQFLDRFYMSRIGIRMLIEPGVIGLINTKMSPMTVARIASEDARAICMREYGSSPDVDIYGDPGFTFPYVTPHLHLMIFELVKNSLRAVQERYMDSDKLAPPVRIIVADGAEDVTIKISDEGGGIPRSGLSRIFTYLYSTAENPPDLDGHNEGVTMAGYGYGIPISRLYARYFGGDLQIISMEGYGTDAYLHLSRLGDSEEPLP

SEQ ID NO: 157980 - protein, 128 aa, Zea Mays
MGRGEISRLVSNVLSRTSAPPTRPISRENAPPTHYLAQPSPRAKGDDARDAPPSARHRPLRCRSLSLTRSRAGHEIQYKVGSPASLWHMERTEQVRASTSVHRSSTKQVLLTLSTRFLDANSTHVGQG

SEQ ID NO: 157981 - protein, 60 aa, Zea Mays
MTRYPIQGRLSCKSVAHGANRASPRLHQRPPLLHQASSSHPLYSFPGCEFNSRRPGVNQE

SEQ ID NO: 157982 - protein, 71 aa, Zea Mays
MERTEQVRASTSVHRSSTKLMGVTISKKARGRNKHIQEHSNNTKRSKNASTKLKQSPLSRIRALGSLGVLL

SEQ ID NO: 157983 - protein, 468 aa, Zea Mays
MNQCRQDIIFKILIKRNLKYTYILLGIRAGRTLLFWIGPIPAVLSTDLQLIKQVLTDRTGLYQKDFMIPVLKFLFGNGVILINGDDWKRHRKVVLPAFNHETIKSMSAVTAEVTEQMMQQWRGQIHGSEEESAEIDMIHAFNDLTSKVNGRVAFGTSHREVEEVIVLMREMQKLATAATLDAPILWYLPTRRNLHVRRLNKQLRSKIMSIMQARLAADGADRRGGRGGAVSGGGDLLGLLLEAWTPQPQHGNGGETLTTDEVIDECKTFFAAGQETTATLLVWAMFLLAVHPEWQDKVREEVVREFCTSDDGEVPHADVLAKLKLLYMVLLETSRLYPPIVYIQRRAAWDAVLGGIKVPQGTVISIPIAMLHRDKQVWGPDADEFNPMRFEHGLTKAAKDPKALLSFSLGPRVCTGQSFGIVEVQVVMAMILRRFSFSLSPKYVHKPKYLLSLTPKLGMPLIVRNVDG

SEQ ID NO: 157984 - protein, 847 aa, Zea Mays
MGNSTSRVVGCFAPPDKAGGIDLDFLEPLDEGLGHSFCYVRPGAVADSPAITPSNSERYTLDSSVMDSETRSGSFRQEPADDLAAAAAAGLQRPCRSFGETTFRTISGASVSANASSARTGTLTVSLIRDVQEPAAAFESTASFAAVPLQPVPRGSGPLNTFLSGPLERGFASGPLDKGSGFMSGPLDKGAFMSGPIDAGSRSNFSAPLSYGRRKPRLRLLVHRISRPMKTALSRTFSRSSQNPGWVQKFLSHPMSQLPWARDAKSRSEGSQDGLESGIPEPEYNVTRNLQWAHGKAGEDRVHVVLSEEQGWLFIGIYDGFSGPDVPDFLMSNLYKAIDRELEGLLWVYEDSSERSDHVSTHEEGGLVAASVDAPHDDSGQCQSDSGRQELGNFGKQNVSPGKGCDDSALQFQPNCTSSEEKDLAPHGSSSEMLGRDEIVEEMVEADLGNDLQSREPHSSNRDLSGTDLNTSCRCATETSSYCDQHAKFLKGNRKSKRLFELLQMELLQDYNTRLSKEPPEESKIPNLHVTQADTAEARSRNTAEVSRCSLAATGECFDDSEGLGSSRHADSVLGIGIKECTGCSISTSSSGHKQVTRRILIGSKLRKMYKKQKMLQKKFFPWNYDWHRDQPHVDESVIKSSEVTRRCKSGPVEHDAVLRAMSRALEITEEAYMKIVEKELDRYPELALMGSCVLVMLMKDQDVYVMNLGDSRAILAQDNDHFDQYDSSSFSKGDLQHRNRSRESLVRVELDRISEESPMHNPNSHLNSNAKAKELSICRLKMRAVQLSTDHSTSIEEEVLRIKVEHPDDPQAVFNGRVKGQLKVTRAFGAGFLKKMDCINISAMMR

SEQ ID NO: 157985 - protein, 175 aa, Zea Mays
MPRIRSGDLALAAQARKKPRRAGGRVSCSGPRRRARPQYDLPLPSPSVIVPGFPPASASDPHAEAGKLYDLRTPLRASGGLAPAAQARKKPIEPKAVRCVPALDAVLDHDTPFRFLRQVCSFLASFARPHLLFHVFFGGGRVEWVGAAKSLIFNAFCQSSHMCDGFWPFALRLEQ

SEQ ID NO: 157986 - protein, 315 aa, Zea Mays
MPDPTTKLPSPRPRRRRRLFSLCLGTALLALIVSALVHVVAQPPGPAPASARFSVIIDGGSTGTRAHVFAAGPDGRPDLARSTVMRVSPGLSSFAADPARAGESLKPLLDFARDKIGGAVREAEVRLMATAGLRLLEERAQEAILASCRDVLRASGFRFEDAWAKVIPGSDEGVYAWVAANYALGRLGGDPNKTVGIIELGGASAQLTFVSDEVLPPKLSYNYTFGETTYTLYTNSFLNFGQNAAQDSFHEMLRSRGSFKNGTLADPCAPRGYSRNEGASRSTLENQYVNNGTGNFTECISSSQLLLQKGKVLWT

SEQ ID NO: 157987 - protein, 330 aa, Zea Mays
MEDRLFDKSLNPNKLLKEQFVSNLTGSSLLEIAALSTVVPALVVLRKWSSRDNSRKDSAKKNDDQVHPVGKDWMQYFSTLAVDYLTVVLPIIVVFTVLSEWAFGCAISLAILIYIYVMFKRPQLYLKDGFSQLPSMRADISSYRVSVVLVTCLCILAVDFKIFPRRYAKAETYGSGIMDLGVGSFVVANALVSRQARNIASMSFKAALSSISPLVFLGFARIISTWGVDYQVHVGEYGVHWNFFFTLAAVSILTSIVRIHPKHCGLVGLLILAGYQIWLSSGLNEYLISDKRSADIISQNKEGIYSILAPGEGHTHGCRQDTFRDLDSGN

SEQ ID NO: 157988 - protein, 203 aa, Zea Mays
MEDRLFDKSLNPNKLLKEQFVSNLTGSSLLEIAALSTVVPALVVLRKWSSRDNSRKDSAKKNDDQVHPVGKDWMQYFSTLAVDYLTVVLPIIVVFTVLSEWAFGCAISLAILIYIYVMFKRPQLYLKDGFSQLPSMRADISSYRVSVVLVTCLCILAVDFKIFPRRYAKAETYGSGIEFQGGSEFHKSTSISWLCSHYIHMGC

SEQ ID NO: 157989 - protein, 799 aa, Zea Mays
MSGDHAKKEMEIGDKPTTSHRKASSEESRNKGKGKEKKASSHKSHRSGDKKKKMMKVVYYETDTSSPSTFGSDAPSITSKSHERKKFSKIPLRYPRIPKYTPLLSVPLGKPPIFDGEDYARWSDLMKFHLTSLHKSIWNVVEFGAQVPSVGDEDYDEDEVAQIEHFNSQATTILLASLSREEYNKVQGLKSTKEVWDVLNTAHEGDELTKITKRETIEGELGRFRLRQGEEPQDMYNRLKTLVNQVRNLESKKWDDHEMVKVILRSLIFLNPTQVQLIRGNPIYTLMTPEEVIGNFVSFEFMIKGSRKINELDGPSTSEAQPIAFKATEEKKEESTSSRQPIDASKLDNEEMALVIKSFHQILKQRREKDYKPRSKKVCYKCGKPGHFIAKCPISSDSDRGDDKKGRRKEKKKYYKKKGGDAHICREWDSDESSSDSSSDEDAANIAINKGLLFPNVGHKCLMAKDDKKKKVKSKSSTRYESSSDDNASDEEDNLRTLFANLNMQQKEKLNELISAIHEKYDLLDTQEDFLIKENKKHIKVKNAYALEVEKCEKLSSELSTCRETIDNLRNENASLSAKVDSNVCDVSIPNLRNDNDDLLAKIEELNISLASLRIENEKLLTKAKELDVCNASISDLRSKNDILHAKVVELKSCKPSTSIVEHTTICTRCRDVNIDVIHDHMALIKQQNDHIAKLDAKIAEHDLENEKFKFARSMLYRGRRPGIKDGIGFQQGGNVKLNATSKKLSNFVKGKAPMPQDNEGYILYPVGYPESKIRRIHSRKSHSGPNHAFMYKGETSSS

SEQ ID NO: 157990 - protein, 555 aa, Zea Mays
MARNLTDNRTRNTLVMIVIFGLCSFFYLLGVWQKSGSGGGDGIQTWVNEQTKCAQLPNLSFETHHSASNLLNDTDNSKIEPFKPCDEQYTDYTPCEEQSRAMTFPRDNMIYRERHCPPDKEKLYCLIPAPKGYVAPFRWPKSRDFVHYANVPHKSLTVEKAIQNWVHYEGNVFRFPGGGTQFPQGADKYIDQLASVIPIAEGKVASLGAYLFKKNVLTISFAPRDNHEAQVQFALERGVPAYIGVLGSIKLPFPSRAFDMAHCSRCLIPWSGNDGMYMMEVDRVLRPGGYWVLSGPPIGWKIYYEGWQHSKEDLQNEQRKIEQFAQLLCWKKISEKDGIAIWRKRLNDKSCSMKQYNPKGVKCGLTSDSDVWYKKMEVCIDPLPNVNSVSKVAGGQLEPFPKRLYAVPPRITLGSVPGFSVQSYEEDNKLWQKYVEAYKNTNNLLDTGRYRNIMDMNAGFSTYPRTYDLIHSNGIFSLYQNKCQFEDILLEMDRILRPEGAVIIRDKVDVLVKVEKIANAMRWKTRLADHEGGPLVPEKILFAVKQYWTVAKTSS

SEQ ID NO: 157991 - protein, 464 aa, Zea Mays
MTFPRDNMIYRERHCPPDKEKLYCLIPAPKGYVAPFRWPKSRDFVHYANVPHKSLTVEKAIQNWVHYEGNVFRFPGGGTQFPQGADKYIDQLASVIPIAEGKVRTALDTGCGVASLGAYLFKKNVLTISFAPRDNHEAQVQFALERGVPAYIGVLGSIKLPFPSRAFDMAHCSRCLIPWSGNDGMYMMEVDRVLRPGGYWVLSGPPIGWKIYYEGWQHSKEDLQNEQRKIEQFAQLLCWKKISEKDGIAIWRKRLNDKSCSMKQYNPKGVKCGLTSDSDVWYKKMEVCIDPLPNVNSVSKVAGGQLEPFPKRLYAVPPRITLGSVPGFSVQSYEEDNKLWQKYVEAYKNTNNLLDTGRYRNIMDMNAGFSTYPRTYDLIHSNGIFSLYQNKCQFEDILLEMDRILRPEGAVIIRDKVDVLVKVEKIANAMRWKTRLADHEGGPLVPEKILFAVKQYWTVAKTSS

SEQ ID NO: 157992 - protein, 112 aa, Zea Mays
MQIGSWDAIHVVQVGPEEEGAAHYCLNSTVMLSLTTNNKQSGTFNLSGSIRRQMSMTLAVADGHLVNMGKMIEEMEGKLRNSLDQVYFGKTREMVCTLRPPPEVLNMRLPDS

SEQ ID NO: 157993 - protein, 268 aa, Zea Mays
MVPSEMGSVATAVSTPAADKLLHGPISGKKCKKPGPRKIHKAEREKLKRDHLNDLFVELGNMLDRQNNGKACILTDTTRILRDLLVQVDSLRKEHSDLQNESHYVTMERDEMQDENGVLRKEISELQNELTMRVSGSPAGWGHGTARSDPPLPHSTAVFSSEQAMQPPTIASVVFPLQQPLAPSAMTKPPHAAPPLELKLFPEVASAEGHEPCEDHKAPNHVARPQARYPTQSASWPVNLFSGLPRMEDEQCSSSTSGSSREDNTDIE

SEQ ID NO: 157994 - protein, 162 aa, Zea Mays
MERDEMQDENGVLRKEISELQNELTMRVSGSPAGWGHGTARSDPPLPHSTAVFSSEQAMQPPTIASVVFPLQQPLAPSAMTKPPHAAPPLELKLFPEVASAEGHEPCEDHKAPNHVARPQARYPTQSASWPVNLFSGLPRMEDEQCSSSTSGSSREDNTDIE

SEQ ID NO: 157995 - protein, 97 aa, Zea Mays
MVHVSFYRNYGKTFKKPRRPYEKERLDAELKLVGEYGLRCKRELCRVQYALSRIRNAARELLTLDEKNPAVSLRTIVFKNGMAKSIHHACAHQAAPH

SEQ ID NO: 157996 - protein, 108 aa, Zea Mays
MVFSVRARTSLITCLHSLLRTSCSAAFRPLSSRMAWQSPSIMRVLIRQRHIRVGRQLVNIPSFMVKLDSEKHIDFSLTSPLGGGEPGRVKRKNQKKASGGGGDDEEEE

SEQ ID NO: 157997 - protein, 248 aa, Zea Mays
MPCRLGVQEGSVGSITAHHNVKFHQNSTMEKDLSSPFDHTVISNANEMQCNRNADDNGLPEDSSKHTKRTGRKVGILSHCPKRLVALKVMYFGQRFYGFSSEGNIEPTVESEIFKALERAKLMVANRKESCYSRCGRTDKGVSATGQVISLYLRSNIKDVGGDMLDERSEIDYVKVLNRILPRDIRVLGWCPVPADFHARFTCLSREYKYLFWKGDLDILEMQKAASKFIGEHDFRNFCKMDAANVQQ

SEQ ID NO: 157998 - protein, 285 aa, Zea Mays
MAAADPETAAALRGEVAALRMRVQELEAENQRLARIASTCTCGFKEGSVGSITAHHNVKFHQNSTMEKDLSSPFDHTVISNANEMQCNRNADDNGLPEDSSKHTKRTGRKVGILSHCPKRLVALKVMYFGQRFYGFSSEGNIEPTVESEIFKALERAKLMVANRKESCYSRCGRTDKGVSATGQVISLYLRSNIKDVGGDMLDERSEIDYVKVLNRILPRDIRVLGWCPVPADFHARFTCLSREYKYLFWKGDLDILEMQKAASKFIGEHDFRNFCKMDAANVQQ

SEQ ID NO: 157999 - protein, 199 aa, Zea Mays
MQKAASKFIGEHDFRNFCKMDAANVSNYRRHITEFTISACDRRSNNDELCSMTIKGSAFLWHQVRCMVAVLFLIGQGLESPSVVDSLLDIMKTSRKPQYKMAPELPLILQSCLFDKANFMCSADASRSLTEHLNDEYRHHMLQAEIFHIASSCLPFPEPNSSETPQKKRNHIPLLSRETEPSYEERISKVKAKLADNLK

SEQ ID NO: 158000 - protein, 160 aa, Zea Mays
MQQMSNNDELCSMTIKGSAFLWHQVRCMVAVLFLIGQGLESPSVVDSLLDIMKTSRKPQYKMAPELPLILQSCLFDKANFMCSADASRSLTEHLNDEYRHHMLQAEIFHIASSCLPFPEPNSSETPQKKRNHIPLLSRETEPSYEERISKVKAKLADNLK

SEQ ID NO: 158001 - protein, 314 aa, Zea Mays
MAAADPETAAALRGEVAALRMRVQELEAENQRLARIASTCTCGFKGSVSKVSPRWPGVPSLPCEIVMPCRLGVQEGSVGSITAHHNVKFHQNSTMEKDLSSPFDHTVISNANEMQCNRNADDNGLPEDSSKHTKRTGRKVGILSHCPKRLVALKVMYFGQRFYGFSSEGNIEPTVESEIFKALERAKLMVANRKESCYSRCGRTDKGVSATGQVISLYLRSNIKDVGGDMLDERSEIDYVKVLNRILPRDIRVLGWCPVPADFHARFTCLSREYKYLFWKGDLDILEMQKAASKFIGEHDFRNFCKMDAANVQQ

SEQ ID NO: 158002 - protein, 81 aa, Zea Mays
MLYSCTRTVAQLHFFSLLDARPVTFASRCRFSSLAELVRCCSSSIAMHHAADELLRSSAPRLLSRSCSSRRSAAQARPCPW

SEQ ID NO: 158003 - protein, 103 aa, Zea Mays
MEARGSQLNQSIQHHLSSDKSIARTQQQWRLHKHKRTRSRAPQVNLNRHIHRNRSLSLDGSSSRRKPSEEVAAVVGEQGSRHGSQQGGRRHRRRARPAPAAEA

SEQ ID NO: 158004 - protein, 103 aa, Zea Mays
MGFDGELIGGSRVGRESCYVGLGVPLLPSSERHHPPWSRCGQARWLLFPSLGNPRRVMTPFRSVQEASETEARVIRAQLAESDCRMADRWVRLQSTSRPVIRP

SEQ ID NO: 158005 - protein, 667 aa, Zea Mays
MSSYPVLNNRPIDQWRVTDLKDELRKRKLPVKGLKEELVKRLSDSIQSEREADEADEDVGVNVDDQLPDANAIEENTVTVTEVHQETVVDVTHQVEVPTTEVGQESIISPTRGPPSVDVEEASTTKGKVPESVARGNLTFEEVQVHTKSTNEPLHEKTTDVDTNDAVDVNSDLIPAEVKFGATEASKIEEQDFPPAPVDDLTSDSTGPLGTDVVTAATSGAGPMDTDVFIATTSDAGPMDTDVVTAAPVSDEGEKLAPKDASGNKVSMHDEEQNNSDTMNEDCKPIISQSNNQTSLEDIDSTDNVDSYKKDSPEGGSPEKLNLDRSSGDESMEEDTVEIKQDESNMKSDDLGGKNEFNSEDVKEVILPDSVVEASKEAMAEEKSAASTEKRKLEAEEGVASTEPIKRQRRWTADIAKVSGRQALSQTGPETPKESFQPAFKRSFGRSDSTASVDSPKERIVPPSEKPPTTSLRIDRFVRPFTLKAVQEFLGKTGSVQDFWMDHIKTHCYVTFSSVDEAVATRDAVYNLQWPPNNGNKLVAEFVDPQEVKLKVDPPPPPAAPVSPAAATRAPPVQHTQTNQSVPRQAAAPKEELPPPPPPPLAKPPMADLTPLGRERLPPTPKKPEPPVVTLDDLFKKTQSSPRIYYLPLSEEEVAAKLAAQGKGKKG

SEQ ID NO: 158006 - protein, 561 aa, Zea Mays
MSSYPVLNNRPIDQWRVTDLKDELRKRKLPVKGLKEELVKRLSDSIQSEREADEADEDVGVNVDDQLPDANAIEENTVTVTEVHQETVVDVTHQVEVPTTEVGQESIISPTRGPPSVDVEEASTTKGKVPESVARGNLTFEEVQVHTKSTNEPLHEKTTDVDTNDAVDVNSDLIPAEVKFGATEASKIEEQDFPPAPVDDLTSDSTGPLGTDVVTAATSVSDEGEKLAPKDASGNKVSMHDEEQNNSDTMNEDCKPIISQSNNQVPEASKEAMAEEKSAASTEKRKLEAEEGVASTEPIKRQRRWTADIAKVSGRQALSQTGPETPKESFQPAFKRSFGRSDSTASVDSPKERIVPPSEKPPTTSLRIDRFVRPFTLKAVQEFLGKTGSVQDFWMDHIKTHCYVTFSSVDEAVATRDAVYNLQWPPNNGNKLVAEFVDPQEVKLKVDPPPPPAAPVSPAAATRAPPVQHTQTNQSVPRQAAAPKEELPPPPPPPLAKPPMADLTPLGRERLPPTPKKPEPPVVTLDDLFKKTQSSPRIYYLPLSEEEVAAKLAAQGKGKKG

SEQ ID NO: 158007 - protein, 336 aa, Zea Mays
MEEDTVEIKQDESNMKSDDLGGKNEFNSEDVKEVILPDSVVEASKEAMAEEKSAASTEKRKLEAEEGVASTEPIKRQRRWTADIAKVSGRQALSQTGPETPKESFQPAFKRSFGRSDSTASVDSPKERIVPPSEKPPTTSLRIDRFVRPFTLKAVQEFLGKTGSVQDFWMDHIKTHCYVTFSSVDEAVATRDAVYNLQWPPNNGNKLVAEFVDPQEVKLKVDPPPPPAAPVSPAAATRAPPVQHTQTNQSVPRQAAAPKEELPPPPPPPLAKPPMADLTPLGRERLPPTPKKPEPPVVTLDDLFKKTQSSPRIYYLPLSEEEVAAKLAAQGKGKKG

SEQ ID NO: 158008 - protein, 172 aa, Zea Mays
MEGVSSAPEMDEAISTDQSSRSTKRRAKVWDHVDSELIDGKEKAVCKYCKAHLSSAAGKAHFISEDFELHKKIIAFKKISFPHTSYAVQDGITSCLLEWGLVGDLFTLTLDNASVNNRAMKDMRDALGSQMFFSGEHLHVRCSSHVLNIMVQAGLKAKEFLGASGDKRKEVN

SEQ ID NO: 158009 - protein, 164 aa, Zea Mays
MEGVSSAPEMDEAISTDQSSRSTKRRAKVWDHVDSELIDGKEKAVCKYCKAHLSSAAGKAHFISEDFELHKKIIAFKKISFPHTSYAVQDGITSCLLEWGLVGDLFTLTLDNASVNNRAMKDMRDALGSQMFFSGEHLHVRCSSHVLNIMVQAGLKVVPNAEYH

SEQ ID NO: 158010 - protein, 200 aa, Zea Mays
MRDDMGMTIEDVIEECKVFYFAGMETTSVLLTWTMVVLSMDPEWQDRAREEVTALFGRDGKPEYDGLSRLKVVTMVLYEVLRLYPPATSVVRQTYKEMELPVLLIHHDPDIWGGDAREFRPDRFSEGVSRASKDPGAFLPFGWGPRICIGQNFALLEAKMALCMILQRFEFGLAPSYAHAPHTVITLHPMHGAQLKLRAI

SEQ ID NO: 158011 - protein, 220 aa, Zea Mays
MAMHWLVQGCSYGDSLVFHFSGIGAQVADDDGDEADGYDEAICPLDAFQSGPILDDEINEVIVRPLVHGARLHAVVDACYSATVLDLPYQCRMSRNGFWQWEDESPPSGAWKGTSGGHAVLISGYSEGKGNFAMMPDAHASVVGAMTHSFVRTLECQPRGVTYGHLLSSMRAIMKNRGGGCDLQGAIGAPIRTVANFSGVQEPNLSSSETFDIYRKQFVL

SEQ ID NO: 158012 - protein, 169 aa, Zea Mays
MFSLFYGLWKYVFAKDEFRVLILGVDRAGKTTLLEKLKSIYLKGEGLPPDRVVPTVGLNIGRIEDAKAKLVFWDLGGQVSLRTIWEKYYEEAHAIMYVIDAATASSFEDSKSALEKVIRHEHLRGAPLLIVANKQDLPGAIDEEELAKFLHKELDERPYTFQAVSAYDG

SEQ ID NO: 158013 - protein, 201 aa, Zea Mays
MFSLFYGLWKYVFAKDEFRVLILGVDRAGKTTLLEKLKSIYLKGEGLPPDRVVPTVGLNIGRIEDAKAKLVFWDLGGQVSLRTIWEKYYEEAHAIMYVIDAATASSFEDSKSALEKVIRHEHLRGAPLLIVANKQDLPGAIDEEELAKFLHKELDERPYTFQAVSAYDGGIKSGIDWLVEQMEKSKRTETLQARAGVAGQI

SEQ ID NO: 158014 - protein, 118 aa, Zea Mays
MFSLFYGLWKYVFAKDEFRVLILGVDRAGKTTLLEKLKSIYLKGEGLPPDRVVPTVGLNIGRIEDAKAKLVFWDLGGQVSLRTIWEKYYEEAHAIMYVIDAATASSFEDSKSALGYSP

SEQ ID NO: 158015 - protein, 398 aa, Zea Mays
MASDGIGPRDVCVVGVARTPMGGFLGALSPLPATKLGSIVIQAALERANVDPALVQEVYFGNVLSANLGQAPARQAALGAGIPNSVVCTTVNKVCASGMKATMFAAQSIQLGINDIVVAGGMESMSNAPKYIAEARKGSRFGHDTLVDAMLKDGLWDVYNDCAMGMCAELCADNHALTREDQDAFAIQSNERGIAARDSGAFAWEIIPVQVPVGRGKPPTLIERDESLDKFDPVKLKKLRPSFKENGGTVTAGNASSISDGAAALVLVSGQKAQELGLQVLARIKGYADAAQAPELFTTTPALAIPKAIANAGLESSRVDFYEINEAVALANQKLLGIPSEKINVHGGAVSLGHPLGCSGARILVTLIGVLRAKSGKIGVAGVCNGGGGASALVLELA

SEQ ID NO: 158016 - protein, 312 aa, Zea Mays
MASDGIGPRDVCVVGVARTPMGGFLGALSPLPATKLGSIVIQAALERANVDPALVQEVYFGNVLSANLGQAPARQAALGAGIPNSVVCTTVNKVCASGMKATMFAAQSIQLGINDIVVAGGMESMSNAPKYIAEARKGSRFGHDTLVDAMLKDGLWDVYNDCAMGMCAELCADNHALTREDQDAFAIQSNERGIAARDSGAFAWEIIPVQVPVGRGKPPTLIERDESLDKFDPVKLKKLRPSFKENGGTVTAGNASSISDGAAALVLVSGQKAQELGLQVLARIKGSGAFYNHSSTCNTKGYRKCWIRVIPC

SEQ ID NO: 158017 - protein, 368 aa, Zea Mays
MASDGIGPRDVCVVGVARTPMGGFLGALSPLPATKLGSIVIQAALGAGIPNSVVCTTVNKVCASGMKATMFAAQSIQLGINDIVVAGGMESMSNAPKYIAEARKGSRFGHDTLVDAMLKDGLWDVYNDCAMGMCAELCADNHALTREDQDAFAIQSNERGIAARDSGAFAWEIIPVQVPVGRGKPPTLIERDESLDKFDPVKLKKLRPSFKENGGTVTAGNASSISDGAAALVLVSGQKAQELGLQVLARIKGYADAAQAPELFTTTPALAIPKAIANAGLESSRVDFYEINEAFSAVALANQKLLGIPSEKINVHGGAVSLGHPLGCSGARILVTLIGVLRAKSGKIGVAGVCNGGGGASALVLELA

SEQ ID NO: 158018 - protein, 121 aa, Zea Mays
MSEDQMDRGCLETDVVEEIYEEGSAMLARRLNINYPEGNMFKLHDCAVCQLEMKPGEGTSVHGNMPKHSRVDPWGGPFLCSSCQLKKEAMEGKLHSRRNLGSLPLMCYQKPDLTRRRMIPT

SEQ ID NO: 158019 - protein, 108 aa, Zea Mays
MSEDQMDRGCLETDVVEEIYEEGSAMLARRLNINYPEGNMFKLHDCAVCQLEMKPGEGTSVHGNMPKHSRVDPWGGPFLCSSCQLKKEAMEGKLHSRNSQSAVQPVPK

SEQ ID NO: 158020 - protein, 474 aa, Zea Mays
MEMHADVDGCSVPLAVLLKRELCNQKVERPDILFGEANKSKKGEDFTLLVPRCHRTPGGSGGGENAGDDDTISVFAIFDGHNGSAAAIYTRENLISSVLAAIPPNLTSEEWKAALPRALVAGFVKTDKDFQGKAARSGTTVTFVIIDGWVVTVASVGDSRCILESAEGSIYFLSADHRLDANEEEVERVTASGGEVGRINIAGGAGIGPLRCWPGGLCLSRSIGDIDVGEFIVPVPHVKQVKLSNAGGRLVIASDGVWDALHFQEALNYTRGLPAEAAANRIVKEAVTSKGLRDDTTCIVVDILPPEKLSPPLKRPGKGVIKALFRRRPSDEMSEDQMDRGCLETDVVEEIYEEGSAMLARRLNINYPEGNMFKLHDCAVCQLEMKPGEGTSVHGNMPKHSRVDPWGGPFLCSSCQLKKEAMEGKLHSRNSQSAVQPVPKESWLPSANVLPEARSNTTKDDPNLINGQTNSFSM

SEQ ID NO: 158021 - protein, 106 aa, Zea Mays
MSEDQMDRGCLETDVVEEIYEEGSAMLARRLNINYPEGNMFKLHDCAVCQLEMKPGEGTSVHGNMPKHSRVDPWGGPFLCSSCQLKKEAMEGKLHSRSMDVFTQML

SEQ ID NO: 158022 - protein, 1796 aa, Zea Mays
MEEQERAREVARKQEEEQERMIREEEERQRLAEEQAKQAAWQAEQERLEAARRAEEQRIAREEERKRIAMEEERRREAAHQKLLELEARIAKREAKTNIDSTRAVNDEFIPGDVKDRDLSHSANFGDRKDIDKMNERINTSTPLESSSINRFSETVPRVRTLTDGRPSFIDRETAHYSSRPAFPEQENVHHRPQHDPFASKRGNFPKKDLNDGFGSVSVRQSSTGRTTDSSWALEDFHHEKVPRWDAPREIDRFSKQSEFDNEFFNSDRFGDTAWLPSSSHGSLNAQQGDRMFQSPDVNELSSFTRPRYSMRQPRVPPPPIVTSVHRSSIGASAQRFNSSFVDGGNRECSGRDDVQIMQGQYGSVYQEASRQHGIRSDHISVNEQQIVDRKSPVLGSQSSLSVSSPPSSPPHVSHDEMDVSGDSPVLPTSADGEHTALSDNHHAALTVDADNTSRIAASGVPHLEEDEWSSVNNDDRRKQDEYDEDNDSYQEDEMNEADDENIDLDDEFLEGQDTPVELEPVILGFDEGVQVEIPPNSQLELASVRSTERTVGVHLNSGVAEQENVSGSVVHSDPVTEAEKALQALTLDGVNGLTEDSNGEPSNSSRTPASSSQLPQASSVGPIFSSASTVVGQNEVPVSLQFGLFTGPPLIPTPVPAIQIGSIQMPIHLHNQFNPSLPHMHPSTTPLYQFGQLRYVRPIAPSVRSLPSQATRPAHSSISAQHTLNQNVSSVLPELMDGGTNQNIPAQASSSTFINKSAAPTTKVPLGMDNSNSQYLNAPANNQMAGVDGFSSQVDREFAEGTTPSGRNQGLSLKRNYRPTSNNVESSQYGLEGRAMGDPKALGVVSDRRGRRYGYAVKDINMRSTGSIVEPSHKDSKGGFQRRARRNVRRTEFRVRENIEKNQNETSESFCHGEQDEITSSNGTRDIPARNTNRRELDMSKASRINGASDQSLSFRSTHNVPYERSHGGNKKSRTGAVPDGDTTSLQAGAVRVVKQQGIEVPVDADGFIEVRSKRQIMSVRREQREKENRSKIRMAKAPRKQHSISLQSSVGPSVNKRAAPSSGEVTKKVSSGSAITVEGRIVDYAESSIPLMGDTASMNLIGPPSTNAETHTNCFANQPIQIQASSDLVTSSPAKLVSGLSDGDNKGPSISTPFNMVSWDNSQINQQVMPLTQTQLEEAMGPAKFEQQAGPGFSLESNNALSPTVITEKVLPSSASPINSLLAGEKIQFGAVTSPTMLPPVSRTVSSGLGAPGSSRPDMKIDRGLPSDNSGPDKANSKELCPSTEDAEAEAEAAASAVAVAAISTDEGSPADATTASAPDKSFTSKDLSGLTSGGARTGQAGQSSTEEPLAVALPADLSVDTPSMSLWPPIASPQASGPMLSQFHGAQPSHFSCFDMNSMLGGHIFAFGPSDESAGSQGQHPQRSNALPSAPLGAWPQCHSGVDSFYRPPTGYAGPFITPGGIPGVQAPPHMVVYNHFAPVGQFGQMGLGFMGATYIPGDKQPDWKQSQGPPIVGVSQSDPNSQNMVSGQVNAPSVPAPVPHLRPTSIMPIPSPLTMFDIAPFQTSTDIQMQTCWPHMPVPPLHSVPLSVALKQHPVEGTATQQFVHNVPIDKSGTNNRFQESSASAGPSDGNKTFPNAAVSQYRDELGLVEQPASTSSSSQTVQPSFGQAGLISNEVPTSAKAMVRVTPSKVNPGIAAGAAGSTNAPQVTSIPSKTHQSSSSSSDPQYQHLVNNQDRRARATQKAGTGNEWQRRSGYQGRNQGSGSDRSSGTGRMKQIYVAKPSATSGHASSG

SEQ ID NO: 158023 - protein, 1739 aa, Zea Mays
MSHPGKFVSVNLNRSYGQSAPSSHHGGGGRPSRPAGAGSSAGGGMVVLSRPRGASSLAKPQAPKLSVPPPLNLPSLRKEHERFDGSAAAAGGGVASAPPRSGGPAAGWTKPASASEKPPGSAALPGGVPRPPSYGFAEKAGVLRGEDFPSLKAAVAPPTPPQPAQRQKDADGVRVVTPEARPGSLGMRPQVTTSRTTETLASGVSLGPGGRTSAERVQKPDLGPLPMVRLRYDSDWADDERDTGLSLPERDSRERGFGRTEAMLPGRDLYVSMRDPFKKEMFGRDVAATNKEGGQDRLWRSPVSNQHDRERTDGRPYSGGRGSSGQSYRENIAASGSKDVWSNGKEPPMSAYGQNGVEAASERYGDSSNNWPRLNSFQNNVGSKVQPFGGNKGPLNNDPVAKFGREKRLTGSPAKPLIDDSGFDSISAVNLTAIKKKKEAAKPADFHDPARESFEAELDRILRVQEQERQRVMEEQERAREVARKQEEEQERMIREEEERQRLAEEQAKQAAWQAEQERLEAARRAEEQRIAREEERKRIAMEEERRREAAHQKLLELEARIAKREAKTNIDSTRAVNDEFIPGDVKDRDLSHSANFGDRKDIDKMNERINTSTPLESSSINRFSETVPRVRTLTDGRPSFIDRETAHYSSRPAFPEQENVHHRPQHDPFASKRGNFPKKDLNDGFGSVSVRQSSTGRTTDSSWALEDFHHEKVPRWDAPREIDRFSKQSEFDNEFFNSDRFGDTAWLPSSSHGSLNAQQGDRMFQSPDVNELSSFTRPRYSMRQPRVPPPPIVTSVHRSSIGASAQRFNSSFVDGGNRECSGRDDVQIMQGQYGSVYQEASRQHGIRSDHISVNEQQIVDRKSPVLGSQSSLSVSSPPSSPPHVSHDEMDVSGDSPVLPTSADGEHTALSDNHHAALTVDADNTSRIAASGVPHLEEDEWSSVNNDDRRKQDEYDEDNDSYQEDEMNEADDENIDLDDEFLEGQDTPVELEPVILGFDEGVQVEIPPNSQLELASVRSTERTVGVHLNSGVAEQENVSGSVVHSDPVTEAEKALQALTLDGVNGLTEDSNGEPSNSSRTPASSSQLPQASSVGPIFSSASTVVGQNEVPVSLQFGLFTGPPLIPTPVPAIQIGSIQMPIHLHNQFNPSLPHMHPSTTPLYQFGQLRYVRPIAPSVRSLPSQATRPAHSSISAQHTLNQNVSSVLPELMDGGTNQNIPAQASSSTFINKSAAPTTKVPLGMDNSNSQYLNAPANNQMAGVDGFSSQVDREFAEGTTPSGRNQGLSLKRNYRPTSNNVESSQYGLEGRAMGDPKALGVVSDRRGRRYGYAVKDINMRSTGSIVEPSHKDSKGGFQRRARRNVRRTEFRVRENIEKNQNETSESFCHGEQDEITSSNGTRDIPARNTNRRELDMSKASRINGASDQSLSFRSTHNVPYERSHGGNKKSRTGAVPDGDTTSLQAGAVRVVKQQGIEVPVDADGFIEVRSKRQIMSVRREQREKENRSKIRMAKAPRKQHSISLQSSVGPSVNKRAAPSSGEVTKKVSSGSAITVEGRIVDYAESSIPLMGDTASMNLIGPPSTNAETHTNCFANQPIQIQASSDLVTSSPAKLVSGLSDGDNKGPSISTPFNMVSWDNSQINQQVMPLTQTQLEEAMGPAKFEQQAGPGFSLESNNALSPTVITEKVLPSSASPINSLLAGEKIQFVTSPTMLPPVSRTVSSGLGAPGSSRPDMKIDRGLPS

SEQ ID NO: 158024 - protein, 415 aa, Zea Mays
MWHEARRSERKVHDLMDAARRRAQRRAVYLARRRGDPQQALQVSGTRCRVHRDDALYQATEDQQGLIQWNGKQDVLIDRFDGRALLDFIRDSSSRPFRVQGKSEEEEELEEFVNFERYRDLIKHRRRGFSDEAGLQHVVQELEAKALLPFSFDKPQSSQPPASKGAYSQVGYSYKGDGNEESEDLDSDDDDEEEEVDDDDKDFSSDDSSDERMESIAKEFGIKRYNWLVYMDKKNKEQEKRQKEIVKGDPSIKKMSRRERRKASQIEREKEREAARSVGRVSYRDPYREQRRSPSYEAYSRGRRSRSRSRSRSPSHSRRHGRGIHAESNYWSKQKAPRVEYITEFGGSDDTSEPKVSGISPPSSPIRIDIPNRLSGGQILEALHSDPASSLSVEQERTAKLLKPSPRFVMMITML

SEQ ID NO: 158025 - protein, 106 aa, Zea Mays
MKHIQGAEDQDRDQDLVHHPILGVMAVGYMLKAIIGASKRLLGLNILLNLEVPMIPVNQKFQGSLRLRLQYELTYLTGRETRLLIFANIHWANFSLMELITSILVF

SEQ ID NO: 158026 - protein, 490 aa, Zea Mays
MPSTAEDFPAIRKLGKLFRLTEVYLWDDSYGAGPHDGQKNGRSAEAALVDSHTDKTCNEASNSTDKGHFFVEDLELVNLMGSLGLPVSFSTSKVNKNTCNKGKKKGRQAPLKAANTQINDAVRICINTEDRENSVESLDAMEQTHSCNLFVTPLGQNEPSRDDTDKRLREDSSCVEEQEESGCSTIYSAGKAPGCDAKNHLTELGAFELSDNLANSAKEEYSIQENQAYESVLLDSEEMSRNDCVDDESTHSCVGIYQDERVSTRGDQTSEETLSVPHDYNDVGREASLSLAEPSSIDEHAQSSANNFYYDYGEWRVIWDPFYNRYYFYNIQTQESTWCPPEGLEDFASYCSPDTTKELAELGSQCSSMAPQENNLATHVNHLEAQEQDHCIHDLSDIPVEKPIYQSMITTSDKAQHTENKYSDSTTTVLEMNQEVASTKTKKRVRRSRSYHSCQDMAGNVSNDIIKYWAQRSWWKCHPICQKVQACNCS

SEQ ID NO: 158027 - protein, 616 aa, Zea Mays
MPSTAEDFPAIRKLGKLFRLTEVYLWDDSYGAGPHDGQKNGRSAEAALVDSHTDKTCNEASNSTDKGHFFVEDLELVNLMGSLGLPVSFSTSKVNKNTCNKGKKKGRQAPLKAANTQINDAVRICINTEDRENSVESLDAMEQTHSCNLFVTPLGQNEPSRDDTDKRLREDSSCVEEQEESGCSTIYSAGKAPGCDAKNHLTELGAFELSDNLANSAKEEYSIQENQAYESVLLDSEEMSRNDCVDDESTHSCVGIYQDERVSTRGDQTSEETLSVPHDYNDVGREASLSLAEPSSIDEHAQSSANNFYYDYGEWRVIWDPFYNRYYFYNIQTQESTWCPPEGLEDFASYCSPDTTKELAELGSQCSSMAPQENNLATHVNHLEAQEQDHCIHDLSDIPVEKPIYQSMITTSDKAQHTENKYSDSTTTVLEMNQEVASTKTKKRVRRSRSYHSCQDMAGNVSNDIIKYWAQRYSLFSLFDSGIKMDEVGWFSVTPEPIAKHHASRVGAGVMIDCFTGVGGNAIQFAKKCKHVIAVDIDPQKIDCAHHNASIYGVNDHIDFIVGDFIHIAPHLKGETAFMSPPWGGPDYAKVDVYDMKSMLIPCDGFKSSDVSSSQH

SEQ ID NO: 158028 - protein, 397 aa, Zea Mays
MGSLGLPVSFSTSKVNKNTCNKGKKKGRQAPLKAANTQINDAVRICINTEDRENSVESLDAMEQTHSCNLFVTPLGQNEPSRDDTDKRLREDSSCVEEQEESGCSTIYSAGKAPGCDAKNHLTELGAFELSDNLANSAKEEYSIQENQAYESVLLDSEEMSRNDCVDDESTHSCVGIYQDERVSTRGDQTSEETLSVPHDYNDVGREASLSLAEPSSIDEHAQSSANNFYYDYGEWRVIWDPFYNRYYFYNIQTQESTWCPPEGLEDFASYCSPDTTKELAELGSQCSSMAPQENNLATHVNHLEAQEQDHCIHDLSDIPVEKPIYQSMITTSDKAQHTENKYSDSTTTVLEMNQEVASTKTKKRIIHAKTWQGTSLMTSSSTGLSGIHFSHFLIVV

SEQ ID NO: 158029 - protein, 418 aa, Zea Mays
MPSTAEDFPAIRKLGKLFRLTEVYLWDDSYGAGPHDGQKNGRSAEAALVDSHTDKTCNEASNSTDKGHFFVEDLELVNLMGSLGLPVSFSTSKVNKNTCNKGKKKGRQAPLKAANTQINDAVRICINTEDRENSVESLDAMEQTHSCNLFVTPLGQNEPSRDDTDKRLREDSSCVEEQEESGCSTIYSAGKAPGCDAKNHLTELGAFELSDNLANSAKEEYSIQENQAYESVLLDSEEMSRNDCVDDESTHSCVGIYQDERVSTRGDQTSEETLSVPHDYNDVGREASLSLAEPSSIDEHAQSSANNFYYDYGEWRVIWDPFYNRYYFYNIQTQESTWCPPEGLEDFASYCSPDTTKELAELGSQCSSMAPQENNLATHVNHLEAQEQDHCIHDLSDIPVEKPIYQRSFMPRHGRERL

SEQ ID NO: 158030 - protein, 636 aa, Zea Mays
MPSTAEDFPAIRKLGKLFRLTEVYLWDDSYGAGPHDGQKNGRSAEAALVDSHTDKTCNEASNSTDKGHFFVEDLELVNLMGSLGLPVSFSTSKVNKNTCNKGKKKGRQAPLKAANTQINDAVRICINTEDRENSVESLDAMEQTHSCNLFVTPLGQNEPSRDDTDKRLREDSSCVEEQEESGCSTIYSAGKAPGCDAKNHLTELGAFELSDNLANSAKEEYSIQENQAYESVLLDSEEMSRNDCVDDESTHSCVGIYQDERVSTRGDQTSEETLSVPHDYNDVGREASLSLAEPSSIDEHAQSSANNFYYDYGEWRVIWDPFYNRYYFYNIQTQESTWCPPEGLEDFASYCSPDTTKELAELGSQCSSMAPQENNLATHVNHLEAQEQDHCIHDLSDIPVEKPIYQSMITTSDKAQHTENKYSDSTTTVLEMNQEVASTKTKKRIIHAKTWQGTSLMTSSITPEPIAKHHASRVGAGVMIDCFTGVGGNAIQFAKKCKHVIAVDIDPQKIDCAHHNASIYGVNDHIDFIVGDFIHIAPHLKGETAFMSPPWGGPDYAKVDVYDMKSMLIPCDGYSLFKLGTMIASRVVMFLPRNIDLNQLADMSLSVDPPWAVEVEKNFLNGKLKAITAYFEEQDR

SEQ ID NO: 158031 - protein, 376 aa, Zea Mays
MRGVKEAQESRGTRQEASAMRFMLCEVVEPPRTGATWGVAAQRRGLGWQEHAHAWRKVGPARIAGHGRWRTWKHRWKGEECGEETYLDGRRWKGEEWGLGPRRRESWRRGRMMPVRARRARTPRAGQWATFCPRTKSGAIRGPSKIRARPEAPRHLRARAVPVPVPVPGASASPLLAHFSLDHHFGTAASESLRTPTQARCPAVLIEPALIPSARVLHSTYGGSPPSRPPLRWSWPRPRTQMMVAEKPAPGVFQVHEAADDEQEPASPSSPRKMHSLDFEHIGALAAVAESLAPGSRWRRALTSARFVIFQAKINVLLPFGPLAIVLHYLSGTHVRTPATHFVSKSSQSFSFSSFFFRQPSARTLSTFARPRLNLY

SEQ ID NO: 158032 - protein, 113 aa, Zea Mays
MKSSLSRKGESSAAKNHWTVRWCTGLSSESEPPKPTVASAISGRRVARANGRFGTPDCPVRQRNRRPNNRMRQIRKEIEHRTATGPVRWCTGLSGASLDRRQELPSKLISNGS

SEQ ID NO: 158033 - protein, 53 aa, Zea Mays
MRQIRKEIEHQTTTGPVRWCTGLFGAPLDRRRELPSKLISNGSELPWDYKRDP

SEQ ID NO: 158034 - protein, 74 aa, Zea Mays
MAESSLASECNVVLRGRRRRRTSPGRVARAVEPLRCCPLHCWNRHAGEEEDDPLVTKIVFPAVQTIGFNPKRID

SEQ ID NO: 158035 - protein, 59 aa, Zea Mays
MLPLKNKRNNLPTHCQRLSILLGGILSWGLHCYIRRRLLLTGKETSRSLIWSRCFTIIS

SEQ ID NO: 158036 - protein, 55 aa, Zea Mays
MLPLKNKRNNLPTHCQRLSILLGGILSWGLHCYIRRRLLLTGKETSSYDLKSTAS

SEQ ID NO: 158037 - protein, 381 aa, Zea Mays
MRANGREGLLTCCIRPSSIFGPGDKLMVPSLVAAARAGKSKYIIGDGNNYYDFTYVENVAYGHVCAEKTLSSEDGAKIAAGKTYFITNMEPIKFWEFMSLILEGLGYERPSVKIPVSVMMPVAHVVEWTYQKFAKYGMKVPQLTPSRIRLLSCNRTFSCSRAKEQLGYEPLVSLKDGVKRTVESYSHLQAQNHRSISKASIFLGNGNLAKTVLWEDAKQTVTVLLLLAVIYYHLFTCGYTFITAMAKLLSLTALFLFIHGMLPSNLFGHKVEKLEASNFHITQAQAHHIANSISSNWNSLVSALRSLCRGNDWLLFLKVSLSLLVVSILSSMSSQAAFKIGTALVFTGFKAYEKWEDSIDSMVGDACTILLHFGSAKESSS

SEQ ID NO: 158038 - protein, 539 aa, Zea Mays
MEAVRGDGRWCVVTGGRGFAARHLVTMLLRSGEWRVRVADLGPAITLDRDEEEGFLGAALREGQAVYVSADLRDKAQVARAFEGAEVVFHMAAPDSSINNFHLHYGVNVDGTKNVIDTCIRCKVKRLIYTSSPSVVFDGVHGIFNADESMPYPDKFNDSYSETKADAEKLVMRANGREGLLTCCIRPSSIFGPGDKLMVPSLVAAARAGKSKYIIGDGNNYYDFTYVENVAYGHVCAEKTLSSEDGAKIAAGKTYFITNMEPIKFWEFMSLILEGLGYERPSVKIPVSVMMPVAHVVEWTYQKFAKYGMKVPQLTPSRIRLLSCNRTFSCSRAKEQLGYEPLVSLKDGVKRTVESYSHLQAQNHRSISKASIFLGNGNLAKTVLWEDAKQTVTVLLLLAVIYYHLFTCGYTFITAMAKLLSLTALFLFIHGMLPSNLFGHKVEKLEASNFHITQAQAHHIANSISSNWNSLVSALRSLCRGNDWLLFLKASKRMRNGRTALIVWWATPVPFFCTLVLPRNHLARNKRRCSLQTASYFVY

SEQ ID NO: 158039 - protein, 519 aa, Zea Mays
MEAVRGDGRWCVVTGGRGFAARHLVTMLLRSGEWRVRVADLGPAITLDRDEEEGFLGAALREGQAVYVSADLRDKAQVARAFEGAEVVFHMAAPDSSINNFHLHYGVNVDGTKNVIDTCIRCKVKRLIYTSSPSVVFDGVHGIFNADESMPYPDKFNDSYSETKADAEKLVMRANGREGLLTCCIRPSSIFGPGDKLMVPSLVAAARAGKSKYIIGDGNNYYDFTYVENVAYGHVCAEKTLSSEDGAKIAAGKTYFITNMEPIKFWEFMSLILEGLGYERPSVKIPVSVMMPVAHVVEWTYQKFAKYGMKVPQLTPSRIRLLSCNRTFSCSRAKEQLGYEPLVSLKDGVKRTVESYSHLQAQNHRSISKASIFLGNGNLAKTVLWEDAKQTVTVLLLLAVIYYHLFTCGYTFITAMAKLLSLTALFLFIHGMLPSNLFGHKVEKLEASNFHITQAQAHHIANSISSNWNSLVSALRSLCRGNDWLLFLKVSLSLLVVSILSSMSSQAAFKFGSAKESSS

SEQ ID NO: 158040 - protein, 435 aa, Zea Mays
MESMSMVKRLIYTSSPSVVFDGVHGIFNADESMPYPDKFNDSYSETKADAEKLVMRANGREGLLTCCIRPSSIFGPGDKLMVPSLVAAARAGKSKYIIGDGNNYYDFTYVENVAYGHVCAEKTLSSEDGAKIAAGKTYFITNMEPIKFWEFMSLILEGLGYERPSVKIPVSVMMPVAHVVEWTYQKFAKYGMKVPQLTPSRIRLLSCNRTFSCSRAKEQLGYEPLVSLKDGVKRTVESYSHLQAQNHRSISKASIFLGNGNLAKTVLWEDAKQTVTVLLLLAVIYYHLFTCGYTFITAMAKLLSLTALFLFIHGMLPSNLFGHKVEKLEASNFHITQAQAHHIANSISSNWNSLVSALRSLCRGNDWLLFLKVSLSLLVVSILSSMSSQAAFKIGTALVFTGFKAYEKWEDSIDSMVGDACTILLHFGSAKESSS

SEQ ID NO: 158041 - protein, 161 aa, Zea Mays
MGWSESAMVAGARDVGVSPAIVGAFPRKEAALVEFFMDDCLQQLMDRIDAGEGEQLKNLILSERLSKLVRMRLEMQAPYISKWPQALSIQSQPANVSTSLKQRAILVDEIWHAAGDSGSDIDWYVKRTVLGGIYSTSEVYMLTDNSPARIETKVFHCFGVP

SEQ ID NO: 158042 - protein, 63 aa, Zea Mays
MKLLFLMFMEFVLQVFSPSMVEQRFLETMKAIQGALIVSSSIQIILGYSQLWGIFSSPVGMTP

SEQ ID NO: 158043 - protein, 474 aa, Zea Mays
MPWLAVPFSDSEGREALDGQFKVSGIPHLVILDAKTGEVYTEDGVEFVSEYGVEAYPFTPDRINELKEQEKAEKENQTIQSVLGTSTRDYLISNKGDKVPISELEGKYVGLCFVVDGFPPLAEFTEVLAKIYEKLKEVGEKFEVVAVSLDSEESSFNESFAKMPWLAIPQGDIKCQTLVRYFELSSLPTLVLIGPDGKTLNNNVADIIDDHGFEAWEGFPFSAEKLEILAEKAKIKAASQTLESILISGHLDFVIGKDGAKVPVSELVGKTVLVYFSAKWCPPCRAFLPTLVKEYNKIKEKNSDFEIVFISSDEDQSSFDDFFSEMPWLAVPWEDERKASLKKTFKIRGIPSLVAIGPTGQTVSRDAKSQLMIHGADAFPFTEERLEELQKKLDEMAKGWPQKLKHELHDEHELVLLRRGTYRCDGCNEMGSSWSYRCDECDFDLHPKCALGEEKMGEEAPAGYVCEGGVCRKA

SEQ ID NO: 158044 - protein, 291 aa, Zea Mays
MWNEAMASDGSSSSTFRGLYGNVHGPAVLTGAAFALVALLISLWLILQHLRSYSDPAEQKWIIAVLFMVPVYACESIISLWNSKLSLACDILRNCYEAFALYAFGRYLVACLGGERQVFRLLESRKRDELSQELLDKARARNRGGAYSFFCDPDALGENLYTIIKFGLVQYMILKTLCALLALVLEPFGAYGDGEFKWNYGYPYIAAVINFSQTWALYCLVKFYNATHEKLQAIRPLAKFISFKAIVFATWWQGVGIAIICQTGLLPKEGKVQNALQDFLICIECRWLSQR

SEQ ID NO: 158045 - protein, 61 aa, Zea Mays
MLSLLACSPFRLPPTRCGARRKSMTTATIMIRSGARIGSRRSKGGISALRIFNTRLDFGVQ

SEQ ID NO: 158046 - protein, 138 aa, Zea Mays
MRIDLLFITQPWGSSLQQRQGFQSTSNTQTHIVNIKMQVPNGDRTRHEQQASPMRNTICGLRTRLAGSRIRNDDNSLVLPFRRTPRARRMGWTTSLPGLRRHVVRGQGTEGGRARHRSSWRRPWETSRGWCPSFWRGG

SEQ ID NO: 158047 - protein, 384 aa, Zea Mays
MEQYEGTQASLVGSHAVLGKGNQNTVDTAASGKNNFGGELCCSSSDPIHVPSPGSKSAGTFGAIKREVGVVGARQRPADSAAIYTSTSNGLVKVVSAPKVSPHLEWKPKSVSPSTAAPPGAPSPVDDGSKTEVSALSKKLSHANVSHEHVIIPEHIRIPDSERTHFIFGSFESEIYPKASLAAYYDAVAKEDLNDHSPSRMDNVGSCSPLPQSEPAVSVSEHEQSLTECVDVRSPGVVGGTNETISSKVTHSQPRLQHQEAAQNFKAYEPDSGYGMSFITKVDGEAAQGYGFTFCKWLSVTCIYSNSTTSAPDVFSTIPSTSVSKLFAISACFLTTVWVSNGCSKLFKQPCISSVATCQQLSGNAKWSLTTSCQWHEIWIKPSV

SEQ ID NO: 158048 - protein, 535 aa, Zea Mays
MASRGGSSGFIEYFHNSTKRHGSNRENTSQQGMNAIRVQKEMKKEWARPGRVFNRNITRGGYSRSSLPGVTQEFRVVKDNRIKLKEVSETLPEASQNGDSSNECAFSNVRDKCSTKKLAAQHHLVTCNVNGHGAAHADNGIKIAAQAHDKEVKPSIVRKMEQYEGTQASLVGSHAVLGKGNQNTVDTAASGKNNFGGELCCSSSDPIHVPSPGSKSAGTFGAIKREVGVVGARQRPADSAAIYTSTSNGLVKVVSAPKVSPHLEWKPKSVSPSTAAPPGAPSPVDDGSKTEVSALSKKLSHANVSHEHVIIPEHIRIPDSERTHFIFGSFESEIYPKASLAAYYDAVAKEDLNDHSPSSPLPQSEPAVSVSEHEQSLTECVDVRSPGVVGGTNETISSKVTHSQPRLQHQEAAQNFKAYEPDSGYGMSFITKVDGEAAQGYGFTFCKWLSVTCIYSNSTTSAPDVFSTIPSTSVSKLFAISACFLTTVWVSNGCSKLFKQPCISSVATCQQLSGNAKWSLTTSCQWHEIWIKPSV

SEQ ID NO: 158049 - protein, 543 aa, Zea Mays
MASRGGSSGFIEYFHNSTKRHGSNRENTSQQGMNAIRVQKEMKKEWARPGRVFNRNITRGGYSRSSLPGVTQEFRVVKDNRIKLKEVSETLPEASQNGDSSNECAFSNVRDKCSTKKLAAQHHLVTCNVNGHGAAHADNGIKIAAQAHDKEVKPSIVRKMEQYEGTQASLVGSHAVLGKGNQNTVDTAASGKNNFGGELCCSSSDPIHVPSPGSKSAGTFGAIKREVGVVGARQRPADSAAIYTSTSNGLVKVVSAPKVSPHLEWKPKSVSPSTAAPPGAPSPVDDGSKTEVSALSKKLSHANVSHEHVIIPEHIRIPDSERTHFIFGSFESEIYPKASLAAYYDAVAKEDLNDHSPSRMDNVGSCSPLPQSEPAVSVSEHEQSLTECVDVRSPGVVGGTNETISSKVTHSQPRLQHQEAAQNFKAYEPDSGYGMSFITKVDGEAAQGYGFTFCKWLSVTCIYSNSTTSAPDVFSTIPSTSVSKLFAISACFLTTVWVSNGCSKLFKQPCISSVATCQQLSGNAKWSLTTSCQWHEIWIKPSV

SEQ ID NO: 158050 - protein, 559 aa, Zea Mays
MASRGGSSGFIEYFHNSTKRHGSNRENTSQQGMNAIRVQKEMKKEWARPGRVFNRNITRGGYSRSSLPGVTQEFRVVKDNRIKLKEVSETLPEASQNGDSSNECAFSNVRDKCSTKKLAAQHHLVTCNVNGHGAAHADNGIKIAAQAHDKEVKPSIVRKMEQYEGTQASLVGSHAVLGKGNQNTVDTAASGKNNFGGELCCSSSDPIHVPSPGSKSAGTFGAIKREVGVVGARQRPADSAAIYTSTSNGLVKVVSAPKVSPHLEWKPKSVSPSTAAPPGAPSPVDDGSKTEVSALSKKLSHANVSHEHVIIPEHIRIPDSERTHFIFGSFESEIYPKASLAAYYDAVAKEDLNDHSPSSVAALGFTSTDGTLNDRMDNVGSCSPLPQSEPAVSVSEHEQSLTECVDVRSPGVVGGTNETISSKVTHSQPRLQHQEAAQNFKAYEPDSGYGMSFITKVDGEAAQGYGFTFCKWLSVTCIYSNSTTSAPDVFSTIPSTSVSKLFAISACFLTTVWVSNGCSKLFKQPCISSVATCQQLSGNAKWSLTTSCQWHEIWIKPSV

SEQ ID NO: 158051 - protein, 714 aa, Zea Mays
MASRGGSSGFIEYFHNSTKRHGSNRENTSQQGMNAIRVQKEMKKEWARPGRVFNRNITRGGYSRSSLPGVTQEFRVVKDNRIKLKEVSETLPEASQNGDSSNECAFSNVRDKCSTKKLAAQHHLVTCNVNGHGAAHADNGIKIAAQAHDKEVKPSIVRKMEQYEGTQASLVGSHAVLGKGNQNTVDTAASGKNNFGGELCCSSSDPIHVPSPGSKSAGTFGAIKREVGVVGARQRPADSAAIYTSTSNGLVKVVSAPKVSPHLEWKPKSVSPSTAAPPGAPSPVDDGSKTEVSALSKKLSHANVSHEHVIIPEHIRIPDSERTHFIFGSFESEIYPKASLAAYYDAVAKEDLNDHSPSSPLPQSEPAVSVSEHEQSLTECVDVRSPGVVGGTNETISSKVTHSQPRLQHQEAAQNFKAYEPDSGYGMSFITKVDGEAAQGIAYSSEAMVLHSVNGYQLPASTATQQPVPQMFSQQFQAPQYPNFLPYRHVFSPQFGSLMVVPNYSSNHAFPQLPHASSYLVMPNGASQLAANGMKYGSNHQYKQVFQGAPAGYGYGNHNGYPNGVIGGTGAIEDMNMSKYKDNCLYAPNPQVETADVWIQSQKESPNMPSAPFYNMVGQPVSPHAAYLPPQSGHTAFSPAPSHPGHLQYPGFVHALQPTSMTMVQNPQTMIHQPAAPPLAGNLGLDMSAMVPGNQVGAFQHNQLAHLGWTTQSF

SEQ ID NO: 158052 - protein, 400 aa, Zea Mays
MEQYEGTQASLVGSHAVLGKGNQNTVDTAASGKNNFGGELCCSSSDPIHVPSPGSKSAGTFGAIKREVGVVGARQRPADSAAIYTSTSNGLVKVVSAPKVSPHLEWKPKSVSPSTAAPPGAPSPVDDGSKTEVSALSKKLSHANVSHEHVIIPEHIRIPDSERTHFIFGSFESEIYPKASLAAYYDAVAKEDLNDHSPSSVAALGFTSTDGTLNDRMDNVGSCSPLPQSEPAVSVSEHEQSLTECVDVRSPGVVGGTNETISSKVTHSQPRLQHQEAAQNFKAYEPDSGYGMSFITKVDGEAAQGYGFTFCKWLSVTCIYSNSTTSAPDVFSTIPSTSVSKLFAISACFLTTVWVSNGCSKLFKQPCISSVATCQQLSGNAKWSLTTSCQWHEIWIKPSV

SEQ ID NO: 158053 - protein, 671 aa, Zea Mays
MLQPGFSSSNHHHSATPERPSLPATPGAQVLFGPFAGDERHQDASETKLMKQPTWVFFEKESVTDLREQILQLIQHDCKDQEEKSRAELLEKLNRCKRDTLIELCRSFDLIGSRANRKEELVLFLMEFIKDHCSGSDVINSDKKYKKRKRVREEENLSAGKPSKKKKREGEEEAEDRVKHSDCDLLDNKYSCADSKNGKFPNEQTNFEPSGRINYSVSENLDGASLSEAPIPTDEQAIITTPPTKFVTAAEDDSTDVKALQRKMSSIAKKKTTSKEDCKVKLCGNRESKGDTKPRKQVIKPSKDELREAVFLILDTADFATVRYTMTFGDVVKEVDKYFGKDLFERKPLIRSLIEEELFRLADEAEKKELEESEAAEAKARAEQAAKEMAQVQTVELVINEQNVLEDGRDSNTKDSLKNANDSANKKCIDGGASVEYGFNENSCYAAEGSEEHKVDDDNKNITKDGNGGKVAVAPTANTDCTLQLQGSSNVEAETTMKSNVGTLEASKDGEVRDARNGENNGTEDGGNEGIRSGNVGSNAEAEESHGHGNNERAEHTEDDKAQECSHNENSASVGILGDGDGEAREGDINAEAEQSQADGGGNSKAEDAEHNENTKTDANSSKNGTTAAGNGKTDVDVKGATAMAQLKEALCDEMDVDCKGGGVGPRLCRS

SEQ ID NO: 158054 - protein, 346 aa, Zea Mays
MTFGDVVKEVDKYFGKDLFERKPLIRSLIEEELFRLADEAEKKELEESEAAEAKARAEQAAKEMAQVQTVELVINEQNVLEDGRDSNTKDSLKNANDSANKKCIDGGASVEYGFNENSCYAAEGSEEHKVDDDNKNITKDGNGGKVAVAPTANTDCTLQLQGSSNVEAETTMKSNVGTLEASKDGEVRDARNGENNGTEDGGNEGIRSGNVGSNAEAEESHGHGNNERAEHTEDDKAQECSHNENSASVGILGDGDGEAREGDINAEAEQSQADGGGNSKAEDAEHNENTKTDANSSKNGTTAAGNGKTDVDVKGATAMAQLKEALCDEMDVDCKGGGVGPRLCRS

SEQ ID NO: 158055 - protein, 638 aa, Zea Mays
MLQPGFSSSNHHHSATPERPSLPATPGAQVLFGPFAGDERHQDASETKLMKQPTWVFFEKESVTDLREQILQLIQHDCKDQEEKSRAELLEKLNRCKRDTLIELCRSFDLIGSRANRKEELVLFLMEFIKDHCSGSDVINSDKKYKKRKRVREEENLSAGKPSKKKKREGEEEAEDRVKHSDCDLLDNKYSCADSKNGKFPNEQTNFEPSGRINYSVSENLDGASLSEAPIPTDEQAIITTPPTKFVTAAEDDSTDVKALQRKMSSIAKKKTTSKEDCKVKLCGNRESKGDTKPRKQVIKPSKDELREAVFLILDTADFATVRYTMTFGDVVKEVDKYFGKDLFERKPLIRSLIEEELFRLADEAEKKELEESEAAEAKARAEQAAKEMAQVQTVELVINEQNVLEDGRDSNTKDSLKNANDSANKKCIDGGASVEYGFNENSCYAAEGSEEHKVDDDNKNITKDGNGGKVAVAPTANTDCTLQLQGSSNVEAETTMKSNVGTLEASKDGEVRDARNGENNGTEDGGNEGIRSGNVGSNAEAEESHGHGNNERAEHTEDDKAQECSHNENSASVGILGDGDGEAREGDINAEAEQSQADGGGNSKAEDAEHNENTKTDANSSKNGTTAAGSLNMRMWM

SEQ ID NO: 158056 - protein, 589 aa, Zea Mays
MKQPTWVFFEKESVTDLREQILQLIQHDCKDQEEKSRAELLEKLNRCKRDTLIELCRSFDLIGSRANRKEELVLFLMEFIKDHCSGSDVINSDKKYKKRKRVREEENLSAGKPSKKKKREGEEEAEDRVKHSDCDLLDNKYSCADSKNGKFPNEQTNFEPSGRINYSVSENLDGASLSEAPIPTDEQAIITTPPTKFVTAAEDDSTDVKALQRKMSSIAKKKTTSKEDCKVKLCGNRESKGDTKPRKQVIKPSKDELREAVFLILDTADFATVRYTMTFGDVVKEVDKYFGKDLFERKPLIRSLIEEELFRLADEAEKKELEESEAAEAKARAEQAAKEMAQVQTVELVINEQNVLEDGRDSNTKDSLKNANDSANKKCIDGGASVEYGFNENSCYAAEGSEEHKVDDDNKNITKDGNGGKVAVAPTANTDCTLQLQGSSNVEAETTMKSNVGTLEASKDGEVRDARNGENNGTEDGGNEGIRSGNVGSNAEAEESHGHGNNERAEHTEDDKAQECSHNENSASVGILGDGDGEAREGDINAEAEQSQADGGGNSKAEDAEHNENTKTDANSSKNGTTAAVEFEYEDVD

SEQ ID NO: 158057 - protein, 634 aa, Zea Mays
MLQPGFSSSNHHHSATPERPSLPATPGAQVLFGPFAGDERHQDASETKLMKQPTWVFFEKESVTDLREQILQLIQHDCKDQEEKSRAELLEKLNRCKRDTLIELCRSFDLIGSRANRKEELVLFLMEFIKDHCSGSDVINSDKKYKKRKRVREEENLSAGKPSKKKKREGEEEAEDRVKHSDCDLLDNKYSCADSKNGKFPNEQTNFEPSGRINYSVSENLDGASLSEAPIPTDEQAIITTPPTKFVTAAEDDSTDVKALQRKMSSIAKKKTTSKEDCKVKLCGNRESKGDTKPRKQVIKPSKDELREAVFLILDTADFATMTFGDVVKEVDKYFGKDLFERKPLIRSLIEEELFRLADEAEKKELEESEAAEAKARAEQAAKEMAQVQTVELVINEQNVLEDGRDSNTKDSLKNANDSANKKCIDGGASVEYGFNENSCYAAEGSEEHKVDDDNKNITKDGNGGKVAVAPTANTDCTLQLQGSSNVEAETTMKSNVGTLEASKDGEVRDARNGENNGTEDGGNEGIRSGNVGSNAEAEESHGHGNNERAEHTEDDKAQECSHNENSASVGILGDGDGEAREGDINAEAEQSQADGGGNSKAEDAEHNENTKTDANSSKNGTTAAGSLNMRMWM

SEQ ID NO: 158058 - protein, 63 aa, Zea Mays
MLLMHDSGARRISIVVELHEVDFPLLLLCSVWMTLCCLRYIIYSTFLKLILAKKTIHMRPWLV

SEQ ID NO: 158059 - protein, 150 aa, Zea Mays
MASVKLRTNTLDKLDGDPYVNIRMGKMLCVHKSSTVTIWTFLAMFERCDGVWISHKKCNVNLNTLMNMFSVLGDGGGLGGRNASNGSGPPCLRLPRDVHAAIAREQLRQPHRRVAPALVSQARVTVGAHAEEGMIHAEQPKARCHLRCHA

SEQ ID NO: 158060 - protein, 92 aa, Zea Mays
MASVKLRTNTLDKLDGDPYVNIRMGKMLCVHKSSTVTIWTFLAMFERCDGVWISHKKCNVNLNTLMNMFSVLGDGGGLGGRNASNGPFMWHT

SEQ ID NO: 158061 - protein, 122 aa, Zea Mays
MSKEGARASWNSTYEKGLVDVLHDNKDNPKLKGQNGWNSEGWKCITAKFNERFSLAHFTKQQLQEKDKELKSSYKAVRDSRKESWTGWNDSLCMILAEPEVWARLTQRLQGFARSHFLFSTL

SEQ ID NO: 158062 - protein, 194 aa, Zea Mays
MSIGDVCPKESEEPPNAQDQPSSSTQASPPTQNEDEAQVDEGEDQANEPPQDDSNNRGGEANDQDKEDEEQRPPHPRVHQAIQRDHPVNTILGDIHKGVTTRSRVAHFCEHYSFVSSIEPHRVEEALQDSDWVVAMQEELNNFTRNELCNRPLRCACRQQPLNTVPALPPPTPDCDRCLQVATGASRQQRSRWR

SEQ ID NO: 158063 - protein, 411 aa, Zea Mays
MDLTSTTTAFLSGLILILVSLVAHKARTSRSMKRRPPGPRALPFIGCIHHVLTSQPQAALRDLAQKHGPVMYLKLGQVDTVVISSPTAAQEALREKDRSLASRPSLLGSEIICYGNRDIAFAPYGDYWRSLRKMCTVELLNASKVRRFAAIRDSETMSLVREIRRACAAASGEPVDLGGLLLSCTNSVTGRAAFGNRCSRELTADFLSAISVVISNISGLCVSDLFPSLRFVDALTGTKRRLRRAHQRLEDVFARIISDGEARRAERKGTGAGAGGDDDDDDLLSVMLRIRDEGFIHRRDGDDFVGGRVAHGGADEEPRRNAQGARRGAASIRAQQPRRARSPDGQAALHQDGDQGDPEAVPAPPAAPPSPVPRDLRHRRVPGGQGQQGDRERMGDREEPGALGRRRQVHA

SEQ ID NO: 158064 - protein, 131 aa, Zea Mays
MAESTARTVKDVNPHEFVKAYSAHLKRSGKMELPEWVDIVKTARFKELPPYDPDWYYIRAASIARKIYGGRQRNGSRPPHFCKSSGAVARNILQQLQIMGIIDVDPKGGRLITNQGRRDLDQVAGRVAVEA

SEQ ID NO: 158065 - protein, 454 aa, Zea Mays
MVAKNVVSRGPGAVLRMDSKSVDLERGSTRRQTVCSEVLKCKYSKAETNIVILKRLGAMVLHGVDAKRMRFHTDLKNRRFDHIVFNFPRGGFRGKENDLRMIDLHKELVWGFFRNARHIVRQLGEVHVTHKSGEPYGSWDLEHLASESSFAMVDKVPFQREDYPGYNQKRGDGKRCNKPFDLGACCTFKFQIRNLKKLKQMNRRSRLIPNLGGNNFHPGHSVTDRGVFHPVAPVEARSWHHFSPLAHTGSMLMSPQPYTVNQCQRSGRCGSYPKPVESCHPVVSMPGPCLNDLPAQGGIPPPLPMSRIPSPDLLAPREQPWYQQRTILDHLGVDDYFFAREHQMSLQREYEMKRQVIPLEHRHTDRESVEKLEWLHRMIALYDGKDTEEQSHCSPSWSSEGEGFDVTKSGDARVGLVGFPSIGKSTLLNKLTGTFSEVAAYEFTTLIMYKGAKI

SEQ ID NO: 158066 - protein, 63 aa, Zea Mays
MIVLWLFDHCILLFDRWIIWTNYEYAYYCIIITCCLLYRPLQRLLLFCCLNHLLSIFLKVLCI

SEQ ID NO: 158067 - protein, 335 aa, Zea Mays
MTAMMMRRYMPHALMVLAQLFFTLLYFIAEAAFNRGLNSFVYVTYRHLLAACILCPFAYFKEKTLRPKMTPMLFLEIFVLSLVGGSLTLNMYFSSLKYTSPTFVTSMLNTVASITFVVAVVLRLEIVDVRTLRGLAKIAGTAVSLAGVTTISLYRGAAVKRPWRAPAVHVHGIGGAGHVEPHESWVKGSLLALASCICWSICFILQASSIKRYPAKLSLTAWTSLVGGLQSAAFAAFVQRDARDWLVGFGLNFWAIVYAGERPRVRRHVQPPPHRHGGTPRLLRLRRKPIRWERDWRAACDSGALHAAVGQGQGPRTARVVVIGGGQRAGAPPWP

SEQ ID NO: 158068 - protein, 334 aa, Zea Mays
MTAMMMRRYMPHALMVLAQLFFTLLYFIAEAAFNRGLNSFVYVTYRHLLAACILCPFAYFKEKTLRPKMTPMLFLEIFVLSLVGLEIVDVRTLRGLAKIAGTAVSLAGVTTISLYRGAAVKRPWRAPAVHVHGIGGAGHVEPHESWVKGSLLALASCICWSICFILQASSIKRYPAKLSLTAWTSLVGGLQSAAFAAFVQRDARDWLVGFGLNFWAIVYAAIACNGLTVVIQLWCNREKGPVFVAMFNPLLTVMVALLAYFVFGENLYVGSVIGGLLVILGLYMLLWGKDKDQEQHVSSSSEEGKEQEHPHGHDELDLHYSVSLREAAVGRGRP

SEQ ID NO: 158069 - protein, 115 aa, Zea Mays
MYLKLGLVVEDERENKEREDACNRRGHGNNLDELGGDGSAPLPCVDFLPHKTRVVYDSNHPAMEVGSLYASMTEFRLAMRQYAIDKEFELGIEASTPKKYRGYCRGGDCPWSINA

SEQ ID NO: 158070 - protein, 362 aa, Zea Mays
MKIIARSKRKNFERNHEVPTAEHVWNTESLIRAKGMMCCVCLESISPAQPLGQMMTSENMVHRCNVCGAAAHIICSSNSQKDCKCISMFGFKHVVHQWTVLWTDIADQSEEGQYCSYCEELCSESFLGGPPIYCCMWCQRLVHADCQSAMATETGEICDLGPFKRLILSPLFVRAISKPGSILSSITHGANEFATTVRGRLNRTKKEKHQNRFSSDSNDDSSSDTTLNSNQRAGELKTIGDSAQRSPENEHDSSESDGRELISESRRLGNDETGEVKLKYALSELPADSRPLLIFINKKSGAQRGDLLKHKLHFLLNPVQVFELSSSQGPETGLFLFRKLALAMIFREFYHGEVAFAQFYMT

SEQ ID NO: 158071 - protein, 517 aa, Zea Mays
MKIIARSKRKNFERNHEVPTAEHVWNTESLIRAKGMMCCVCLESISPAQPLGQMMTSENMVHRCNVCGAAAHIICSSNSQKDCKCISMFGFKHVVHQWTVLWTDIADQSEEGQYCSYCEELCSESFLGGPPIYCCMWCQRLVHADCQSAMATETGEICDLGPFKRLILSPLFVRAISKPGSILSSITHGANEFATTVRGRLNRTKKEKHQNRFSSDSNDDSSSDTTLNSNQRAGELKTIGDSAQRSPENEHDSSESDGRELISESRRLGNDETGEVKLKYALSELPADSRPLLIFINKKSGAQRGDLLKHKLHFLLNPVQVFELSSSQGPETGLFLFRKVPHFRILVCGGDGTVGWVLDAIDKQNYESPPPIAILPAGTGNDLSRVLSWGGGLGAVEKQGGLCTILHDIEHAAVTILDRWKVTVEDKKSKNVLLVKYMNNYLGIGCDAKVALDIHNLREGNPEKFYSQAFMLRRAVEEPLGHAAAMITDVLEHAESSHVITASQKKALLREMALRLS

SEQ ID NO: 158072 - protein, 413 aa, Zea Mays
MVWLQDQLEMHKFHWYSRAPTPSEFWIPLAAWFTVGLVGLWTFFHFFSVWRRKISLSWMKIIARSKRKNFERNHEVPTAEHVWNTESLIRAKGMMCCVCLESISPAQPLGQMMTSENMVHRCNVCGAAAHIICSSNSQKDCKCISMFGFKHVVHQWTVLWTDIADQSEEGQYCSYCEELCSESFLGGPPIYCCMWCQRLVHADCQSAMATETGEICDLGPFKRLILSPLFVRAISKPGSILSSITHGANEFATTVRGRLNRTKKEKHQNRFSSDSNDDSSSDTTLNSNQRAGELKTIGDSAQRSPENEHDSSESDGRELISESRRLGNDETGEVKLKYALSELPADSRPLLIFINKKSGAQRGDLLKHKLHFLLNPVQVFELSSSQGPETGLFLFRKLALAMIFREFYHGEVA

SEQ ID NO: 158073 - protein, 138 aa, Zea Mays
MRGKGPRASLTGLLWTYHGKFGWKSMAPRSRYQRTRKACLSRTSRATWEGLTCGKTRVRIPKILTRSRSMTRCSKWSALQEHGIWEHSRLDFLGRGGSRKASRSRYRCLPLSPFKSTVSLGSSSPARSRYLITGRLLC

SEQ ID NO: 158074 - protein, 459 aa, Zea Mays
MLSTHEANADQFDLLSYGNLRGLEASRSSEESNFGNDLKDGSSVSSENFGSSCLPGESYQSATVDHEKRPLSDVKTCQIACKRPKQTDHCTWLYSFEEHPLTSEVGISSPALYDGLVEIKQPNDIPAINGATTCSDCGPVVTYSHVDDIGSPRKGVPIGPEHQADIPEWRPLNSMIVPGASEFCANLDCSSASTSESVPRGDDYVSDKWIRYCVVPVTCCSSPVDWAGDSKIDCNCSDEGSMRCSRQHIIEARDNLKMILGQDRFRELGLCEMGEDVALRWTDEEEKLFQRVVFLNPVSLGKNFWDHLPDAFPNKTSQEFVSYYFNVFMLRKRAQQNRSDVLAVDSDDDELHGEPLAERVEGDPAVESSTHEHSVSNSLPMDDDHKEFEGAQFDGSLCEKSVYNAVECRHLPNQMPADSNTVNTALDVCDQDNGAQCSEFHMSLPSDTSNSLGDQSASV

SEQ ID NO: 158075 - protein, 620 aa, Zea Mays
MMKVKMMLEAKPCATNGAMDAGNLLKPMLGRGELRCIGATTLDEYRKYIEKDPALERRFQQVFVDQPSVEDTISILRGLRERYELHHGVRISDSALVAAAVLSDRYISGRFLPDKAIDLVDESAAKLKMEITSKPTALDEIDRAVLKLEMERLSLTNDTDKASRDRLSRLEAELSLLKDKQRQLTEQWEHEKAVMTKIQSIKEEIDRVNVEIQQAEREYDLNRAAELKYGSLNALQRQLQATEKELDEYQSSGKSMLREEVTQDDIAEIVSRWTGIPVSKLKQSDREKLLYLEDELHKRVVGQDPAVKAVAEAIQRSRAGLSDPNRPIASFMFMGPTGVGKTELAKALAAFMFNTEEAVVRIDMSEYMEKHSVSRLIGAPPGYVGYEEGGQLTEAVRRRPYSVVLFDEIEKAHSDVFNVFLQILDDGRVTDSQGRKVSFTNTIIIMTSNVGSQYILNMDEEVGSSDSAYENIKRRVMDAARSVFRPEFMNRVDEYIVFKPLEREQINSIVKLQLARVQKRIADRKIKLEVSPGAIEFLGSLGYDPNYGARPVKRVIQQHVENELAKGILRGDFKDEDSIFVDTQVTVPSNGQLPQQKLVFRKVGEQSKPAAEGEKFLPAV

SEQ ID NO: 158076 - protein, 824 aa, Zea Mays
MRKKKLIPVDPGPLPSLPTTPAHPRNHCSRRFVSSHRAKLRRRRSQSCLPSNRTAAAAAVMRMLAIRYLHRTVAAKADTIMALKLCRRLSGFIVGANSRCCRLSDVDKFALLFQNCTDVRSLKKLHARVLTLGLGRDVILGSEILICYASLGVLCKTRLCFQGFLNNDLAEWNSVMVDIFRAGYPEEAILLYRGLKLRQIDLDEKTVTFGLKSCIELRNLLLGKGMHADSVKLGLSRDKFVGSSLVGLYSKLARMDDSQKAFEEILDKDIVSYTSMITGYSENMDSTSWNAFKIVSDMSWSNLEVNRVTLVSLLQVAGNLGAIREGKSVHCYSIRRDIGISDEVLETSLVHMYMQCGACQLASAVLKNSAQSVASWNAMLAGLVRTGQSGNAIHYLYIMLYEHKVVPDSVTYANVISACAELCNSGYAASVHAYIIRRSIPLDVVLATALIKVYLKCTRITISKRLFNQLVVKDTVSYNAMIYGYLQNGMVNEAIALLKEMVTECVAPNFVTILSLLAAIADHKDFARGRWIHGFSIRHGFCSNVDIANQIIRMYSGCGKIASARIVFASFENKNLISWTTMMMGCLFCGHGGQTVELFQLLMQQHDNKPDSIAVMTAIQAVSEFGHLKGVKQVHCFVYRALLEKDTKTMNSLITAYAKCGRLDLSVSLFLSLEHRDLDSWNSMISAYGMHGFYTKSMTSMYSVRPQEEHYGCFVDLMSRAGHLEEGYKFIKLSTLNDKSSVLCALLSACRTYGNTMLGQVISNELLEVGQQNPGTYALISEVFAQKGQWNKSASIRNRAKENGLRKLPGSSLIESVEQVSKVC

SEQ ID NO: 158077 - protein, 739 aa, Zea Mays
MQEAIRIYCWDVILGSEILICYASLGVLCKTRLCFQGFLNNDLAEWNSVMVDIFRAGYPEEAILLYRGLKLRQIDLDEKTVTFGLKSCIELRNLLLGKGMHADSVKLGLSRDKFVGSSLVGLYSKLARMDDSQKAFEEILDKDIVSYTSMITGYSENMDSTSWNAFKIVSDMSWSNLEVNRVTLVSLLQVAGNLGAIREGKSVHCYSIRRDIGISDEVLETSLVHMYMQCGACQLASAVLKNSAQSVASWNAMLAGLVRTGQSGNAIHYLYIMLYEHKVVPDSVTYANVISACAELCNSGYAASVHAYIIRRSIPLDVVLATALIKVYLKCTRITISKRLFNQLVVKDTVSYNAMIYGYLQNGMVNEAIALLKEMVTECVAPNFVTILSLLAAIADHKDFARGRWIHGFSIRHGFCSNVDIANQIIRMYSGCGKIASARIVFASFENKNLISWTTMMMGCLFCGHGGQTVELFQLLMQQHDNKPDSIAVMTAIQAVSEFGHLKGVKQVHCFVYRALLEKDTKTMNSLITAYAKCGRLDLSVSLFLSLEHRDLDSWNSMISAYGMHGFYTKVLEMFKLMEEGNINPDGLTFSSVLSACSHAGLIKEGLHIFQSMTSMYSVRPQEEHYGCFVDLMSRAGHLEEGYKFIKLSTLNDKSSVLCALLSACRTYGNTMLGQVISNELLEVGQQNPGTYALISEVFAQKGQWNKSASIRNRAKENGLRKLPGSSLIESVEQVSKVC

SEQ ID NO: 158078 - protein, 785 aa, Zea Mays
MALKLCRRLSGFIVGANSRCCRLSDVDKFALLFQNCTDVRSLKKLHARVLTLGLGRDVILGSEILICYASLGVLCKTRLCFQGFLNNDLAEWNSVMVDIFRAGYPEEAILLYRGLKLRQIDLDEKTVTFGLKSCIELRNLLLGKGMHADSVKLGLSRDKFVGSSLVGLYSKLARMDDSQKAFEEILDKDIVSYTSMITGYSENMDSTSWNAFKIVSDMSWSNLEVNRVTLVSLLQVAGNLGAIREGKSVHCYSIRRDIGISDEVLETSLVHMYMQCGACQLASAVLKNSAQSVASWNAMLAGLVRTGQSGNAIHYLYIMLYEHKVVPDSVTYANVISACAELCNSGYAASVHAYIIRRSIPLDVVLATALIKVYLKCTRITISKRLFNQLVVKDTVSYNAMIYGYLQNGMVNEAIALLKEMVTECVAPNFVTILSLLAAIADHKDFARGRWIHGFSIRHGFCSNVDIANQIIRMYSGCGKIASARIVFASFENKNLISWTTMMMGCLFCGHGGQTVELFQLLMQQHDNKPDSIAVMTAIQAVSEFGHLKGVKQVHCFVYRALLEKDTKTMNSLITAYAKCGRLDLSVSLFLSLEHRDLDSWNSMISAYGMHGFYTKVLEMFKLMEEGNINPDGLTFSSVLSACSHAGLIKEGLHIFQSMTSMYSVRPQEEHYGCFVDLMSRAGHLEEGYKFIKLSTLNDKSSVLCALLSACRTYGNTMLGQVISNELLEVGQQNPGTYALISEVFAQKGQWNKSASIRNRAKENGLRKLPGSSLIESVEQVSKVC

SEQ ID NO: 158079 - protein, 640 aa, Zea Mays
MHADSVKLGLSRDKFVGSSLVGLYSKLARMDDSQKAFEEILDKDIVSYTSMITGYSENMDSTSWNAFKIVSDMSWSNLEVNRVTLVSLLQVAGNLGAIREGKSVHCYSIRRDIGISDEVLETSLVHMYMQCGACQLASAVLKNSAQSVASWNAMLAGLVRTGQSGNAIHYLYIMLYEHKVVPDSVTYANVISACAELCNSGYAASVHAYIIRRSIPLDVVLATALIKVYLKCTRITISKRLFNQLVVKDTVSYNAMIYGYLQNGMVNEAIALLKEMVTECVAPNFVTILSLLAAIADHKDFARGRWIHGFSIRHGFCSNVDIANQIIRMYSGCGKIASARIVFASFENKNLISWTTMMMGCLFCGHGGQTVELFQLLMQQHDNKPDSIAVMTAIQAVSEFGHLKGVKQVHCFVYRALLEKDTKTMNSLITAYAKCGRLDLSVSLFLSLEHRDLDSWNSMISAYGMHGFYTKVLEMFKLMEEGNINPDGLTFSSVLSACSHAGLIKEGLHIFQSMTSMYSVRPQEEHYGCFVDLMSRAGHLEEGYKFIKLSTLNDKSSVLCALLSACRTYGNTMLGQVISNELLEVGQQNPGTYALISEVFAQKGQWNKSASIRNRAKENGLRKLPGSSLIESVEQVSKVC

SEQ ID NO: 158080 - protein, 698 aa, Zea Mays
MQEAIRIYCWDVILGSEILICYASLGVLCKTRLCFQGFLNNDLAEWNSVMVDIFRAGYPEEAILLYRGLKLRQIDLDEKTVTFGLKSCIELRNLLLGKGMHADSVKLGLSRDKFVGSSLVGLYSKLARMDDSQKAFEEILDKDIVSYTSMITGYSENMDSTSWNAFKIVSDMSWSNLEVNRVTLVSLLQVAGNLGAIREGKSVHCYSIRRDIGISDEVLETSLVHMYMQCGACQLASAVLKNSAQSVASWNAMLAGLVRTGQSGNAIHYLYIMLYEHKVVPDSVTYANVISACAELCNSGYAASVHAYIIRRSIPLDVVLATALIKVYLKCTRITISKRLFNQLVVKDTVSYNAMIYGYLQNGMVNEAIALLKEMVTECVAPNFVTILSLLAAIADHKDFARGRWIHGFSIRHGFCSNVDIANQIIRMYSGCGKIASARIVFASFENKNLISWTTMMMGCLFCGHGGQTVELFQLLMQQHDNKPDSIAVMTAIQAVSEFGHLKGVKQVHCFVYRALLEKDTKTMNSLITAYAKCGRLDLSVSLFLSLEHRDLDSWNSMISAYGMHGFYTKSMTSMYSVRPQEEHYGCFVDLMSRAGHLEEGYKFIKLSTLNDKSSVLCALLSACRTYGNTMLGQVISNELLEVGQQNPGTYALISEVFAQKGQWNKSASIRNRAKENGLRKLPGSSLIESVEQVSKVC

SEQ ID NO: 158081 - protein, 764 aa, Zea Mays
MRMLAIRYLHRTVAAKADTIMALKLCRRLSGFIVGANSRCCRLSDVDKFALLFQNCTDVRSLKKLHARVLTLGLGRDVILGSEILICYASLGVLCKTRLCFQGFLNNDLAEWNSVMVDIFRAGYPEEAILLYRGLKLRQIDLDEKTVTFGLKSCIELRNLLLGKGMHADSVKLGLSRDKFVGSSLVGLYSKLARMDDSQKAFEEILDKDIVSYTSMITGYSENMDSTSWNAFKIVSDMSWSNLEVNRVTLVSLLQVAGNLGAIREGKSVHCYSIRRDIGISDEVLETSLVHMYMQCGACQLASAVLKNSAQSVASWNAMLAGLVRTGQSGNAIHYLYIMLYEHKVVPDSVTYANVISACAELCNSGYAASVHAYIIRRSIPLDVVLATALIKVYLKCTRITISKRLFNQLVVKDTVSYNAMIYGYLQNGMVNEAIALLKEMVTECVAPNFVTILSLLAAIADHKDFARGRWIHGFSIRHGFCSNVDIANQIIRMYSGCGKIASARIVFASFENKNLISWTTMMMGCLFCGHGGQTVELFQLLMQQHDNKPDSIAVMTAIQAVSEFGHLKGVKQVHCFVYRALLEKDTKTMNSLITAYAKCGRLDLSVSLFLSLEHRDLDSWNSMISAYGMHGFYTKSMTSMYSVRPQEEHYGCFVDLMSRAGHLEEGYKFIKLSTLNDKSSVLCALLSACRTYGNTMLGQVISNELLEVGQQNPGTYALISEVFAQKGQWNKSASIRNRAKENGLRKLPGSSLIESVEQVSKVC

SEQ ID NO: 158082 - protein, 98 aa, Zea Mays
MAARRNVRYSPLPSEDGDDSNFIKEDVDLRYTYTPKSYRRIPWKSIALALFLLLLGTSLLFLSYFIFTGHMEGDSSQAYGLLFLGFLSFLPGISLLHT

SEQ ID NO: 158083 - protein, 95 aa, Zea Mays
MAARRNVRYSPLPSEDGDDSNFIKEDVDLRYTYTPKSYRRIPWKSIALALFLLLLGTSLLFLSYFIFTGHMEGDSSQAYGLLFLGFLSFLPGMLI

SEQ ID NO: 158084 - protein, 105 aa, Zea Mays
MAARRNVRYSPLPSEDGDDSNFIKEDVDLRYTYTPKSYRRIPWKSIALALFLLLLGTSLLFLSYFIFTGHMEGDSSQAYGLLFLGFLSFLPAHSIESRVHVPVHP

SEQ ID NO: 158085 - protein, 108 aa, Zea Mays
MAARRNVRYSPLPSEDGDDSNFIKEDVDLRYTYTPKSYRRIPWKSIALALFLLLLGTSLLFLSYFIFTGHMEGDSSQAYGLLFLGFLSFLPGFYETRVAYYSWRGAPG

SEQ ID NO: 158086 - protein, 369 aa, Zea Mays
MGSCTSKSALDHRRPARYYTRGRRVHSRRSIMPEAPQSQQLGDASRGRMTGFSMSEIVHVETANRGKSEHSKTFHLTQMEWHHSQRDSKGCSNEDAWFDSVSILEDDSDDEFKSVDGDSDEDEEQAEKQQYASVSSFADALSRIGDICRGVPLPDILALKGDGRRSQQSMPSSFGLKAVLIKDKSDAADDDDDDGDGGGGKETSTPSRLRKLLQSISFNERVQQLTGGSPAKKKSTVIRLSYKTTSSCGGDDYEDGGGGGGGECGRSKKYVVRPKVGQTVPCGGERPATGCWSRMDPSLFKLRSDTFLKYRQEKIYIFTSIFVFFSSSGKACMSCTNRTSGLVFVFVFLSQRQEEMRGSKLRCLLSDRR

SEQ ID NO: 158087 - protein, 308 aa, Zea Mays
MTSPGGVFSAALVAEDFPWVDMEEEMGMAPDMYREVFDLAQRGTRAFRDRLFDEAISCYTKAQNLRPDPIILGNRSLTFCRLSQLLRERSAADSEYQPLNGLDPTTHAELALKDAEKILSINSNSPRPYILKAYALFLMEHYHEARETLLAGLQVDPLSHVLQTCLNDLDRNTNIAAGARRARLARIDDFECTLCFKLLYEPVTTPCGHSFCRSCLHQSMDHGNKCPMCRTVLFIGPRTCPISVTLSNIIQRNFPEEYAERRSEHETMTYAGVDLMPLFVMDVVLPSQKMALNIFEPRYRLMPDSPHS

SEQ ID NO: 158088 - protein, 473 aa, Zea Mays
MTSPGGVFSAALVAEDFPWVDMEEEMGMAPDMYREVFDLAQRGTRAFRDRLFDEAISCYTKAQNLRPDPIILGNRSLTFCRLSQLLRERSAADSEYQPLNGLDPTTHAELALKDAEKILSINSNSPRPYILKMEHYHEARETLLAGLQVDPLSHVLQTCLNDLDRNTNIAAGARRARLARIDDFECTLCFKLLYEPVTTPCGHSFCRSCLHQSMDHGNKCPMCRTVLFIGPRTCPISVTLSNIIQRNFPEEYAERRSEHETMTYAGVDLMPLFVMDVVLPSQKMALNIFEPRYRLMVRRIMEGNHRMGMVAIDSATGTVADCGCEVEISECEPLPDGRFYLEVEGTRRFRIVRSWDQDGYRVAEVEWLKDIPLPEGSQGRRELMELANGASELARAYIRHARDTVRTARRTRHLDLEGMPGPQDPEKFSFWLANLISLRPSDRLDTLRLRDTRERISSSISLLRDSEQGCRVQ

SEQ ID NO: 158089 - protein, 130 aa, Zea Mays
MEGNHRMGMVAIDSATGTVADCGCEVEISECEPLPDGRFYLEVEGTRRFRIVRSWDQDGYRVAEVEWLKDIPLPEGSQGRRELMELANGASELARAYIRHARDTVRTGEQDIWILRACLGHRTRKNLVSG

SEQ ID NO: 158090 - protein, 133 aa, Zea Mays
MEGNHRMGMVAIDSATGTVADCGCEVEISECEPLPDGRFYLELMELANGASELARAYIRHARDTVRTARRTRHLDLEGMPGPQDPEKFSFWLANLISLRPSDRLDTLRLRDTRERISSSISLLRDSEQGCRVQ

SEQ ID NO: 158091 - protein, 96 aa, Zea Mays
MGSRWLMELANGASELARAYIRHARDTVRTARRTRHLDLEGMPGPQDPEKFSFWLANLISLRPSDRLDTLRLRDTRERISSSISLLRDSEQGCRVQ

SEQ ID NO: 158092 - protein, 862 aa, Zea Mays
MSAPTPGPAATTPPSPAPGLLSSPDSFPAGRSKAQRWSDDGGGPAGRQPSYRDVLISSSIPPVQPPLDDVPADGWVTVVNRHARWRRSRPPKPPPRPIPADLRGKCFNCFSPSHRAAVCRRLVRCFLCRLSGHHASVCPRRRTISGLPRRSLVWRPVSHSSSSTMAPVCVEGGQDGDAVAGSGGGGGLSSGGGGHRRTRRGHRRRRASGGLGGGDRAEASGGTPQAALEVDRVLPGVASRPSRFFRRTQRITQAEDDLRRALLVSVVGREVSGYAAEVSDALISRYDLEADALDLRRVAPSTFVALLPNVELADRVFNGGQSLYAPPLLHIRRWSRHFMASGGSALPRLLDVELLGLPIHLWEIRTAEQLLDEHCIILDLHDDTKDGGDLSVFKLRVWCADPGGLPSIIDLHVEESSVLEGDVPSSPRTVIYHVSIMVSHSDRSSMVPPTPPSPSFPGGRDDGRDRDSGSRQKRRFSCRPQSSSVRASVLSCLGPRVHSSRDNGGGRDSGSKQTRRCGFQHQSSSVRASVLSRLGPRDNSNSDFGGPIDALAFPVSPVDGLAAPVPAISSREADDASFLRPVGPVDASAPPTFSVSELAAPVSSKALIALDASSPASSGPVLPSAGDNYSLQLAVVPGDRCLGGSASTHIPGDLLSETASPPVVNQITTHLDQEDLQNATPSDLHSSNLGLVPSRTLWCMPPKVYSRRCRVLQQHPQVSLVDSQLVQSSENVSVDVSISPSDSPISDQLRSSFRCRVTKSTVHILPAPQTGRPGAANSTVVPPRRSRRIAGIGVENLATSSDGQTRFRKKVMRVLHVIDENEGINPEALDRYSKLFDKPLSPSHIQALAALFGWSAPEVGEC

SEQ ID NO: 158093 - protein, 153 aa, Zea Mays
MWLVAHGRCWTADRLARRGLPHPQSCLLCDQEEETMNHLLVSCVFSREVWFNILKTVGLQHLSPSLDSSSFDDWWENVSMTLISHSDKKLRKGLNSLIILGAWAIWIHRNQCVFNGEQPRASKVINWVMAESHLWCRAGARGLSDILLPRHTI

SEQ ID NO: 158094 - protein, 220 aa, Zea Mays
MPMTPLECDMAPAASRQSWPLPRCGLLVLALALATTAAVGSAQLSSESYYDASCPAALLTIRTAVSTAVLLEPRMGASLLRLHFHDCFVQGCDASVLLDDTASFTGEKGAGPNAGSLRGFDVIDNIKMLLELLCPQTVSCADILAVAARDSVAQLGGPSWAVPLGRRDATTASASLANSDLPGPTSSLNGLLNAFSNKGLSSTDMVALSDRHGSRSSTAS

SEQ ID NO: 158095 - protein, 117 aa, Zea Mays
MQNTMALAEEPEPMSLVTLTSAGATIPPPVKATPTPTPEIHVDENWLFVQLKKGGGGRTRWILDTGVTNHMTGDCMAFSELDTSVCGMFDSAIAPWSPSRAAALSSLRQGQRALGVD

SEQ ID NO: 158096 - protein, 83 aa, Zea Mays
MLYPNNTALFGSVVFLRFRNNTMVFDDSVVLVYWNSKGVWFVQAKHSFKYHGFPKTVVYLEFSKLHSGPQFFSLFSTYTLFFQ

SEQ ID NO: 158097 - protein, 54 aa, Zea Mays
MGDRCSRARPGHDGGGRRGRQQPHDYGHVAGVHGQHIGGKRRGDEPHPRLGTRR

SEQ ID NO: 158098 - protein, 54 aa, Zea Mays
MTPNHKDINGNGIEPDYNRLPGTLRKRQISFVAIEFCNISMKPEVTFHDVELKN

SEQ ID NO: 158099 - protein, 88 aa, Zea Mays
MISMMKGGEFYSWFKLELASEVRSGVCMCCPFLFHFMRKDCYLFLELYLVVLVNKYFSMAVRLLIMFIRHQFMILVLRDILSYEFCIS

SEQ ID NO: 158100 - protein, 240 aa, Zea Mays
MPGAMEPAEADAAAAAVAGRRPTASERRRMYRDLALSLRCGLRDAAAGFSFLRLRGLRALLRALRSTSDADADADAGLFRDSQSIRDLQVIPVLFEHSLRKATGDAVLTVAQVLGMEPAAARLRNPATDSEVVLALRVLEGCCLLCPACAAAAHRYNAVKVVLNILMTRGILEQRACLDTLLALLVNCSGNLTDFKEQDGLNKIAVIVKDANRDDHVKMFRVSASLLWKRKRKMWRRFRV

SEQ ID NO: 158101 - protein, 251 aa, Zea Mays
MDGRTCLSRRYAINPEMEVIKDQMNSMDPKSVQEGQAKMKALFKKHGVSPLTPMKGLLIQGPIFMSFFFAISNMVEKVPSFKGGGTLWFTDLTTPDSLYILPMLTGLTFLATVELNLQEGMEGNPMAGKMKYFSRGVAVLTVPFTMNFATAVFCYWTSSNIFTLLYGLVIRRPAVRKWFDLPALENTRSLTAKPVFNMFGGSKAIPAAQSPVAIAGAQQSGLDQPDASALGYKVKNLEKKVKSRGKSRKHR

SEQ ID NO: 158102 - protein, 238 aa, Zea Mays
MAFAARRSIATRLSHHLTRRLHPCVPHSRTSDSLDEQASRPSPPLPLPLPPLHVQLKQRSREVQILGFLPFSLRLAGPTRRTFSSSAPAPNLEAAPAAEVDAAGVLADAAEAAASVPAPFPGEVAAAAADSFPPVAALQHIIDAIHTFTGLNWWVCIALTTFIIRIATVPLLVNQLKATTKLRAINPEMEVIKDQMNSMDPKSVQEGQAKMKALFKKYQTWLRKYLHSKEVEHCGLLT

SEQ ID NO: 158103 - protein, 200 aa, Zea Mays
MAFAARRSIATRLSHHLTRRLHPCVPHSRTSDSLDEQASRPSPPLPLPLPPLHVQLKQRSREVQILGFLPFSLRLAGPTRRTFSSSAPAPNLEAAPAAEVDAAGVLADAAEAAASVPAPFPGEVAAAAADSFPPVAALQHIIDAIHTFTGLNWWVCIALTTFIIRIATVPLLVNQLKATTKLRAINPEMEVIKDQMNTWC

SEQ ID NO: 158104 - protein, 225 aa, Zea Mays
MAFAARRSIATRLSHHLTRRLHPCVPHSRTSDSLDEQASRPSPPLPLPLPPLHVQLKQRSREVQILGFLPFSLRLAGPTRRTFSSSAPAPNLEAAPAAEVDAAGVLADAAEAAASVPAPFPGEVAAAAADSFPPVAALQHIIDAIHTFTGLNWWVCIALTTFIIRIATVPLLVNQLKATTKLRAINPEMEVIKDQMNSMDPKSVQEGQAKMKALFKNCTSLHYQL

SEQ ID NO: 158105 - protein, 221 aa, Zea Mays
MAFAARRSIATRLSHHLTRRLHPCVPHSRTSDSLDEQASRPSPPLPLPLPPLHVQLKQRSREVQILGFLPFSLRLAGPTRRTFSSSAPAPNLEAAPAAEVDAAGVLADAAEAAASVPAPFPGEVAAAAADSFPPVAALQHIIDAIHTFTGLNWWVCIALTTFIIRIATVPLLVNQLKATTKLRVKHGVSPLTPMKGLLIQGPIFMSFFFAVSFFLLTQVFL

SEQ ID NO: 158106 - protein, 157 aa, Zea Mays
MEVIKDQMNSMDPKSVQEGQAKMKALFKKHGVSPLTPMKGLLIQGPIFMSFFFAISNMVEKVPSFKGGGTLWFTDLTTPDSLYILPMLTGLTFLATVELNLQEGMEGNPMAGKMKYFSRGVAVLTVPFTMNFATFSVTGPHQTYSPCYMVLLSGDQL

SEQ ID NO: 158107 - protein, 173 aa, Zea Mays
MPLHARAPPLRHSHLLLTAATARLRPCAAPATKPRRRSLVLVRASSSDPPQQQLNLSVLRFTLGIPGLDESYLPRWIGLGFGALVVLNHLLSASPTPAQLRSEAVGLCLAAFSATLPFLGRFLEGADAASRVPLPEGSIQVFVMSENLSAVQKEDMAWASYVLLRNTNTTSVV

SEQ ID NO: 158108 - protein, 71 aa, Zea Mays
MSFPQNYPNSPPSVRFTSEMWHPNVYPDGWVCISILHPPSEDPNGYELASERWTPVHTVCDESSNLRSRAW

SEQ ID NO: 158109 - protein, 72 aa, Zea Mays
MSFPQNYPNSPPSVRFTSEMWHPNVYPDGWVCISILHPPSEDPNGYELASERWTPVHTVWLRILCLHIFSPL

SEQ ID NO: 158110 - protein, 69 aa, Zea Mays
MKYKAKQIKSLFFFQEGKGNDRKVRRVRGVQIRMRAEKRSRKKHKTNQDQPLQNVIDIDLTHLFNIAQT

SEQ ID NO: 158111 - protein, 62 aa, Zea Mays
MTCRGTPPPTRVNRPHRSPVHGHDSRPWAYNAPIVPGYRRAMAALVPTIIRYGRLRLRSSEG

SEQ ID NO: 158112 - protein, 75 aa, Zea Mays
MGITCASRRRGVGSQTCCTLGKTAGGKLSMRGEEGSSEEGAEQGRGAGHGAPARHHPWKKGRSMEEEELCWLLLP

SEQ ID NO: 158113 - protein, 897 aa, Zea Mays
MDDTLATIRMKLKKRKKGKDSNDFDAVAECGPEVPALVQQEGERAVVDIGDGVADEKSNLNVVKLEGSDVSGNCAQGLDDLGLKDSLAVLFTRPGRKSRQVSEEAEGMEVSCPHDEDGLNKGSGLAPDTASKGIKRRRRRTKEEMKNASVQDQKASLPRKAKTNGSKSTKLYKVGAGPGQALGGLSSVSPQLEKSGKENAVDDGSFYQSLGEVLLQDVEASKVLKDGSITSFNGVTDHFEISAWASNHPGLESRSGNLDEKTPRTAEHTTNLGVSDAHTRSQTLGKESSDDVDCSQGKSPTSTIKRKIGLKPKQVPGKSVRRKEEVLSVDADNKPTDTTEIIEASTTPVIEENLDQLPVMAPKDSCSSHDIVGNSPMCLGADMAAPVKYVDIVDVATPLDYEDKENTSKVKRVTRGSKKRKHGDMAYEGDVDWETLMQEQGLFSNPSAGFPDQSIKTKNKIKTSEVYEGGGDTGVAAVRAGLKAKTITPIEKIKFKEVLKRKGGLQEYLECRNMILSRWSKDVKHLLDLADCGVSDVPLKDELPHQALTRAVFLFLDQYGYINAGIASDKVAKGHNDTPYEVIEVPKLNESHQMESVNIQNSVVSVSQKNEDFEHGTSTECCRTAYASVEAEISVPRELPKIPSFQSFVMRDHHLDESDARKRTLKDDFGRLECISENDSKNGEVKDLPENTKYADGDSLKMSHDNFTQQSHSNETACLANAQDHSTDTVVVDGRFTRAWVDTDTICIDGVKDPLAIERWQAQAMEADKEFYSRIRIPDEDDSSSQKHTCRSSASQGADSKPASERQSRGVEHIKQGLVNFIASLLMPLYRGKKIDREGYKTIMRKSVNKIIDTCSEGEKSMTTLEFLDDKRKIKIESFVGKMVDKHLHVVSKSAKP

SEQ ID NO: 158114 - protein, 1349 aa, Zea Mays
MDDTLATIRMKLKKRKKGKDSNDFDAVAECGPEVPALVQQEGERAVVDIGDGVADEKSNLNVVKLEGSDVSGNCAQGLDDLGLKDSLAVLFTRPGRKSRQVSEEAEGMEVSCPHDEDGLNKGSGLAPDTASKGIKRRRRRTKEEMKNASVQDQKASLPRKAKTNGSKSTKLYKVGAGPGQALGGLSSVSPQLEKSGKENAVDDGSFYQSLGEVLLQDVEASKVLKDGSITSFNGVTDHFEISAWASNHPGLESRSGNLDEKTPRTAEHTTNLGVSDAHTRSQTLGKESSDDVDCSQGKSPTSTIKRKIGLKPKQVPGKSVRRKEEVLSVDADNKPTDTTEIIEASTTPVIEENLDQLPVMAPKDSCSSHDIVGNSPMCLGADMAAPVKYVDIVDVATPLDYEDKENTSKVKRVTRGSKKRKHGDMAYEGDVDWETLMQEQGLFSNPSAGFPDQSIKTKNKIKTSEVYEGGGDTGVAAVRAGLKAKTITPIEKIKFKEVLKRKGGLQEYLECRNMILSRWSKDVKHLLDLADCGVSDVPLKDELPHQALTRAVFLFLDQYGYINAGIASDKVAKGHNDTPYEVIEVPKLNESHQMESVNIQNSVVSVSQKNEDFEHGTSTECCRTVSVKNTECALVEASNEKNRSTVHCGVLELLPHLMSEEHPMEKNILDVSTEVRNASLPSSNLDIQFTSYMNSSVGKVEAPHQQEALEIENSGNNCQSDRAEFAVHGKRIIIVGAGPAGLTAARHLQRQGFLVTVLEARERIGGRVYTDRTSLSVPVDLGASIITGVEADIATERRADPSSLICYQLGLELTTLNSACPLYDVVTGDKVPDSLDEDLEAEYNGLLDEMALLFAHNGDSAIGLSLEDGLEYALRKHRATQPMDSVDQDGHLRFMTNSRAVDISVSASIGKEIDHCGKNDKIDVLSPLERRVMNWHFAHLEYGCAATLKSVSLPYWNQDDVYGGFGGAHCMIKGGYDTVLRSLAKGLDIRLNHVVTEVLYGSEELGDSCKDGKYVKVSTSTGSEFTGDAVLITIPLGCLKADTINFSPSLPDWKVSSINRLGFGVLNKIVLEFPEVFWDDNVDYFGATAEETDLRGQCFMFWNLRKTAGAPVLIALLVGKAAIDGQSISSGDHVNNAMVVLRKLFKNASVPDPVASVVTNWGLDPFSRGAYSYVAVGASGRDYDILGRPVDNCLFFAGEATCKEHPDTVGGAILSGLREAVRIVDLLNTGSDYIAEVETLQTYQMQTDSERNEVKDMSNRLEACELSTALSKNSSDAMYPIVSKESLLQEMFFSAKTTSGRLHLAKELLKLPTDVLKSFAGCKEGLRFTWEKCYSTTAALCAFACACFH

SEQ ID NO: 158115 - protein, 832 aa, Zea Mays
MDDTLATIRMKLKKRKKGKDSNDFDAVAECGPEVPALVQQEGERAVVDIGDGVADEKSNLNVVKLEGSDVSGNCAQGLDDLGLKDSLAVLFTRPGRKSRQVSEEAEGMEVSCPHDEDGLNKGSGLAPDTASKGIKRRRRRTKEEMKNASVQDQKASLPRKAKTNGSKSTKLYKVGAGPGQALGGLSSVSPQLEKSGKENAVDDGSFYQSLGEVLLQDVEASKVLKDGSITSFNGVTDHFEISAWASNHPGLESRSGNLDEKTPRTAEHTTNLGVSDAHTRSQTLGKESSDDVDCSQGKSPTSTIKRKIGLKPKQVPGKSVRRKEEVLSVDADNKPTDTTEIIEASTTPVIEENLDQLPVMAPKDSCSSHDIVGNSPMCLGADMAAPVKYVDIVDVATPLDYEDKENTSKVKRVTRGSKKRKHGDMAYEGDVDWETLMQEQGLFSNPSAGFPDQSIKTKNKIKTSEVYEGGGDTGVAAVRAGLKAKTITPIEKIKFKEVLKRKGGLQEYLECRNMILSRWSKDVKHLLDLADCGVSDVPLKDELPHQALTRAVFLFLDQYAYASVEAEISVPRELPKIPSFQSFVMRDHHLDESDARKRTLKDDFGRLECISENDSKNGEVKDLPENTKYADGDSLKMSHDNFTQQSHSNETACLANAQDHSTDTVVVDGRFTRAWVDTDTICIDGVKDPLAIERWQAQAMEADKEFYSRIRIPDEDDSSSQKHTCRSSASQGADSKPASERQSRGVEHIKQGLVNFIASLLMPLYRGKKIDREGYKTIMRKSVNKIIDTCSEGEKSMTTLEFLDDKRKIKIESFVGKMVDKHLHVVSKSAKP

SEQ ID NO: 158116 - protein, 333 aa, Zea Mays
MPNVLILPRSADYSEEVWMEIREKAIAILQSFLYDGVVPNNVISDEDEEISEMGCDDDQLDKQGKEHPLQICDGEQQTEESQLTAEYDKRRAISQPEEPQASAQSQSIGSRSEGRRSRSGKKGKKRPARRRSQQKMDELSTVEGGSNYSSRRDDDNQVLSSSSRFASPEDSKNKQKSSVESPMEIISENKLPVGLGRRPPEKLKEGFVIALKTRDNSGFYVSRERVTGGGWYLDVIPNATKRDPAAQFLVTFRNKDTMGLRSFVAGGKLLQANNKMEFVFASHSFDVCESWMLEGCLSEYCKLVNRKNAMAVLGVYIEVLGAPSEDGVVRWLD

SEQ ID NO: 158117 - protein, 358 aa, Zea Mays
MSWGCRRRAPPPLRRRRLGARGHRSPRSTARSGAWRAEVLLSFLAGGGMDWAAAFGSPSWSAVATDPGPTMLSFAGPSSSATDAEVRLQDFTVGRMEAEATVASITHGWGQAIARHADAQVQQCWGITSGRGYRGVRHGDGAGARAGIAMTGAGAGGGTRITGVEPRWWWTPSLVSYRVVEIEIVGVHNSQWRTVLLSLHPPALPPCYINARRFCLSLSLRRLPPPHPSPLLGAAPRRAASSASPPRSPTTRPAPTSSRCSQSPPATPPLTPRIPDAESCPSPAAVSSVFSKFRDPAPSPVTPDDAAAAPDEPRDLGFDDDDSFDADSILCGVHQSAAEGIDGIMGSEYHHQSSAEAA

SEQ ID NO: 158118 - protein, 157 aa, Zea Mays
MKEVVLHVYDVTNSDSEKTNNTILQINRIFKDRIGLGGIFHSAVQVYGEDEWSFGFCESGSGVFSCPIGKNPMYTYRERIVLGETECGIAAVNRILRELSREWPGHSYDLLSRNCNHFCDVLCERLGVPKLPGWVNRFANAGDTAVVVAENTAVKAG

SEQ ID NO: 158119 - protein, 393 aa, Zea Mays
MAHDEPGFAYADYFAAAAGAVATFVPEVDVGGGGEEGLHLYGLQPHHQQPGVEMYGARGHMPPAAMMAAHGGKAALGLDVASPVVGGHFGDDHLRQALQAPLSLSLHDDGTADAAPLALHHHHHHLGGVPQAQQHQPPGAWPQPQQQGAWHLRGSRFLRPTQQLLQEFCTLPVDTVTSTPAKPASVEDGVGSSSSAAAPSQQIIQAMDAAELQRLKAKLYAMLQEVERRYRRYREQMRAVAGSFEAVAGERAAAAYTRLAQRTISRHFRSVRDGVAAQMQAVRRALGEKDADDGGVVPAAAGMMANKGETTPRLRVIDQCLRQHRAYQTGVVLESQPWRPQRGLPERAVSILRAWMFEHFLHPYPSDVDKHILARQTGLSRSQVRIRLLPSSI

SEQ ID NO: 158120 - protein, 290 aa, Zea Mays
MAHASAGARCGCPVDRVPRRSRARARLHALLYRARRRERVLSSTAFSISLARPPRACAHWQVSNWFINARVRLWKPMVEEMYSEEMKDPKEGACSNANSSVNTGAGYASEELGQPLGHGGACGGVDEQKPTRAQLVHDAGSLASAVSIGSSRDQQQISSINFRMMDHLDFDAYSGDPAAAGGPAAGFGGAGASGGVSLTLGLQQHADGDPHGGVNIAFAAAPSAAHEFLFMAGGGEHRMVAAGAVHPSSSHGHGQFAASMQGDSAGVASSHYHRGLGAATGFQLLHDLAG

SEQ ID NO: 158121 - protein, 111 aa, Zea Mays
MARRGIMHACKIWLRRYSRRLQRRSCTRAFGGARGSWSGTPRRGARRRAPGRGGAWPPGRRQRLRRERHPRRGAAARPRPWRARSTRTPPRTPPPPLGTRRLRRTPRTRLP

SEQ ID NO: 158122 - protein, 226 aa, Zea Mays
MAERDYALEMWRLLDPDSRLINSVQLHDRMVCVKSGLKKSLLNVFHDGSCHPGMALVIDDRLKVWDEKDQLRVHVVPAFTPYYAPQAEANCSIPVLCVARNVACNVRGGFFNVHLFAFCCQPNTSATRLPHQLLISTNSHCHGLVHLDTSCLKSSRPNTIVLSGLSGSGKTTIYYQKDKVKPVHVIDVPGHARLKPKLDEVLPKVAAVVFVVDAQDFLSSMQAAAE

SEQ ID NO: 158123 - protein, 101 aa, Zea Mays
MCRRRPILLRDAAASAALLPAPLHGRVQGLCASVSFWYQSTGLSFLHSKRRRCSGEEAEECLRPRRKKAADGEEDQLGAWRGVAVVHEEEEPALAGGRRSM

SEQ ID NO: 158124 - protein, 104 aa, Zea Mays
MNRDYVPVLVFGTSLQVFHFYIQRVVYSVLFQKTLHGTGTGTSGDGVVVRRQRSAFGLDGRRPPMEKKTSWERGAASRSCTRRRSLHLPEGEEACSTVRCCSRA

SEQ ID NO: 158125 - protein, 92 aa, Zea Mays
MRAHPLILFVPAPPPHPLPRRADTHRALSLPRRRPSPTRTARRRLPRALSHAGPRCSRWRRHTFFLHVDRSPPRRLPPRTAPKNALGTMCQC

SEQ ID NO: 158126 - protein, 121 aa, Zea Mays
MCRRRPILLRDAAASAALLPAPLHGRVQGLCASVSFWYQSTGLSFLHSKKTLHGTGTGTSGDGVVVRRQRSAFGLDGRRPPMEKKTSWERGAASRSCTRRRSLHLPEGEEACSTVRCCSRA

SEQ ID NO: 158127 - protein, 54 aa, Zea Mays
MSQSKVVCLTDGSEELPKEAHLQFYIKCNHTTMGPEVSSFIYRFHVTEDHSKKH

SEQ ID NO: 158128 - protein, 191 aa, Zea Mays
MPFHVLAFSIAATSMASPPSIDGSPRKILPCSRARKSRDSPFHGVAPFHGSRAPSAPFHPWPRIPARRDSSHTLPLRPSIHGRGSLRTAILPIRSLRAVCGCQSSPSTPRFFPSSRDCLPPISFGVHNPSLRTPHPGTSSVCRCRRRRRSPAPASRCAATPHPCVAPVFHEAKCLHNSVLALTPPTGLSAS

SEQ ID NO: 158129 - protein, 97 aa, Zea Mays
MKPFICSSHFVVLVLSIVIAAEMASVEADHDCYHLSGKFKGWCLYPDHCADVCFTESDNNLGGKCRGFPSRCYCKTYCAQGPKAAPRTTVAASPALV

SEQ ID NO: 158130 - protein, 96 aa, Zea Mays
MQCYCRSGIECGKRQKDCIDNERSGNGISSSYQHQAAGLRTIKRPRARLCWKRYVADEEFIRILADAPPSRGTRVPEVGAPPPPPPPPLSLRPRTN

SEQ ID NO: 158131 - protein, 134 aa, Zea Mays
MAVVTRDAACLPLVLLLLVFSAAPSPADGCDRCVRRSKATYYQASSLALNGGVVQLAVHGAGPRAGVEHGAGAAGAAAVPAGGDRWLRRQVGVGGVGGAAAPVGGRPRLRRRGAGLRRRAGRVLPLRHARVAVT

SEQ ID NO: 158132 - protein, 104 aa, Zea Mays
MKDNYISDTFIVRLGEEDTTPLPEKDEVVVFQIFLKTGLQFPPHNMVVKVLKFFDICLQQLISNALVWLGIFIWAMRSQGVEPNVDYFCHIHELHYQTNASGKE

SEQ ID NO: 158133 - protein, 138 aa, Zea Mays
MDAVVVRPRWRQPGRFGEHHLKLLEQAIHEWLAGCGRYGTGGRCACLAPARAQASPPHGPGSPRERHAHVLEIPQYRPQSAEELYAQDEIKLAEVDAVTVDAESFGVDGDLHVPCYALARHAFPVSHHHPKRGAGFSG

SEQ ID NO: 158134 - protein, 207 aa, Zea Mays
MAATPTAAVLLARPLIALSSAFTSPHRARVPSDPSSISVPPLRSRWCQWRGPLRSLPPEGAPAELMEEDSKFVPLNADDPMYGPPALLLIGFEKGETVTAFLKELEGEFLKVIHCTEEMTKQTLWDAMHTEQPDLEAVKIAGPLPRICIFSGLTGEEMMMFINAFPETGLEAAAFAALVPNSAEKVLGEVIEEIMGDHEMLTGKDSK

SEQ ID NO: 158135 - protein, 286 aa, Zea Mays
MLPYATAAEAEAALGRPMTPAEALWFRYTAGVSDYHLYCCNILFLFVVFTVAPLPIALLELRAPAAVSPYKLQPRVRLSRAEFVRCYKDVLRIFFLVIGPLQLVSYPAVKLAAQLLVYFLVEDYLNYWIHRFLHGEWGYQNIHRVHHEFTAPIGFAAPYAHWAEVLILGIPSFVGPAIVPGHMITFWLWIILRQVEAIETHSGFDFPFTPTKYIPFYGGAEYHDYHHYVGGQSQSNFASVFTYCDYLYGTDKGYRFHKTYLAKLKDLGHNDGQKGDGSGPSYVKLD

SEQ ID NO: 158136 - protein, 92 aa, Zea Mays
MTLQHRVFSFDFPFTPTKYIPFYGGAEYHDYHHYVGGQSQSNFASVFTYCDYLYGTDKGYRFHKTYLAKLKDLGHNDGQKGDGSGPSYVKLD

SEQ ID NO: 158137 - protein, 341 aa, Zea Mays
MRACSARGAAAAVQSPAAAAASVAGILPQRHVQAAGLLRGLPHPVGRAAPDAVAGRQVPDALDGQQLGQRVQVCAGVPERLLRRVRQGAAGVHRRRQHRLLPRSTRGTTTRSTWSCWGRCRGSRTRCRPTCTCAAAATAPSSAGRCGSTSGSTPPPTSTTTPSSGTPTRSCSWWTTCPSGGTRGRRRPRSLTGRCGRTAPSGTPPTGPPTAAATAPTTGTSRSCRGSPASGSAGAPRTRPRTASQCRRLRRRRGRRRSARSRRPPCGGRSGTPWCITTASTQPGTARSTPSAETLRCAIPTDYSGELRVSELYGTASTSHSQHKRIFEYYNLEDERRSNLI

SEQ ID NO: 158138 - protein, 1087 aa, Zea Mays
MRRDAVPPPTAPSASSSSSLFSGGGGERLFESGPSPLVFLPLLLIQGGGMDLSRVGEKLLSSVRSARSLGLPPIPTAPPPRPEVPERAAAAAAAARAIAGLPPHERINLPSNSEDLVSIYGSNPQGQPVEELEEVFYEEEFDPIKYILQSIPEEGGGDATYFDKQSTLRLEQLDKIAERLAHHVMGHHEEMVKGMQLVMELEHDLKVANVICMNGRRHITSSKNEVSRDLVVNVKSKKKQALLDVLPILTELRHALDMQMELETFVEKENYFQAFQLLPEYLQILENYSGLSAVQEMGRGIEAWLVRTIQKLDTHLLGVCHIFDAENYLTVVDAYALMGDVSGMAEKMQSFFLQEVLSRTHYVLKEMLEEEVGNNTQKNRFTYSDLCVQIPEPKLRLCLLRTLEFLFSLMCSYYTIMSFSSGDKNIDSKGQDEAYKDGTSQNSSETLVNLGRGHSSAAVTQDGSAAEKIDRASSSEVSNPDTSTSETGSPFYQLRTDATKLVAQTFQRGRRNLWQLATSRLSVLLSSSAVCSTSTYQFLKNYEDLAIFILAGEAFCGFEASEFRQKLKTVCLNYMVSFHRQNVYALKMVLEKESWTIMSAEASQIISLAGLTGDGAALCSPTSRSPKLPINCYHGTTTANSGKEKLGFASWLVIENPFSFKLENGSAESPKSNMLVDSSASNNHGNGNNSSLDEENEDLLADFIDEDSQLPSRTPKAKMVKGNSLHWKDGDISSQTGSSLSLLRMMDKYARLMQKLEIVNVELFKGISQLFGIFYHYIYETFGNQDKSQSSKPLPDHQSSRLKAALSKITQDSDQWTKPNTVSYSPSSPLSKNSTFGQMDVMPTAPPSSMFTSYGLKERCAAAETLSLVARILNRSRAHLHSVLSKNNSSVVEEFFRTLVDSVPDLTEHIHRTSARMLLHIDGYPDKIANAKWEVKELGIEHNGYVDLLLGEFKHYKTRLDHGGISRELQHLLLEYGVESISEVLVEGLSRVKRCTDEGRALMSLDLQVLINGLQHIVASNVRPKLQTVDTFIKAYYLPETEYVHWARSHPEFSTSQVVGLVNLVATMKGWRRKTRLETVEKIEAGP

SEQ ID NO: 158139 - protein, 860 aa, Zea Mays
MRRDAVPPPTAPSASSSSSLFSGGGGERLFESGPSPLVFLPLLLIQGGGMDLSRVGEKLLSSVRSARSLGLPPIPTAPPPRPEVPERAAAAAAAARAIAGLPPHERINLPSNSEDLVSIYGSNPQGQPVEELEEVFYEEEFDPIKYILQSIPEEGGGDATYFDKQSTLRLEQLDKIAERLAHHVMGHHEEMVKGMQLVMELEHDLKVANVICMNGRRHITSSKNEVSRDLVVNVKSKKKQALLDVLPILTELRHALDMQMELETFVEKENYFQAFQLLPEYLQILENYSGLSAVQEMGRGIEAWLVRTIQKLDTHLLGVCHIFDAENYLTVVDAYALMGDVSGMAEKMQSFFLQEVLSRTHYVLKEMLEEEVGNNTQKNRFTYSDLCVQIPEPKLRLCLLRTLEFLFSLMCSYYTIMSFSSGDKNIDSKGQDEAYKDGTSQNSSETLVNLGRGHSSAAVTQDGSAAEKIDRASSSEVSNPDTSTSETGSPFYQLRTDATKLVAQTFQRGRRNLWQLATSRLSVLLSSSAVCSTSTYQFLKNYEDLAIFILAGEAFCGFEASEFRQKLKTVCLNYMVSFHRQNVYALKMVLEKESWTIMSAEASQIISLAGLTGDGAALCSPTSRSPKLPINCYHGTTTANSGKEKLGFASWLVIENPFSFKLENGSAESPKSNMLVDSSASNNHGNGNNSSLDEENEDLLADFIDEDSQLPSRTPKAKMVKGNSLHWKDGDISSQTGSSLSLLRMMDKYARLMQKLEIVNVELFKGISQLFGIFYHYIYETFGNQDKSQSSKPLPDHQSSRLKAALSKITQDSDQWTKPNTVSYSPSSPLSKNSTFGQMDVMPTAPPSSMFTSYGLKVSR

SEQ ID NO: 158140 - protein, 676 aa, Zea Mays
MKGMQLVMELEHDLKVANVICMNGRRHITSSKNEVSRDLVVNVKSKKKQALLDVLPILTELRHALDMQMELETFVEKENYFQAFQLLPEYLQILENYSGLSAVQEMGRGIEAWLVRTIQKLDTHLLGVCHIFDAENYLTVVDAYALMGDVSGMAEKMQSFFLQEVLSRTHYVLKEMLEEEVGNNTQKNRFTYSDLCVQIPEPKLRLCLLRTLEFLFSLMCSYYTIMSFSSGDKNIDSKGQDEAYKDGTSQNSSETLVNLGRGHSSAAVTQDGSAAEKIDRASSSEVSNPDTSTSETGSPFYQLRTDATKLVAQTFQRGRRNLWQLATSRLSVLLSSSAVCSTSTYQFLKNYEDLAIFILAGEAFCGFEASEFRQKLKTVCLNYMVSFHRQNVYALKMVLEKESWTIMSAEASQIISLAGLTGDGAALCSPTSRSPKLPINCYHGTTTANSGKEKLGFASWLVIENPFSFKLENGSAESPKSNMLVDSSASNNHGNGNNSSLDEENEDLLADFIDEDSQLPSRTPKAKMVKGNSLHWKDGDISSQTGSSLSLLRMMDKYARLMQKLEIVNVELFKGISQLFGIFYHYIYETFGNQDKSQSSKPLPDHQSSRLKAALSKITQDSDQWTKPNTVSYSPSSPLSKNSTFGQMDVMPTAPPSSMFTSYGLKDFCIVAALLP

SEQ ID NO: 158141 - protein, 610 aa, Zea Mays
MQMELETFVEKENYFQAFQLLPEYLQILENYSGLSAVQEMGRGIEAWLVRTIQKLDTHLLGVCHIFDAENYLTVVDAYALMGDVSGMAEKMQSFFLQEVLSRTHYVLKEMLEEEVGNNTQKNRFTYSDLCVQIPEPKLRLCLLRTLEFLFSLMCSYYTIMSFSSGDKNIDSKGQDEAYKDGTSQNSSETLVNLGRGHSSAAVTQDGSAAEKIDRASSSEVSNPDTSTSETGSPFYQLRTDATKLVAQTFQRGRRNLWQLATSRLSVLLSSSAVCSTSTYQFLKNYEDLAIFILAGEAFCGFEASEFRQKLKTVCLNYMVSFHRQNVYALKMVLEKESWTIMSAEASQIISLAGLTGDGAALCSPTSRSPKLPINCYHGTTTANSGKEKLGFASWLVIENPFSFKLENGSAESPKSNMLVDSSASNNHGNGNNSSLDEENEDLLADFIDEDSQLPSRTPKAKMVKGNSLHWKDGDISSQTGSSLSLLRMMDKYARLMQKLEIVNVELFKGISQLFGIFYHYIYETFGNQDKSQSSKPLPDHQSSRLKAALSKITQDSDQWTKPNTVSYSPSSPLSKNSTFGQMDVMPTAPPSSMFTSYGLKDFCIVAALLP

SEQ ID NO: 158142 - protein, 82 aa, Zea Mays
MHFCSDKSTTTSGFNLKLRKHIHLKRHEDVHMLRYDRIILFHCGCGNNAHFIILDLHAQGNILLIDSEHIVMTLRSHRLLPN

SEQ ID NO: 158143 - protein, 416 aa, Zea Mays
MPATVFASPSIAASPSPSLSPWSPRPPPRRVHVRVRVRPPPPRSGSSGGDEPSTATPWASPDWLTSLSRAVGRSGGDDSGIPVASAKLDDVRDLLGGALFLPLFKWFREEGPVYRLAAGPQDFVIVSDPAVARHVLRGYGSRYAKGLVAEVSEFLFGSGFAIAEGDLWTVRRRAVVPSLHKRFLSIIVDKVFCKCAERLIDKLEPYALSGEPVNMEARFSQLTLDVIGLSLFNYNFDSLTTDSPVIDAVYTALKEAELRSTDLLPYWKVGFLCKIIPRQIKAENAVMIIRNTVEELIMKCKEIVEAENEQIEGEEYVNEGDPSILRFLLASRDEVSSVQLRDDLLSMLVAGHETTGSVLTWTIYLLSKDPTALRRAQDEVDRVLQGRLPKYEDVKELKYLMRCINESMRLCCYGVQ

SEQ ID NO: 158144 - protein, 202 aa, Zea Mays
MPATVFASPSIAASPSPSLSPWSPRPPPRRVHVRVRVRPPPPRSGSSGGDEPSTATPWASPDWLTSLSRAVGRSGGDDSGIPVASAKLDDVRDLLGGALFLPLFKWFREEGPVYRLAAGPQDFVIVSDPAVARHVLRGYGSRYAKGLVAEVSEFLFGSGFAIAEGDLWTIVLSLMLFILHSKKQSFVLQIFCHTGRLVSCAR

SEQ ID NO: 158145 - protein, 393 aa, Zea Mays
MPATVFASPSIAASPSPSLSPWSPRPPPRRVHVRVRVRPPPPRSGSSGGDEPSTATPWASPDWLTSLSRAVGRSGGDDSGIPVASAKLDDVRDLLGGALFLPLFKWFREEGPVYRLAAGPQDFVIVSDPAVARHVLRGYGSRYAKGLVAEVSEFLFGSGFAIAEGDLWTVRRRAVVPSLHKRFLSIIVDKVFCKCAERLIDKLEPYALSGEPVNMEARFSQLTLDVIGLSLFNYNFDSLTTDSPVIDAVYTALKEAELRSTDLLPYWKVGFLCKIIPRQIKAENAVMIIRNTVEELIMKCKEIVEAENEQIEGEEYVNEGDPSILRFLLASRDEVSSVQLRDDLLSMLVAGHETTGSVLTWTIYLLSKDPTALRRAQDEVDRVLQGAVTACNS

SEQ ID NO: 158146 - protein, 317 aa, Zea Mays
MDDSPVIDAVYTALKEAELRSTDLLPYWKVGFLCKIIPRQIKAENAVMIIRNTVEELIMKCKEIVEAENEQIEGEEYVNEGDPSILRFLLASRDEVSSVQLRDDLLSMLVAGHETTGSVLTWTIYLLSKDPTALRRAQDEVDRVLQGRLPKYEDVKELKYLMRCINESMRLYPHPPVLLRRAIVDDVLPGNYKVKAGQDIMISVYNIHRSPEVWDRADEFIPERFDLEGPVPNESNTDFRFIPFSGGPRKCVGDQFALLEAIVALAVVLQKMDMQLVPDQKINMTTGATIHTTSGLYMNVSLRKVQQEAELALSESK

SEQ ID NO: 158147 - protein, 383 aa, Zea Mays
MPATVFASPSIAASPSPSLSPWSPRPPPRRVHVRVRVRPPPPRSGSSGGDEPSTATPWASPDWLTSLSRAVGRSGGDDSGIPVASAKLDDVRDLLGGALFLPLFKWFREEGPVYRLAAGPQDFVIVSDPAVARHVLRGYGSRYAKGLVAEVSEFLFGSGFAIAEGDLWTVRRRAVVPSLHKRFLSIIVDKVFCKCAERLIDKLEPYALSGEPVNMEARFSQLTLDVIGLSLFNYNFDSLTTDSPVIDAVYTALKEAELRSTDLLPYWKVGFLCKIIPRQIKAENAVMIIRNTVEELIMKCKEIVEAENEQIEGEEYVNEGDPSILRFLLASRDEVSSVQLRDDLLSMLVAGHETTGSVLTWTIYLLSKCYTTEGSDCTEESSR

SEQ ID NO: 158148 - protein, 410 aa, Zea Mays
MPATVFASPSIAASPSPSLSPWSPRPPPRRVHVRVRVRPPPPRSGSSGGDEPSTATPWASPDWLTSLSRAVGRSGGDDSGIPVASAKLDDVRDLLGGALFLPLFKWFREEGPVYRLAAGPQDFVIVSDPAVARHVLRGYGSRYAKGLVAEVSEFLFGSGFAIAEGDLWTVRRRAVVPSLHKRFLSIIVDKVFCKCAERLIDKLEPYALSGEPVNMEARFSQLTLDVIGLSLFNYNFDSLTTDSPVIDAVYTALKEAELRSTDLLPYWKVGFLCKIIPRQIKAENAVMIIRNTVEELIMKCKEIVEAENEQIEGEEYVNEGDPSILRFLLASRDEVSSVQLRDDLLSMLVAGHETTGSVLTWTIYLLSKDPTALRRAQDEVDRVLQGRLPKYEDVKELKYLMRCAVTACNS

SEQ ID NO: 158149 - protein, 534 aa, Zea Mays
MPATVFASPSIAASPSPSLSPWSPRPPPRRVHVRVRVRPPPPRSGSSGGDEPSTATPWASPDWLTSLSRAVGRSGGDDSGIPVASAKLDDVRDLLGGALFLPLFKWFREEGPVYRLAAGPQDFVIVSDPAVARHVLRGYGSRYAKGLVAEVSEFLFGSGFAIAEGDLWTVRRRAVVPSLHKRFLSIIVDKVFCKCAERLIDKLEPYALSGEPVNMEARFSQLTLDVIGLSLFNYNFDSLTTDSPVIDAVYTALKEAELRSTDLLPYWKVGFLCKIIPRQIKAENAVMIIRNTVEELIMKCKEIVEAENEQIEGEEYVNEGDPSILRFLLASRDEVSSVQLRDDLLSMLVAGHETTGSVLTWTIYLLSKDPTALRRAQDEVDRVLQGRLPKYEDVLLRRAIVDDVLPGNYKVKAGQDIMISVYNIHRSPEVWDRADEFIPERFDLEGPVPNESNTDFRFIPFSGGPRKCVGDQFALLEAIVALAVVLQKMDMQLVPDQKINMTTGATIHTTSGLYMNVSLRKVQQEAELALSESK

SEQ ID NO: 158150 - protein, 294 aa, Zea Mays
MPATVFASPSIAASPSPSLSPWSPRPPPRRVHVRVRVRPPPPRSGSSGGDEPSTATPWASPDWLTSLSRAVGRSGGDDSGIPVASAKLDDVRDLLGGALFLPLFKWFREEGPVYRLAAGPQDFVIVSDPAVARHVLRGYGSRYAKGLVAEVSEFLFGSGFAIAEGDLWTVGFLCKIIPRQIKAENAVMIIRNTVEELIMKCKEIVEAENEQIEGEEYVNEGDPSILRFLLASRDEVSSVQLRDDLLSMLVAGHETTGSVLTWTIYLLSKDPTALRRAQDEVDRVLQGAVTACNS

SEQ ID NO: 158151 - protein, 543 aa, Zea Mays
MMLSQKSLFRGRVFVAVPEEPRDGKSILSWVIDRVSDSAEIIIVHIVTSPDFESRQQILDCYLDQCSRKKVRAEKRVFLFTDIDEGLIHLINLYGVTELVIGAAADRHYRRKMKAPQSKTALSVMQKAHSHCNMWFICKGKLMFFREANYCLLTKSRSARPTCGVGNRKMDLRSLLQPNLEAKRLEYMYTKDIEIRKEIEAEISQQREETETLKKATLMLQNELDWYRYQWNKNANALQQASKQKRLLEHRISELDSVASHLGESMRASDSLVLSLKLEYSKVKRERDDAVKEARDMRMEKELTEPRAYGAMSSEFSLAELEQATQAFSSSLNIGEGGFGSVYKGLLRSTTVAIKILNTESLRAQSQFKQEVAILSRVRHPNLVTLIGASPEASALVYEFLPNGSLEDRLNCVNSTLPLSWQVRIQIIAEVCSALIFLHKHKPHPVVHGDLKPGNILLDANLVSKLSDFGISRLLLESSATGSEAHFTTQPMGTPAYMDPEFFGTGELTPQSDTYSFGITILRLLTGRAPLRLARVVQQAPLR

SEQ ID NO: 158152 - protein, 112 aa, Zea Mays
MDLDAAAEAEEEERRLEDFNEAEDARFFIGLVVGPVVMRDPHMAADGFTYEADALRYWLDSGHATSPVTNRSLSNRDTIPNHALRSAIQEYLRQNELQEPFSQWQEDFGVVN

SEQ ID NO: 158153 - protein, 369 aa, Zea Mays
MEYGAVLAAAPLVARPNWLLLSPPPLAPSIQIQNRLYSISSFPLKAGPVRACRALASNYTQTSETVDLDWENLGFGIVQTDYMYIAKCGTDGNFSEGEMVPFGPIALSPSSGVLNYGQGLFEGLKAYKKTDGSILLFRPEENAERMRTGAERMCMPAPSVEQFIDAVKQTVLANKRWIPPTGKGSLYIRPLLMGSGAVLGLAPAPEYTFIIFVSPVGNYFKEGLAPINLIVEDKFHRATPGGTGGVKTIGNYASVLMAQKIAKEKGYSDVLYLDAVHKKYLEEVSSCNVFVVKDNVISTPAIKGTILPGITRKSIIDVALSKGFQVEERLVSVDELLDADEVFCTGTAVVVSPVGSITYQGKRLNIIFA

SEQ ID NO: 158154 - protein, 585 aa, Zea Mays
MEDELEKLMLLKKFPNDEVQRRKADLGIDVSLDTISEHTNKSTDNSYHQAGISTPSTPSMDYGVLNYTEEYNLESVLVNFLGEIYSCHNECPHSDCKNKNELCPSLKSLIHKKVNELNNLPHNIGRGQSQEGSDAKPSDQNNLYNTMAAQSKQFKDALEILGSNSELFVKLLQKPNQHIADSIQQHENSKVSAGLEPDKIHGQTNFVGGRGSSKQHPLATKEQAKERKYMFFWRKSKSNRRQMLDATDGAQTVSKIVILKPNPERGINQKAATARTLHQQPCTSNAPGCSGRENSKFSIKEVKKRFRFVTGERSERNLSPAEDLQGDPRKIKDSVVAINKYFRHLPEGSLANKSASDIENGIKPFISSKQKNQNGSITEISGHIVAPKGASVFYEEARRHLSEMLKGNDCSINYPEVQISKSLEGILSLPHGNVSTTGSSLRGKDYLDPSPGETDVYDACEVEREECTQERSQSQEDFGSIAHCTCTTVDDQVTVREGYYTNEAQEGPRHAHDEPDTLYIEGLDKFICRENIRNEESSPAEQSRDDIRQVSLNKCIFFFLVINFSKCPMFHKGDTRRNKSGKRAC

SEQ ID NO: 158155 - protein, 85 aa, Zea Mays
MRPASCLFPSSLRSDRADSRRVSLESSSLSLSPFLSRLIFQLISDFLTVSPKLSVRGGLGLAIKEEQSPLPPILDSASSRTFTKT

SEQ ID NO: 158156 - protein, 96 aa, Zea Mays
MRRSHGVIVPVVMGHDSCGNLAHSGSSSVTLVRSRQFATAVASSLSPPVSRSTPRRHARGGEPARIFGLNSTSYGGFIKIAEAPSRGRGRWGAPRG

SEQ ID NO: 158157 - protein, 54 aa, Zea Mays
MFLSHTCGLRGGAAATAALTVCGGVDGRDQLLPLHRRAPTLDRCYNSSFIMLRD

SEQ ID NO: 158158 - protein, 418 aa, Zea Mays
MRAWEMHPLCCLAGEWPASGGGLAPGDRSPPAEDAGAAPAVAGVLYKWTNIGKGWRPRWFAIRGGVLAYSKIRRRVAAEPRPEAAGGVRLIGVARGAAGAAERPIGFVPLKISSFSESKSDDKRFYIITPTKTLQLRTGCANDRATWIEALVTARSEYSFNGDLSGDQNDASFSTEKLRNRLNAEGVGEAVIKDCEQIIHSEFSQYQTQMKQRCEEYLSFIGTLPQDVEVVNSVDSTVPEKPRLELFKHDCSSSGKCSEYSNTESSDDVGKQEISELSDGDEFHFYDTRQSFSEFASSPADPRKGCLNNGNEDHKSVESLTVDKAEKYMLSHSKRRLQLPEPIEKEKGVSLWSMIKDNVGKDLTRVCLPVYFNEPLSSLQKCFEELEYSYLLDRAYECGLRVCLFLYLPVFLDPYIFF

SEQ ID NO: 158159 - protein, 456 aa, Zea Mays
MRAWEMHPLCCLAGEWPASGGGLAPGDRSPPAEDAGAAPAVAGVLYKWTNIGKGWRPRWFAIRGGVLAYSKIRRRVAAEPRPEAAGGVRLIGVARGAAGAAERPIGFVPLKISSFSESKSDDKRFYIITPTKTLQLRTGCANDRATWIEALVTARSEYSFNGDLSGDQNDASFSTEKLRNRLNAEGVGEAVIKDCEQIIHSEFSQYQTQMKQRCEEYLSFIGTLPQDVEVVNSVDSTVPEKPRLELFKHDCSSSGKCSEYSNTESSDDVGKQEISELSDGDEFHFYDTRQSFSEFASSPADPRKGCLNNGNEDHKSVESLTVDKAEKYMLSHSKRRLQLPEPIEKEKGVSLWSMIKDNVGKDLTRVCLPVYFNEPLSSLQKCFEELEYSYLLDRAYECGLRIPGLANLSIHCLGKPMKLITLKRGSVFSLKRSVIILWSWHVTVRGKVGNFGETAI

SEQ ID NO: 158160 - protein, 735 aa, Zea Mays
MRAWEMHPLCCLAGEWPASGGGLAPGDRSPPAEDAGAAPAVAGVLYKWTNIGKGWRPRWFAIRGGVLAYSKIRRRVAAEPRPEAAGGVRLIGVARGAAGAAERPIGFVPLKISSFSESKSDDKRFYIITPTKTLQLRTGCANDRATWIEALVTARSEYSFNGDLSGDQNDASFSTEKLRNRLNAEGVGEAVIKDCEQIIHSEFSQYQTQMKQRCEEYLSFIGTLPQDVEVVNSVDSTVPEKPRLELFKHDCSSSGKCSEYSNTESSDDVGKQEISELSDGDEFHFYDTRQSFSEFASSPADPRKGCLNNGNEDHKSVESLTVDKAEKYMLSHSKRRLQLPEPIEKEKGVSLWSMIKDNVGKDLTRVCLPVYFNEPLSSLQKCFEELEYSYLLDRAYECGLRGNGLMRILYVAAFAVSGYASTDSRPCKPFNPLLGETYEADYPEKGIRFFSEKVSHHPMVMACHCEGKGWKFWGDSNLKSKFWGQSIQLDPNGVLTLEFDDGEIFQWSKVTTTINNLILGRVYCHHHGTMNISGNRRYSCKLTFKEQSFLDRNPRQVQGVVKDAGGSKVATLTGKWDESVHCVINNDASKVNSHGPHQSSGSTLLWEKNEPPVNPTRYNLSAFAITLNELTPELEEKLPPTDSRLRPDQRHLENGEYEKANAEKLRLETQQRMARKMQESGWKPRWFQRDSEDGTYRYVGGYWEAREQRTWVGCNDIFGNLSSSQKLPPSALYTS

SEQ ID NO: 158161 - protein, 189 aa, Zea Mays
MRILYVAAFAVSGYASTDSRPCKPFNPLLGETYEADYPEKGIRFFSEKVSHHPMVMACHCEGKGWKFWGDSNLKSKFWGQSIQLDPNGVLTLEFDDGEIFQWSKVTTTINNLILGRVYCHHHGTMNISGNRRYSCKLTFKEQSFLDRNPRQVKKDKKITHKIYMGCANIWLYGRFKESSRMLVEARLQH

SEQ ID NO: 158162 - protein, 512 aa, Zea Mays
MLYVFLVVNSVDSTVPEKPRLELFKHDCSSSGKCSEYSNTESSDDVGKQEISELSDGDEFHFYDTRQSFSEFASSPADPRKGCLNNGNEDHKSVESLTVDKAEKYMLSHSKRRLQLPEPIEKEKGVSLWSMIKDNVGKDLTRVCLPVYFNEPLSSLQKCFEELEYSYLLDRAYECGLRGNGLMRILYVAAFAVSGYASTDSRPCKPFNPLLGETYEADYPEKGIRFFSEKVSHHPMVMACHCEGKGWKFWGDSNLKSKFWGQSIQLDPNGVLTLEFDDGEIFQWSKVTTTINNLILGRVYCHHHGTMNISGNRRYSCKLTFKEQSFLDRNPRQVQGVVKDAGGSKVATLTGKWDESVHCVINNDASKVNSHGPHQSSGSTLLWEKNEPPVNPTRYNLSAFAITLNELTPELEEKLPPTDSRLRPDQRHLENGEYEKANAEKLRLETQQRMARKMQESGWKPRWFQRDSEDGTYRYVGGYWEAREQRTWVGCNDIFGNLSSSQKLPPSALYTS

SEQ ID NO: 158163 - protein, 241 aa, Zea Mays
MLSHSKRRLQLPEPIEKEKGVSLWSMIKDNVGKDLTRVCLPVYFNEPLSSLQKCFEELEYSYLLDRAYECGLRGNGLMRILYVAAFAVSGYASTDSRPCKPFNPLLGETYEADYPEKGIRFFSEKVSHHPMVMACHCEGKGWKFWGDSNLKSKFWGQSIQLDPNGVLTLEFDDGEIFQWSKVTTTINNLILGRVYCHHHGTMNISGNRRYSCKLTFKEQSFLDRNPRQESSRMLVEARLQH

SEQ ID NO: 158164 - protein, 360 aa, Zea Mays
MKQRCEEYLSFIGTLPQDVEVVNSVDSTVPEKPRLELFKHDCSSSGKCSEYSNTESSDDVGKQEISELSDGDEFHFYDTRQSFSEFASSPADPRKGCLNNGNEDHKSVESLTVDKAEKYMLSHSKRRLQLPEPIEKEKGVSLWSMIKDNVGKDLTRVCLPVYFNEPLSSLQKCFEELEYSYLLDRAYECGLRGNGLMRILYVAAFAVSGYASTDSRPCKPFNPLLGETYEADYPEKGIRFFSEKVSHHPMVMACHCEGKGWKFWGDSNLKSKFWGQSIQLDPNGVLTLEFDDGEIFQWSKVTTTINNLILGRVYCHHHGTMNISGNRRYSCKLTFKEQSFLDRNPRQESSRMLVEARLQH

SEQ ID NO: 158165 - protein, 524 aa, Zea Mays
MKQRCEEYLSFIGTLPQDVEVVNSVDSTVPEKPRLELFKHDCSSSGKCSEYSNTESSDDVGKQEISELSDGDEFHFYDTRQSFSEFASSPADPRKGCLNNGNEDHKSVESLTVDKAEKYMLSHSKRRLQLPEPIEKEKGVSLWSMIKDNVGKDLTRVCLPVYFNEPLSSLQKCFEELEYSYLLDRAYECGLRGNGLMRILYVAAFAVSGYASTDSRPCKPFNPLLGETYEADYPEKGIRFFSEKVSHHPMVMACHCEGKGWKFWGDSNLKSKFWGQSIQLDPNGVLTLEFDDGEIFQWSKVTTTINNLILGRVYCHHHGTMNISGNRRYSCKLTFKEQSFLDRNPRQVQGVVKDAGGSKVATLTGKWDESVHCVINNDASKVNSHGPHQSSGSTLLWEKNEPPVNPTRYNLSAFAITLNELTPELELPPTDSRLRPDQRHLENGEYEKANAEKLRLETQQRMARKMQESGWKPRWFQRDSEDGTYRYVGGYWEAREQRTWVGCNDIFGNLSSSQKLPPSALYTS

SEQ ID NO: 158166 - protein, 407 aa, Zea Mays
MLSHSKRRLQLPEPIEKEKGVSLWSMIKDNVGKDLTRVCLPVYFNEPLSSLQKCFEELEYSYLLDRAYECGLRGNGLMRILYVAAFAVSGYASTDSRPCKPFNPLLGETYEADYPEKGIRFFSEKVSHHPMVMACHCEGKGWKFWGDSNLKSKFWGQSIQLDPNGVLTLEFDDGEIFQWSKVTTTINNLILGRVYCHHHGTMNISGNRRYSCKLTFKEQSFLDRNPRQVQGVVKDAGGSKVATLTGKWDESVHCVINNDASKVNSHGPHQSSGSTLLWEKNEPPVNPTRYNLSAFAITLNELTPELEEKLPPTDSRLRPDQRHLENGEYEKANAEKLRLETQQRMARKMQESGWKPRWFQRDSEDGTYRYVGGYWEAREQRTWVGCNDIFGNLSSSQKLPPSALYTS

SEQ ID NO: 158167 - protein, 317 aa, Zea Mays
MWFKDSRPCKPFNPLLGETYEADYPEKGIRFFSEKVSHHPMVMACHCEGKGWKFWGDSNLKSKFWGQSIQLDPNGVLTLEFDDGEIFQWSKVTTTINNLILGRVYCHHHGTMNISGNRRYSCKLTFKEQSFLDRNPRQVQGVVKDAGGSKVATLTGKWDESVHCVINNDASKVNSHGPHQSSGSTLLWEKNEPPVNPTRYNLSAFAITLNELTPELEEKLPPTDSRLRPDQRHLENGEYEKANAEKLRLETQQRMARKMQESGWKPRWFQRDSEDGTYRYVGGYWEAREQRTWVGCNDIFGNLSSSQKLPPSALYTS

SEQ ID NO: 158168 - protein, 88 aa, Zea Mays
MGSTRRPMLKNCASRHSNGWQGRCRRVAGNQDGSKGTARMERTATSEVTGRQGSREHGSAAMTYLVTCLAARSSHHPLSTRAEVYRGG

SEQ ID NO: 158169 - protein, 283 aa, Zea Mays
MSAASSATCRVCGGAGECACRHGHGIGGARCGGVVAVADLNRGFPALWHQPEEEPSGAGAAPGLHEFQFFGHDEDHDSVTWLFTDPSPHLHRGPAAAEVGNGVAEAEQRRPPPVFDGGYAHAQYGELPGHGLTFDVPLSGRRGGEVASVAPVLEAGLGLGGGGGGDLATSSSATIMSFCGTTFTDAASAVPGDAAAAAPNGSASGAADPAVDREAKVMRYKEKRKRRRYEKQIRYASRKAYAEMRPRVKGRFAKVPDGEAPSPPAPAAACYEPGRLDLGWFRS

SEQ ID NO: 158170 - protein, 194 aa, Zea Mays
MQVFFLSLHPSVSLSFCRHENHNAIFFLACLHRLSINMLTPECLEDNHGHQADQLSFHVWFYNIDPNFSCFYVRVVLIVYSARPFQMSFCGTTFTDAASAVPGDAAAAAPNGSASGAADPAVDREAKVMRYKEKRKRRRYEKQIRYASRKAYAEMRPRVKGRFAKVPDGEAPSPPAPAAACYEPGRLDLGWFRS

SEQ ID NO: 158171 - protein, 98 aa, Zea Mays
MVTMRPPLRPVHFAPYLCVRVRVDAGATRRERRKQRADARSEGRLAARTFLFCLYVRAHADTGAGRRIAARTRGIARSTRFHYTPLGPTTKRLRNSKH

SEQ ID NO: 158172 - protein, 104 aa, Zea Mays
MVTMRPPLRPVHFAPYLCVRVRVDAGATRRERRKQRADARSEGRLAARTFLFCLYVRAHADTGAGRRIAARTRGIARSTRFHYTPLGEEQVSLEEDYYDEPDEI

SEQ ID NO: 158173 - protein, 125 aa, Zea Mays
MVTMRPPLRPVHFAPYLCVRVRVDAGATRRERRKQRADARSEGRLAARTFLFCLYVRAHADTGAGRRIAARTRGIARSTRFHYTPLGPVKSRYPWRRTTTTSPMRYRRRLPVNCWCQGYGYIISV

SEQ ID NO: 158174 - protein, 210 aa, Zea Mays
MPNYSSAAAHAAMAAAAAGNGGGGTSAGQDSCVTAAPAGRGARSKRSSRAPAAAAWHSLVSRPPSQPSPSSSSCSSSDFPSSSNRPARGRKSPGPGGDAVAGSDGGVRRCTHCASEKTPQWRTGPLGPKTLCNACGVRFKSGRLVPEYRPAASPTFVLTQHSNSHRKVMELRRQKELILIRGSHRDAAAAAGAGSAGPRPELMFRDYGVC

SEQ ID NO: 158175 - protein, 474 aa, Zea Mays
MNQCVPSWDLVDDPTAAVAGGGGGLNHQVSTTGGAHRGLLLQASAGGAGGGGAFAPVVVPMSNQYYEVAELTWEKGNISSHGLLNRPAHNKYPPAAAPSSAQLHAIAGGGGRGGGSPSGDRETLEAVVGEAAARSHFLSQPAPPWLIGADAVARAAADALVPCAARAGESAADGGEAGASRRKRPRVVGDDSLVVCASQGSTAPRRRGESALLTQLDACGTEADDVCGFRTTTTNNSTSMDRDDKGSPDTENTSIGGGASDSRCFSRRSQKRRDRINQKMKTLQKLVPNSNKAQVQLMSRMGSMMMPMAMPQLQMSMMAQMAQMAQMAQMAQMNMGSLGQPGYAGLTPPMMHPPPFVPVSWDTTATATTSLAPQAGSGTVPADAFSAFLACQAQQNGQFCLDFFGSFYRICSDSFLSIDEAWNCVTESMTAGAREQEVAHAVFCREEREIVEKGSAGTRCLFCGDRCGGCWRAK

SEQ ID NO: 158176 - protein, 170 aa, Zea Mays
MKTLQKLVPNSNKQTDKASMLDEVIDYLKQLQAQVQLMSRMGSMMMPMAMPQLQMSMMAQMAQMAQMAQMAQMNMGSLGQPGYAGLTPPMMHPPPFVPVSWDTTATATTSLAPQAGSGTVPADAFSAFLACQAQQNGQQPGSMEAYNRMVALYQKMNQTQQSAPSNPSKQ

SEQ ID NO: 158177 - protein, 124 aa, Zea Mays
MSVMITVSVRPEQDGSFLHRICAHPRQPSAMHVSPSKSQCRVREKKIQMVLSRRSSERRAHVRGGPHAAAVLTGLHCTVRLACYSNSYWSYNSYSLLLVYNFFYGALEILLERFFSFLKQVENQ

SEQ ID NO: 158178 - protein, 1163 aa, Zea Mays
MSPCCPTSSSGDEVGDGSGVMQDKDLMEPFGVPCMVEILQFLCSLLNIAEDIELNPRMSPIDFDEDVPLFALGLINSAIEFSASSIHRHQKLLAFVQDELFRNLMHFGLSMSPLILSTVCSIVFTLFYHLRHELKLQIEAFFSCVILRLAQSRYGASYQQQEVALEALIDFCWQKEFMAEMYANMDCDLQCSNIFEELANLLSKSAFPVNSPLSALNVLALDGLVAVIQAMAQRTDNAPQHHDQTVPEISEYFPFWQLKCESSNDPDQWVKFVHQQKSIKTKLMIGVEHFNRDKKKGFEYLQAVHLLPEKLDPHNVALFFRYTPGLDKNLLGDYLGNHDEFSIQVLHEFARTFDFKDMNLDAALRLFLETFRLPGESQKIQRILEAFSERYYEQSPQMFVNRDAALVLSYSVIMLNTDQHNVRVKKKMTEEDFIRNNRRINGGNDLPREFLSELYYSICRNEIRTIPEQGAGCSEMSFSRWVDLMWRSKRTSLYIACDSYPFLDHDMFSLMAGPTVAAVSVVFDNVEHEEVLTGCIDGFLSVAKLAAFYHLDDVLNDLVVALSKFTTLLNTSYIDDPVIAFGEDTKARMATEAVFTIATAYGDHIRSGWRNIIDCILRLHKIGLLPGRLTGDTTDDQESSSDSLPGKHTSSAPQVLPISTPRKTYGLMGRFSQLLYLDADEPRSRPTEEQLAAQRNASETVKKCQIGIIFTESKFLQADSLSNLARALIQAAGRPQKITSSLDDEGVAALCLELLITVTLNNRDRIVLLWQDVFEHITHIVQCTVMPCNLVEKAVFGLLHICQRLLPYKANLVDDLLRSLQLILKLDARVADAYCENITLEVTRLVKANATHIKSQMGWRTIISLLCITARHPDASDAGFEALVFIMSEGVHLSPANFILSVEASRQFAESRLGSAERSIHALNLMADSVNCLVRWSQEVREAGGEADRILEGIAEMWLRLVQALRKVCMDQREEVRNHALLSLHRCLVVDGISVKSSTWLMAFDIIFQLLDELLEIAQSYSPKDFRNMEVSLLHAVKLLCKVFLQSLKDLSGQHSFDKLWLEVLDMIEKFMKVKLRGRRTEKLQEAIPELVKNILMMMKASGILSKTGASENSFWEATWLQVNKIAPSLQLEIFPDNEDGSTTQVEENKLDTQVQSDQNNDR

SEQ ID NO: 158179 - protein, 1143 aa, Zea Mays
MQDKDLMEPFGVPCMVEILQFLCSLLNIAEDIELNPRMSPIDFDEDVPLFALGLINSAIEFSASSIHRHQKLLAFVQDELFRNLMHFGLSMSPLILSTVCSIVFTLFYHLRHELKLQIEAFFSCVILRLAQSRYGASYQQQEVALEALIDFCWQKEFMAEMYANMDCDLQCSNIFEELANLLSKSAFPVNSPLSALNVLALDGLVAVIQAMAQRTDNAPQHHDQTVPEISEYFPFWQLKCESSNDPDQWVKFVHQQKSIKTKLMIGVEHFNRDKKKGFEYLQAVHLLPEKLDPHNVALFFRYTPGLDKNLLGDYLGNHDEFSIQVLHEFARTFDFKDMNLDAALRLFLETFRLPGESQKIQRILEAFSERYYEQSPQMFVNRDAALVLSYSVIMLNTDQHNVRVKKKMTEEDFIRNNRRINGGNDLPREFLSELYYSICRNEIRTIPEQGAGCSEMSFSRWVDLMWRSKRTSLYIACDSYPFLDHDMFSLMAGPTVAAVSVVFDNVEHEEVLTGCIDGFLSVAKLAAFYHLDDVLNDLVVALSKFTTLLNTSYIDDPVIAFGEDTKARMATEAVFTIATAYGDHIRSGWRNIIDCILRLHKIGLLPGRLTGDTTDDQESSSDSLPGKHTSSAPQVLPISTPRKTYGLMGRFSQLLYLDADEPRSRPTEEQLAAQRNASETVKKCQIGIIFTESKFLQADSLSNLARALIQAAGRPQKITSSLDDEGVAALCLELLITVTLNNRDRIVLLWQDVFEHITHIVQCTVMPCNLVEKAVFGLLHICQRLLPYKANLVDDLLRSLQLILKLDARVADAYCENITLEVTRLVKANATHIKSQMGWRTIISLLCITARHPDASDAGFEALVFIMSEGVHLSPANFILSVEASRQFAESRLGSAERSIHALNLMADSVNCLVRWSQEVREAGGEADRILEGIAEMWLRLVQALRKVCMDQREEVRNHALLSLHRCLVVDGISVKSSTWLMAFDIIFQLLDELLEIAQSYSPKDFRNMEVSLLHAVKLLCKVFLQSLKDLSGQHSFDKLWLEVLDMIEKFMKVKLRGRRTEKLQEAIPELVKNILMMMKASGILSKTGASENSFWEATWLQVNKIAPSLQLEIFPDNEDGSTTQVEENKLDTQVQSDQNNDR

SEQ ID NO: 158180 - protein, 1384 aa, Zea Mays
MGGVRAASPSGAGSGAVAGAGSDHGAPRLAMACVLASEAATVLAVMRRNVRWAGVRYGGGDGGAGDDEHLDHPLVAGLKVLRRRAAAWGQGSWAGVEPLLYLRPFLDIVCSDETGAPITGAALSSLHKILTLDVVGPGAPGAAGAMAAVVDAVTACRFEVTDPASEEAVLARVLQVLLACVRSRAAPALANRHVCTIVNTCFRVVQQAGTKGELLQRVSRQTMQEVIRTVFARLPDINVTLLSDEQVAGCKNPCLGAEETENGKSDYVCLNSSGDEVGDGSGVMQDKDLMEPFGVPCMVEILQFLCSLLNIAEDIELNPRMSPIDFDEDVPLFALGLINSAIEFSASSIHRHQKLLAFVQDELFRNLMHFGLSMSPLILSTVCSIVFTLFYHLRHELKLQIEAFFSCVILRLAQSRYGASYQQQEVALEALIDFCWQKEFMAEMYANMDCDLQCSNIFEELANLLSKSAFPVNSPLSALNVLALDGLVAVIQAMAQRTDNAPQHHDQTVPEISEYFPFWQLKCESSNDPDQWVKFVHQQKSIKTKLMIGVEHFNRDKKKGFEYLQAVHLLPEKLDPHNVALFFRYTPGLDKNLLGDYLGNHDEFSIQVLHEFARTFDFKDMNLDAALRLFLETFRLPGESQKIQRILEAFSERYYEQSPQMFVNRDAALVLSYSVIMLNTDQHNVRVKKKMTEEDFIRNNRRINGGNDLPREFLSELYYSICRNEIRTIPEQGAGCSEMSFSRWVDLMWRSKRTSLYIACDSYPFLDHDMFSLMAGPTVAAVSVVFDNVEHEEVLTGCIDGFLSVAKLAAFYHLDDVLNDLVVALSKFTTLLNTSYIDDPVIAFGEDTKARMATEAVFTIATAYGDHIRSGWRNIIDCILRLHKIGLLPGRLTGDTTDDQESSSDSLPGKHTSSAPQVLPISTPRKTYGLMGRFSQLLYLDADEPRSRPTEEQLAAQRNASETVKKCQIGIIFTESKFLQADSLSNLARALIQAAGRPQKITSSLDDEGVAALCLELLITVTLNNRDRIVLLWQDVFEHITHIVQCTVMPCNLVEKAVFGLLHICQRLLPYKANLVDDLLRSLQLILKLDARVADAYCENITLEVTRLVKANATHIKSQMGWRTIISLLCITARHPDASDAGFEALVFIMSEGVHLSPANFILSVEASRQFAESRLGSAERSIHALNLMADSVNCLVRWSQEVREAGGEADRILEGIAEMWLRLVQALRKLLDELLEIAQSYSPKDFRNMEVSLLHAVKLLCKVFLQSLKDLSGQHSFDKLWLEVLDMIEKFMKVKLRGRRTEKLQEAIPELVKNILMMMKASGILSKTGASENSFWEATWLQVNKIAPSLQLEIFPDNEDGSTTQVEENKLDTQVQSDQNNDR

SEQ ID NO: 158181 - protein, 379 aa, Zea Mays
MRVLIVENLRNPYESNLGGTNKRFKLTLNKLYAWTLVDYERVVMIDSDNIFLQNTDELFQCGQFCAVFINPCYFHTGLFVLQPSIDVFRSMLHDLETGRENSDGADQGFLVGCYPDLLDKPMFHPPENGTKLNGTYRLPLGYQMDASYYYLKLHWHVPCGPNSVITFPSAPWFKPWYWWSWPVLPLGLSWHKQRWDDLGYAAEMPVILMELLMYIVIIAVTRLARPGITKLCYNRRPEKQSALVQWLIKLAAIAAMVAAYSIPFFVVPRTVHPIMGWSVYLFGALALSVLVINVFLLPPLDVLTTWLAIVGMLIVMAFPWYHDGVVRALAVFGYAFCSAPILWASMVRMMDSLQTMLERDSFFPRIGEPAQETEFSKLY

SEQ ID NO: 158182 - protein, 475 aa, Zea Mays
MMHWSRPVDRRSHFPVLRAVTPPIPDQSPNYFPLRIPMPRTVAVVGAGAAGLVAARQLLREGLDVAVFEKSGRAGGTWAYDPRADADPLSRDPGSPSAVHGSLYASLRTNLTRDLMGFSDFPMAGWVFAGDARAFPGHQEVLAFLDAFAEECGVAARVRLRSEVLRVRERWAVSWRREDGEVAEEVFDAVVVCNGHCTVPRVPGIRGIDNWSGKQIHSHNYRTPEPFRDQNVVVVGFSTSGIDIASEISRLAKEVHVADRYSRDRLGKMALYQNVWIHAEVDCIQDDGKVRFAEGSVVDADVILYCTGYRYHFPFLDLDGLTVDDNRVGPLYKHVFPPKYAPNLSFVGLPVKTIVFQELEQEAKWVAAVLSGRATLPSEEDMMASVRSHYQLMEEAGRPKRHTHALAAQWAEHMNWLADQVGEPPVEPWKCEVFDKVLASILALDEAYRDRWEQEEDGGSSGHQEGIRIRASSIM

SEQ ID NO: 158183 - protein, 233 aa, Zea Mays
MAASCALTSSHGDLAHGGSPCSAYSPLQELAQPLSAGDRAISLDTPLPLLLPMVALADLSHGVGNSSTSLHGRPRSSPYSPSTSSSPRPQPLFRRCGDPVSLACCPILASRPGRLHGRRRKAQSDAPHVLDEKPEREIICFFCGIRVEFINGCLGEEEGYAPCSSFPWFPTAAAGNIPTPDAEIHASGSIFLNVGCLSDLAVDLLLTAACALFPPSSSPGSAQPRPYYRPQWF

SEQ ID NO: 158184 - protein, 237 aa, Zea Mays
MAASCALTSSHGDLAHGGSPCSAYSPLQELAQPLSAGDRAISLDTPLPLLLPMVALADLSHGVGNSSTSLHGRPRSSPYSPSTSSSPRPQPLFRRCGDPVSLACCPILASRPGRLHGRRRKAQSDAPHVLDEKPEREIICFFCGIRVEFINEILGCLGEEEGYAPCSSFPWFPTAAAGNIPTPDAEIHASGSIFLNVGCLSDLAVDLLLTAACALFPPSSSPGSAQPRPYYRPQYVN

SEQ ID NO: 158185 - protein, 409 aa, Zea Mays
MRRRAEVAVVGAGAAGLVAARELLREGHTVSVFEKSGRVGGTWAYSPRADADPLGSDPGAPGAVHSSLYASLRTNLPRELMGFSGFPLAGRAFAGDPRTFPGHREVLAYLDAFAADSGVAPHVRLRAQVLRVRPLCPGRGQGEKWAVAWRGEDGDVAEEAFDAVVVCNGHCSVPLVPKIRGINKWRGKQMHSHNYRTPEPFQDQSVVVVGLGASGIDIAREISHVAKEVHISARYSEGRLGKIELYHNAWMHSEIECIQDDGQVRFAEGSSVAADTILYCTGYRYHFPFLDLDGFTVDDNRVGPLYKHVFPPKHAPNLCFVGLPYKISCVCFAEHHLPGTRAGIQVGRRRPVGACRAAGGGGHDGRRGRGVPAHGGRREAEAPHPHAVASVGGVPELGGGPGRRGAPGA

SEQ ID NO: 158186 - protein, 317 aa, Zea Mays
MDIMALNARDEEQYGNNHLGLGLSLSLGLGVATAAPVEVEPPPPPRQQQQRAISVAPITSLPAPQWWKWNGPGLFFGTTMDQQQQPAAARHGHEMPFLRGVDVNRAPAGDTRRGSCSEDDEEPGGASSSPNSTLSSSLSGKRAAPARSGGEVADHTPRAGGGSDDEDSGGGSRKKLRLSKDQAAVLEESFKEHNTLNPKAALAKQLNLKPRQVEVWFQNRRARTKLKQTEVDCEFLKRCCETLTEENRRLQREVAELRVLKLVAPHHYARMPPPTTLTMCPSCERLASASASADQAGRAGPCWGPLPVFVDGPARRP

SEQ ID NO: 158187 - protein, 128 aa, Zea Mays
MMKLPVGAPLPETPGPTPTRAIPQAFNEASRASMRQSNSTTSCTAAELSSQLSRCGEEARSTKRHKHRKVPGRLWCCEYPRTPHHNQSRGKPRRPRRWPSTLSWRSLFALSYNGPCMRMQKTTFFWKN

SEQ ID NO: 158188 - protein, 372 aa, Zea Mays
MGCTASKVEQEDTVRRCKERRRHMKDAVAARQLLASAHADYLRSLRVTAAALSRFAKGHPSLAVSHHTTPVLLSAAAPPPAPSAARALPTPAPSTAASSSLPPPTPLAQHPHPPPQPPAAMAAPQPAPARAPRPRRLRVPHILSDSSVASPARSSFRKQPPVGTPSSSSAWDWENFYPPSPPDSEFFDRRKAEVEHASRLRELEEEEKARAYLQHHTQYNLKEEDEAAEDDDGEVDHEPEGMHCGGWEDDEHYASTTTSETRSEDEGEMGDRSECGFAARSECGFVARSEYGGTAPSEYAAVPLPLRRDERPAAHNSTATSGSSKRRCTIPTACYQHCRRHGHQNRHWLYDTSWTLMHWRWSRRKGRVMDPL

SEQ ID NO: 158189 - protein, 86 aa, Zea Mays
MQVLQRKEHFCGVKPGRKEKKRERSYTPELATILFIRSFRLRQRIVQEAMMKMRKRYRSNKQCVYPNLGIMFCSTRHALNIASMLI

SEQ ID NO: 158190 - protein, 411 aa, Zea Mays
MEEAAAVAKRWPGWPGDSVFRLVVPVLKVGSIIGRKGELIKRLVEETKARVRILEGPVGATERIVLVSGKEDPDLELPPAMDALMRVFKRVTGITDGAAEGTQAAATPDVCAARLLVPGAQAINLIGKQGATIKAIQESTSATIRVISVDEHERPFYVTDDERIVEIQGDTEKVLKALQAVSNHLRKFLVDHSVLPLFEKTNTTVSQDRNGDGWSDMSRPSIGSAQVNQLPSVLDDYILQVKRDPLYLERESLVDHNIHRSGVSLYGRDPALSTLRPSAVHGAGSLLTQITQTMQIPLTYAEDIIGVKGANIAYIRANSGAVVTIQESLGSPDDITVEIKGTSSQDSLAAHREPVRSSYVGAGLDSVYRSSYSQYGSSIYPSSSLPSYSSIDDVSRYPSSGLGGYGSSYRY

SEQ ID NO: 158191 - protein, 229 aa, Zea Mays
MAESSAAAEVGSPASLPPLVAEEADAAAMEEAAAVAKRWPGWPGDSVFRLVVPVLKVGSIIGRKGELIKRLVEETKARVRILEGPVGATERIVLVSGKEDPDLELPPAMDALMRVFKRVTGITDGAAEGTQAAATPDVCAARLLVPGAQAINLIGKQGATIKAIQESTSATIRVISVDEHERPFYVTDDERIVEIQGDTEKVLKALQAVSNHLRKFLVDHSVLPLFEKT

SEQ ID NO: 158192 - protein, 82 aa, Zea Mays
MLIALLGESEMRLSDEIIETILDKTFSDADANQDGKIDRTEWENFVTRNPSLMKIMTLPYLKDITTTFPSFVFNSEVDDLVT

SEQ ID NO: 158193 - protein, 144 aa, Zea Mays
MRQYHLCTDDGFTEEQNELIESSAEMLYGLIHARYILTSKGLAAMLEKFKNYDFGRCPRVYCCGQPCLPAGQSDVPRSSTVKIYCPKCEELNYPRSKYQGNIDGSYFGTTFPHLFLMTYSHLKPQKPSQQYTPRVFGFKLHKPS

SEQ ID NO: 158194 - protein, 80 aa, Zea Mays
MLYGLIHARYILTSKGLAAMLEKFKNYDFGRCPRVYCCGQPCLPAGQSDVPRSSTVKIYCPKCEELNYPRSKYQGSILLI

SEQ ID NO: 158195 - protein, 119 aa, Zea Mays
MLYGLIHARYILTSKGLAAMLEKFKNYDFGRCPRVYCCGQPCLPAGQSDVPRSSTVKIYCPKCEELNYPRSKYQGNIDGSYFGTTFPHLFLMTYSHLKPQKPSQQYTPRVFGFKLHKPS

SEQ ID NO: 158196 - protein, 485 aa, Zea Mays
MLPLHHHPAAAPESAAPATDPPPPPVLDPSSLRIHIPSSPHHALPSTPHKRPVVMTSSSSSSTPTRPSPLPFTPPRRRKVPAPAAPAGTAAARHLLRCLHLRLRVLLLISLPSLYFLSPTPAIFPRSLLADFLSAAAFSCALLLLLCLSLPRLPFALTLPLPLRRARRSPILWSIGSSPSASATTPTTGHFVQVYSNGDVYEGQFHRGRCTGSGVYYYYMSGRYEGDWVDGKYSGFGVETWARGSRYRGQYRQGLRHGYGVYRFYTGDVYAGEWSNGQSHGYGVHTCEDGSRYIGEFKRGVKHGLGHYHFRNGDTYAGEYFADRMHGFGIYSFANGHRYEGAWHEGRRQGLGMYSFRNGETQAGHWQNGVLDTLSTQNFIPGSPIAVNHSKVLNAVQEARRAAEKAYDIPRVDDKVNRAVAAANKAANAARVAAVKAAQKRIPSNGEATARPSGHGVLATPESLPAAFKLAGEDQVFSHPFHTSL

SEQ ID NO: 158197 - protein, 433 aa, Zea Mays
MLPLHHHPAAAPESAAPATDPPPPPVLDPSSLRIHIPSSPHHALPSTPHKRPVVMTSSSSSSTPTRPSPLPFTPPRRRKVPAPAAPAGTAAARHLLRCLHLRLRVLLLISLPSLYFLSPTPAIFPRSLLADFLSAAAFSCALLLLLCLSLPRLPFALTLPLPLRRARRSPILWSIGSSPSASATTPTTGHFVQVYSNGDVYEGQFHRGRCTGSGVYYYYMSGRYEGDWVDGKYSGFGVETWARGSRYRGQYRQGLRHGYGVYRFYTGDVYAGEWSNGQSHGYGVHTCEDGSRYIGEFKRGVKHGLGHYHFSFANGHRYEGAWHEGRRQGLGMYSFRNGETQAGHWQNGVLDTLSTQNFIPGSPIAVNHSKVLNAVQEARRAAEKAYDIPRVDDKVNRAVAAANKAANAARVAAVKAAQKRIPSNGDDLPLSVV

SEQ ID NO: 158198 - protein, 96 aa, Zea Mays
MLLKCALSKVTSTGAMTFGFIQAIERGQGTTYGSILNSMRSTIRNTDDSAGVGGGAVTSLITMLLTGGSLSAGGLRQEPQLTACEPFDVYAKPFSL

SEQ ID NO: 158199 - protein, 504 aa, Zea Mays
MAFPRQNMTYRERHCPVENEKLHCLIPAPKGYVTPFSWPKSRDYVPYANAPYKSLTVEKAVQNWIQYQGDVFKFPGGGTMFPNGANAYLDELASIIPLADGTIRTALDTGCGVASFGAYLMDRNVLTMSFAPRDSHEAQVQFALERGVPAVIGVLGTIKVPYPSRSFDMAHCSRCLIPWESNGGMYMMEVDRVLRPGGYWILSGPPINWKKYYQSWKRSKQDAEEDQHRIENIAEMLCWDKIFEKDDIAIWQKQGNSYSCHQKDGHASKMCKVQDSDDVWIGYKKLESCITPPIEAAQLKKFPERLSAIPPRILEGQVPDITEEVYEEDNKLWKKHVNTYKRVNKLIGSSRYRNIMDMNAGLGSFAATLHSSSSWVMNVVPSISERNTLGIIYERGLIGIYHDWCEAFSTYPRTYDLIHGNDIFSLYQNKCDAEDILLEMDRILRPEGAVILRDNADVLNKVRSMVAGMRWKSKLLDHEDGPHVPEKILISVKEYWVGSEEQNS

SEQ ID NO: 158200 - protein, 268 aa, Zea Mays
MQPAQPICSVHCLRQRHSSRHLVGPSSTPTPPPPLPQSSRVIFSLFTRKKLKKNYKRKKNGRRSIARFIYLFIGVGATVFLVSLFGCIGAGTRNTCCLCFYAFLVILLILAEAGAAAFIFFDHSWKDVIPVDKTHNFDVMYGFLKKNWEIARWVALGVVVFEAVLFLLALVVRAMNKPAEYDSDDEIIAIGRSPTMRQPLIHAQNVPATGVPVPTLDQRSSRNDAWSQRMREKYGLDTSQFTYNPSDPSRYQQNGAPQAEERSRCTIM

SEQ ID NO: 158201 - protein, 129 aa, Zea Mays
MYGFLKKNWEIARWVALGVVVFEAVLFLLALVVRAMNKPAEYDSDDEIIAIGRSPTMRQPLIHAQNVPATGVPVPTLDQRSSRNDAWSQRMREKYGLDTSQFTYNPSDPSRYQQNGAPQAEERSRCTIM

SEQ ID NO: 158202 - protein, 180 aa, Zea Mays
MQNSPTPLDSGTTAPAEEPTGRRSGMGAMAAARGQKALVALPQLVKSLRSDPVSGSARLRHLPSLRRTFSLYDQINLIDSVPEDELRFQSYDDTGFKINNIKYEGSLLIVENKIMTWAPKTFSEITAESLSIFKVVHPIPEILILGCGRHIQPRNAASTYNILNEEGRPVAAAVLPYGVA

SEQ ID NO: 158203 - protein, 157 aa, Zea Mays
MQNSPTPLDSGTTAPAEEPTGRRSGMGAMAAARGQKALVALPQLVKSLRSDPVSGSARLRHLPSLRRTFSLYDQINLIDSVPEDELRFQSYDDTGFKINNIKYEGSLLIVENKIMTWAPKTFSEITAESLSIFKVVHPIPGNFVSANALLPSRILLC

SEQ ID NO: 158204 - protein, 501 aa, Zea Mays
MNSKATSEITSQAVTANSRRKTKIVCTIGPSTNTREMIWKLAETGMNVARLNMSHGDHQSHQKVIDLVKEYNAQNTDGNVIAIMLDTKGPEVRSGDVPEPIMLKEGQEFNFTIKRGVSTEDTVSVNYDDFINDVEAGDILLVDGGMMSLAVKSKTTDTVKCKVVDGGELKSRRHLNVRGKSATLPSITEKDWEDIKFGVENGVDFYAVSFVKDAKVIHELKDYLKSANADIHVIPKIESADSIPNLQSIIAASDGAMVARGDLGAELPIEDVPLLQAEIVQTCRSMEKPVIVATNMLESMIDHPTPTRAEVSDIAIAVREGADAIMLSGETAHGKYPLKAVKVMHTVALRTESSLYNPTTSPSLVASAQGLQNEDFSPSQLSKMFGSHATMMANTLRTPIIVFTQTGSMAVLLSHYRPSSTLFAFTNEERVKQRLALYQGVIPIHMQFSDDAEETFSRAISSLLKAQYVKKGDYVTLVQSGVTSIWREESTHHIQVRKVQV

SEQ ID NO: 158205 - protein, 535 aa, Zea Mays
MAAAAEIGGFAAARVAVATLRPAAHPAPAAAPQQPRRAVAAQSLRTTATEALTADLAGTTNGAVHARMNSKATSEITSQAVTANSRRKTKIVCTIGPSTNTREMIWKLAETGMNVARLNMSHGDHQSHQKVIDLVKEYNAQNTDGNVIAIMLDTKGPEVRSGDVPEPIMLKEGQEFNFTIKRGVSTEDTVSVNYDDFINDVEAGDILLVDGGMMSLAVKSKTTDTVKCKVVDGGELKSRRHLNVRGKSATLPSITEKDWEDIKFGVENGVDFYAVSFVKDAKVIHELKDYLKSANADIHVIPKIESADSIPNLQSIIAASDGAMVARGDLGAELPIEDVPLLQAEIVQTCRSMEKPVIVATNMLESMIDHPTPTRAEVSDIAIAVREGADAIMLSGETAHGKYPLKAVKVMHTVALRTESSLYNPTTSPSLVASAQGLQNEDFSPSQLSKMFGSHATMMANTLRTPIIVFTQTGSMAVLLSHYRPSSTLFAFTNEERVKQRLALYQGVIPIHMQFSDDAEETFSRAISSLLKHNM

SEQ ID NO: 158206 - protein, 324 aa, Zea Mays
MSVERVLLCHLSLDWEDIKFGVENGVDFYAVSFVKDAKVIHELKDYLKSANADIHVIPKIESADSIPNLQSIIAASDGAMVARGDLGAELPIEDVPLLQAEIVQTCRSMEKPVIVATNMLESMIDHPTPTRAEVSDIAIAVREGADAIMLSGETAHGKYPLKAVKVMHTVALRTESSLYNPTTSPSLVASAQGLQNEDFSPSQLSKMFGSHATMMANTLRTPIIVFTQTGSMAVLLSHYRPSSTLFAFTNEERVKQRLALYQGVIPIHMQFSDDAEETFSRAISSLLKAQYVKKGDYVTLVQSGVTSIWREESTHHIQVRKVQV

SEQ ID NO: 158207 - protein, 365 aa, Zea Mays
MAAAAEIGGFAAARVAVATLRPAAHPAPAAAPQQPRRAVAAQSLRTTATEALTADLAGTTNGAVHARMNSKATSEITSQAVTANSRRKTKIVCTIGPSTNTREMIWKLAETGMNVARLNMSHGDHQSHQKVIDLVKEYNAQNTDGNVIAIMLDTKGPEVRSGDVPEPIMLKEGQEFNFTIKRGVSTEDTVSVNYDDFINDVEAGDILLVDGGMMSLAVKSKTTDTVKCKVVDGGELKSRRHLNVRGKSATLPSITEKDWEDIKFGVENGVDFYAVSFVKDAKVIHELKDYLKSANADIHVIPKIESADSIPNLQSIIAASDGAMVARGDLGAELPIEDVPLLQRLSKHVEVWRNQSLSLQICWKA

SEQ ID NO: 158208 - protein, 428 aa, Zea Mays
MGCFQSKVAGPLPPNDAAALPADKPADPEAANGAADGGGDGDDKEAVKRAVPVFREFALAELRAATKGFSADLIVSESGEKAPNAVYRGRLDGGRLIAVKRFSRLSWPDPQQFLADAVGVGKVRHKRLVNLIGCCAEGDERLLVAEYMPNDTLSKHLFHWDKQPLPWEMRLRVAYFIAQALDHCNLENRKIYHDLNAYRVLFDEEGDPRLSSFGLMKNSRDGKSYSTNLAYTPPEFLRTGRVIPESVIYSYGTVLLDLLSGKHIPPSHALDLIRGKNILLLMDSSLEGQYANEDASKLVDLASKCLQFESRDRPNIKYLLSSVGPLQNQKEVASHVFMGITKATSVLPAIYSPLGKACAGMDLSAVHDILLKTGYKDDEGAENELSFQEWTQQVQEMLNTKKFGDIAFRDKDFKTAIDYYSKFFLLDE

SEQ ID NO: 158209 - protein, 428 aa, Zea Mays
MDFASRHAAAEAATSASAAAPAGVAEEPEYLARYLVVKHSWRGRYRRVLCIASSGVVTLDPTTLNLTNSYDARSEFDHAEALTATDEFTLAVRTDARSKFKPMRFSSPLRPGILTELHRLRPVQASFDFPVLHLRRRTHEWSSFKFKVTPVGVELLEASGDIRWCLDFRDMNSPAIVLLGDSYGRKTSEGGGFVLCPLYGRKSKAFMAASGTTNTAIISHMTKTAKLKIGLSLSVDNSQSMKADDFIAKRAMEAVGAAETRHGEWSVTRLRSAARGTANIESLSLGVGPRGGLGEQGDSVSRLLVLTSTSLVERRPENYEAAIVRPLSAVSAFVRFAEEPQMFAFEFNDGCPIHVYASTSRDNLLATVLDILQTQRQCAIPVLPRLTMPGHRIDPPCGVSHLQMPHHSSVDMESATMHIKTSGCSCLR

SEQ ID NO: 158210 - protein, 426 aa, Zea Mays
MDFASRHAAAEAATSASAAAPAGVAEEPEYLARYLVVKHSWRGRYRRVLCIASSGVVTLDPTTLNLTNSYDARSEFDHAEALTATDEFTLAVRTDARSKFKPMRFSSPLRPGILTELHRLRPVQASFDFPVLHLRRRTHEWSSFKFKVTPVGVELLEASGDIRWCLDFRDMNSPAIVLLGDSYGRKTSEGGGFVLCPLYGRKSKAFMAASGTTNTAIISHMTKTAKLKIGLSLSVDNSQSMKADDFIAKRAMEAVGAAETRHGEWSVTRLRSAARGTANIESLSLGVGPRGGLGEQGDSVSRLLVLTSTSLVERRPENYEAAIVRPLSAVSAFVRFAEEPQMFAFEFNDGCPIHVYASTSRDNLLATVLDILQTQCAIPVLPRLTMPGHRIDPPCGVSHLQMPHHSSVDMESATMHIKTSGCSCLR

SEQ ID NO: 158211 - protein, 403 aa, Zea Mays
MDFASRHAAAEAATSASAAAPAGVAEEPEYLARYLVVKHSWRGRYRRVLCIASSGVVTLDPTTLNLTNSYDARSEFDHAEALTATDEFTLAVRTDARSKFKPMRFSSPLRPGILTELHRLRPVQASFDFPVLHLRRRTHEWSSFKFKVTPVGVELLEASGDIRWCLDFRDMNSPAIVLLGDSYGRKTSEGGGFVLCPLYGRKSKAFMAASGTTNTAIISHMTKTAKLKIGLSLSVDNSQSMKADDFIAKRAMEAVGAAETRHGEWSVTRLRSAARGTANIESLSLGVGPRGGLGEQGDSVSRLLVLTSTSLVERRPENYEAAIVRPLSAVYASTSRDNLLATVLDILQTQRQCAIPVLPRLTMPGHRIDPPCGVSHLQMPHHSSVDMESATMHIKTSGCSCLR

SEQ ID NO: 158212 - protein, 1336 aa, Zea Mays
MGTFCKSTCFDSYPAGEIVTPTPRVKHILSSPRCLPHVAQAMLTGEPSIVEAAASLLKAIVTRNPKAMIRLYSTGAFYFALAYPGSNLLSIAQLFSATHTHQAFHGGEEAALSSSLPLAKRSVLGGLLPESLLYVLERSGPSAFAGAMVSDSDTPEIIWTHKMRAENLIRQVLQHLGDFPQKLAQHCHSLYDYAPMPPVTYPNLKDEMWCHRYYLRNLCDEIRFPNWPIVEHVEFLQSLLVMWREELTRRPMDLSEEEACKILEISLDDLVLVENGSSKRPSDLSSANSGNKTENIDEEKLKRQYRKLAIKYHPDKNPEGREKFVAVQKAYERLQASMQGLQGPQVWRLLLLLKAQCILYKRYGDVLEPFKYAGYPMLLNAVTVDKDDSNFLSSDRAPLLIAASELIWLTCASSSLNGEELIRDGGIPLLATLLSRCMCIVQPTTPANEPAARIVTNIMHTFSVLSQFESGRVEVLKFGGLVEDIVHCTELEFVPSAVDAALLTAANVSVSSELQNALLRAGFLWYVLPLLLQYDSTAEENEICEAHGVGARVQIAKNLHAVHATQALSKLSGLSSDDILYPDNKPAYNALKALLTPKLADMLRNHPPKELLSNLNSNLESPEIIWNSSTRGELLKFVDQQRASQGPDGSYDLTESQSFTYEALSKELIVGNVYLRVYNNQPDFEISDQEEFCIALLKFIAELVQQWNSVNLEETIHQHGSVIEASISENDQVSDSTIEGKMDNSSGKQSTDGDSEVIINLQCGLTSLQNLLTSNPGLAAVFATKERLVPLFECLALHVSPESSIPQICLSILSLLTKHAPCLEAMVAERMSLILLFQILHCNPPCRDGALAVLYSLASTPELAWAAAKHGGVVYILELMLPLQEEISMQQRAAAASLLGKLVGQPMHGPRVAITLARFLPDGLVSAIKDGPGEAVVSSLEQTTETPELVWTPAMAASLSAQLATMASDLYQEQMKGRVVDWDVPEQASGQHVMKDEPQVGGIYVRLFLKDPKFPLRNPKRFLEGLLDQYVSSVAATHYEAIATDPELPLLLSAALVSLLRVHPALADHVGYLGYVPKLVAAMAYEGRRETMASGQATSASKAEPSEHDNSAHSEATVQTPQERVRLSCLRVLHQLASSTTCAEAMAATSAGTPQVVPLLMKAIGWQGGSILALETLKRVVGAGNRARDALVAQGLKVGLVEVLLGILDWRVGGRQGLCNQMKWNESEASIGRVLAVEVLHAFATEGAHCARVREVLNSSDVWSAYKDQKHDLFLPSNAQSSAAGIAGLIESSSSRLTYALTAPPPQPSLVRLPSSSPSPPSAPANPSGRHSYQRL

SEQ ID NO: 158213 - protein, 1335 aa, Zea Mays
MGTFCKSTCFDSYPGEIVTPTPRVKHILSSPRCLPHVAQAMLTGEPSIVEAAASLLKAIVTRNPKAMIRLYSTGAFYFALAYPGSNLLSIAQLFSATHTHQAFHGGEEAALSSSLPLAKRSVLGGLLPESLLYVLERSGPSAFAGAMVSDSDTPEIIWTHKMRAENLIRQVLQHLGDFPQKLAQHCHSLYDYAPMPPVTYPNLKDEMWCHRYYLRNLCDEIRFPNWPIVEHVEFLQSLLVMWREELTRRPMDLSEEEACKILEISLDDLVLVENGSSKRPSDLSSANSGNKTENIDEEKLKRQYRKLAIKYHPDKNPEGREKFVAVQKAYERLQASMQGLQGPQVWRLLLLLKAQCILYKRYGDVLEPFKYAGYPMLLNAVTVDKDDSNFLSSDRAPLLIAASELIWLTCASSSLNGEELIRDGGIPLLATLLSRCMCIVQPTTPANEPAARIVTNIMHTFSVLSQFESGRVEVLKFGGLVEDIVHCTELEFVPSAVDAALLTAANVSVSSELQNALLRAGFLWYVLPLLLQYDSTAEENEICEAHGVGARVQIAKNLHAVHATQALSKLSGLSSDDILYPDNKPAYNALKALLTPKLADMLRNHPPKELLSNLNSNLESPEIIWNSSTRGELLKFVDQQRASQGPDGSYDLTESQSFTYEALSKELIVGNVYLRVYNNQPDFEISDQEEFCIALLKFIAELVQQWNSVNLEETIHQHGSVIEASISENDQVSDSTIEGKMDNSSGKQSTDGDSEVIINLQCGLTSLQNLLTSNPGLAAVFATKERLVPLFECLALHVSPESSIPQICLSILSLLTKHAPCLEAMVAERMSLILLFQILHCNPPCRDGALAVLYSLASTPELAWAAAKHGGVVYILELMLPLQEEISMQQRAAAASLLGKLVGQPMHGPRVAITLARFLPDGLVSAIKDGPGEAVVSSLEQTTETPELVWTPAMAASLSAQLATMASDLYQEQMKGRVVDWDVPEQASGQHVMKDEPQVGGIYVRLFLKDPKFPLRNPKRFLEGLLDQYVSSVAATHYEAIATDPELPLLLSAALVSLLRVHPALADHVGYLGYVPKLVAAMAYEGRRETMASGQATSASKAEPSEHDNSAHSEATVQTPQERVRLSCLRVLHQLASSTTCAEAMAATSAGTPQVVPLLMKAIGWQGGSILALETLKRVVGAGNRARDALVAQGLKVGLVEVLLGILDWRVGGRQGLCNQMKWNESEASIGRVLAVEVLHAFATEGAHCARVREVLNSSDVWSAYKDQKHDLFLPSNAQSSAAGIAGLIESSSSRLTYALTAPPPQPSLVRLPSSSPSPPSAPANPSGRHSYQRL

SEQ ID NO: 158214 - protein, 1416 aa, Zea Mays
MRTIAEEDAIAAESMRDAALKDGALLRHLLNAFFFPAGERRDVSRQLVALWADSYQPALDLLSRILPPGLVAYLHTRSDEDSRSQYDEAPLSRRQRRILQQRRVHGTKTMAVQEQGIPPNGVEDGEPFRHISAGTYGGADVHQRHVGLYSSTHSPSPGINIDPSHTVSVPHGSVPEALSENNQQIEAPQLDSHVYSVDSNANGNLVSSLHSDFSVPAQVVVENTPVGSGRLLCNWYGFWRAFSLDHNRADLIWNERTRGELRAALQAEVHNLDVEKERTDDIVLGSSVTEDAAGSDNLPRISWNYAEFSVSYPSLFKEVCVGQYYLRLLLESGSNYRAQDFPLRDPVAFFRALYHRFLCDADIGLTVDGAVPDELGSSDDWCDMGRLDGFGGGGGSSVRELCSRAMAIVYEQHYKVIGPFDGTAHITVLLDRTDDRVLRHRLLLLLKALMNDLSNVEACVLVGGCVLAVDLLTVAHETSERTAIPLQSNLIAATAFMEPSKEWMYIDKDGTQVGPLEKDAIRRLWSKKSIDWTIKCWASGMSDWKRLRDIRELRWALSVRVPVLTPTQIGDTALSILHSMASARSDLDDAGEIVTPTPRVKHILSSPRCLPHVAQAMLTGEPSIVEAAASLLKAIVTRNPKAMIRLYSTGAFYFALAYPGSNLLSIAQLFSATHTHQAFHGGEEAALSSSLPLAKRSVLGGLLPESLLYVLERSGPSAFAGAMVSDSDTPEIIWTHKMRAENLIRQVLQHLGDFPQKLAQHCHSLYDYAPMPPVTYPNLKDEMWCHRYYLRNLCDEIRFPNWPIVEHVEFLQSLLVMWREELTRRPMDLSEEEACKILEISLDDLVLVENGSSKRPSDLSSANSGNKTENIDEEKLKRQYRKLAIKYHPDKNPEGREKFVAVQKAYERLQASMQGLQGPQVWRLLLLLKAQCILYKRYGDVLEPFKYAGYPMLLNAVTVDKDDSNFLSSDRAPLLIAASELIWLTCASSSLNGEELIRDGGIPLLATLLSRCMCIVQPTTPANEPAARIVTNIMHTFSVLSQFESGRVEVLKFGGLVEDIVHCTELEFVPSAVDAALLTAANVSVSSELQNALLRAGFLWYVLPLLLQYDSTAEENEICEAHGVGARVQIAKNLHAVHATQALSKLSGLSSDDILYPDNKPAYNALKALLTPKLADMLRNHPPKELLSNLNSNLESPEIIWNSSTRGELLKFVDQQRASQGPDGSYDLTESQSFTYEALSKELIVGNVYLRVYNNQPDFEISDQEEFCIALLKFIAELVQQWNSVNLEETIHQHGSVIEASISENDQVSDSTIEGKMDNSSGKQSTDGDSEVIINLQCGLTSLQNLLTSNPGLAAVFATKERLVPLFECLALHVSPESSIPQICLKGWSSCCTIFFSQHTRACLGCCQAWWCCLHS

SEQ ID NO: 158215 - protein, 486 aa, Zea Mays
MRINVCGCRGSTVHLHHLSSSSSPPPLPFHLLPPGDSSSSLPRRSIGPPIDRARGRRFQSGVVSIRSGSLPVWVGAMAAMDASADKNAVFRKLRAKSDNKMCFDCNAKNPTWASVTYGVFLCIDCSAAHRSLGVHVSFVRSTNLDSWTPEQLKMMVYGGNNRAQAFFKQHGWTDGGKIEAKYTSRAADLYRQLLAKDVAKSSTEDGNNSWPSSPVAASQAPNQAAAFPDLKLTEVSKENVSEKKDSEIVRSPRAPTHSFKKPIGAKKPGNKTGGLGARKLTSKPNESLYEQKPEEPAPVLPSSVIESTTTRSKSHTSRFDYVENAPALKNGNSSEGNHMSGHVAPPMSSNFFAEFGMDSGYQKKSTSSSSKVQIEESREARQKFSKAKSISSSQFFGDQASFEKDAQVSLQKFSGSSAISSADLFGHPANNSSVDLSASDLINRISFQATQDLSSLKNMAGETGKNGWLLPSTRVTNWPGLACRSV

SEQ ID NO: 158216 - protein, 339 aa, Zea Mays
MVLALIRDAFGPHDLKIEEQTKRFELKGEIRKHIDVRVKTSEHHVEVSLADLHGYEKYIITTLLSESIPSPSSVCDHTNCRVIVIHDADKLSFDLQHYIGWFLGRYAGCNKIIFCCSDASNLEAIKHLCKVVTLQPPSFDEIINVLEYIATQESIDLPRDLARRITVGANNNLRQTIRSFEATWKANYPFIDGQVILTGWEEEISNVASNIMEEPSPKQLFLVRGKIRKMIEHDVSPHFIFSHLVAELKRDKDEDFQHSVDELASDLNHFQDSKGQCKGNKSREANFKTRYMNIEGFTAEAHDHGETIQCFIKIEEFTVRFLSFYRSLVAKNSNRGSAQ

SEQ ID NO: 158217 - protein, 228 aa, Zea Mays
MGAPLATVAAFNAVLFSVRGQMEAFLRSEPGVPLTVKQQVVAGAGAGIAVSFLACPTELIKCRLQAQSSLAEAATASGVALPKGPIDVAKHVVRDAGAKGLFKGLVPTMGREVPGNALMFGVYEATKQYLAGGPDTSGLGRGSQVLAGGLAGAAFWLSVYPTDVVKSVIQVDDYKKPKYSGSLDALRKIVAADGVKGLYKGFGPAMARSVPANAATFVAYEITRSALG

SEQ ID NO: 158218 - protein, 166 aa, Zea Mays
MLQAQSSLAEAATASGVALPKGPIDVAKHVVRDAGAKGLFKGLVPTMGREVPGNALMFGVYEATKQYLAGGPDTSGLGRGSQVLAGGLAGAAFWLSVYPTDVVKSVIQVDDYKKPKYSGSLDALRKIVAADGVKGLYKGFGPAMARSVPANAATFVAYEITRSALG

SEQ ID NO: 158219 - protein, 1613 aa, Zea Mays
MHGWRGAEGCDVRRRRLVRLMWPAARVEAEAPPPPAQGPATSPSGSSATHPRTTYRPESSAQKQECIDLPCPVSSDSFVKDGREIRVGDCALFRAVDVPPFIGLIRWIEKKEEGYPKLRVSWLYRPNDVKLNKGIQLNAAPNEIFYSFHQDEASAVSLLHPCKVAFLRKGVELPAGIASFVCWRVYDIDNKCLWWLTDRDYINERQEEVNRLLYRTRLEMRAALQSGGRSPKRLNSPSASQQLKTASDGTQNGGLSRGKKRERSEQGVDPAKRDRDRLLKVDDGEPGSFNLDDIKSEIAKITEKGGLPNAEAVAKLVHLMQLDRTEQKIDHSGRVILADVIAATDSPDCLGRFVQSRGLPVLDSWLQEAHKGKSGDGSSPKEADKPIDELLLALLRALAKLPINLSALQSCSIGKSVNHLRSHKNLEIQKKAKCLVENWKKRVDAEMKSNDVKPLVSGQSVSWSGKAGFQEISNVGTKRGGSSENSPKNSVPTLSSSKVLTDKPGGTDAAAKLNPGVSALSNLQHVQSTHVTTNLKEQPCKSTGGTGCPELPTVKEEKSSSSSQSPNNSQSISSEPSKDARSSTAASGGASKTSGSSSRSHRRANNGLVSGNLKEPSVGRSVSLDRSLLQDKSSQTGTASEKGIDMPSDHGNNHRLIVRFPNPGRSPARSASAGSFDDPSVTGGRASSPVVADRHDQTERRVKVKTENSRPHLASDANAESWHSNDIKGATGSEEGDKSPCAILDDDNSRTPDHSVKDAHASRAACSSYMNEKGVSETKVGTSFSPMNALIEIKYSEASHSLQAGDDTAMNLLASVAGEISKSELASSPSTSVKKLVCEGVNTGKVKVESDMGPSHPGQADAKKVAMGNEVKNDACLVPKEEQHQTAPSPELADSKAVKSSAKIEIHEGHANKCNSQHASIDSKGENRDGCTAHGKVEDGSTNKDGAMESAFGSQRSLVVSSKNSRLVLAGESSLSAADKQTQGLLKSTNHKHLLSVSDNPGAFDRHDSMAGKLDLMAAEVKKADVVGNSSVLQNDTEKKEHVSPSSADVPKLVPAASPVGVANGNNEMKESNGSSSESNSHVKSEGVNSQQSEQSAKQSSKKSSDGVCGKEDHVLSDEEGSSLAAHTKSNATAKLDFDLNEGIPGDDGHQSETTASPVVCSSAIHLTGLLPFTSPTTSGLPPAPITVAAPAKGPFVPPENLLRAKPEIGWKGSAATSAFRPAEPRKILEMPAATRDIPVSHAAGKQSRPTLGFDLNVADDQALEEDFPQSSAQTTCSESGNTRSRDGSSRSAGIELDLNRADEVADNGQFVPNASHRVEVPLFSTRSLPRVLSNAGANSSRDFDLNSGPDLYDVGTEPAPRSLPSKNTSSIQFLPQVPVRMNSDAMSNNISPWLVSTSPCGPVAIQSFLPSREQPYPLEAAPGAQRIIAPTADGGQFGGDPCRPPVISTSPAMVFHPPAYQYAGFSFPPSVHLQTPAFSIGSATFNNSASAGVPYFPTLSSSLVGPAGALPSQHSRQYAINLAEGSSSSVRDGNRKWESQGLDLNSGPGSIDLEGKDERMPLPVRQNLIPPLHGFVEDQGRIYQMPVVGTKRKEPDGSWDSERSTYKQLPWQ

SEQ ID NO: 158220 - protein, 1274 aa, Zea Mays
MRAALQSGGRSPKRLNSPSASQQLKTASDGTQNGGLSRGKKRERSEQGVDPAKRDRDRLLKVDDGEPGSFNLDDIKSEIAKITEKGGLPNAEAVAKLVHLMQLDRTEQKIDHSGRVILADVIAATDSPDCLGRFVQSRGLPVLDSWLQEAHKGKSGDGSSPKEADKPIDELLLALLRALAKLPINLSALQSCSIGKSVNHLRSHKNLEIQKKAKCLVENWKKRVDAEMKSNDVKPLVSGQSVSWSGKAGFQEISNVGTKRGGSSENSPKNSVPTLSSSKVLTDKPGGTDAAAKLNPGVSALSNLQHVQSTHVTTNLKEQPCKSTGGTGCPELPTVKEEKSSSSSQSPNNSQSISSEPSKDARSSTAASGGASKTSGSSSRSHRRANNGLVSGNLKEPSVGRSVSLDRSLLQDKSSQTGTASEKGIDMPSDHGNNHRLIVRFPNPGRSPARSASAGSFDDPSVTGGRASSPVVADRHDQTERRVKVKTENSRPHLASDANAESWHSNDIKGATGSEEGDKSPCAILDDDNSRTPDHSVKDAHASRAACSSYMNEKGVSETKVGTSFSPMNALIEIKYSEASHSLQAGDDTAMNLLASVAGEISKSELASSPSTSVKKLVCEGVNTGKVKVESDMGPSHPGQADAKKVAMGNEVKNDACLVPKEEQHQTAPSPELADSKAVKSSAKIEIHEGHANKCNSQHASIDSKGENRDGCTAHGKVEDGSTNKDGAMESAFGSQRSLVVSSKNSRLVLAGESSLSAADKQTQGLLKSTNHKHLLSVSDNPGAFDRHDSMAGKLDLMAAEVKKADVVGNSSVLQNDTEKKEHVSPSSADVPKLVPAASPVGVANGNNEMKESNGSSSESNSHVKSEGVNSQQSEQSAKQSSKKSSDGVCGKEDHVLSDEEGSSLAAHTKSNATAKLDFDLNEGIPGDDGHQSETTASPVVCSSAIHLTGLLPFTSPTTSGLPPAPITVAAPAKGPFVPPENLLRAKPEIGWKGSAATSAFRPAEPRKILEMPAATRDIPVSHAAGKQSRPTLGFDLNVADDQALEEDFPQSSAQTTCSESGNTRSRDGSSRSAGIELDLNRADEVADNGQFVPNASHRVEVPLFSTRSLPRVLSNAGANSSRDFDLNSGPDLYDVGTEPAPRSLPSKNTSSIQFLPQVPVRMNSDAMSNNISPWLVSTSPCGPVAIQSFLPSREQPYPLEAAPGAQRIIAPTADGGQFGGDPCRPPVISTSPAMVFHPPAYQSSIFSNSFLLSCWASRSVAFPTFKAVCHKSC

SEQ ID NO: 158221 - protein, 94 aa, Zea Mays
MVLLPAAYSSDLAIVCCSPGRGRRVLSPAMELGPGFSAGRASSSSIFLHARSVVPARAAMKFSSLALLCAKFFARHDVSSFRAEFLSFVPVERL

SEQ ID NO: 158222 - protein, 1327 aa, Zea Mays
MPSKRRRLLNQDTRLSRAEYLDDNNSCVTGISAEGKLLVDKKKLSISASSRDLTAKANSMANHNKLRNQCVDESKKGSDGCEMHPSSSGRFSPVDSLVMTKKLLRTQSSVSALSRLSPNRQVHEFGKAVDNLSHQPCEKASLLKNNEEPRAGQLNPCIAGENNHGTLAGYSNRHADKNDFSLNDLDNGTLCSKDEIQEHGDITSNDNDKKNVCVKQDSDQDCSMDISNDRKLNTQHDVMTDCGNSEGLIDVNVCDICGDVGREYLLATCTRCLEGAEHTYCMRVKMEKVPVGEWFCEECQLKEDQNNTRSNYGNTAVNVTEGKNQRTESQSKLKALQIVVPDLDAPQVTHSALTADQCDGSKSLHLTSADTQTRLKDTTTAAERLDMKNKKTLSVARCNKLQVLTSDLDTRPHSYGKPTSGVYNKKSRSSDFLLNHKKLQVSTDMESPLSSEGLQSPPISSKRHVESMSSPKPRLFKTGSLGKHDVISRDNSFKKSNKGGLTSVDNVPVRTTQAAKSSETLSRSYSMGNMVNAKAPIPSARGLLSKQLSFNSTNNGPKVKQLADKMSSKLRPAEHSPRDPRDKEPIKKIVQSGSFKREGSDSVDVGSSKQKQTFHLSRDEKPGVLKPIKEKNLTERRASFSLKKPNIPSSPRSDSCMKSGERKNDQHISGTNILKSSKRPGYAEKNLRYDLSRTDNGNQDVTVHPKPMEVSVNNVNIAPNEHAEVVPTMSTAMTRESNLQDVPRESTSDDLAPKVVCCQQKLLENTGDDSCKTLEVVQDSGDILSATPRGLQMAHNLYPYDNKLDKPDLKKEAFADQSSALGNPLKDFVIPEQSYIWQGSFEVSGHGNSPEMFNGFQAYLSTCASSKVREVGEQLPDKIQLAEVPRHSSWPLQFNEVNPTEDNIALFFFAKDVESYERAYGKLLDNMLLGDLSLKANIDNMELLIFPSDKLPERIQRWNGLLFFWGIFYARKASSPLELPTNNCPLEQTNGPVIQHDMGSSKALQPLGIDLNECPNDDISDPALSLGSESEKFGASVDYNVLSESKHEDRNLNASEVHHEETAGTRQIIWGQPSVAPTVTNLPTISTGVHDIVPDYSAAAKDSTGTAGGNKMEKADQNEALFCFSQQPGAIGSISHEIKLKKHGLLPSHCHFSGSKICDDQTKSTPSSDMGSLDSHLTNKRQKTYGKHSTCIFGDEMPPIKCLSKIHPLPAGQDNPVDVLHCHRCPSDPVSLKKTVPDHIINVLSSDDEDSPEPSTSLNKASLKADEGSSALLLLSLSMVATKHNLSGSDIVDDEPLSLSLGFPSVVDGSEDQEMKQFLPEKPGINT

SEQ ID NO: 158223 - protein, 1097 aa, Zea Mays
MRVKMEKVPVGEWFCEECQLKEDQNNTRSNYGNTAVNVTEGKNQRTESQSKLKALQIVVPDLDAPQVTHSALTADQCDGSKSLHLTSADTQTRLKDTTTAAERLDMKNKKTLSVARCNKLQVLTSDLDTRPHSYGKPTSGVYNKKSRSSDFLLNHKKLQVSTDMESPLSSEGLQSPPISSKRHVESMSSPKPRLFKTGSLGKHDVISRDNSFKKSNKGGLTSVDNVPVRTTQAAKSSETLSRSYSMGNMVNAKAPIPSARGLLSKQLSFNSTNNGPKVKQLADKMSSKLRPAEHSPRDPRDKEPIKKIVQSGSFKREGSDSVDVGSSKQKQTFHLSRDEKPGVLKPIKEKNLTERRASFSLKKPNIPSSPRSDSCMKSGERKNDQHISGTNILKSSKRPGYAEKNLRYDLSRTDNGNQDVTVHPKPMEVSGKDAYGVKTSNPLFRSQCAKKYRSNDVEDDDLPISVNNVNIAPNEHAEVVPTMSTAMTRESNLQDVPRESTSDDLAPKVVCCQQKLLENTGDDSCKTLEVVQDSGDILSATPRGLQMAHNLYPYDNKLDKPDLKKEAFADQSSALGNPLKDFVIPEQSYIWQGSFEVSGHGNSPEMFNGFQAYLSTCASSKVREVGEQLPDKIQLAEVPRHSSWPLQFNEVNPTEDNIALFFFAKDVESYERAYGKLLDNMLLGDLSLKANIDNMELLIFPSDKLPERIQRWNGLLFFWGIFYARKASSPLELPTNNCPLEQTNGPVIQHDMGSSKALQPLGIDLNECPNDDISDPALSLGSESEKFGASVDYNVLSESKHEDRNLNASEVHHEETAGTRQIIWGQPSVAPTVTNLPTISTGVHDIVPDYSAAAKDSTGTAGGNKMEKADQNEALFCFSQQPGAIGSISHEIKLKKHGLLPSHCHFSGSKICDDQTKSTPSSDMGSLDSHLTNKRQKTYGKHSTCIFGDEMPPIKCLSKIHPLPAGQDNPVDVLHCHRCPSDPVSLKKTVPDHIINVLSSDDEDSPEPSTSLNKASLKADEGSSALLLLSLSMVATKHNLSGSDIVDDEPLSLSLGFPSVVDGSEDQEMKQFLPEKPVSINFPSGLKIIFMRNRAFG

SEQ ID NO: 158224 - protein, 1514 aa, Zea Mays
MDEGLSASEGKILVEASSTVTTRMYQDGRRAESARCPRWELGPEAWPIGGGGGRVMRAPQERSMRDLYDRTRHKDMAAPEESVEGCGGGCAEGWEQRALASKMEDKTVVRKRLISSNNTRVKAESGTCNVCYAPCSSCLHPRSRFEDSNVECASSQTCSTRSEVKNNLLVHREKGLCSKGDNDDEFSATSDHALYSVTGRNKLVATSSIADDLSEVDMPSKRRRLLNQDTRLSRAEYLDDNNSCVTGISAEGKLLVDKKKLSISASSRDLTAKANSMANHNKLRNQCVDESKKGSDGCEMHPSSSGRFSPVDSLVMTKKLLRTQSSVSALSRLSPNRQVHEFGKAVDNLSHQPCEKASLLKNNEEPRAGQLNPCIAGENNHGTLAGYSNRHADKNDFSLNDLDNGTLCSKDEIQEHGDITSNDNDKKNVCVKQDSDQDCSMDISNDRKLNTQHDVMTDCGNSEGLIDVNVCDICGDVGREYLLATCTRCLEGAEHTYCMRVKMEKVPVGEWFCEECQLKEDQNNTRSNYGNTAVNVTEGKNQRTESQSKLKALQIVVPDLDAPQVTHSALTADQCDGSKSLHLTSADTQTRLKDTTTAAERLDMKNKKTLSVARCNKLQVLTSDLDTRPHSYGKPTSGVYNKKSRSSDFLLNHKKLQVSTDMESPLSSEGLQSPPISSKRHVESMSSPKPRLFKTGSLGKHDVISRDNSFKKSNKGGLTSVDNVPVRTTQAAKSSETLSRSYSMGNMVNAKAPIPSARGLLSKQLSFNSTNNGPKVKQLADKMSSKLRPAEHSPRDPRDKEPIKKIVQSGSFKREGSDSVDVGSSKQKQTFHLSRDEKPGVLKPIKEKNLTERRASFSLKKPNIPSSPRSDSCMKSGERKNDQHISGTNILKSSKRPGYAEKNLRYDLSRTDNGNQDVTVHPKPMEVSGKDAYGVKTSNPLFRSQCAKKYRSNDVEDDDLPISVNNVNIAPNEHAEVVPTMSTAMTRESNLQDVPRESTSDDLAPKVVCCQQKLLENTGDDSCKTLEVVQDSGDILSATPRGLQMAHNLYPYDNKLDKPDLKKEAFADQSSALGNPLKDFVIPEQSYIWQGSFEVSGHGNSPEMFNGFQAYLSTCASSKVREVGEQLPDKIQLAEVPRHSSWPLQFNEVNPTEDNIALFFFAKDVESYERAYGKLLDNMLLGDLSLKANIDNMELLIFPSDKLPERIQRWNGLLFFWGIFYARKASSPLELPTNNCPLEQTNGPVIQHDMGSSKALQPLGIDLNECPNDDISDPALSLGSESEKFGASVDYNVLSESKHEDRNLNASEVHHEETAGTRQIIWGQPSVAPTVTNLPTISTGVHDIVPDYSAAAKDSTGTAGGNKMEKADQNEALFCFSQQPGAIGSISHEIKLKKHGLLPSHCHFSGSKICDDQTKSTPSSDMGSLDSHLTNKRQKTYGKHSTCIFGDEMPPIKCLSKIHPLPAGQDNPVDVLHCHSVVDGSEDQEMKQFLPEKPVSINFPSGLKIIFMRNRAFG

SEQ ID NO: 158225 - protein, 153 aa, Zea Mays
MYAIHSLHLRSLSPITLVQSSAAQSPAAHRLLSLCSASAVSTTQPHPGSWRSSSLAVGLVSLSQARRHLGAAHTSCSPRHGMDATVSVPVSCSSHHRLVGCALCRATPSPLLTVKYGVLQPLLQPRTTVLHHTNCLPTPCANLHVPRHTPLVH

SEQ ID NO: 158226 - protein, 75 aa, Zea Mays
MAWMPLYLFLCHAQAITGWWVVRYVELRQVRSSPSSTESYSPSSNLAPQSSTILTASLLLVLISTSRAIRHWYTR

SEQ ID NO: 158227 - protein, 53 aa, Zea Mays
MKQFKVVKKGVILICSGLIRYVVQKGGPGAAVEPTVCNRKVPGSSPSLCILCG

SEQ ID NO: 158228 - protein, 96 aa, Zea Mays
MKMTRLAQHDTLLCGVPLRVGNPSFKGDLHCHEPHRTSHARMMSRLEDGIFLNGGRQARVLPLQCRQHPRGATLSPPVPFAVPPPSLRSCEKVLGK

SEQ ID NO: 158229 - protein, 378 aa, Zea Mays
MAPLFAAASHASLLPLSSLDRPAAGHLVRGTLRPHTSSLRLRRPPGATGRGRGRGRGGIPDEWGERSPPDNPEPPAQPDPPIDEDEWGRDDSAEGNSRPIVVDEWGEPGVPEPEPPSAADPPSPSADDDWGKEPEAPAPAPAPAAEEDEQEVKREELKRCLVDTVYGSDLGFRASTEVRGEVVELVTQLEAVNPTTAPVESPDLLDGNWILIYTAYSELLPILAAGATPLVKVKQISQEIDSKIMTIVNASTLTTPFASFSFSATASFEVQSPSRIEEGSFQPPTISSSVDLPQQVDIFGQKISLGPVQQALNPLQQAFASIAGSISGQPPLKVPIPGNNRARSWLLTTYLDKDLRISRGDGGLFILAKEGSPLLDQL

SEQ ID NO: 158230 - protein, 311 aa, Zea Mays
MVGPFLLLLVAHAVLMDHLPEEIREDSLVSWHLGVAREVVDVNDEIAVAGADVADHVEVEELQAQRAAEAARDLVDECGGRHDGVLETLFAVVLLRRALSGEVGDLGEGDGSLGRCVILGGHVGQATALDASDVAADDVDLEDDAAMESEVGERGSVVDDDLAGDTESAVLVGGVVELGDDLEHGDAVVEAVDGVGRVDDGDGRVARGEGHELGAPVVSVELVDEEVEGPLLCQGLRRIHGDEVHAPRRRLGHQRRLDEALLLLRRERVTDDVARGVGDAGGGLGGGVGGHRVGFGRNRSMEIEICWEIRW

SEQ ID NO: 158231 - protein, 175 aa, Zea Mays
MVFVSLKDERNKGDDEFINKPLPYYGNLATIFGNSVASGRFAKTSNDPLAVDDGEDVQKEGCIATSSAVHENDPAATSATKPSKKAKREDNGTEFLVEAFQHATQTLASAIKEAANKPLPAGLFEAVDNIPGFEIAHKSKYYSHLVSNPDIAHAFMDVPLLYKVSMITDFVNEKF

SEQ ID NO: 158232 - protein, 191 aa, Zea Mays
MCPGSVESSSAAAAGKSVCVMDAAGPLGHALVDRLLRRGYTVHAATYARDGEEGAAAAALLGHLSCAADACRHRLKLFRADPFDYHAIADAVRGCAGVFCMFNTPDDQAQCDESTVETEVRAAHNVLEACAQTDAMERVVFTSSVTAVVWSGAGAGVGAHREEVADERSWSDLAFCRKFKVRTSERLAVFF

SEQ ID NO: 158233 - protein, 226 aa, Zea Mays
MCPGSVESSSAAAAGKSVCVMDAAGPLGHALVDRLLRRGYTVHAATYARDGEEGAAAAALLGHLSCAADACRHRLKLFRADPFDYHAIADAVRGCAGVFCMFNTPDDQAQCDESTVETEVRAAHNVLEACAQTDAMERVVFTSSVTAVVWSGAGAGVGAHREEVADERSWSDLAFCRKFKRRTEGDTTEDPGQEAQQAHAGVRQRGIRGAGLGRNCRARPQMMRCD

SEQ ID NO: 158234 - protein, 192 aa, Zea Mays
MCPGSVESSSAAAAGKSVCVMDAAGPLGHALVDRLLRRGYTVHAATYARDGEEGAAAAALLGHLSCAADACRHRLKLFRADPFDYHAIADAVRGCAGVFCMFNTPDDQAQCDESTVETEVRAAHNVLEACAQTDAMERVVFTSSVTAVVWSGAGAGVGAHREEVADERSWSDLAFCRKFKTSKLLWILRFSW

SEQ ID NO: 158235 - protein, 197 aa, Zea Mays
MCPGSVESSSAAAAGKSVCVMDAAGPLGHALVDRLLRRGYTVHAATYARDGEEGAAAAALLGHLSCAADACRHRLKLFRADPFDYHAIADAVRGCAGVFCMFNTPDDQAQCDESTVETEVRAAHNVLEACAQTDAMERVVFTSSVTAVVWSGAGAGVGAHREEVADERSWSDLAFCRKFKEKSRWSKRSRLTLRLST

SEQ ID NO: 158236 - protein, 72 aa, Zea Mays
MGHMLANHQIPWKFGFCLYRSNQQMPTHHKKHFRKKCPELVSIRYHHQLEVSTNFRRRPSRVHNVYESLGLV

SEQ ID NO: 158237 - protein, 102 aa, Zea Mays
MRAMVSRPSRIQKAEVVYPAGCCECELCPHLQRKCEMMMLCAEALPPSLSCPGIQHSNFPYGIVKEGGLFFLLQLAAQLVKVASSDGKMAVSIAGHDDSNCV

SEQ ID NO: 158238 - protein, 55 aa, Zea Mays
MVLKLWFKKTVFLNRLSGVTEPIGVIVQPRQVEMGRSFLKISKDRWVGCFEKEYF

SEQ ID NO: 158239 - protein, 78 aa, Zea Mays
MVFPPSRLPCSLPMAFPLDVGDLFPTVQANVLSLPAAAPWWLSSSTSRLRSLGHDVVHPANHWCHTSRVMCSPKCLNM

SEQ ID NO: 158240 - protein, 99 aa, Zea Mays
MDTTTCSPSWWPSPSSCSRPLFSTSARISSSNPHGKCSFPPCSSTLVVVEQHVALAQPRSRRCSPRGTWYSHPWYQNMTWEEKGTCSKLQKPSSRNRCS

SEQ ID NO: 158241 - protein, 412 aa, Zea Mays
MSNLEWIDKIPECPVYCPTKEEFEDPIAYIQKISPEAAKYGICKIVSPVCASVPAGVVLMKEHPNFKFMTRVQPLRLAEWAEDDTVTFFMSGRKYTFRDYEKMANKVFSKKYSSSSCLPARYVEEEFWREIAFGKMDFVEYACDVDGSAFSSSPHDQLGKSNWNLKNFSWLPNSVLRLLQTPIPGVTDPMLYIGMLFSMFAWHVEDHYLYSINYHHCGAFKTWYGIPGDAAPGFERVASQYVYNKDILIGDGEDAAFDVLLGKTTMFPPNVLLDHNVPVYKAVQRPGEFVITFPRSYHAGFSHGFNCGEAVNFAIGDWFPLGSLASKRYALLNRTPLLAHEELLCRSAVLLSQKLLNCDPRSLDKLEHPYSQNCVKSCFVRLIRFQRRARGLLAKMGSEICYKPKTFPKSVL

SEQ ID NO: 158242 - protein, 55 aa, Zea Mays
MFSFLILVSKNSYIYDNNMNPPNDSIDARLELFLVWCKVFSLSLLNIYHVPHHHA

SEQ ID NO: 158243 - protein, 53 aa, Zea Mays
MSYFCVMQKNKNRECNGKWKVKALLIDNLGKDGMELKFWWSVKCVELKSYILS

SEQ ID NO: 158244 - protein, 106 aa, Zea Mays
MLGCSYAKMFWQAIGIQILADLEVSQLHRVERPTNIPKAEFSSFIHLCCWQLWKRRNALVFRQEAASLKCLLQRCGNEAEIWCYSHRSRELGVRAAWQMVFSSARQ

SEQ ID NO: 158245 - protein, 118 aa, Zea Mays
MAAVVRGVLRGIKEKGLTNFIRDVRDEGYFKCLLDGNLLQTKIHNIGATLVGVDKFGNKYYEKLHDTQYGRHRWVEYAEKGRYNASQVPAEWHGWLHHITDSTGDKAVSRPSYMRHAC

SEQ ID NO: 158246 - protein, 141 aa, Zea Mays
MQHMQAWIHFISKCLLDGNLLQTKIHNIGATLVGVDKFGNKYYEKLHDTQYGRHRWVEYAEKGRYNASQVPAEWHGWLHHITDSTGDKLLNQKTARYLVEHKQNYSGEGEELIYHSKGHALNPGQRDWTRYQPWEPKKEQA

SEQ ID NO: 158247 - protein, 297 aa, Zea Mays
MAFRVFHGRDGVVPLSEGSLAQIEKPLPKPNPEFNPLAAKAATISLSAFGGFFSFGDFSNKRNKKNSNKKNPNNLPQNKGQPNNNNHEALSNEWLEMGQCPLAKSYRALSGIVPLVAKMMTPPAGMKLKCPPAVVAARAALSRTAFAKGLRPQPLPTKILVIALLGMAANVPLGIWREHTQKFSLQWFAAVHAAVPFIGMLRKSVLMPKTAMALTIAASILGQTIGSRAERIRLKRAAAAKLARESHGDAADYIKAPMSLKTGNHTVQFWDPLSLRAESTVAAGTTAVLVPAISAFN

SEQ ID NO: 158248 - protein, 327 aa, Zea Mays
MSLQVFPSRPSTSLFPGAKGPIFEDGPNFDMAFRVFHGRDGVVPLSEGSLAQIEKPLPKPNPEFNPLAAKAATISLSAFGGFFSFGDFSNKRNKKNSNKKNPNNLPQNKGQPNNNNHEALSNEWLEMGQCPLAKSYRALSGIVPLVAKMMTPPAGMKLKCPPAVVAARAALSRTAFAKGLRPQPLPTKILVIALLGMAANVPLGIWREHTQKFSLQWFAAVHAAVPFIGMLRKSVLMPKTAMALTIAASILGQTIGSRAERIRLKRAAAAKLARESHGDAADYIKAPMSLKTGNHTVQFWDPLSLRAESTVAAGTTAVLVPAISAFN

SEQ ID NO: 158249 - protein, 318 aa, Zea Mays
MDSAFRRALNEPMCLEETVVQQGIERCPFLRNINEPTSFSFSSVNFPIPARGAKGPIFEDGPNFDMAFRVFHGRDGVVPLSEGSLAQIEKPLPKPNPEFNPLAAKAATISLSAFGGFFSFGDFSNKRNKKNSNKKNPNNLPQNKGQPNNNNHEALSNEWLEMGQCPLAKSYRALSGIVPLVAKMMTPPAANVPLGIWREHTQKFSLQWFAAVHAAVPFIGMLRKSVLMPKTAMALTIAASILGQTIGSRAERIRLKRAAAAKLARESHGDAADYIKAPMSLKTGNHTVQFWDPLSLRAESTVAAGTTAVLVPAISAFN

SEQ ID NO: 158250 - protein, 64 aa, Zea Mays
MATGRPELKGGYRFIWQSDGRRSERERLGLNYAYPFVAFNLNCGSGIVGTRIKLDYLKSGSLIC

SEQ ID NO: 158251 - protein, 62 aa, Zea Mays
MQGGSRVDFATMTVRRGILVSALPITVAGFLKLEELCKGLVVLPCLASSVEVYEIDRLLADG

SEQ ID NO: 158252 - protein, 50 aa, Zea Mays
MYNNVSTRATRTTISFDTIAITTKNVDEILGLLNDFQEPEKVEPLNSSLT

SEQ ID NO: 158253 - protein, 61 aa, Zea Mays
MDGRQRHWCGDKVGEHRRGARCASDTGATQKGAGDKVRVSTIRVRRRRSRALLPCVDPIQR

SEQ ID NO: 158254 - protein, 150 aa, Zea Mays
MKYSKEDKPERAGGAGAGSRAVPVALVVVVLCAFSFYLGGIYSTGRSLLDSIQPAPTALLALGAATTTRRPSDDGQARPALASTAAVAFPECPADYQDYTPCTDPKRWRRIRRQPHQGPRLGHERRLLLRPKLPRRRLRQRAHRRQPRLV

SEQ ID NO: 158255 - protein, 499 aa, Zea Mays
MEAAAALPPERDTSADWGDGVVPLGFRVKASSRESPSQKAGNVLEADLRSHWATATNTKEWILLELQEPCLLSHIRIYNKSVLEWELTAGLRYKPDAFVKLRPRCEAPKRDVVYPANHTPCRYLRISCLRGNPIAIFFIQLFGIPVPGLEPELQPLLSYLLPQITSSKQPLSHNMHLQLLKDISTRLPPFLPQIEAAVCLVQADLNSVVDTPESSVRFLALLAGPFYPILHLINERDPTKSLFGSADSDALRTSPASTPTVSSNFEAQPRRSRSPSVQPASYLLAFRSETTMLLLRKAHKDKTLGVVCVRASKVLQKLLEPEPFLDKSMYTDVMLPNQVSDEIPKSDALSLVHSTDYSSMFGEEFSLSENQFDGSLLNILDIAAVEEGILHVLYAAASQPMLCRKLAETTSDIWSVLPLVQALLPALRPPISSGPIEHIDDSFSQWNHPNIQNALSQITMAADCYNVSIVISFSSSSQSLCWLSFILPSITCKNGLCFA

SEQ ID NO: 158256 - protein, 492 aa, Zea Mays
MEAAAALPPERDTSADWGDGVVPLGFRVKASSRESPSQKAGNVLEADLRSHWATATNTKEWILLELQEPCLLSHIRIYNKSVLEWELTAGLRYKPDAFVKLRPRCEAPKRDVVYPANHTPCRYLRISCLRGNPIAIFFIQLFGIPVPGLEPELQPLLSYLLPQITSSKQPLSHNMHLQLLKDISTRLPPFLPQIEADLNSVVDTPESSVRFLALLAGPFYPILHLINERDPTKSLFGSADSDALRTSPASTPTVSSNFEAQPRRSRSPSVQPASYLLAFRSETTMLLLRKAHKDKTLGVVCVRASKVLQKLLEPEPFLDKSMYTDVMLPNQVSDEIPKSDALSLVHSTDYSSMFGEEFSLSENQFDGSLLNILDIAAVEEGILHVLYAAASQPMLCRKLAETTSDIWSVLPLVQALLPALRPPISSGPIEHIDDSFSQWNHPNIQNALSQITMAADCYNVSIVISFSSSSQSLCWLSFILPSITCKNGLCFA

SEQ ID NO: 158257 - protein, 487 aa, Zea Mays
MEAAAALPPERDTSADWGDGVVPLGFRVKASSRESPSQKAGNVLEADLRSHWATATNTKEWILLELQEPCLLSHIRIYNKSVLEWELTAGLRYKPDAFVKLRPRCEAPKRDVVYPANHTPCRYLRISCLRGNPIAIFFIQLFGIPVPGLEPELQPLLSYLLPQITSSKQPLSHNMHLQLLKDISTRLPPFLPQIEADLNSVVDTPESSVRFLALLAGPFYPILHLINERDPTKSLFGSADSDALRTSPASTPTVSSNFEAQPRRSRSPSVQPASYLLAFRSETTMLLLRKAHKDKTLGVVCVRASKVLQKLLEPEPFLDKSMYTDVMLPNQVSDEIPKSDALSLVHSTDYSSMFGEEFSLSENQFDGSLLNILDIAAVEEGILHVLYAAASQPMLCRKLAETTSDIWSVLPLVQALLPALRPPISSGPIEHIDDSFSQWNHPNIQNALSQDCYNVSIVISFSSSSQSLCWLSFILPSITCKNGLCFA

SEQ ID NO: 158258 - protein, 480 aa, Zea Mays
MEAAAALPPERDTSADWGDGVVPLGFRVKASSRESPSQKAGNVLEADLRSHWATATNTKEWILLELQEPCLLSHIRIYNKSVLEWELTAGLRYKPDAFVKLRPRCEAPKRDVVYPANHTPCRYLRISCLRGNPIAIFFIQLFGIPVPGLEPELQPLLSYLLPQITSSKQPLSHNMHLQLLKDISTRLPPFLPQIEADLNSVVDTPESSVRFLALLAGPFYPILHLINERDPTKSLFGSADSDALRTSPASTPTVSSNFEAQPRRSRSPSVQPASYLLAFRSETTMLLLRKAHKDKTLGVVCVRASKVLQKLLEPEPFLDKSMYTDVMLPNQVSDEIPKSDALSLVHSTDYSSMFGEEFSLSENQFDGSLLNILDIAAVEEGILHVLYAAASQPMLCRKLAETTSDIWSVLPLVQALLPEHFVLQSVLVLLNILMILLANGTIQTFRMLSPRLLQCQYRHQFFILFSELVLVIFHPTFHHM

SEQ ID NO: 158259 - protein, 1669 aa, Zea Mays
MYYMRLHHSLCYVASLLKLLQTFGLSYHLSKLYFQEAGQSLARSRAALKYVVLAISGHMDDVLTEYKEAMHKLLFVLEMLDPFIDPSTSAMEDTVIFDGISAIYLEKQSSVYDIALNIIHTAVKRAAVLPSLELEWRRGAIAPSVILSILDPHMPLPPDIDLCKSSVHEIDKVPLAVLDNHAPQPCNPENIAGRDASETTIRPENFEQCSFLFAPEELNQSELTSLYTLKGKGHDVITQTSLNHDIPEGRSKEKLSSDPFLLDNVVAADYFDSQADYQQLENYQDCELRAQEFHRIALNLCMQQEPTLEGHNAGIDALLLAAECYVNPFFLLGFQSNLEPLDKIERIHSELMQGNASSVSKNLHLKDFNKKTIYNLENKRDRSVIDLLLQAARFDFEYHGKIPEGELYPNIAEDGKRSVEISPEALQFADAVTLVRKNQAMLCHFIMKQFQRKGHLGSEILLQSLLFLLHSATDLFCPPENVVDIILKSAESLNDQLTCLYSFFSAGNKKLDRIKIHGLRRRWMLLQKLVLASSGSDSTRELARNKRDGFHFRSLVPPSTWIQKISDFSMFSSPLPRFFGWMAVSCYAKEYLNEKLFLASDFSQLTSLLSIYMDELCLMDGVAIPKVRSAKGEQFSCTDLFLKKETTLSDQPSMTEQFKILLPELHFFFPSMGKLFNAFGESILEAVGLQLKCLPNSAIPDVLCWFSELCLWPYLEHIKEHLVVANGVSYIRGSIAANAKSVVFYLLESIVTEHLEAVIPEMPRIVHILVSLCRASYTDVAFLKSVLCLIKPLISYFLRKGTNETKVLGHIKEGSNFELLCFEELFEIVRCGKDSVDTTEDNIQAPLVIFILGSMFLDFSFERRIEMLGSLLVWIDCISSDPPSLLCNYLQGFQTLLDGFEAVLIQNIELLGVGILSATNSSIESSDSLGIDGTMLLEKKAQDNEEQTLMKSVTYCENDGNHKGLRNLHPNSIIEFCGTLEKFILHLTSYIEDSWKWHHQLASRISLSMAKCLLFAKFLKSIAQEDTISSSSEQDVAVKISCELAQKHWQSALEGLGDTILINQETQFWQVASAMLDYIMGIPNVLAWGNVLNTTCSAVKHFCSHAPRLSWRLQTDKWLSLLVSGGIEGFKNSEICLIDLFCTMLNHSEPEQRFVAVQQLGRIINSTSSTEADLKYPNYDQNFLISVSTVTSLLVTHTWDRVAALALHDSSMLLRNHAMALLTEYVPFVDRKHLQSFLSSSNGILTGLGQLSGVIEEGYFTRMSLLLFSKACLYSNPEDIALIPECVWQKLENMQTSTGGFGYMEKDLCLALCQLKSESDATTVAKVLSGCNSQPVSPDFKSIRESILQVMSSLSSIEAYFEFFAARSAQEHEELEEAEIELELIEKEKSVPNFVEHTNDTMVLAMPSYDRDGSEVNKRLQQIRENIRSLERSRLKEEITARRQKKLLLRHAREKYLEETRSRETELMQELDRERALEMEREVERQRQLDIERAKSRELQFNIDLEKEKQTQRELQRELEQVELGRSSRREFSANPNRERYRERDGGGRAQQEAGSLRSSSSRGQEGGSAQAPAPAGPGPTVMLAGSRTFSGANLPTILQPRERAADEDSAWAEDASSNGDPELDGVRPHGPRGSRSSSSRQVAERRERDGTAAGTGRREGKWERKQHP

SEQ ID NO: 158260 - protein, 527 aa, Zea Mays
MDDVLTEYKEAMHKLLFVLEMLDPFIDPSTSAMEDTVIFDGISAIYLEKQSSVYDIALNIIHTAVKRAAVLPSLELEWRRGAIAPRKHLQSFLSSSNGILTGLGQLSGVIEEGYFTRMSLLLFSKACLYSNPEDIALIPECVWQKLENMQTSTGGFGYMEKDLCLALCQLKSESDATTVAKVLSGCNSQPVSPDFKSIRESILQVMSSLSSIEAYFEFFAARSAQEHEELEEAEIELELIEKEKSVPNFVEHTNDTMVLAMPSYDRDGSEVNKRLQQIRENIRSLERSRLKEEITARRQKKLLLRHAREKYLEETRSRETELMQELDRERALEMEREVERQRQLDIERAKSRELQFNIDLEKEKQTQRELQRELEQVELGRSSRREFSANPNSRSRERYRERDGGGRAQQEAGSLRSSSSRGQEGGSAQAPAPAGPGPTVMLAGSRTFSGANLPTILQPRERAADEDSAWAEDASSNGDPELDGVRPHGPRGSRSSSSRQVAERRERDGTAAGTGRREGKWERKQHP

SEQ ID NO: 158261 - protein, 1482 aa, Zea Mays
MHKLLFVLEMLDPFIDPSTSAMEDTVIFDGISAIYLEKQSSVYDIALNIIHTAVKRAAVLPSLELEWRRGAIAPSVILSILDPHMPLPPDIDLCKSSVHEIDKVPLAVLDNHAPQPCNPENIAGRDASETTIRPENFEQCSFLFAPEELNQSELTSLYTLKGKGHDVITQTSLNHDIPEGRSKEKLSSDPFLLDNVVAADYFDSQADYQQLENYQDCELRAQEFHRIALNLCMQQEPTLEGHNAGIDALLLAAECYVNPFFLLGFQSNLEPLDKIERIHSELMQGNASSVSKNLHLKDFNKKTIYNLENKRDRSVIDLLLQAARFDFEYHGKIPEGELYPNIAEDGKRSVEISPEALQFADAVTLVRKNQAMLCHFIMKQFQRKGHLGSEILLQSLLFLLHSATDLFCPPENVVDIILKSAESLNDQLTCLYSFFSAGNKKLDRIKIHGLRRRWMLLQKLVLASSGSDSTRELARNKRDGFHFRSLVPPSTWIQKISDFSMFSSPLPRFFGWMAVSCYAKEYLNEKLFLASDFSQLTSLLSIYMDELCLMDGVAIPKVRSAKGEQFSCTDLFLKKETTLSDQPSMTEQFKILLPELHFFFPSMGKLFNAFGESILEAVGLQLKCLPNSAIPDVLCWFSELCLWPYLEHIKEHLVVANGVSYIRGSIAANAKSVVFYLLESIVTEHLEAVIPEMPRIVHILVSLCRASYTDVAFLKSVLCLIKPLISYFLRKGTNETKVLGHIKEGSNFELLCFEELFEIVRCGKDSVDTTEDNIQAPLVIFILGSMFLDFSFERRIEMLGSLLVWIDCISSDPPSLLCNYLQGFQTLLDGFEAVLIQNIELLGVGILSATNSSIESSDSLGIDGTMLLEKKAQDNEEQTLMKSVTYCENDGNHKGLRNLHPNSIIEFCGTLEKFILHLTSYIEDSWKWHHQLASRISLSMAKCLLFAKFLKSIAQEDTISSSSEQDVAVKISCELAQKHWQSALEGLGDTILINQETQFWQVASAMLDYIMGIPNVLAWGNVLNTTCSAVKHFCSHAPRLSWRLQTDKWLSLLVSGGIEGFKNSEICLIDLFCTMLNHSEPEQRFVAVQQLGRIINSTSSTEADLKYPNYDQNFLISVSTVTSLLVTHTWDRVAALALHDSSMLLRNHAMALLTEYVPFVDRKHLQSFLSSSNGILTGLGQLSGVIEEGYFTRMSLLLFSKACLYSNPEDIALIPECVWQKLENMQTSTGGFGYMEKDLCLALCQLKSESDATTVAKVLSGCNSQPVSPDFKSIRESILQVMSSLSSIEAYFEFFAARSAQEHEELEEAEIELELIEKEKSVPNFVEHTNDTMVLAMPSYDRDGSEVNKRLQQIRENIRSLERSRLKEEITARRQKKLLLRHAREKYLEETRSRETELMQELDRERALEMEREVERQRQLDIERAKSRELQFNIDLEKEKQTQRELQRELEQVELGRSSRPAPGRGTAKGMVEAEHSRRRGA

SEQ ID NO: 158262 - protein, 1493 aa, Zea Mays
MDDVLTEYKEAMHKLLFVLEMLDPFIDPSTSAMEDTVIFDGISAIYLEKQSSVYDIALNIIHTAVKRAAVLPSLELEWRRGAIAPSVILSILDPHMPLPPDIDLCKSSVHEIDKVPLAVLDNHAPQPCNPENIAGRDASETTIRPENFEQCSFLFAPEELNQSELTSLYTLKGKGHDVITQTSLNHDIPEGRSKEKLSSDPFLLDNVVAADYFDSQADYQQLENYQDCELRAQEFHRIALNLCMQQEPTLEGHNAGIDALLLAAECYVNPFFLLGFQSNLEPLDKIERIHSELMQGNASSVSKNLHLKDFNKKTIYNLENKRDRSVIDLLLQAARFDFEYHGKIPEGELYPNIAEDGKRSVEISPEALQFADAVTLVRKNQAMLCHFIMKQFQRKGHLGSEILLQSLLFLLHSATDLFCPPENVVDIILKSAESLNDQLTCLYSFFSAGNKKLDRIKIHGLRRRWMLLQKLVLASSGSDSTRELARNKRDGFHFRSLVPPSTWIQKISDFSMFSSPLPRFFGWMAVSCYAKEYLNEKLFLASDFSQLTSLLSIYMDELCLMDGVAIPKVRSAKGEQFSCTDLFLKKETTLSDQPSMTEQFKILLPELHFFFPSMGKLFNAFGESILEAVGLQLKCLPNSAIPDVLCWFSELCLWPYLEHIKEHLVVANGVSYIRGSIAANAKSVVFYLLESIVTEHLEAVIPEMPRIVHILVSLCRASYTDVAFLKSVLCLIKPLISYFLRKGTNETKVLGHIKEGSNFELLCFEELFEIVRCGKDSVDTTEDNIQAPLVIFILGSMFLDFSFERRIEMLGSLLVWIDCISSDPPSLLCNYLQGFQTLLDGFEAVLIQNIELLGVGILSATNSSIESSDSLGIDGTMLLEKKAQDNEEQTLMKSVTYCENDGNHKGLRNLHPNSIIEFCGTLEKFILHLTSYIEDSWKWHHQLASRISLSMAKCLLFAKFLKSIAQEDTISSSSEQDVAVKISCELAQKHWQSALEGLGDTILINQETQFWQVASAMLDYIMGIPNVLAWGNVLNTTCSAVKHFCSHAPRLSWRLQTDKWLSLLVSGGIEGFKNSEICLIDLFCTMLNHSEPEQRFVAVQQLGRIINSTSSTEADLKYPNYDQNFLISVSTVTSLLVTHTWDRVAALALHDSSMLLRNHAMALLTEYVPFVDRKHLQSFLSSSNGILTGLGQLSGVIEEGYFTRMSLLLFSKACLYSNPEDIALIPECVWQKLENMQTSTGGFGYMEKDLCLALCQLKSESDATTVAKVLSGCNSQPVSPDFKSIRESILQVMSSLSSIEAYFEFFAARSAQEHEELEEAEIELELIEKEKSVPNFVEHTNDTMVLAMPSYDRDGSEVNKRLQQIRENIRSLERSRLKEEITARRQKKLLLRHAREKYLEETRSRETELMQELDRERALEMEREVERQRQLDIERAKSRELQFNIDLEKEKQTQRELQRELEQVELGRSSRPAPGRGTAKGMVEAEHSRRRGA

SEQ ID NO: 158263 - protein, 1223 aa, Zea Mays
MDDVLTEYKEAMHKLLFVLEMLDPFIDPSTSAMEDTVIFDGISAIYLEKQSSVYDIALNIIHTAVKRAAVLPSLELEWRRGAIAPSVILSILDPHMPLPPDIDLCKSSVHEIDKVPLAVLDNHAPQPCNPENIAGRDASETTIRPENFEQCSFLFAPEELNQSELTSLYTLKGKGHDVITQTSLNHDIPEGRSKEKLSSDPFLLDNVVAADYFDSQADYQQLENYQDCELRAQEFHRIALNLCMQQEPTLEGHNAGIDALLLAAECYVNPFFLLGFQSNLEPLDKIERIHSELMQGNASSVSKNLHLKDFNKKTIYNLENKRDRSVIDLLLQAARFDFEYHGKIPEGELYPNIAEDGKRSVEISPEALQFADAVTLVRKNQAMLCHFIMKQFQRKGHLGSEILLQSLLFLLHSATDLFCPPENVVDIILKSAESLNDQLTCLYSFFSAGNKKLDRIKIHGLRRRWMLLQKLVLASSGSDSTRELARNKRDGFHFRSLVPPSTWIQKISDFSMFSSPLPRFFGWMAVSCYAKEYLNEKLFLASDFSQLTSLLSIYMDELCLMDGVAIPKVRSAKGEQFSCTDLFLKKETTLSDQPSMTEQFKILLPELHFFFPSMGKLFNAFGESILEAVGLQLKCLPNSAIPDVLCWFSELCLWPYLEHIKEHLVVANGVSYIRGSIAANAKSVVFYLLESIVTEHLEAVIPEMPRIVHILVSLCRASYTDVAFLKSVLCLIKPLISYFLRKGTNETKVLGHIKEGSNFELLCFEELFEIVRCGKDSVDTTEDNIQAPLVIFILGSMFLDFSFERRIEMLGSLLVWIDCISSDPPSLLCNYLQGFQTLLDGFEAVLIQNIELLGVGILSATNSSIESSDSLGIDGTMLLEKKAQDNEEQTLMKSVTYCENDGNHKGLRNLHPNSIIEFCGTLEKFILHLTSYIEDSWKWHHQLASRISLSMAKCLLFAKFLKSIAQEDTISSSSEQDVAVKISCELAQKHWQSALEGLGDTILINQETQFWQVASAMLDYIMGIPNVLAWGNVLNTTCSAVKHFCSHAPRLSWRLQTDKWLSLLVSGGIEGFKNSEICLIDLFCTMLNHSEPEQRFVAVQQLGRIINSTSSTEADLKYPNYDQNFLISVSTVTSLLVTHTWDRVAALALHDSSMLLRNHAMALLTEYVPFVDRKHLQSFLSSSNGILTGLGQLSGVIEEGYFTRMSLLLFSKEVLDIWRKISA

SEQ ID NO: 158264 - protein, 340 aa, Zea Mays
MAAPPSPSSRSPSSEVAVHRFSGTLDVSSSPSRTELLSMVKKHSHLIGWTIIGAEDDASDVGMDDKFWHEMLDLFFVRGRQSKRSEEDDLVFFVNNMKLHGYGFNDNMEDPPPFFVRRWAPTLEKISINTVEVDWERSFYLNLIAHTSYTVTVAIFGIEDLRNRAVKNKQLPPVYKVTKNVYASPSRVNFHLDRRKAVETLPAYPNIFFSVDDFDDTFDAVVLSDPEHCYCVILNAHDGAAFPEESECKNPVSNTQPGMSCGSAQEKPPKRTLFSAYVGYQNVRGAYDACRSKFGSFLSLGHDHNKLDRLFMKGPEGRGEVEVAVSGIAEQWEVEERSRR

SEQ ID NO: 158265 - protein, 59 aa, Zea Mays
MSYTLISLHVLTPLSSYYTLPAQHHPPIVLSQHNATLILLSRAPLSTSGVSILLKYIVF

SEQ ID NO: 158266 - protein, 54 aa, Zea Mays
MKPERAREKHRVKLTDFVGRARGLSWDEGVSDHLGVARRLLSSKTSLFTASLPQ

SEQ ID NO: 158267 - protein, 81 aa, Zea Mays
MKPERAREKHRVKLTDFVGRARGLSWDEGVSDHLGVARRLLSSKTSLFTASLPVRHMLSKSMYTPRSVLVLVPISELGVLD

SEQ ID NO: 158268 - protein, 648 aa, Zea Mays
MAGDALIVIVTSFLLALPSATAIGKVCGNAGNYTANGRYRSNLDSLAAALPANTSSSPQLFANATAGQAPDAVYALALCRGDLTGNLTGCSACVNGSLQYARRACPYAKAASVYDDNCLIGYSSANILVPAYNATRDTSTLFDYWNSMTIAGNGTLVAAHVDDLLTQTAQQAASSPRRFVTAYMDGSSNAVIPTLYSLAQCTPDLSAGDCLACLQRILGLLNATTSMTQIRPSSGAPAPPPPSPTTNKGSGVKPWVIAVSVAPPVAVVAFCFILYNRRQRRRFRRGRSKLRQKHPRNNLKGDELDWEMETELSEFSVFDFHQILEATDNFSEENKLGEGGFGPVYKGQFPDGTEIAVKRLASHSGQGFVEFKNEVQLIAKLQHTNLVRLLGCCSQGEEKILVYEYLPNKSLDFFIFDENRKSLLDWKKRLAIIEGIAEGLLYLHKHSRLRVIHRDLKPSNILLDSEMNPKISDFGLAKIFSSNNIEGSTTRRVVGTYGYMAPEYASEGIFSIKSDVFSFGVLILEILSGKRNSGNHDYGDFINILGYAWQLYEEARWMDLVDASLVPMDHSSEIMRCMNIALLCVQENAADRPAMLDVVAMLSNKAKTLAQPNHPAYFNVRVGNEEESTAATASGSINEMTVSVTTGR

SEQ ID NO: 158269 - protein, 208 aa, Zea Mays
MRPNLILNAEKELGIVAGLQDRVAQVYGGLVYMDFSQGHMDKLGHGIYMPLDVNLLPPLYLIYADNPSDSGKVHSTVRQRWLSGDDFITSRMKEVAQLALDGHKALLQKDYTELARFMNKNFDLRREMFGDDVLGALNIKMVDVARSVGAASKFTGSGGAVVALCPDGDSQVERLRKGCQEAGFVVQQVKVAPSVLTDEELSSLLLAS

SEQ ID NO: 158270 - protein, 197 aa, Zea Mays
MADGGIVVAICQYGGEFTSGPNGNLTYKGGEAHAVDVTRDMPLENFKDEVSKVFHVDVTDMSLKYFLPNNYRTLITISCDRDLQRMVDFTTSATQVEVFLISRVENRSIVTYSGASASKPGSNAPGDKRKRPPSKNKVSKSNKKTPTPSAPGTSVQPSANNVKQPRPIAIETNDNRCIGHYLVHAKGTHTAAILYIL

SEQ ID NO: 158271 - protein, 53 aa, Zea Mays
MYLQLLVPEPYPSTVLKVQVHLMRHNSPAELDVPSSASSLQGPVNLSMCWQIN

SEQ ID NO: 158272 - protein, 475 aa, Zea Mays
MTPSPSSRLEHELEKPPHPHGLDAHFMRRLVSRSWEESRLLWRLAFPALLTEVFQFSIGFVTTAFVGHLGEVELAAVSVVENILDSSAYGVLFGMGSALDTLSGQAVGAGQLDRLGTYTQQSWIICGATALALAPAYAFAPRLLHSFLHQPDHVSRAAGPYARWAIPRLFAHAVNIPLLMFFQAQSRIWAVAAISGAVLGVHAALTYVAVTRLGYGMPGAAVAGDISHWLVVAAQFAYMTGGRFPDAWKGFTVRAFDNLGAFVKLSLGSAVMICLEFWYYTTLLVLVGLLKHGKLQIDIMSVCLNFEFLTVMVALGFSTAIGIRVSNELGANRPKEAKFAVLVAVSTSMFMGAVFMCVVLIWRTSLPKLFSDSEEVKRGASKLGHLLALTVCVSSIWPVLSDSCLFSFRRGRRSWVASACGVHKRRLLLPSGHSDGYPAWVQAKTRHNGHMDGHVDRHVSPNVNTSRHYLHNKVG

SEQ ID NO: 158273 - protein, 137 aa, Zea Mays
MGGAVALKVHFKQPNEWNGAILVAPMCKCSFNVIAYKDKPRLRTALEMLRTTQEIERRLEEVSLPLIILHGEADMVTDPAVSKALYEKAKSQDKKLCLYKGAYHAILEGEPDQTIFQVLDDIISWLDQHSTKEGISL

SEQ ID NO: 158274 - protein, 90 aa, Zea Mays
MLRTTQEIERRLEEVSLPLIILHGEADMVTDPAVSKALYEKAKSQDKKLCLYKGAYHAILEGEPDQTIFQVLDDIISWLDQHSTKEGISL

SEQ ID NO: 158275 - protein, 127 aa, Zea Mays
MIPSQPCFHPREPRCAITVVLREIRERALVHRDRRPCTRDSSALRPRSQPGDFSPPCTEPGCSRVGLGGKHLDTGDTHRCRADPTNPHLAGGKRNLGSSTDEQGIENPGVQQVEVAEQELIEGKLCP

SEQ ID NO: 158276 - protein, 1076 aa, Zea Mays
MDLLMMPSNCGNLMLVQWPLFLLTSKIMLANDYASDCKDSQYELWDRISKDEYMAYAVKECYYSTEKILHSLVDAEGQHWVVRLFRDLNDSIAQGSLLVTINLKKLQLVQSRLTGLTGLLIRDETAGRAAGVTKALLELYEVVTHEFLSQNLREQFDTWQLLLRARNDGRLFSKILWPKDPEMKEQLKRLHLLLTVKDSATNIPKNLEARRRLQFFTNSLFMDIPQAKPVSEMIPFSVFTPYYSETVLYSMSELCVENEDGISILFYLQKIYPDEWANFLERIGCGESSEDDFKESPSDTMELRFWVSYRGQTLARTVRGMMYYRRALMLQSYLERRCLGGIEDGNSAAEYIDTQGYELSPDARAQADIKFTYVVSCQIYGLQKQTKKQEAADIALLLQRNEALRVAFIHEEEIISRDGKATTREYYSKLVKADVHGKDQEIYCIKLPGNPKLGEGKPENQNHAIIFTRGDAVQTIDMNQDNYLEEAMKMRNLLEEFHNAHGKHGIRKPTILGVREHVFTGSVSSLASFMSKQETSFVTLGQRVLAYLKVRMHYGHPDVFDRIFHITRGGISKASRVINISEDIYAGFNSTLRQGNITHHEYIQVGKGRDVGLNQIALFEGKVAGGNGEQVLSRDVYRLGQLFDFFRMLTFFFTTVGYYVCTMMTVLTVYIFLYGRVYLALSGLDYSISRQARFLGNTALDAALNAQFLVQIGIFTAVPMIMGFILELGLMKAVFSFITMQLQFCSVFFTFSLGTRTHYFGRTILHGGAKYRATGRGFVVRHIKFAENYRLYSRSHFVKALEVALLLIVYIAYGYTKGGSSSFILITISSWFLVMSWLFAPYIFNPSGFEWQKTVEDFDDWTNWLLYKGGVGVKGDNSWESWWDEEQAHIQTFRGRILETILSLRFLMFQYGIVYKLKITDHNTSLAVYGFSWIVLFVMVLLFKLFTATPRKSTALPTFVRFLQGVLAIGIIAGIALLIVLTSFTVADLFASALAFIATGWCVLCLAVTWKRVVKVLGLWDSVREIARMYDAGMGAIIFVPIVVFSWEQGESADLKGPAASIVFFCCIFWELLRAA

SEQ ID NO: 158277 - protein, 1846 aa, Zea Mays
MASSTSRRRRGGGLERVADNWERLVRAALKRDRDHLRVGGAPAAVGGQRLADAVPASLGRTTNIEQILQAADDIEVEDPNVARILCEQAYTMAQNLDPSSEGRGVLQFKTGLASVIKQKLAKKDGAPIDRQNDVQVLWNFYLEYKSRCRVDDMQREQERLRESGTFSTEMGNRAMKMKKVFATLRALLDVLENLVGQSPTDRLHRQILEEIKRIKRSDAALRGELMPYNIVPLDTSSSVANIFGFFPEVIAATAAIQNCEDLPRFPFDTPQLRQKDIFDLLQYVFGFQEDNIRNQRENVVLMLANAQSRLSLQIGSEPKIDEMAVTDVFCKVLDNYIKWCRYLGRRVAWTSLEAVNKNRKIILVALYFLIWGEAANIRFLPECICYIFHNMAKELDGILDSSVAETAKSCTTEGSTSFLEKIITPIYDTMAAEAENNKDGKAAHSAWRNYDDFNEYFWSRSCFELGWPPAEGSKFLRKPAKRKRTGKTNFVEHRTFLHLYRSFHRLWIFLLLMFQLLAIIAFHHGKMDIDTIRILLSAGPAFFVLNFIECCLDVILMFGAYKTARGFAISRLVIRFLWLTAVSTFVTYLYVKVLEERDTRNSDSTYFRIYGLVLGGYAAVRIMFALMAKIPACHRLSSFSDRSQFFQFFKWIYQERYYVGRGLYESISDYARYVIFWVVILACKFTFAYFLQIRPLVEPTNIIVQLHDLKYSWHDLVSRGNKNALTILSLWAPVLAIYLMDIHIWYTLLSALVGGVMGARDRLGEIRSIEMLHKRFESFPEAFAKNLSASRIPSRRIDRVNESEITTKTYASIFSPFWNEIIKSLREEDYISNRLLGEFLSREMDLLMMPSNCGNLMLVQWPLFLLTSKIMLANDYASDCKDSQYELWDRISKDEYMAYAVKECYYSTEKILHSLVDAEGQHWVVRLFRDLNDSIAQGSLLVTINLKKLQLVQSRLTGLTGLLIRDETAGRAAGVTKALLELYEVVTHEFLSQNLREQFDTWQLLLRARNDGRLFSKILWPKDPEMKEQLKRLHLLLTVKDSATNIPKNLEARRRLQFFTNSLFMDIPQAKPVSEMIPFSVFTPYYSETVLYSMSELCVENEDGISILFYLQKIYPDEWANFLERIGCGESSEDDFKESPSDTMELRFWVSYRGQTLARTVRGMMYYRRALMLQSYLERRCLGGIEDGNSAAEYIDTQGYELSPDARAQADIKFTYVVSCQIYGLQKQTKKQEAADIALLLQRNEALRVAFIHEEEIISRDGKATTREYYSKLVKADVHGKDQEIYCIKLPGNPKLGEGKPENQNHAIIFTRGDAVQTIDMNQDNYLEEAMKMRNLLEEFHNAHGKHGIRKPTILGVREHVFTGSVSSLASFMSKQETSFVTLGQRVLAYLKVRMHYGHPDVFDRIFHITRGGISKASRVINISEDIYAGFNSTLRQGNITHHEYIQVGKGRDVGLNQIALFEGKVAGGNGEQVLSRDVYRLGQLFDFFRMLTFFFTTVGYYVCTMMTVLTVYIFLYGRVYLALSGLDYSISRQARFLGNTALDAALNAQFLVQIGIFTAVPMIMGFILELGLMKAVFSFITMQLQFCSVFFTFSLGTRTHYFGRTILHGGAKYRATGRGFVVRHIKFAENYRLYSRSHFVKALEVALLLIVYIAYGYTKGGSSSFILITISSWFLVMSWLFAPYIFNPSGFEWQKTVEDFDDWTNWLLYKGGVGVKGDNSWESWWDEEQAHIQTFRGRILETILSLRFLMFQYGIVYKLKITDHNTSLAVYGFSWIVLFVMVLLFKLFTATPRKSTALPTFVRFLQGVLAIGIIAGIALLIVLTSFTVADLFASALAFIATGCWP

SEQ ID NO: 158278 - protein, 1001 aa, Zea Mays
MASSTSRRRRGGGLERVADNWERLVRAALKRDRDHLRVGGAPAAVGGQRLADAVPASLGRTTNIEQILQAADDIEVEDPNVARILCEQAYTMAQNLDPSSEGRGVLQFKTGLASVIKQKLAKKDGAPIDRQNDVQVLWNFYLEYKSRCRVDDMQREQERLRESGTFSTEMGNRAMKMKKVFATLRALLDVLENLVGQSPTDRLHRQILEEIKRIKRSDAALRGELMPYNIVPLDTSSSVANIFGFFPEVIAATAAIQNCEDLPRFPFDTPQLRQKDIFDLLQYVFGFQEDNIRNQRENVVLMLANAQSRLSLQIGSEPKIDEMAVTDVFCKVLDNYIKWCRYLGRRVAWTSLEAVNKNRKIILVALYFLIWGEAANIRFLPECICYIFHNMAKELDGILDSSVAETAKSCTTEGSTSFLEKIITPIYDTMAAEAENNKDGKAAHSAWRNYDDFNEYFWSRSCFELGWPPAEGSKFLRKPAKRKRTGKTNFVEHRTFLHLYRSFHRLWIFLLLMFQLLAIIAFHHGKMDIDTIRILLSAGPAFFVLNFIECCLDVILMFGAYKTARGFAISRLVIRFLWLTAVSTFVTYLYVKVLEERDTRNSDSTYFRIYGLVLGGYAAVRIMFALMAKIPACHRLSSFSDRSQFFQFFKWIYQERYYVGRGLYESISDYARYVIFWVVILACKFTFAYFLQIRPLVEPTNIIVQLHDLKYSWHDLVSRGNKNALTILSLWAPVLAIYLMDIHIWYTLLSALVGGVMGARDRLGEIRSIEMLHKRFESFPEAFAKNLSASRFLTLFSIFESEITTKTYASIFSPFWNEIIKSLREEDYISNRLLGEFLSREMDLLMMPSNCGNLMLVQWPLFLLTSKIMLANDYASDCKDSQYELWDRISKDEYMAYAVKECYYSTEKILHSLVDAEGQHWVVRLFRDLNDSIAQGSLLVTINLKKLQLVQSRLTGLTGLLIRDETAGRAAGVTKALLELYEVVTHEFLSQNLSLTRGNCC

SEQ ID NO: 158279 - protein, 1469 aa, Zea Mays
MASSTSRRRRGGGLERVADNWERLVRAALKRDRDHLRVGGAPAAVGGQRLADAVPASLGRTTNIEQILQAADDIEVEDPNVARILCEQAYTMAQNLDPSSEGRGVLQFKTGLASVIKQKLAKKDGAPIDRQNDVQVLWNFYLEYKSRCRVDDMQREQERLRESGTFSTEMGNRAMKMKKVFATLRALLDVLENLVGQSPTDRLHRQILEEIKRIKRSDAALRGELMPYNIVPLDTSSSVANIFGFFPEVIAATAAIQNCEDLPRFPFDTPQLRQKDIFDLLQYVFGFQEDNIRNQRENVVLMLANAQSRLSLQIGSEPKIDEMAVTDVFCKVLDNYIKWCRYLGRRVAWTSLEAVNKNRKIILVALYFLIWGEAANIRFLPECICYIFHNMAKELDGILDSSVAETAKSCTTEGSTSFLEKIITPIYDTMAAEAENNKDGKAAHSAWRNYDDFNEYFWSRSCFELGWPPAEGSKFLRKPAKRKRTGKTNFVEHRTFLHLYRSFHRLWIFLLLMFQLLAIIAFHHGKMDIDTIRILLSAGPAFFVLNFIECCLDVILMFGAYKTARGFAISRLVIRFLWLTAVSTFVTYLYVKVLEERDTRNSDSTYFRIYGLVLGGYAAVRIMFALMAKIPACHRLSSFSDRSQFFQFFKWIYQERYYVGRGLYESISDYARYVIFWVVILACKFTFAYFLQIRPLVEPTNIIVQLHDLKYSWHDLVSRGNKNALTILSLWAPVLAIYLMDIHIWYTLLSALVGGVMGARDRLGEIRSIEMLHKRFESFPEAFAKNLSASRIPSRRIDRVNESEITTKTYASIFSPFWNEIIKSLREEDYISNREMDLLMMPSNCGNLMLVQWPLFLLTSKIMLANDYASDCKDSQYELWDRISKDEYMAYAVKECYYSTEKILHSLVDAEGQHWVVRLFRDLNDSIAQGSLLVTINLKKLQLVQSRLTGLTGLLIRDETAGRAAGVTKALLELYEVVTHEFLSQNLREQFDTWQLLLRARNDGRLFSKILWPKDPEMKEQLKRLHLLLTVKDSATNIPKNLEARRRLQFFTNSLFMDIPQAKPVSEMIPFSVFTPYYSETVLYSMSELCVENEDGISILFYLQKIYPDEWANFLERIGCGESSEDDFKESPSDTMELRFWVSYRGQTLARTVRGMMYYRRALMLQSYLERRCLGGIEDGNSAAEYIDTQGYELSPDARAQADIKFTYVVSCQIYGLQKQTKKQEAADIALLLQRNEALRVAFIHEEEIISRDGKATTREYYSKLVKADVHGKDQEIYCIKLPGNPKLGEGKPENQNHAIIFTRGDAVQTIDMNQDNYLEEAMKMRNLLEEFHNAHGKHGIRKPTILGVREHVFTGSVSSLASFMSKQETSFVTLGQRVLAYLKVRMHYGHPDVFDRIFHITRGGISKASRVINISEDIYAGFNSTLRQGNITHHEYIQVGKGRDVGLNQIALFEGKVAGGNGFWGTLH

SEQ ID NO: 158280 - protein, 1391 aa, Zea Mays
MASSTSRRRRGGGLERVADNWERLVRAALKRDRDHLRVGGAPAAVGGQRLADAVPASLGRTTNIEQILQAADDIEVEDPNVARILCEQAYTMAQNLDPSSEGRGVLQFKTGLASVIKQKLAKKDGAPIDRQNDVQVLWNFYLEYKSRCRVDDMQREQERLRESGTFSTEMGNRAMKMKKVFATLRALLDVLENLVGQSPTDRLHRQILEEIKRIKRSDAALRGELMPYNIVPLDTSSSVANIFGFFPEVIAATAAIQNCEDLPRFPFDTPQLRQKDIFDLLQYVFGFQEDNIRNQRENVVLMLANAQSRLSLQIGSEPKIDEMAVTDVFCKVLDNYIKWCRYLGRRVAWTSLEAVNKNRKIILVALYFLIWGEAANIRFLPECICYIFHNMAKELDGILDSSVAETAKSCTTEGSTSFLEKIITPIYDTMAAEAENNKDGKAAHSAWRNYDDFNEYFWSRSCFELGWPPAEGSKFLRKPAKRKRTGKTNFVEHRTFLHLYRSFHRLWIFLLLMFQLLAIIAFHHGKMDIDTIRILLSAGPAFFVLNFIECCLDVILMFGAYKTARGFAISRLVIRFLWLTAVSTFVTYLYVKVLEERDTRNSDSTYFRIYGLVLGGYAAVRIMFALMAKIPACHRLSSFSDRSQFFQFFKWIYQERYYVGRGLYESISDYARYVIFWVVILACKFTFAYFLQIRPLVEPTNIIVQLHDLKYSWHDLVSRGNKNALTILSLWAPVLAIYLMDIHIWYTLLSALVGGVMGARDRLGEIRSIEMLHKRFESFPEAFAKNLSASRIPSRRIDRVNESEITTKTYASIFSPFWNEIIKSLREEDYISNREMDLLMMPSNCGNLMLVQWPLFLLTSKIMLANDYASDCKDSQYELWDRISKDEYMAYAVKECYYSTEKILHSLVDAEGQHWVVRLFRDLNDSIAQGSLLVTINLKKLQLVQSRLTGLTGLLIRDETAGRAAGVTKALLELYEVVTHEFLSQNLREQFDTWQLLLRARNDGRLFSKILWPKDPEMKEQLKRLHLLLTVKDSATNIPKNLEARRRLQFFTNSLFMDIPQAKPVSEMIPFSVFTPYYSETVLYSMSELCVENEDGISILFYLQKIYPDEWANFLERIGCGESSEDDFKESPSDTMELRFWVSYRGQTLARTVRGMMYYRRALMLQSYLERRCLGGIEDGNSAAEYIDTQGYELSPDARAQADIKFTYVVSCQIYGLQKQTKKQEAADIALLLQRNEALRVAFIHEEEIISRDGKATTREYYSKLVKADVHGKDQEIYCIKLPGNPKLGEGKPENQNHAIIFTRGDAVQTIDMNQDNYLEEAMKMRNLLEEFHNAHGKHGIRKPTILVSLRWRHLCRNRRLVLLLWGNVFLLTSKFECTMDILMFLIGYFT

SEQ ID NO: 158281 - protein, 648 aa, Zea Mays
MDLLMMPSNCGNLMLVQWPLFLLTSKIMLANDYASDCKDSQYELWDRISKDEYMAYAVKECYYSTEKILHSLVDAEGQHWVVRLFRDLNDSIAQGSLLVTINLKKLQLVQSRLTGLTGLLIRDETAGRAAGVTKALLELYEVVTHEFLSQNLREQFDTWQLLLRARNDGRLFSKILWPKDPEMKEQLKRLHLLLTVKDSATNIPKNLEARRRLQFFTNSLFMDIPQAKPVSEMIPFSVFTPYYSETVLYSMSELCVENEDGISILFYLQKIYPDEWANFLERIGCGESSEDDFKESPSDTMELRFWVSYRGQTLARTVRGMMYYRRALMLQSYLERRCLGGIEDGNSAAEYIDTQGYELSPDARAQADIKFTYVVSCQIYGLQKQTKKQEAADIALLLQRNEALRVAFIHEEEIISRDGKATTREYYSKLVKADVHGKDQEIYCIKLPGNPKLGEGKPENQNHAIIFTRGDAVQTIDMNQDNYLEEAMKMRNLLEEFHNAHGKHGIRKPTILGVREHVFTGSVSSLASFMSKQETSFVTLGQRVLAYLKVRMHYGHPDVFDRIFHITRGGISKASRVINISEDIYAGFNSTLRQGNITHHEYIQVGKGRDVGLNQIALFEGKVAGGNDDCSNCVYLLVWKGLSGTLWP

SEQ ID NO: 158282 - protein, 632 aa, Zea Mays
MDLLMMPSNCGNLMLVQWPLFLLTSKIMLANDYASDCKDSQYELWDRISKDEYMAYAVKECYYSTEKILHSLVDAEGQHWVVRLFRDLNDSIAQGSLLVTINLKKLQLVQSRLTGLTGLLIRDETAGRAAGVTKALLELYEVVTHEFLSQNLREQFDTWQLLLRARNDGRLFSKILWPKDPEMKEQLKRLHLLLTVKDSATNIPKNLEARRRLQFFTNSLFMDIPQAKPVSEMIPFSVFTPYYSETVLYSMSELCVENEDGISILFYLQKIYPDEWANFLERIGCGESSEDDFKESPSDTMELRFWVSYRGQTLARTVRGMMYYRRALMLQSYLERRCLGGIEDGNSAAEYIDTQGYELSPDARAQADIKFTYVVSCQIYGLQKQTKKQEAADIALLLQRNEALRVAFIHEEEIISRDGKATTREYYSKLVKADVHGKDQEIYCIKLPGNPKLGEGKPENQNHAIIFTRGDAVQTIDMNQDNYLEEAMKMRNLLEEFHNAHGKHGIRKPTILGVREHVFTGSVSSLASFMSKQETSFVTLGQRVLAYLKVRMHYGHPDVFDRIFHITRGGISKASRVINISEDIYAGFNSTLRQGNITHHEYIQVGKGRDVGLNQIALFEGKVAGGNASYVC

SEQ ID NO: 158283 - protein, 996 aa, Zea Mays
MDLLMMPSNCGNLMLVQWPLFLLTSKIMLANDYASDCKDSQYELWDRISKDEYMAYAVKECYYSTEKILHSLVDAEGQHWVVRLFRDLNDSIAQGSLLVTINLKKLQLVQSRLTGLTGLLIRDETAGRAAGVTKALLELYEVVTHEFLSQNLREQFDTWQLLLRARNDGRLFSKILWPKDPEMKEQLKRLHLLLTVKDSATNIPKNLEARRRLQFFTNSLFMDIPQAKPVSEMIPFSVFTPYYSETVLYSMSELCVENEDGISILFYLQKIYPERIGCGESSEDDFKESPSDTMELRFWVSYRGQTLARTVRGMMYYRRALMLQSYLERRCLGGIEDGNSAAEYIDTQGYELSPDARAQADIKFTYVVSCQIYGLQKQTKKQEAADIALLLQRNEALRVAFIHEEEIISRDGKATTREYYSKLVKADVHGKDQEIYCIKLPGNPKLGEGKPENQNHAIIFTRGDAVQTIDMNQDNYLEEAMKMRNLLEEFHNAHGKHGIRKPTILGVREHVFTGSVSSLASFMSKQETSFVTLGQRVLAYLKVRMHYGHPDVFDRIFHITRGGISKASRVINISEDIYAGFNSTLRQGNITHHEYIQVGKGRDVGLNQIALFEGKVAGGNGEQVLSRDVYRLGQLFDFFRMLTFFFTTVGYYVCTMMTVLTVYIFLYGRVYLALSGLDYSISRQARFLGNTALDAALNAQFLVQIGIFTAVPMIMGFILELGLMKAVFSFITMQLQFCSVFFTFSLGTRTHYFGRTILHGGAKYRATGRGFVVRHIKFAENYRLYSRSHFVKALEVALLLIVYIAYGYTKGGSSSFILITISSWFLVMSWLFAPYIFNPSGFEWQKTVEDFDDWTNWLLYKGGVGVKGDNSWESWWDEEQAHIQTFRGRILETILSLRFLMFQYGIVYKLKITDHNTSLAVYGFSWIVLFVMVLLFKLFTATPRKSTALPTFVRFLQGVLAIGIIAGIALLIVLTSFTVADLFASALAFIATGCWP

SEQ ID NO: 158284 - protein, 949 aa, Zea Mays
MRLLAVQLVLLKLFLSFMREQFDTWQLLLRARNDGRLFSKILWPKDPEMKEQLKRLHLLLTVKDSATNIPKNLEARRRLQFFTNSLFMDIPQAKPVSEMIPFSVFTPYYSETVLYSMSELCVENEDGISILFYLQKIYPDEWANFLERIGCGESSEDDFKESPSDTMELRFWVSYRGQTLARTVRGMMYYRRALMLQSYLERRCLGGIEDGNSAAEYIDTQGYELSPDARAQADIKFTYVVSCQIYGLQKQTKKQEAADIALLLQRNEALRVAFIHEEEIISRDGKATTREYYSKLVKADVHGKDQEIYCIKLPGNPKLGEGKPENQNHAIIFTRGDAVQTIDMNQDNYLEEAMKMRNLLEEFHNAHGKHGIRKPTILGVREHVFTGSVSSLASFMSKQETSFVTLGQRVLAYLKVRMHYGHPDVFDRIFHITRGGISKASRVINISEDIYAGFNSTLRQGNITHHEYIQVGKGRDVGLNQIALFEGKVAGGNGEQVLSRDVYRLGQLFDFFRMLTFFFTTVGYYVCTMMTVLTVYIFLYGRVYLALSGLDYSISRQARFLGNTALDAALNAQFLVQIGIFTAVPMIMGFILELGLMKAVFSFITMQLQFCSVFFTFSLGTRTHYFGRTILHGGAKYRATGRGFVVRHIKFAENYRLYSRSHFVKALEVALLLIVYIAYGYTKGGSSSFILITISSWFLVMSWLFAPYIFNPSGFEWQKTVEDFDDWTNWLLYKGGVGVKGDNSWESWWDEEQAHIQTFRGRILETILSLRFLMFQYGIVYKLKITDHNTSLAVYGFSWIVLFVMVLLFKLFTATPRKSTALPTFVRFLQGVLAIGIIAGIALLIVLTSFTVADLFASALAFIATGWCVLCLAVTWKRVVKVLGLWDSVREIARMYDAGMGAIIFVPIVVFSWFPFVSTFQSRFLFNQAFSRGLEISLILAGNKANQQI

SEQ ID NO: 158285 - protein, 606 aa, Zea Mays
MNQDNYLEEAMKMRNLLEEFHNAHGKHGIRKPTILGVREHVFTGSVSSLASFMSKQETSFVTLGQRVLAYLKVRMHYGHPDVFDRIFHITRGGISKASRVINISEDIYAGFNSTLRQGNITHHEYIQVGKGRDVGLNQIALFEGKVAGGNGEQVLSRDVYRLGQLFDFFRMLTFFFTTVGYYVCTMMTVLTVYIFLYGRVYLALSGLDYSISRQARFLGNTALDAALNAQFLVQIGIFTAVPMIMGFILELGLMKAVFSFITMQLQFCSVFFTFSLGTRTHYFGRTILHGGAKYRATGRGFVVRHIKFAENYRLYSRSHFVKALEVALLLIVYIAYGYTKGGSSSFILITISSWFLVMSWLFAPYIFNPSGFEWQKTVEDFDDWTNWLLYKGGVGVKGDNSWESWWDEEQAHIQTFRGRILETILSLRFLMFQYGIVYKLKITDHNTSLAVYGFSWIVLFVMVLLFKLFTATPRKSTALPTFVRFLQGVLAIGIIAGIALLIVLTSFTVADLFASALAFIATGWCVLCLAVTWKRVVKVLGLWDSVREIARMYDAGMGAIIFVPIVVFSWFPFVSTFQSRFLFNQAFSRGLEISLILAGNKANQQI

SEQ ID NO: 158286 - protein, 405 aa, Zea Mays
MTVLTVYIFLYGRVYLALSGLDYSISRQARFLGNTALDAALNAQFLVQIGIFTAVPMIMGFILELGLMKAVFSFITMQLQFCSVFFTFSLGTRTHYFGRTILHGGAKYRATGRGFVVRHIKFAENYRLYSRSHFVKALEVALLLIVYIAYGYTKGGSSSFILITISSWFLVMSWLFAPYIFNPSGFEWQKTVEDFDDWTNWLLYKGGVGVKGDNSWESWWDEEQVYGFSWIVLFVMVLLFKLFTATPRKSTALPTFVRFLQGVLAIGIIAGIALLIVLTSFTVADLFASALAFIATGWCVLCVSTTSLFCSGITCIISMCYLIESNLLAVTWKRVVKVLGLWDSVREIARMYDAGMGAIIFVPIVVFSWFPFVSTFQSRFLFNQAFSRGLEISLILAGNKANQQI

SEQ ID NO: 158287 - protein, 89 aa, Zea Mays
MRMWRQQFIVRSDSQWLDDLALEAKGSDQEVGATISATRITTQYQQEQLTVSHETLTTLSAGTPPRMKGWLVKKSPPRRRKCEVFVFCV

SEQ ID NO: 158288 - protein, 79 aa, Zea Mays
MTLASAFPFSPPIPNAAAAAARLSLANAHMHSPPPLDSPLPMAPRRSPSNVSSPTSARSPMRWYSHPPHLPLSLCHFWS

SEQ ID NO: 158289 - protein, 99 aa, Zea Mays
MEMQPAPPPSAAASASQTAWPLDWPVDGRSLNPPSPPTISVQYSARYALYAYDDLYEDDLDKEVDHMSVSSKDWPPGSWSICCPILMRCLDWNAHSLLL

SEQ ID NO: 158290 - protein, 88 aa, Zea Mays
MEMQPAPPPSAAASASQTAWPLDWPVDGRSLNPPSPPTISVQYSARYALYAYDDLYEDDLDKEVDHMSVSSKVFGLECAQSVTLMQNV

SEQ ID NO: 158291 - protein, 52 aa, Zea Mays
MRTVCYFDAKRMNWLDRAANEVPWVRIQEACKWFCEGFCESLESLVLLRMVL

SEQ ID NO: 158292 - protein, 63 aa, Zea Mays
MEMQPAPPPSAAASASQTAWPLDWPVDGRSLNPPSPPTISVHISCSRALGMLSMPTMIYMRMT

SEQ ID NO: 158293 - protein, 92 aa, Zea Mays
MHSPPPLDSPLPMAPRRSPSNVSSPTSARSPMRWRCSPHHHHLLRRRHRRRRGHWIGRWTGARSILHRRPLYQSSIALGMLSMPTMIYMRMT

SEQ ID NO: 158294 - protein, 86 aa, Zea Mays
MQPAPPPSAAASASQTAWPLDWPVDGRSLNPPSPPTISVQYSARYALYAYDDLYEDDLDKEVDHMSVSSKVFGLECAQSVTLMQNV

SEQ ID NO: 158295 - protein, 89 aa, Zea Mays
MRPWGTRGHSRPTTRVLCTAAGSVQREGKELLVQHLLVGEKDVRLLVDLEKNIIAGDLSDLAVEHSLCPSKANGGMLGGFEGDRWYNIN

SEQ ID NO: 158296 - protein, 91 aa, Zea Mays
MRPWGTRGHSRPTTRVLCTAAGSVQREGKELLVQHLLVGEKDVRLLVDLEKNIIAGGVDLSDLAVEHSLCPSKANGGMLGGFEGDRWYNIN

SEQ ID NO: 158297 - protein, 139 aa, Zea Mays
MPQILICAAKSPSNNQPLNTRRPLSFVPQLIYGCDASYHTAPDDSIPIAKNRINGPRRSSSPSTDTAAPRLERRWLHRRFPIRHHKASQIRPAMDSQLRRWHAPAGWSPQARIDGGGCAHSTAPRRWWCCDTRRGFLTW

SEQ ID NO: 158298 - protein, 104 aa, Zea Mays
MLVCDLCLLNLAILVLSGLSRVLGTLRRILLSYLLHMHSHVRSLRQGQVHVGPITWEVLPHTTPPTASPSHPKFATHSSDHYKLSVPPAPLSCYEASAPLLTAD

SEQ ID NO: 158299 - protein, 96 aa, Zea Mays
MSSSSSIPPPPVSAQRSTSTTHLVVYIFVLWSSSIEKNPHRQVVYLLQAGVCDRVRQPGTIINHVMRKTTQVDPRIMQRLDISARRCCQSDKSEDG

SEQ ID NO: 158300 - protein, 60 aa, Zea Mays
MSSSSSIPPPPVSAQRSTSTTHLVVYIFVLWSSSIEKNPHRQVVYLLQAGVCDRVRQPGR

SEQ ID NO: 158301 - protein, 61 aa, Zea Mays
MSSSSSIPPPPVSAQRSTSTTHLVVYIFVLWSSSIEKNPHRQVVYLLQAGVCDRVRQPGRK

SEQ ID NO: 158302 - protein, 293 aa, Zea Mays
MRFVVTKVCSGGGKARAGALHIAGAGIGIETPALLLSTRKGLPAFLSCDLLASLPLPDSLLLHVCPTHFIEGPPVKTISAIRGLHGMLGLPDHILVAAASDSIESLPSCEATNKFGASFETPSGRRLVKPSDYMELISCMKPNIWASLADEVPAWVTEKRNKVSVDRTLRWLDACIALDVASGTNSFGVIVGGSSLEQRKLCATEVSKRNVSGFWIAGFGFGESIEERCTLLNATTDCLPREKPRLVSRLGLPEEVLEGVAAEKCRMVYSTLLMAIQQRLTCVLQHIGRIRHG

SEQ ID NO: 158303 - protein, 312 aa, Zea Mays
MLGLPDHILVAAASDSIESLPSCEATNKFGASFETPSGRRLVKPSDYMELISCMKPNIWASLADEVPAWVTEKRNKVSVDRTLRWLDACIALDVASGTNSFGVIVGGSSLEQRKLCATEVSKRNVSGFWIAGFGFGESIEERCTLLNATTDCLPREKPRLVSRLGLPEEVLEGVAAGIDLFDSTYIYQLTMGGFALIFPVDMVEREMQNGVLNTTDGDSTKINLRATTYRKDTSRLVDSCNCFTCQNHTRAYLNHLLNVHEMLAQILLEIHNTHHYLRFFHSIREAIKVGEFDLFRQEFVKKRRTHFAAVVV

SEQ ID NO: 158304 - protein, 179 aa, Zea Mays
MLGLPDHILVAAASDSIESLPSCEATNKFGASFETPSGRRLVKPSDYMELISCMKPNIWASLADEVPAWVTEKRNKVSVDRTLRWLDACIALDVASGTNSFGVIVGGSSLEQRKLCATEVSKRNVSGFWIAGFGFGESIEERCTLLNATTDCLPREKPRLVSRLGLPDTFTNLLWVVSH

SEQ ID NO: 158305 - protein, 369 aa, Zea Mays
MRFVVTKVCSGGGKARAGALHIAGAGIGIETPALLLSTRKGLPAFLSCDLLASLPLPDSLLLHVCPTHFIEGPPVKTISAIRGLHGMLGLPDHILVAAASDSIESLPSCEATNKFGASFETPSGRRLVKPSDYMELISCMKPNIWASLADEASGTNSFGVIVGGSSLEQRKLCATEVSKRNVSGFWIAGFGFGESIEERCTLLNATTDCLPREKPRLVSRLGLPEEVLEGVAAGIDLFDSTYIYQLTMGGFALIFPVDMVEREMQNGVLNTTDGDSTKINLRATTYRKDTSRLVDSCNCFTCQNHTRAYLNHLLNVHEMLAQILLEIHNTHHYLRFFHSIREAIKVGEFDLFRQEFVKKRRTHFAAVVV

SEQ ID NO: 158306 - protein, 377 aa, Zea Mays
MRFVVTKVCSGGGKARAGALHIAGAGIGIETPALLLSTRKGLPAFLSCDLLASLPLPDSLLLHVCPTHFIEGPPVKTISAIRGLHGMLGLPDHILVAAASDSIESLPSCEATNKFGASFETPSGRRLVKPSDYMELISCMKPNIWASLADEVPAWVTEKRNKVSVDRTLRWLDACIALDVASGTNSFGVIVGGSSLEQRKLCATEVSKRNVSGFWIAGFGFGESIEERCTLLNATTDCLPREKPRLVSRLGLPEEVLEGVAAGIDLFDSTEMQNGVLNTTDGDSTKINLRATTYRKDTSRLVDSCNCFTCQNHTRAYLNHLLNVHEMLAQILLEIHNTHHYLRFFHSIREAIKVGEFDLFRQEFVKKRRTHFAAVVV

SEQ ID NO: 158307 - protein, 305 aa, Zea Mays
MRFVVTKVCSGGGKARAGALHIAGAGIGIETPALLLSTRKGLPAFLSCDLLASLPLPDSLLLHVCPTHFIEGPPVKTISAIRGLHGMLGLPDHILVAAASDSIESLPSCEATNKFGASFETPSGRRLVKPSDYMELISCMKPNIWASLADEVPAWVTEKRNKVSVDRTLRWLDACIALDVASGTNSFGVIVGGSSLEQRKLCATEVSKRNVSGFWIAGFGFGESIEERCTLLNATTDCLPREKPRLVSRLGLPGACAVFSPVTLDFVMLFPQGQWLRKLHFLFCLICDFLHFNLIIIINKLQPSC

SEQ ID NO: 158308 - protein, 122 aa, Zea Mays
MGGFALIFPVDMVEREMQNGVLNTTDGDSTKINLRATTYRKDTSRLVDSCNCFTCQNHTRAYLNHLLNVHEMLAQILLEIHNTHHYLRFFHSIREAIKVGEFDLFRQEFVKKRRTHFAAVVV

SEQ ID NO: 158309 - protein, 178 aa, Zea Mays
MGGCCCCSSRTSEAVRARAPVDIYHQQNLEEQEPLSSIFDGSSPASAIVAVDTNLDTSTPDTYRAPPAPLPYDVILAVPNNPGFGNSVGLEKPDTKSKTDDQQESINDQESLKVDESCKKSVTEDKADEEDVCPICLEEYDEENPRSITKCEHHFHLCCILEWMERKDTCPVCDQMFE

SEQ ID NO: 158310 - protein, 163 aa, Zea Mays
MLVHQQNLEEQEPLSSIFDGSSPASAIVAVDTNLDTSTPDTYRAPPAPLPYDVILAVPNNPGFGNSVGLEKPDTKSKTDDQQESINDQESLKVDESCKKSVTEDKADEEDVCPICLEEYDEENPRSITKCEHHFHLCCILEWMERKDTCPVCDQITLVDEMFE

SEQ ID NO: 158311 - protein, 103 aa, Zea Mays
MADHLAKGGPPHPIACPFCDQAKETINHILLPCVFTRQIWSLVLQSLVLAAVAPTAAVWHLSTWWDTNRSSPKEFHKGLNYIIISWLGKFGSIRIPVFLLDSN

SEQ ID NO: 158312 - protein, 168 aa, Zea Mays
MTSPWRSTKTCSSSRRGRSWWASGALLAVASQSTARSPSSRAGGAPQMARSCRRHSRARPARWSMPGCSSRRGTAGMACRPSSSPACSGSLSSRSRSERAGRSTSPFKSSRYACMCMHIRPAHVSAGVLYLHLSHVQHADYSGRSHHVLDRVDYTCSWALCSHVLINQ

SEQ ID NO: 158313 - protein, 100 aa, Zea Mays
MQTVVARATGLAVPAPCPPLDSLPAGAPSLVAINRARPCCVKRWRRKELDEGRKAQCNTCFVFGRNQSHVVFDGLFEPKSMDDLVDLNQIGHGKLNCCLC

SEQ ID NO: 158314 - protein, 97 aa, Zea Mays
MHQWFSTQLLSPNASNKVINILKHQGGGKCTGACLGNTRLVLLDDDQLMIILVLALDQAGSSISITMRSSPRLGSTWLAFHITRLFIVPHEIHDAHV

SEQ ID NO: 158315 - protein, 326 aa, Zea Mays
MDVKNAFLSGDLHEVYMHPPLGVHTPSWHVCRLCRVLYGLKQAPRAWFERFLSVITAAGFSTSEHDPALFVHVSPKGRTLLLLYVDDMLITGDNSEHISNVKQYLSKEFQMSDLGPLSYFLGIEVPQTPKGFYLSQSKYIQDILDRSGITDTRIVATPMDIHLKLRLKDGTPLEDPTRYRHIVGSLVYLTITRPYIARAVHMLNQFVSTPTSVHYGHLLRVLRYLRGTRSRCLLYAFDSPLQLHAYSDATWASDLLTVALLQVTVFFLDPLLLLGNPRSKRPYLVLVLKPNFRLLLLPLLKLFGCADSWLILVSPVTLLHLCYVIT

SEQ ID NO: 158316 - protein, 508 aa, Zea Mays
MSIQHAMPEDFLLFLPDEHTTTQILNEGRPFRGPRFSLSFKRWSRFSHASSTSMTALVDIEIQGIPAHAWELSTTKMLLQDSCWVLELLRDSGSTFLLRAWCFDPNRLYREMDLHIVESGVDEQKNRCLTYNISIAVSPVPLQLTSISVTSSPSSEGGQFGEGDDRDPSSSQQRRLPPQPRRGSVHLRQLPTKARAASLNEPHPGARVASFKDVARTKVPPVVGSLDGSRPTSPQHYTVVARPLELDGTDSPQDTGPLGSIDDGLRDPLSLTSPRQDVPGAEPLEQAMTGPSHDAGRTPGNIFEVMWAPEDLGSTISPDTGMPSSTRPSLPQLIHCTNDENLPEHDHLRTPPIGCPHSPKLVVYSRKRINKKSISENKDEERNGPNESEMGGKAKKVSDLLATPHDPSLMSKSAQAPDIIPRRSHQIAGVGVEFDKQDLCSRSTKRVMQALKVIGDSEGISQQAKEDYLKVFSNELPLSHVEALVAFFGWAVPDELKIGSNSVGISAC

SEQ ID NO: 158317 - protein, 92 aa, Zea Mays
MSSAPPHVRSCSKDSCTSPASLGGDHHRSMDLGEWRSRIYSTGVDEVCFPVLEKRRRNRSSCTAESSPPSRKGITPLHPRSLNRSGHYDLFS

SEQ ID NO: 158318 - protein, 151 aa, Zea Mays
MSSAPPHVRSCSKDSCTSPASLGGDHHRSMDLGEWRSRIYSTGVDEVCFPVLEKRRRNRSSCTAESSPPSRKGITPLHPRSLNRSGVDLICNGLLGFRPGVIWFVNESLCHALSCFFCAVSWLHSIGIVQFIRLGASFFPDKTSKRSKLHV

SEQ ID NO: 158319 - protein, 82 aa, Zea Mays
MTWRGTPSPHTSTVPIDSLSAGAHRLGVQWLTDPDYRCAVTAHVPTITGMGDHVSGRVRRAIYCQVHSDTRLTDLPYFSACA

SEQ ID NO: 158320 - protein, 149 aa, Zea Mays
MRSSLPCRNSMRIISTRHHPVHAHARAIRFLMRPLHIRAQPLVGGGVVEEPAEDVQRHERKGPRRQLPSAVVQENQKQLTGDATREKPPQESANRHQEAIASSVHAVQLEKSSTRSNTHSRPSSEKGRHQKEASRGRCQEAAKEAQIQG

SEQ ID NO: 158321 - protein, 105 aa, Zea Mays
MYPASCNSVSCFLSSFNYSTDILYGRLEIGAVAGKRSITNSTSLSGGIPGNSSGKTSRNSLTTRMFLPTNLPSTIYMAGLVEGVMVIMTSNLSPFELVSSTVPLA

SEQ ID NO: 158322 - protein, 107 aa, Zea Mays
MVATFSSPACCSLASAPCELLLPRPVCSSGLDGCQRRFFDLALTLNRCSTLCHVCYNIIVRYTHSRQFSLSFLGYYLVSSCASCTSCVRIKHQDFEEKKAPVHRPVK

SEQ ID NO: 158323 - protein, 533 aa, Zea Mays
MDSDNDCGSDAGAEWVWVRRPSEVEAAAAAAGWLADEEARPLKVVFGSPAKYFTDAAPIGNGRLGAMVWGCVESERLQLNHDTLWTGGPGNYTNPNAPAVLSKVRSLVENGKYPEATSAAYDLSGDQTQVFQPLGDIDLVFGEDIKYTNYRRELDLHTATVTVTYTVGDIVYTREHFSSNPHQVIVTKISANKPGNVSFTVSLTSPLDHKIRVTHANEIIMEGSCPGQRPEEIKTAADQPIGIKFSAILYLQINGANSTVEVLNDNMLKLDCADSVVLLLAATTSFQSAFIKPSESKLDPTVSAFTTLSIARRTSYSQLKAYHIDDYQTLFQRVSLQLSQGSNYDLRRSRLVQSAETSSQGANVSDYGFQISGCTRLTSLNSFVKPTVERIVTFKDNEDPSLVELLFQFGRYLLISCSRPGTQISNLQGIWSNDTSPPWDAAPHPNINLQMNYWPALPCNLSECQEPLFDFIGSLSINGAKTAKVNYEASGWVSHQVTDLWAKTSPDAGDPVWALWPMAFFRENSVSTIGRIS

SEQ ID NO: 158324 - protein, 448 aa, Zea Mays
MDSDNDCGSDAGAEWVWVRRPSEVEAAAAAAGWLADEEARPLKVVFGSPAKYFTDAAPIGNGRLGAMVWGCVESERLQLNHDTLWTGGPGNYTNPNAPAVLSKVRSLVENGKYPEATSAAYDLSGDQTQFGRYLLISCSRPGTQISNLQGIWSNDTSPPWDAAPHPNINLQMNYWPALPCNLSECQEPLFDFIGSLSINGAKTAKVNYEASGWVSHQVTDLWAKTSPDAGDPVWALWPMGGPWLATHLWEHYCFTLDKHFLEKTAYPLLEGSARFLLDWLIEGHRGYLETNPSTSPEHYFIAPDGKEACVSYSTTMDISIIREVFSALILSADILGKSDTNVVQRIKKALPNLPPMKVARDGTIMEWAQDFQDPEIHHRHVSHLFGLYPGHTMSLEETPDLCRAVANSLYKRGSQLRCRKCWYRALGPTCTFSLLCPATSGLKATLKV

SEQ ID NO: 158325 - protein, 767 aa, Zea Mays
MDSDNDCGSDAGAEWVWVRRPSEVEAAAAAAGWLADEEARPLKVVFGSPAKYFTDAAPIGNGRLGAMVWGCVESERLQLNHDTLWTGGPGNYTNPNAPAVLSKVRSLVENGKYPEATSAAYDLSGDQTQVFQPLGDIDLVFGEDIKYTNYRRELDLHTATVTVTYTVGDIVYTREHFSSNPHQVIVTKISANKPGNVSFTVSLTSPLDHKIRVTHANEIIMEGSCPGQRPEEIKTAADQPIGIKFSAILYLQINGANSTVEVLNDNMLKLDCADSVVLLLAATTSFQSAFIKPSESKLDPTVSAFTTLSIARRTSYSQLKAYHIDDYQTLFQRVSLQLSQGSNYDLRRSRLVQSAETSSQGANVSDYGFQISGCTRLTSLNSFVKPTVERIVTFKDNEDPSLVELLFQFGRYLLISCSRPGTQISNLQGIWSNDTSPPWDAAPHPNINLQMNYWPALPCNLSECQEPLFDFIGSLSINGAKTAKVNYEASGWVSHQVTDLWAKTSPDAGDPVWALWPMGGPWLATHLWEHYCFTLDKHFLEKTAYPLLEGSARFLLDWLIEGHRGYLETNPSTSPEHYFIAPDGKEACVSYSTTMDISIIREVFSALILSADILGKSDTNVVQRIKKALPNLPPMKVARDGTIMEWAQDFQDPEIHHRHVSHLFGLYPGHTMSLEETPDLCRAVANSLYKRGDEGPGWSTSWKMVLWARLHNSDHAYKMILQLITLVDPEHEVSREGGLYSNLFTAHPPFQIDANFGPALWRGCQKS

SEQ ID NO: 158326 - protein, 69 aa, Zea Mays
MMEEKTCNGRLLFFSFHYCTFIARSCCSDHVFLFVFSIYIQKHYMDSRRGLVIYRNLSHKRRQNWKLSK

SEQ ID NO: 158327 - protein, 52 aa, Zea Mays
MYETSLSLKRRICNTQNPILGFIKVSPKGFKLKFPLIPGFLSLKSCIHAGDF

SEQ ID NO: 158328 - protein, 183 aa, Zea Mays
MAARRGREWDGDEQGAALPTPAPLGAPVVCLLSSAGDLAAGAFVGSLVGYGKGLITNQGTKACLSIAGSSAKTFAALAGVQSFIMCLLRRLRGKDDSCCTGIALSFPGAPQAMFHSCVTFAAFSCIMDGLSKQQAAMALTLDVKSPTVKYEEGRVIPPFTLPPLLDALDPLGSFCQTLIKPKH

SEQ ID NO: 158329 - protein, 71 aa, Zea Mays
MFHSCVTFAAFSCIMDGLSKQQAAMALTLDVKSPTVKYEEGRVIPPFTLPPLLDALDPLGSFCQTLIKPKH

SEQ ID NO: 158330 - protein, 89 aa, Zea Mays
MRRPAPVHGSIPHMAGKLHTAHCLAHTHLTAAALDAVRLLPRPTALIWSDPRSRWPRTTCIRGADTHGSCHVATAAAARADMGLGEKSV

SEQ ID NO: 158331 - protein, 332 aa, Zea Mays
MFAESFRVESPRVRYGDGEIQSEYRYDTTEVVPPGNSGAGWVVRPKSVTYNFKTSTNVPKLGVMLVGWGGNNGTTLTAGVIANREGISWETKEKVHRANYFGSLTQASTIRIGSHNGEEIYAPFKSLVPMVNPNTIVFGGWDISNLNMADAMARAQVLDIHLQKQLRPYMESMQPLAGIFNPDFVAANQGARANNIIKGTKKEQVEQIRKDIREFKEKTKVDKVVVLWTANTERYSNVVAGLNDTMDNLLASLDKNEAEISPSTLYAIACVFEGVPFVNGSPQNTFVPGLMELAIKKNSVIGGDDFKSGQTKMKSVLVDFLVGAGIKETMMA

SEQ ID NO: 158332 - protein, 422 aa, Zea Mays
MFFCSLCKAEHSKHCRVCNKCVDGFDHHCRWLNNCIGKRNYKGFFILLASAVLLLIMKWLVGALVLILFFMKRGEFSGQITSKLGSSFSVVAFVIVVVTCTLLAMVATIPLSQLLCFHILLIKKGISTYDYIVALREQEQQEHSEHQSPQISIISSITGLSTSSSFGPLHRGSWCTPPRLLVEDQDVFHPDMPQNSTGKKARKDEGSKRKPPGAVKISTWSLARLNAEDVTKAAVEAKKRSKVLQPITRRGNILKPDKRTDKSRVFLPVPEQSPDPMARTSASGTDGNLSDMMMETPASLAPLQHEARSDYQPSAVTSIMNLNLTSSPESSLESPDLHPFRISMSGADELRSFMSLAASESTAQKTIALSRSTSGGYEASGGDDSDQIPSRIVHRSSNWTNVILNSGRQATMSDLNLPRLHL

SEQ ID NO: 158333 - protein, 541 aa, Zea Mays
MRRHGWQLPYHPLQVVAIAVFLALGFAFYVFFVPFVGGDRLQYLLMGLYTPLITCVILLYIWCAGTDPGDPGIFLNSKRPPEKQGSSTHEYPEGVSFSNCCRVVHNSENISNNFEVKDSSSYLTFTRVLCLIYFPFSCLCKRWFHSDDQSSEQNTSEEGMFFCSLCKAEVLQHSKHCRVCNKCVDGFDHHCRWLNNCIGKRNYKGFFILLASAVLLVTCTLLAMVATIPLSQLLCFHILLIKKGISTYDYIVALREQEQQEHSEHQSPQISIISSITGLSTSSSFGPLHRGSWCTPPRLLVEDQDVFHPDMPQNSTGKKARKDEGSKRKPPGAVKISTWSLARLNAEDVTKAAVEAKKRSKVLQPITRRGNILKPDKRTDKSRVFLPVPEQSPDPMARTSASGTDGNLSDMMMETPASLAPLQHEARSDYQPSAVTSIMNLNLTSSPESSLESPDLHPFRISMSGADELRSFMSLAASESTAQKTIALSRSTSGGYEASGGDDSDQIPSRIVHRSSNWTNVILNSGRQATMSDLNLPRLHL

SEQ ID NO: 158334 - protein, 427 aa, Zea Mays
MFFCSLCKAEVLQHSKHCRVCNKCVDGFDHHCRWLNNCIGKRNYKGFFILLASAVLLLIMKWLVGALVLILFFMKRGEFSGQITSKLGSSFSVVAFVIVVVTCTLLAMVATIPLSQLLCFHILLIKKGISTYDYIVALREQEQQEHSEHQSPQISIISSITGLSTSSSFGPLHRGSWCTPPRLLVEDQDVFHPDMPQNSTGKKARKDEGSKRKPPGAVKISTWSLARLNAEDVTKAAVEAKKRSKVLQPITRRGNILKPDKRTDKSRVFLPVPEQSPDPMARTSASGTDGNLSDMMMETPASLAPLQHEARSDYQPSAVTSIMNLNLTSSPESSLESPDLHPFRISMSGADELRSFMSLAASESTAQKTIALSRSTSGGYEASGGDDSDQIPSRIVHRSSNWTNVILNSVYLDHLLGGVDGSLLDSL

SEQ ID NO: 158335 - protein, 80 aa, Zea Mays
MSSLRPSLLLVVSLLAAALLAAAPSSASRDLRPLQASFVVRGRVWCDNCRAGFETPASTYIADNSPFAKSEGVAGKDHVQ

SEQ ID NO: 158336 - protein, 57 aa, Zea Mays
MLWLVVRGPPSSLPATTVLHPTFVWQMLWGSRRTLPFLDARRSSRCTRMRMTVSNYA

SEQ ID NO: 158337 - protein, 733 aa, Zea Mays
MRVLNRSDYYVSNRGDYYGPYTSSTVDAAAVLLADAAEARLDWRFAKLPQPQAEEVDEPFRDVANPPSHPSIVYESYRDAAEARLDWRFAKLLQPQAEEVDEPFRDVANPPSHPSIVYESYRDEAMAGAGARALAGRCNERPARGRNSSSDDRSEQSYLTPTCEATNRAPAPDNRLMASVDHRRRQTLDEEGGVEQESGGAIADKVEAVATHELPRDETGAEVATQQPWRLCRSTSSLVMMGSDGACMGFAATHRGELVAGGHAGGALCSGVVAVSVGHVRVHVQPCVRSADGAAHPGHPRGVGGRRHPFPLHLLLRGAVLAGRAPGDLRARRAAPTTSSIEEDVPFDTLTKCSMRVLNRGTNYGHNTAASLKTSGKRAEFIVSIVKGRGGSLFREKMIVGVGAHFIVIVDASKLVSRLGCMGANPIEVIPFDALHALGLICGLFDGLPGSHTRRRSVPAAAANGKEDSKQYIITDNDNYIVEDGIRGDLRGISDRLLQITGVIEHDMFLGYFSHAEEGGDARTKVQLTEAAERCFDELVGRGLLRLTVGSNGAAGARMPIMICSFAKDVYDHENFCTESAANNLSEVRRLSIVENEADDRIGEGMTMAAWTTSMETVVKLEQAGERLWVKMGGHKVLNVDKYDNIFAKPGGSFRGPDVHVETARRNTVTYSILEQRDAQKVQLFKSINSGAVFGFPENLEEAARASLMSGIKQPWPPPMELSDWICAGPPAT

SEQ ID NO: 158338 - protein, 505 aa, Zea Mays
MAKLSCFPALLPGKRKKKTRKITDAIKASGNECPKVKPVEVELIDPTLGAGVVQDVVPAELSVPVEDRNNKEAADQLVLVKESDLSDFDFSFHAAMKPVRSDSDVALDTSADAAVADTSPKLKRSCSNIETKRPGSRSAPEMPARSRSYGDLGNLVAGLALDATATPHGAPEASPASVKTSRTADRVMLKKRSSSQVLPSRSRKLWWRLFLWSHRNLHMPRSARTAHRSFSPGRHDGYTSDTFEEGPAADRKNKTVMVDESPPAASVPNQWVAFCAESSIHDRVSAWVSSIESEPPFDIAEEDDDNYDGEDDEENGECAASQPRHLELGEPSSGKGGNSKSKRCATTADEVVQANTVVQSLNAFSSVAHISGMGLKVVPMIAPFSTLRAVNLSSNLIVHISPGSLPKGLHSLDLSRNKIASVEGLRELTKLRVLNLSYNRISRIGHGLSNCTAIRELYLAGNKISDVEGLHRLLKLAKNQLRDSRCSLETGDGGVTACRQTQTTP

SEQ ID NO: 158339 - protein, 453 aa, Zea Mays
MAKLSCFPALLPGKRKKKTRKITDAIKASGNECPKVKPVEVELIDPTLGAGVVQDVVPAELSVPVEDRNNKEAADQLVLVKESDLSDFDFSFHAAMKPVRSDSDVALDTSADAAVADTSPKLKRSCSNIETKRPGSRSAPEMPARSRSYGDLGNLVAGLALDATATPHGAPEASPASVKTSRTADRVMLKKRSSSQVLPSRSRKLWWRLFLWSHRNLHMPRSARTAHRSFSPGRHDGYTSDTFEEGPAADRKNKTVMVDESPPAASVPNQWVAFCAESSIHDRVSAWVSSIESEPPFDIAEEDDDNYDGEDDEENGECAASQPRHLELGEPSSGKGGNSKSKRCATTADEVVQANTVVQSLNAFSSVAHISGMGLKVVPMIAPFSTLRAVNLSSNLIVHISPGSLPKGLHSLDLSRNKIASVEGLRELTKLRVLNLSYNRISRIGHVCRCGSE

SEQ ID NO: 158340 - protein, 387 aa, Zea Mays
MPRSARTAHRSFSPGRHDGYTSDTFEEGPAADRKNKTVMVDESPPAASVPNQWVAFCAESSIHDRVSAWVSSIESEPPFDIAEEDDDNYDGEDDEENGECAASQPRHLELGEPSSGKGGNSKSKRCATTADEVVQANTVVQSLNAFSSVAHISGMGLKVVPMIAPFSTLRAVNLSSNLIVHISPGSLPKGLHSLDLSRNKIASVEGLRELTKLRVLNLSYNRISRIGHGLSNCTAIRELYLAGNKISDVEGLHRLLKLAVLDLSFNKITTAKALGQLVANYHSLLALNLVGNPVQANIGDDALRRAVTGLLPSLAYLNKQPVKPQRIAREVATDSIARAALSGSDSRSIRKRTSRRLTQSPRSSSLTRARGGGGGGSPTPRNTSRRR

SEQ ID NO: 158341 - protein, 177 aa, Zea Mays
MSSLVRSFGSLYSQKLRSTTRLGSATAAPPRFQALVRSGFSGSSHGGDVRRPPARPSQHQSQDKERTPFFILARLAVGSILAAAAPMLHSRWASFLLIQSEVDMVKDTAEVVAEAVEDAATVAEKVSSEVAEQLPENGRLRTAVVLLEHASKEVAEEAHLAQNIIHKSKQRASINNS

SEQ ID NO: 158342 - protein, 130 aa, Zea Mays
MVKDTAEVVAEAVEDAATVAEKVSSEVAEQLPENGRLRTAVVLLEHASKEVAEEAHLAQNIIHKWSPTLRDEVSSPEPATEKRVYFFISGTRLRLACLERPDSTMKQPNVPRLSPAVNVEYGTWNCRYAV

SEQ ID NO: 158343 - protein, 195 aa, Zea Mays
MKRPTSRGSSMVSGQATTDLQEDSCRSMEPHGVDGDATAAAERDDVDAGAYDEEVDEEEELAGSRGGLGEKKRRLAADQVRALERSFEVDNKLDPERKARIARDLSLHPRQVAVWFQNRRARWKTKQIERDFAALRVRHDALRVECDALRRDKDALAAEKGAEGHGGKADGGEAGVRGGGAAAGGDEVSSSSRCV

SEQ ID NO: 158344 - protein, 88 aa, Zea Mays
MHKPERPSRTMQRPDTHKTVATCLTPPPPPLRDQNKFHRTDIIEHYLLPSSCASELRSGCCYASSPQFRLNTEQPGCSCHLNISGTHN

SEQ ID NO: 158345 - protein, 71 aa, Zea Mays
MQYCQIPSVASCDGCIVKIVSNQINYCQIVFKLLSKCSQIVLFHNVVEMMSDCFLKISLKDCQNLFKFKYW

SEQ ID NO: 158346 - protein, 313 aa, Zea Mays
METYTTDDALTAMGFGKFQALVLVYAGTGWLADSMELMLLSFVGPLVRQQWNVSAQHESLLSSVVFTGMLLGACSWGYISDKYGRRTALLFSVTLTAGAGLTSALSPNYISLLALRFLVGVGVGGTHVFSSWFLEFVPTKNRGAWMLVFSAFWTIGTIFEASLAWVVLSRLSWRWLLAFTSLPCFALLVFFVVAPESPRYLCAQNRISDATLVLERMSRTNKAALPPGALAYHHTETQLGLGESTTDDASKSGSGGMAALRRLFSRKLLRSTLLIWFVWFANSFAYYGLVLLTSQLSDANRRVSGAGYFCHYR

SEQ ID NO: 158347 - protein, 61 aa, Zea Mays
MFFKKASSKIIAFRIEIIRNMWRVAIPFIFSLCRLKRASLTLTRGVSTVHWMAPPTKKTGA

SEQ ID NO: 158348 - protein, 445 aa, Zea Mays
MAPSVAVENLNPKVLKCEYAVRGEIVIHAQRLQQQLQTQPGSLPFDEILFCNIGNPQSLGQQPVTFFREVLALCDHPCLLEKEETKSLFSADAISRAKQILATIPGRATGAYSHSQGIKGLRDAIAAGITSRDGFPANADDIFITDGASPGVPYYLDEKTGWGLEISDLKKQLEDARSKGIDVRALVVINPGNPTGQVLAEDNQYDIVKFCKNEGLVLLADEVYQENIYVDNKKFNSFKKIARSMGYGEDDLPLVSFQSVSKGYYGECGKRGGYMEITGFSAPVREQIYKVASVNLCSNITGQILASLVMNPPKVGDESYASYKAEKDGILQSLARRAKALEDAFNTLEGFSCNKAEGAMYLFPQIHLPHKAIEAAKAAKKAPDAFYALRLLESTGIVVVPGSGFGQVPGTWHVRCTILPQEDKIPAVITRFKAFHEAFMAEYRD

SEQ ID NO: 158349 - protein, 205 aa, Zea Mays
MAPSVAVENLNPKVLKCEYAVRGEIVIHAQRLQQQLQTQPGSLPFDEILFCNIGNPQSLGQQPVTFFREVLALCDHPCLLEKEETKSLFSADAISRAKQILATIPGRATGAYSHSQGIKGLRDAIAAGITSRDGFPANADDIFITDGASPGVPYYLDEKTGWGLEISDLKKQLEDARSKGIDVRALVVINPGNPTGFLLKTTNMI

SEQ ID NO: 158350 - protein, 482 aa, Zea Mays
MAPSVAVENLNPKVLKCEYAVRGEIVIHAQRLQQQLQTQPGSLPFDEILFCNIGNPQSLGQQPVTFFREVLALCDHPCLLEKEETKSLFSADAISRAKQILATIPGRATGAYSHSQGIKGLRDAIAAGITSRDGFPANADDIFITDGASPGVHMMMQLLIRNEKDGILCPIPQYPLYSASIALHGGALVPYYLDEKTGWGLEISDLKKQLEDARSKGIDVRALVVINPGNPTGQVLAEDNQYDIVKFCKNEGLVLLADEVYQENIYVDNKKFNSFKKIARSMGYGEDDLPLVSFQSVSKGYYGECGKRGGYMEITGFSAPVREQIYKVASVNLCSNITGQILASLVMNPPKVGDESYASYKAEKDGILQSLARRAKALEDAFNTLEGFSCNKAEGAMYLFPQIHLPHKAIEAAKAAKKAPDAFYALRLLESTGIVVVPGSGFGQVPGTWHVRCTILPQEDKIPAVITRFKAFHEAFMAEYRD

SEQ ID NO: 158351 - protein, 166 aa, Zea Mays
MRRFFHPLSRGSGTNANNNVNNTPIVGGTFNPDDIVADPALRRQIYEYDKDVQDQVRRAYVLNGPCQPKGLDFPRRQYGQSLRPFKEEWYDKYDWLEYSESKDAVYCFYCFLFKQAVKGDKYEAFTKVGYNNWKDAVERLKSHVGGVNKNILGEIGDRNFSILIDE

SEQ ID NO: 158352 - protein, 153 aa, Zea Mays
MCEMTTAQEGRTGGGDQHRGWRSHAGRGQAGRAVQMWRQRSGGPCRAGNGGGPHVEACVFSRQFWFQLLQKVGLQKLCHEPGIASFGDWWWHASEAVSRLSRHGLNSMIILGAWSLWKHHNRCYATETYKLADLNAEAQESGDDEDDNVWEEG

SEQ ID NO: 158353 - protein, 175 aa, Zea Mays
MAGKMKELDGASPAKIFIGGLSKDTSMSTFKEHFGKYGDIIDAVIMKDRYTQKPRGFGFITFADPTVVDRVIEDEHVINGKPVEIKRTIPKGAAPLKDFKTKKIFVGGLPSALKEDEFKEFFSKFGKVVEHEIIRDHATNRSRGFGFIVFDAEKAVDDLLHKKGNMIDLNGSQLL

SEQ ID NO: 158354 - protein, 314 aa, Zea Mays
MAGKMKELDGASPAKIFIGGLSKDTSMSTFKEHFGKVIEDEHVINGKPVEIKRTIPKGAAPLKDFKTKKIFVGGLPSALKEDEFKEFFSKFGKVVEHEIIRDHATNRSRGFGFIVFDAEKAVDDLLHKKGNMIDLNGSQVEIKKAEPKKPSNQPPRSLDSEPRGRPYADSYDGFGSSYNYGGSFGPYRSPRSFGARPSSYSSAYGPGDYGSGYATYGGALVGYREPSLYSSRYGSTYGGSLGGGYGGVSYDGGLAGAYERDAGGYGGSSYGRSYDSSWANTGDGFGTGGLYGARTGYGGSGGSGAAGRYHPYGR

SEQ ID NO: 158355 - protein, 183 aa, Zea Mays
MIDLNGSQVEIKKAEPKKPSNQPPRSLDSEPRGRPYADSYDGFGSSYNYGGSFGPYRSPRSFGARPSSYSSAYGPGDYGSGYATYGGALVGYREPSLYSSRYGSTYGGSLGGGYGGVSYDGGLAGAYERDAGGYGGSSYGRSYDSSWANTGDGFGTGGLYGARTGYGGSGGSGAAGRYHPYGR

SEQ ID NO: 158356 - protein, 109 aa, Zea Mays
MPPGRDRLWPRPPSRPEFWHVFLLRPISHLTIHGAARRPPPTVVPRSARSCQILPQSCCWSPSCSPRQRPVHRRRSSTCCLCELYRARPTMALTPQPFSCSSHRDCHVH

SEQ ID NO: 158357 - protein, 432 aa, Zea Mays
MASPPPGAGLTEYERRREENIRRNETILAALRRKAAELSASFIPTASSPKRPKKQHPLARTTSPVVLRRSLRTRGIPAGESSACDGANTSLNTPPSPTKPRSTRFSSSLASALRDATAAEPSPSVKSWIGAPDGFDPCRELVLRPVDVRKVVPGRILSLRILPLSDRTVVVAGNVHGHIGFWDVDRLVEDEDGDGVDGVFEYFPHRGSVGGIVMHPAMLHKIYSSSYHGEICLMDVEKENFNTVYLCDYPIFSLCQAPNSPSSLYFAEGNELKLFDERMGKVPTTWSLHDHRINSIDFRPENPYIFATSSTDRTVCIWDIRRMKKKGSESLKVLEYNKSIQSAYFSPSGNMLATTRAIWSWNDSNLFVGSMKRAIDVISVDRRQKSISASYMAFLESEHMTAIPCRFTLHPCKVGHLAGASSSGKVFLWTRA

SEQ ID NO: 158358 - protein, 493 aa, Zea Mays
MPGGKRRRARNPTAGGPQRSAGAGRRRPVPELPSFVSPASVAAAFSPASGGRSRGRCARRCGAYSDGESSHAVPFSYPSLRSCSAYPERDQAQALEVTIDTAPCADPAASVPMYSYGPAVLGETGLVLSADEEEACDRGLHLGLGFRDGGHDEMELKLKELTEEDVSFKTPKRKQEQRAKANPGFLLIGGVRIYTEDISSSESDRMSSSDVDLEPNSGDGERFENDDGDSDEEDRQGEERDSISDSESLGSESDEDLSTGDSSSVDNEVVADYMEGIGGSDELLSSKWITSMNLGDADTIEQMYTNDNDGFVKKGKEKLEGYALMTASEQYGMKRRNSLEQRKGKGMVCDRDLSSMQVMDQEDMFMVNNVWMPNRSRKGMKTGSSSSQLSQSWPKDDRKSKNYQSRPGEKKQHRKELIAKKRQQRALSRGVDLGQINSKLRKMVVDQVDMLCFHPMHSRDCSQVQRLASIYQLKSGCQGSGKKRAQAIYCKAA

SEQ ID NO: 158359 - protein, 113 aa, Zea Mays
MDPKGKGVVINDKKKETLNIEEPKGDKATDLGSNNKRKEGKKKRCIKKIIYYDSNASSSSPKDGDGDDSSTKKRTLNQNYSFDYSQIPYNSNAHLLSISLGKPPHFDGETYSF

SEQ ID NO: 158360 - protein, 267 aa, Zea Mays
MEHFSFAMDGAALSVVWTLMHDDKDMSKYAGEELELAVKEVQGNHMEKWEAINMLKYVLSSIHYPWIIKSHSLNLMLILSGEDHVEEINNHVDFTCFAHRIFETLKAIESVMIAAPMALVRKKAFAALKKVISMVPSSQRFDILHGLVNNSTSPALTAILLDLVRQEVSRESRQADNDCIEDEGFRGNGLPRWASHALELVELILRPPEGGPPCLPDHSEQDLRTGEVIGTGRRRRAAPRLYILDSFRLPSLATSPAHVLSATLSSV

SEQ ID NO: 158361 - protein, 561 aa, Zea Mays
MNAVEPSAAAIAEDPITPAASAAPYPGRLREALTALSEACESGNFNASETASFTISDILDTAAGVSGELDDGSDDSQDASRSGASEVLLREVLEFLSRPSSISNQMALDALSLVLPKPVAKLGARMGRCRDVAAAILKFFVTNCNPRDMLSILCEALDAPMELPNGLSSFVLLLDALAKVFTLIQRRHIEQVKVALPVVLKVMHATVSECVEEHGSAAVDLFNAAHGVGKAIQEMCISMFNKNKDLCAILGLYSLQNIALVSRSRQQDILSACGSVVFQSFRFLKTSGFTYRGLLTGSDVTAATVELSKEEDADFMEHFSFAMDGAALSVVWTLMHDDKDMSKYAGEELELAVKEVQGNHMEKWEAINMLKYVLSSIHYPWIIKSHSLNLMLILSGEDHVEEINNHVDFTCFAHRIFETLKAIESVMIAAPMALVRKKAFAALKKVISMVPSSQRFDILHGLVNNSTSPALTAILLDLVRQEVSRESRQADNDCIEDEGFRGNGLPRWASHALELVELILRPPEGGPPCLPDHSEQVISALNLLRFILIIDSRARDEHLGC

SEQ ID NO: 158362 - protein, 428 aa, Zea Mays
MLLYQNVLRNMEVLLLIFSMQHMVLARPFKKCAYQWFVNLSNYFNKNKDLCAILGLYSLQNIALVSRSRQQDILSACGSVVFQSFRFLKTSGFTYRGLLTGSDVTAATVELSKEEDADFMEHFSFAMDGAALSVVWTLMHDDKDMSKYAGEELELAVKEVQGNHMEKWEAINMLKYVLSSIHYPWIIKSHSLNLMLILSGEDHVEEINNHVDFTCFAHRIFETLKAIESVMIAAPMALVRKKAFAALKKVISMVPSSQRFDILHGLVNNSTSPALTAILLDLVRQEVSRESRQADNDCIEDEGFRGNGLPRWASHALELVELILRPPEGGPPCLPDHSEQVISALNLLRFILIIDSRGQRSAKLFRKETLHKVHSEWLTPLRPIAEQIQLENEKDADEITKQIVCMLNLVQLVLYRCIELVEEKMKGC

SEQ ID NO: 158363 - protein, 238 aa, Zea Mays
MEHFSFAMDGAALSVVWTLMHDDKDMSKYAGEELELAVKEVQGNHMEKWEAINMLKYVLSSIHYPWIIKSHSLNLMLILSGEDHVEEINNHVDFTCFAHRIFETLKAIESVMIAAPMALVRKKAFAALKKVISMVPSSQRFDILHGLVNNSTSPALTAILLDLVRQEVSRESRQADNDCIEDEGFRGNISSKLAKIYSDNRFKRTKICKIVSERDIAQGALGVADPIKTNRGANSVGK

SEQ ID NO: 158364 - protein, 82 aa, Zea Mays
MGICNQESSETLSSKSYTRRGQTRFLESNLQLSDDRHCRLPCCITLAPQNHDGSFMDWWLRARQGLNSPNYPWSVDNMKAHK

SEQ ID NO: 158365 - protein, 114 aa, Zea Mays
MLLPTARPSPALGSPSFFPGCSFLLQYAWMLSCGSTAPSAINALAPSSALRCQGCRPGVLLPLQPRPWWSSTLAAAGSPHPAAVTNLRLDVIVPCTQHGSSPSVPATTSARCDL

SEQ ID NO: 158366 - protein, 72 aa, Zea Mays
MMMKKRHKIERDLSIGEEVGWSKNQQVAKSNPTLAAMNKKFGMIHGLSSLANIMSFGSLAMHSWYLASKLEL

SEQ ID NO: 158367 - protein, 142 aa, Zea Mays
MGWATRFLAAVCFFAAGVLFVPEALLGSPSGAGAVTAAKLAHVLSFATSWGAALWATFIGGIIMFKNLPRHMFGNLQSKMFPAYFTLISACAAISVATFSHLHPWKTASTVERYQLGFLLSALGCNLSNLLVFTPMTIEEIE

SEQ ID NO: 158368 - protein, 145 aa, Zea Mays
MGWATRFLAAVCFFAAGVLFVPEALLGSPSGAGAVTAAKLAHVLSFATSWGAALWATFIGGIIMFKNLPRHMFGNLQSKMFPAYFTLISACAAISVATFSHLHPWKTASTVERYQLGFLLSALGCNLSNLLVFTPMTIEPKLSVK

SEQ ID NO: 158369 - protein, 131 aa, Zea Mays
MRLASPTTSSLTRSPMCRRSLKMLYLSQNRLSDTIPEGKFGPMCGRSRCSNCRDIDCPTPSPRARSDPSAASASYTSPTSSPAPSQGTSPKHDCSSCRSPTTALRARCWTSPSQSSGSSMSPTTSSQNPFQ

SEQ ID NO: 158370 - protein, 128 aa, Zea Mays
MMMRFQWTRQGTWGLEMCDRRNHTNKTNFLSQQWCNPLLQMRNRYVKILATIKEEHMKKKTRRKKMFHRHLHRVSEPPSDEHDPRVEEALKDTNRVMAMQEELNKFKRNEVWGLVPRAKKNIVGTKKR

SEQ ID NO: 158371 - protein, 739 aa, Zea Mays
MATHFTPSQAHAASHHAAHHHSAAAAAAVTATATARLHPSAPPASASAAAAALCPPHLLAAASPAASSSAACQPAHRPIFVGHGAPWAQQPQRTAAAAAALGPEFRRARTTKTISKRTRGGGGGGGAQDRGRVSSAAAGRCVEKLLRVAPEDRRGLGSALSSFRGELLGPEDYCQILRGLGDRDKSALRAFEVFYAALPLVGGGAVDKGKLLTAAIGALGKMGRPDLARRAFDTGIAGSYGNTVFAHSALISAYARSGLATEAMGVLESMKGAGLRPTTVSYNAVIDACGKGGVDLRFTLGYFRQMLQDGLCPDRKTFNSLLAACSRAGHLEDARTVFDEMIHLGSGRDIYTYNTFVDAICKCGNMGLALQVVLDMEANNAKPNVVTYSTLMDGFSKLEKYDEALKLREKMKSLRIQLDRVCYNTLLAIYVKTGKYDEIATVCEEMEKLGIEKDTVTYNSLINGYGKQGRLDMVAFLVQDMRAQGVAPSVLTYSTLIDIYSKAGMHGDAFNVYLDFKESGLKADVVLFSSFIDTLAKNGLVECALSLLDEMMKMGIKPNVVTYNTIIDAFGKSKIFTEEDSDIGDMGIVGVYGGQVVRVTNPVIRGGRSATDVRMRRSQELFFILELFQKMVQQGVRPNVVTFSAILNACSRCNSFEDAALLLEQLRLFDNSVYGVAYGLLMGHREAWSQARSLFNQLGRMDSPTSSAFYNALTDVLWHFGQVGLLLSVHMDPSAVIVY

SEQ ID NO: 158372 - protein, 546 aa, Zea Mays
MPSCFWLIPMTTMRDSRQLEQIFCKPPTSARSQSESSMTSCDGSCSNTSHRINSLNRSSFDSNLPLQSTLASKITNLATKVTNKVRSRVRTDENDDGGSGESHCLDRGAKEEPTSSGTSTPRGDAPHGPFATEENSPGKSTNPNSDESEGKVGLHKILGSKAEALLNKKGISWPWKGRENEGPDERNHVILPWLHGGQENGVNHQKVSDSSISPDAQGAEHNQPSKNEASGSWSSFNNNSTGSASSTGSTNSSALYKVDHEADCLDYEILWEDLVIGEQIGQGSCGTVYHALWYGSDVAVKVFSKQEYSEEVILTFRQEVSLMKKLRHPNILLFMGAVMSPQRLCIVSEFLPRGSLFRLLQRSATKLDVRRRVHMALDIVRGMNYLHHSSPPIIHRDLKSSNLLVDKNWIVKVADFGLSRLKRETFLTTKTGKGTPQWMAPEVLRNEPSDEKSDVYSYGVILWELVTQKIPWENLNSMQVIGAVGFMNQRLDIPSEVDPQWKSIILSCWESDPQQRPSFQELLERLRELQRHYAIQHRNTKNSIEE

SEQ ID NO: 158373 - protein, 637 aa, Zea Mays
MDSSGEELLKKIRELEVGQAQLKQEMSKLIPGAGERRRSQSVSPRRGVPVPPPPPAKAKAGAPGRRLSGGFEGGQRAWARGSASFPHSSPLQREGRAGAGDASTSARLPERQYSRVLQSMGQSVHILDLDGRIIYWNQSAENLFGYPASEALGQDALMLLVDSHDHNAATKVTNKVRSRVRTDENDDGGSGESHCLDRGAKEEPTSSGTSTPRGDAPHGPFATEENSPGKSTNPNSDESEGKVGLHKILGSKAEALLNKKGISWPWKGRENEGPDERNHVILPWLHGGQENGVNHQKVSDSSISPDAQGAEHNQPSKNEASGSWSSFNNNSTGSASSTGSTNSSALYKVDHEADCLDYEILWEDLVIGEQIGQGSCGTVYHALWYGSDVAVKVFSKQEYSEEVILTFRQEVSLMKKLRHPNILLFMGAVMSPQRLCIVSEFLPRGSLFRLLQRSATKLDVRRRVHMALDIVRGMNYLHHSSPPIIHRDLKSSNLLVDKNWIVKVADFGLSRLKRETFLTTKTGKGTPQWMAPEVLRNEPSDEKSDVYSYGVILWELVTQKIPWENLNSMQVIGAVGFMNQRLDIPSEVDPQWKSIILSCWESDPQQRPSFQELLERLRELQRHYAIQHRNTKNSIEE

SEQ ID NO: 158374 - protein, 691 aa, Zea Mays
MDSSGEELLKKIRELEVGQAQLKQEMSKLIPGAGERRRSQSVSPRRGVPVPPPPPAKAKAGAPGRRLSGGFEGGQRAWARGSASFPHSSPLQREGRAGAGDASTSARLPERQYSRVLQSMGQSVHILDLDGRIIYWNQSAENLFGYPASEALGQDALMLLVDSHDHNAVNNIFQRISMGESWTGKFPVKNKQGHRFSAVATNTPFYDEDGSLMGFICVSSDSRQLEQIFCKPPTSARSQSESSMTSCDGSCSNTSHRINSLNRSSFDSNLPLQSTLASKITNLATKVTNKVRSRVRTDENDDGGSGESHCLDRGAKEEPTSSGTSTPRGDAPHGPFATEENSPGKSTNPNSDESEGKVGLHKILGSKAEALLNKKGISWPWKGRENEGPDERNHVILPWLHGGQENGVNHQKVSDSSISPDAQGAEHNQPSKNEASGSWSSFNNNSTGSASSTGSTNSSALYKVDHEADCLDYEILWEDLVIGEQIGQGSCGTVYHALWYGSDVAVKVFSKQEYSEEVILTFRQEVSLMKKLRHPNILLFMGAVMSPQRLCIVSEFLPRGSLFRLLQRSATKLDVRRRVHMALDIVRGMNYLHHSSPPIIHRDLKSSNLLVDKNWIVKVADFGLSRLKRETFLTTKTGKGTPQWMAPEVLRNEPSDEKSDVYSYGVILWELVTQKIPWENLNSMSLVQWVL

SEQ ID NO: 158375 - protein, 228 aa, Zea Mays
MDSSGEELLKKIRELEVGQAQLKQEMSKLIPGAGERRRSQSVSPRRGVPVPPPPPAKAKAGAPGRRLSGGFEGGQRAWARGSASFPHSSPLQREGRAGAGDASTSARLPERQYSRVLQSMGQSVHILDLDGRIIYWNQSAENLFGYPASEALGQDALMLLVDSHDHNATRMTMVAVVRAIAWIVVQRKSQHLAEQAHQEGMHHMVPLLQKRTHLGNQRTQTATNQKEK

SEQ ID NO: 158376 - protein, 530 aa, Zea Mays
MDSSGEELLKKIRELEVGQAQLKQEMSKLIPGAGERRRSQSVSPRRGVPVPPPPPAKAKAGAPGRRLSGGFEGGQRAWARGSASFPHSSPLQREGRAGAGDASTSARLPERQYSRVLQSMGQSVHILDLDGRIIYWNQSAENLFGYPASEALGQDALMLLVDSHDHNAVNNIFQRISMGESWTGKFPVKNKQGHRFSAVATNTPFYDEDGSLMGFICVSSDSRQLEQIFCKPPTSARSQSESSMTSCDGSCSNTSHRINSLNRSSFDSNLPLQSTLASKITNLATKVTNKVRSRVRTDENDDGGSGESHCLDRGAKEEPTSSGTSTPRGDAPHGPFATEENSPGKSTNPNSDESEGKVGLHKILGSKAEALLNKKGISWPWKGRENEGPDERNHVILPWLHGGQENGVNHQKVSDSSISPDAQGAEHNQPSKNEASGSWSSFNNNSTGSASSTGSTNSSALYKVDHEADCLDYEILWEDLVIGEQIGQGSCGTVYHALWYGSDVAVKVFSKQEYSEEVILTFRQEACSSS

SEQ ID NO: 158377 - protein, 482 aa, Zea Mays
MPSCFWLIPMTTMRDSRQLEQIFCKPPTSARSQSESSMTSCDGSCSNTSHRINSLNRSSFDSNLPLQSTLASKITNLATKVTNKVRSRVRTDENDDGGSGESHCLDRGAKEEPTSSGTSTPRGDAPHGPFATEENSPGKSTNPNSDESEGKVGLHKILGSKAEALLNKKGISWPWKGRENEGPDERNHVILPWLHGGQENGVNHQKVSDSSISPDAQGAEHNQPSKNEASGSWSSFNNNSTGSASSTGSTNSSALYKVDHEADCLDYEILWEDLVIGEQIGQGSCGTVYHALWYGSDVAVKVFSKQEYSEEVILTFRQEVSLMKKLRHPNILLFMGAVMSPQRLCIVSEFLPRGSLFRLLQRSATKLDVRRRVHMALDIVRGMNYLHHSSPPIIHRDLKSSNLLVDKNWIVKVADFGLSRLKRETFLTTKTGKGTPQWMAPEVLRNEPSDEKSDVYSYGVILWELVTQKIPWENLNSMQWVL

SEQ ID NO: 158378 - protein, 208 aa, Zea Mays
MNQSAENLFGYPASEALGQDALMLLVDSHDHNAVNNIFQRISMGESWTGKFPVKNKQGHRFSAVATNTPFYDEDGSLMGFICVSSDSRQLEQIFCKPPTSARSQSESSMTSCDGSCSNTSHRINSLNRSSFDSNLPLQSTLASKITNLTRMTMVAVVRAIAWIVVQRKSQHLAEQAHQEGMHHMVPLLQKRTHLGNQRTQTATNQKEK

SEQ ID NO: 158379 - protein, 184 aa, Zea Mays
MAAAASASTPQGVAERRGIPAAAFVEDVEAYLRQAGLDVNSALAFLQERLQQYKIVEMKLLAQQRDLQAKIPDIEKCLDIVSTLQAKNDLADFELSEGIYSCAKIEDTDSVCLWLGANVMLEYSCDEANALLKKNLENAKASLEVLVADLQFLRDQQTITQVTIARVFNWDVHHRRSKQAVKEP

SEQ ID NO: 158380 - protein, 143 aa, Zea Mays
MMLEYMYKIVEMKLLAQQRDLQAKIPDIEKCLDIVSTLQAKNDLGEALIADFELSEGIYSCAKIEDTDSVCLWLGANVMLEYSCDEANALLKKNLENAKASLEVLVADLQFLRDQQTITQVTIARVFNWDVHHRRSKQAVKEP

SEQ ID NO: 158381 - protein, 134 aa, Zea Mays
MTTYILQWSIGLEAKIPDIEKCLDIVSTLQAKNDLGEALIADFELSEGIYSCAKIEDTDSVCLWLGANVMLEYSCDEANALLKKNLENAKASLEVLVADLQFLRDQQTITQVTIARVFNWDVHHRRSKQAVKEP

SEQ ID NO: 158382 - protein, 334 aa, Zea Mays
MAMAARLLRATEVASRFLSASHGFVQRAAYTAGGIVDVGQPTPQSHPELLADGEITPGITNEEYISRRKKLLEVLPEKSLAIIASADQQMMTDVVPYPFRQNGDYLYITGCTQPGGVAVLSEETGFCMFMPDTNKEDLVWQGETAGVEAAVDFFKADKAFPLSQMQKILPELIEQSKGVYHNVNTTSSYKNLDAFRRASLNNKVKDLTNYTDELRWVKSKSEIKLMRESASIVSQSLLQTMLMSRTHREESQLAAKIEYECKMRGAQRMAFHPVVGGGANGSIIHYSRNDRKIRTGDLLLMDVGCEYHGYLSDLTRTWPPCGRFSPAQPNTGDK

SEQ ID NO: 158383 - protein, 330 aa, Zea Mays
MQKILPELIEQSKGVYHNVNTTSSYKNLDAFRRASLNNKVKDLTNYTDELRWVKSKSEIKLMRESASIVSQSLLQTMLMSRTHREESQLAAKIEYECKMRGAQRMAFHPVVGGGANGSIIHYSRNDRKIRTGDLLLMDVGCEYHGYLSDLTRTWPPCGRFSPAQEELYSLILETNKECIKLCKPGTSINEIHNHSVKLLIKGFQELRILEKGKSIQYNYLNPTAIGHSLGMDIHDSMTLPKDKPLEPGVVITIEPGVYIPAAPVLNERAPSRYRGMGIRIEDEVLITDDGHEVLTASVPKEVSHLTTLMNMGRGGSAADAHGHELRAACS

SEQ ID NO: 158384 - protein, 254 aa, Zea Mays
MLMSRTHREESQLAAKIEYECKMRGAQRMAFHPVVGGGANGSIIHYSRNDRKIRTGDLLLMDVGCEYHGYLSDLTRTWPPCGRFSPAQEELYSLILETNKECIKLCKPGTSINEIHNHSVKLLIKGFQELRILEKGKSIQYNYLNPTAIGHSLGMDIHDSMTLPKDKPLEPGVVITIEPGVYIPAAPVLNERAPSRYRGMGIRIEDEVLITDDGHEVLTASVPKEVSHLTTLMNMGRGGSAADAHGHELRAACS

SEQ ID NO: 158385 - protein, 233 aa, Zea Mays
MQKILPELIEQSKGVYHNVNTTSSYKNLDAFRRASLNNKVKDLTNYTDELRWVKSKSEIKLMRESASIVSQSLLQTMLMSRTHREESQLAAKIEYECKMRGAQRMAFHPVVGGGANGSIIHYSRNDRKIRTGDLLLMDVGCEYHGYLSDLTRTWPPCGRFSPAQEELYSLILETNKECIKLCKPGTSINEIHNHSVLSLELFWFPCYFRKINILNAMKNSEKTYLPKKSIKCR

SEQ ID NO: 158386 - protein, 213 aa, Zea Mays
MAALYIIQETIEKTGDLLLMDVGCEYHGYLSDLTRTWPPCGRFSPAQEELYSLILETNKECIKLCKPGTSINEIHNHSVKLLIKGFQELRILEKGKSIQYNYLNPTAIGHSLGMDIHDSMTLPKDKPLEPGVVITIEPGVYIPAAPVLNERAPSRYRGMGIRIEDEVLITDDGHEVLTASVPKEVSHLTTLMNMGRGGSAADAHGHELRAACS

SEQ ID NO: 158387 - protein, 207 aa, Zea Mays
MFMPDTNKEDLVWQGETAGVEAAVDFFKADKAFPLSQMQKILPELIEQSKGVYHNVNTTSSYKNLDAFRRASLNNKVKDLTNYTDELRWVKSKSEIKLMRESASIVSQSLLQTMLMSRTHREESQLAAKIEYECKMRGAQRMAFHPVVGGGANGSIIHYSRNDRKIRTGDLLLMDVGCEYHGYLSDLTRTWPPCGRFSPAQPNTGDK

SEQ ID NO: 158388 - protein, 617 aa, Zea Mays
MEESFVPLRGIKDDLHGRLACYKQDWTGGFRAGIRVCVWTAILLFLLAILGACSIINRFTRIAGELFGLLIAMLFMQQAIKGLVDEFRVPERENTKALEFVPSWRFANGMFAIVLSFGLLLTALRSRKARSWRYGTGWLRGFIADYGVPLMVLVWTGVSYIPYGNVPKGIPRRLFSPNPWSPGAYDNWTVVKDMTQVPLLYILGAFIPATMIAVLYYFDHSVASQLAQQKEFNLRKPPSFHYDLLLLGFLTLMCGLIGIPPSNGVIPQSPMHTKSLATLKHQILRNRLVATARKGMSQNASLSQLYGSMQDAYQQMQTPLVYQQQSVRRGLNELKDSTVQLASSMGNIDAPVDETVFDIEKEIDDLLPIEVKEQRLSNLLQASMVVGCVAAMPLLKKIPTSVLWGYFAFMAIESLPGNQFWERILLLFTAPSRRYKVLEEYHTTFVETVPFKTIAMFTVFQTAYLLVCFGITWIPIAGVLFPLMIMLLVPVRQYILPKLFKGAHLTDLDAAEYEESPAIPFSLAAQDIDVALGRSQSAEILDDMVTRSRGEIKRLNSPKITSSGGTPVAELKGIRSPSISEKAYSPRLTELQHERSPLGGRSRPRTPSKLGEGSAPK

SEQ ID NO: 158389 - protein, 608 aa, Zea Mays
MYTFMFNFAKDRPDLGRNLFLAWTGWVCVWTAILLFLLAILGACSIINRFTRIAGELFGLLIAMLFMQQAIKGLVDEFRVPERENTKALEFVPSWRFANGMFAIVLSFGLLLTALRSRKARSWRYGTGWLRGFIADYGVPLMVLVWTGVSYIPYGNVPKGIPRRLFSPNPWSPGAYDNWTVVKDMTQVPLLYILGAFIPATMIAVLYYFDHSVASQLAQQKEFNLRKPPSFHYDLLLLGFLTLMCGLIGIPPSNGVIPQSPMHTKSLATLKHQILRNRLVATARKGMSQNASLSQLYGSMQDAYQQMQTPLVYQQQSVRRGLNELKDSTVQLASSMGNIDAPVDETVFDIEKEIDDLLPIEVKEQRLSNLLQASMVVGCVAAMPLLKKIPTSVLWGYFAFMAIESLPGNQFWERILLLFTAPSRRYKVLEEYHTTFVETVPFKTIAMFTVFQTAYLLVCFGITWIPIAGVLFPLMIMLLVPVRQYILPKLFKGAHLTDLDAAEYEESPAIPFSLAAQDIDVALGRSQSAEILDDMVTRSRGEIKRLNSPKITSSGGTPVAELKGIRSPSISEKAYSPRLTELQHERSPLGGRSRPRTPSKLGEGSAPK

SEQ ID NO: 158390 - protein, 84 aa, Zea Mays
MSATSTLALRVHQRRITTPTEAPSCDVDEMTAAALVIHSAFFPLALHSMSLVATLGNEARQRRSEYLCSKVGHMHRGPRWPLGG

SEQ ID NO: 158391 - protein, 55 aa, Zea Mays
MTGEFPGSRRAAVERVVGAVGNNGVGETSAGMAIQKLETSAFSSSTRRRTTGRKK

SEQ ID NO: 158392 - protein, 1224 aa, Zea Mays
MPHPQFDSWRAPPGHPPEGMWHRGLVPGGPYRPVGPPGSFPVEPFGYYGQFPPNSEVAARQGPGHGGYQAKNGDVYHPTPPNSYIMNQPVIPVRPVYQGPVPYDGYYGPRAHFNNANVRDPHFVGGPGILNQFPNQNDRFHPGHPQNRPGRHETVPREQLEYDKIHVFHRGNPGSLHDNSDRLGGSREFERNAQPASPLLPHPDGNRTDVNMRTDTRDTFSESERTRVLTKSVPNQRGSVGTEHLSVYDNAHSHHRETGDGTLRKKFKEDGSAALHPVIKKNAALIEKIESLNNKARNVDARNLPESASSKEFNKHKKSTDVSSNDVMGMACKSDPAVSVSCVSPAVQRLPNVPIKGTILGPAHPQLTEFSKAEKLGDSISDHVHRKSDSSRNSYHGPSKDRPANKFGSHGRGESSTTDLRNNIDHGQQPEIASQLQPAIVPDDMPASLDYESQRAKMKELAAERAKKLKAEEEERIKNQKAKALAKLEELNRRSSVLQKKSNDIKVETYDAHDKQHAGLDVTAKLDTSTEPHDVIAPDRLTDLLPPNDPNHTMVHIQAQSTAQSHALDGGKDPDAHATSSLVKNTHSNMEPVVQKSISQLHDITVVKAKQGYRKRHVSEEKISDEKASASITTRNITKNVDVLIDTVTAVVAPHDDPPTQNKKGTRHLRSKKKLDDAPVTSKHPPVVLNEPNTVKVSTEPKTHTGGVIISSSIVPTEGTIVTVGSITVGGISLKPMNQERVKSPDGTNNTESSQPRPQQTRKSGKHQHVLRPVEKPHGNDGILCAPVKPPVPNEHSDGAMPTAAVADLTKPVGKAINDGENVTRTKRAEMERYVPKPMSKELQQQNPSDDKEAVDKPSGAKSHPAAEPKKTSKAHGGKSNPSWRKRNPDESALVAPNSVEQADVSYESKEVQNFTYQKQPVELGKQDTQLKFSVDAAAENSSAPVQTVPLSVGGAKQHSAANRQRRQHVKAQRNEASGYSNESKGSEGKNDVVYQSATPVMDSNSSNHRNVPRSDVKNSGVVSHSRAWKPKTNSHPQDSSDGKIAVDGQVDSHGGRLEMNTSKGSDTITHLVTSSEPTKRSDGKEVSHSKHENLAREDGNQKGETEQEQANPTLRRQGQPNARYHRGGGSHRGRGGYDTGRPNHVTNVERRKGGSHLEYQPVGPQNKAADFQQSLGMEERTEGPPASGQAFRQRGHNRGLRPAGRFVQRNPASTPTTNSHQNE

SEQ ID NO: 158393 - protein, 1013 aa, Zea Mays
MRTDTRDTFSESERTRVLTKSVPNQRGSVGTEHLSVYDNAHSHHRETGDGTLRKKFKEDGSAALHPVIKKNAALIEKIESLNNKARNVDARNLPESASSKEFNKHKKSTDVSSNDVMGMACKSDPAVSVSCVSPAVQRLPNVPIKGTILGPAHPQLTEFSKAEKLGDSISDHVHRKSDSSRNSYHGPSKDRPANKFGSHGRGESSTTDLRNNIDHGQQPEIASQLQPAIVPDDMPASLDYESQRAKMKELAAERAKKLKAEEEERIKNQKAKALAKLEELNRRSSVLQKKSNDIKVETYDAHDKQHAGLDVTAKLDTSTEPHDVIAPDRLTDLLPPNDPNHTMVHIQAQSTAQSHALDGGKDPDAHATSSLVKNTHSNMEPVVQKSISQLHDITVVKAKQGYRKRHVSEEKISDEKASASITTRNITKNVDVLIDTVTAVVAPHDDPPTQNKKGTRHLRSKKKLDDAPVTSKHPPVVLNEPNTVKVSTEPKTHTGGVIISSSIVPTEGTIVTVGSITVGGISLKPMNQERVKSPDGTNNTESSQPRPQQTRKSGKHQHVLRPVEKPHGNDGILCAPVKPPVPNEHSDGAMPTAAVADLTKPVGKAINDGENVTRTKRAEMERYVPKPMSKELQQQNPSDDKEAVDKPSGAKSHPAAEPKKTSKAHGGKSNPSWRKRNPDESALVAPNSVEQADVSYESKEVQNFTYQKQPVELGKQDTQLKFSVDAAAENSSAPVQTVPLSVGGAKQHSAANRQRRQHVKAQRNEASGYSNESKGSEGKNDVVYQSATPVMDSNSSNHRNVPRSDVKNSGVVSHSRAWKPKTNSHPQDSSDGKIAVDGQVDSHGGRLEMNTSKGSDTITHLVTSSEPTKRSDGKEVSHSKHENLAREDGNQKGETEQEQANPTLRRQGQPNARYHRGGGSHRGRGGYDTGRPNHVTNVERRKGGSHLEYQPVGPQNKAADFQQSLGMEERTEGPPASGQAFRQRGHNRGLRPAGRFVQRNPASTPTTNSHQNE

SEQ ID NO: 158394 - protein, 1488 aa, Zea Mays
MASSLLTTDRRWGATPARKSGMTVLGKVPKPINLPSQRLENNGLDPNLELVPKGTHTWGSKAPSTTPNAWSSSSILSTKNDGSSSSSSHFNGRPSSGGGSRPSTAGSEPLGSPNAWGPNSRPSSASGTFPSSHLPMATNRPRSAETRPGSSQLSRFADNASDNVKASIRTIDRPGSSSHGPGFTLSTGHSSKGRPISSSGKEVSQGEQVKSLTTGNGELISQSNNQPVDIMKTEQHAHTGGAPVLATNVPNEGLQPRPYPPNFPMPHPQFDSWRAPPGHPPEGMWHRGLVPGGPYRPVGPPGSFPVEPFGYYGQFPPNSEVAARQGPGHGGYQAKNGDVYHPTPPNSYIMNQPVIPVRPVYQGPVPYDGYYGPRAHFNNANVRDPHFVGGPGILNQFPNQNDRFHPGHPQNRPGRHETVPREQLEYDKIHVFHRGNPGSLHDNSDRLGGSREFERNAQPASPLLPHPDGNRTDVNMRTDTRDTFSESERTRVLTKSVPNQRGSVGTEHLSVYDNAHSHHRETGDGTLRKKFKEDGSAALHPVIKKNAALIEKIESLNNKARNVDARNLPESASSKEFNKHKKSTDVSSNDVMGMACKSDPAVSVSCVSPAVQRLPNVPIKGTILGPAHPQLTEFSKAEKLGDSISDHVHRKSDSSRNSYHGPSKDRPANKFGSHGRGESSTTDLRNNIDHGQQPEIASQLQPAIVPDDMPASLDYESQRAKMKELAAERAKKLKAEEEERIKNQKAKALAKLEELNRRSSVLQKKSNDIKVETYDAHDKQHAGLDVTAKLDTSTEPHDVIAPDRLTDLLPPNDPNHTMVHIQAQSTAQSHALDGGKDPDAHATSSLVKNTHSNMEPVVQKSISQLHDITVVKAKQGYRKRHVSEEKISDEKASASITTRNITKNVDVLIDTVTAVVAPHDDPPTQNKKGTRHLRSKKKLDDAPVTSKHPPVVLNEPNTVKVSTEPKTHTGGVIISSSIVPTEGTIVTVGSITVGGISLKPMNQERVKSPDGTNNTESSQPRPQQTRKSGKHQHVLRPVEKPHGNDGILCAPVKPPVPNEHSDGAMPTAAVADLTKPVGKAINDGENVTRTKRAEMERYVPKPMSKELQQQNPSDDKEAVDKPSGAKSHPAAEPKKTSKAHGGKSNPSWRKRNPDESALVAPNSVEQADVSYESKEVQNFTYQKQPVELGKQDTQLKFSVDAAAENSSAPVQTVPLSVGGAKQHSAANRQRRQHVKAQRNEASGYSNESKGSEGKNDVVYQSATPVMDSNSSNHRNVPRSDVKNSGVVSHSRAWKPKTNSHPQDSSDGKIAVDGQVDSHGGRLEMNTSKGSDTITHLVTSSEPTKRSDGKEVSHSKHENLAREDGNQKGETEQEQANPTLRRQGQPNARYHRGGGSHRGRGGYDTGRPNHVTNVERRKGGSHLEYQPVGPQNKAADFQQSLGMEERTEGPPASGQAFRQRGHNRGLRPAGRFVQRNPASTPTTNSHQNE

SEQ ID NO: 158395 - protein, 368 aa, Zea Mays
MAPTSVEVAPLTSGRLSHSSGPLNCGGSLSDSPPVSPEIDDTKFCRAVSLSTPKPQPYARGGSKTVGRWLKDRRERRKEEARAHNAQVHAAVSVAAVAAAIAAVAAGKGARTDMAVASAATLVAAQCVEAAEALGAEREQLAAAVASAVSVRTPSDVATVTAAAATALRGAATLRARALKEAWNVAAVTPVEKGAMTGGGGHHLHGGGYKHDGQQQRQRLLREVESSNSSSSCLSDELVLGEENNFLGICTQELLARGTELLKRTRKGSLHWKVVSVYINRAGLVMLKMKSRHVGGTITKKKKSVVVDVCRDVAAWPGRHLLDSGEHRRYFGLRTAEQRVIEFECGSQREHEVWTKGVARLLADARKR

SEQ ID NO: 158396 - protein, 88 aa, Zea Mays
MVRIPQKLPQHRDMKYRVYPCHGIRQLQAISQAANLGQDTERSNVSQAKLPGDTDEDITSIHTMNGLITRSRARQLNLQVRSTLVNCV

SEQ ID NO: 158397 - protein, 54 aa, Zea Mays
MDMNKIYVKKISSNNLLKWLYKCSHLLFWFSRYQKIEKINDSRVKTSYRKAFGD

SEQ ID NO: 158398 - protein, 66 aa, Zea Mays
MLSTFQHLIDRAIMTERKRREVEHWKRKIGGPQARSSSRPRFSGNPHQQFKQTHPQGHQHQHQHQR

SEQ ID NO: 158399 - protein, 1086 aa, Zea Mays
MTGSKPAPAASQNPSAVPHRRPPPPPPPPPPPPVTAVARVREEGELSSGADDDETLQTQLGAASILGKFVEAGSQVPSASLLGKGSNTLIVSNALNHKASAPSYKKIMRVNQGQFKPGTNRNLSWQKPVSSDNLLITFSDDDSGADSGKTGRDKVRKASSQGTQRTGNSMQTRIMREEVSQQKNLGSKVGPAHLPAFPFTHRNVGAGRASGNTFFRKELPVRQVNPLKSKQKVQNGVGVHSEDHRLEILRHKIAAKENELKGQKRPLSAVATKNADFSSNQPRLPSEKIRLEASSIGEYSRFNSLSEHSGGPNKRLKLNQQYNQFCSDLTPLAPIGSISGKTNVQSSEVTNRSENGITMNLNVNETDTTDTTELADQIQQGGATKSLRHHKDSGGAENHVMLESHDGLAAQPPFTDTQTIPEDTSALAPVTSAQARQQVLAVGTSPVLDGTPQLQPGKENDECLNSSGQIGVETQNTILFSLLEMEELQDKELEDAQEHRQKCEAEEREALRAYRKAQRALLEANERCAILRRKREICSSQVHGLIAENSSLVQSLSIRNPEDGLAMPSLLNSQIHAVSQIPENQGGRHRLCPEEPSQQQIDKHEDEARPHYCDKLAASTADPSSVSAVNADSILSDYMEDDLLFPTRQARSECALDVENQMEETIHVYAEENRQVSGDGGEDYELLEASLRSRLVERFGKKSCLNGTIDEGTEGLAVGKVAAEHGKQSAYVGHQLQEAEQNIMTTTLEGTMELENDGAEKTVGLSNSCSGPSMGNCDPEDNISSLKELCMPLVMDSLIFPSSAPLNAARQIKRAFPGICKELSDYKNDHLTSDAVSEVTGSVQDMIHDLVGENMKMLPTTQNDNNMVHSVIDPFWPFCMFELRGKCNDEECQWQHFEHHDWRKLELTKHSMISVSGQIPYGLSQYILPVPVYRVGSNLIKADLNLTQSVLASSLWQYWQRGFCASFPLPLSVQRVLPSDAPFFQAGDGRIADFDRNRQLLKFRMLDSRKGSVDIEFFLEAALDLYCGKVNKPDRIKALSFLARSIEADPSTVILWVFYLHIYYQKDEGLGKDDMFSDAEPSRGNY

SEQ ID NO: 158400 - protein, 1091 aa, Zea Mays
MTGSKPAPAASQNPSAVPHRRPPPPPPPPPPPPVTAVARVREEGELSSGADDDETLQTQLGAASILGKFVEAGSQVPSASLLGKGSNTLIVSNALNHKASAPSYKKIMRVNQGQFKPGTNRNLSWQKPVSSDNLLITFSDDDSGADSGKTGRDKVRKASSQGTQRTGNSMQTRIMREEVSQQKNLGSKVGPAHLPAFPFTHRNVGAGRASGNTFFRKELPVRQVNPLKSKQKVQNGVGVHSEDHRLEILRHKIAAKENELKGQKRPLSAVATKNADFSSNQPRLPSEKIRLEASSIGEYSRFNSLSEHSGGPNKRLKLNQQYNQFCSDLTPLAPIGSISGKTNVQSSEVTNRSENGITMNLNVNETDTTDTTELADQIQQGGATKSLRHHKDSGGAENHVMLESHDGLAAQPPFTDTQTIPEDTSALAPVTSAQARQQVLAVGTSPVLDGTPQLQPGKENDECLNSSGQIGVETQNTILFSLLEMEELQDKELEDAQEHRQKCEAEEREALRAYRKAQRALLEANERCAILRRKREICSSQVHGLIAENSSLVQSLSIRNPEDGLAMPSLLNSQIHAVSQIPENQGGRHRLCPEEPSQQQIDKHEDEARPHYCDKLAASTADPSSVSAVNADSILSDYMEDDLLFPTRQARSECALDVENQMEETIHVYAEENRQVSGDGGEDYELLEASLRSRLVERFGKKSCLNGTIDEGTEGLAVGKVAAEHGKQSAYVGHQLQEAEQNIMTTTLEGTMELENDGAEKTVGLSNSCSGPSMGNCDPEDNISSLKELCMPLVMDSLIFPSSAPLNAARQIKRAFPGICKELSDYKNDHLTSDAVSEVTGSVQDMIHDLVGENMKMLPTTQNDNNMVHSVIDPFWPFCMFELRGKCNDEECQWQHFEHHDWRKLELTKHSMISVSGQIPYGLSQYILPVPVYRVGSNLIKADLNLTQSVLASSLWQYWQRGFCASFPLPLSVQRVLPSDAPFFQAGDGRIADFDRNRQLLKFRMLDSRKNKIVQGSVDIEFFLEAALDLYCGKVNKPDRIKALSFLARSIEADPSTVILWVFYLHIYYQKDEGLGKDDMFSDAEPSRGNY

SEQ ID NO: 158401 - protein, 1124 aa, Zea Mays
MTGSKPAPAASQNPSAVPHRRPPPPPPPPPPPPVTAVARVREEGELSSGADDDETLQTQLGAASILGKFVEAGSQVPSASLLGKGSNTLIVSNALNHKASAPSYKKIMRVNQGQFKPGTNRNLSWQKPVSSDNLLITFSDDDSGADSGKTGRDKVRKASSQGTQRTGNSMQTRIMREEVSQQKNLGSKVGPAHLPAFPFTHRNVGAGRASGNTFFRKELPVRQVNPLKSKQKVQNGVGVHSEDHRLEILRHKIAAKENELKGQKRPLSAVATKNADFSSNQPRLPSEKIRLEASSIGEYSRFNSLSEHSGGPNKRLKLNQQYNQFCSDLTPLAPIGSISGKTNVQSSEVTNRSENGITMNLNVNETDTTDTTELADQIQQGGATKSLRHHKDSGGAENHVMLESHDGLAAQPPFTDTQTIPEDTSALAPVTSAQARQQVLAVGTSPVLDGTPQLQPGKENDECLNSSGQIGVETQNTILFSLLEMEELQDKELEDAQEHRQKCEAEEREALRAYRKAQRALLEANERCAILRRKREICSSQVHGLIAENSSLVQSLSIRNPEDGLAMPSLLNSQIHAVSQIPENQGGRHRLCPEEPSQQQIDKHEDEARPHYCDKLAASTADPSSVSAVNADSILSDYMEDDLLFPTRQARSECALDVENQMEETIHVYAEENRQVSGDGGEDYELLEASLRSRLVERFGKKSCLNGTIDEGTEGLAVGKVAAEHGKQSAYVGHQLQEAEQNIMTTTLEGTMELENDGAEKTVGLSNSCSGPSMGNCDPEDNISSLKELCMPLVMDSLIFPSSAPLNAARQIKRAFPGICKELSDYKNDHLTSDAVSEVTGSVQDMIHDLVGENMKMLPTTQNDNNMVHSVIDPFWPFCMFELRGKCNDEECQWQHFEHHDWRKLELTKHSMISVSGQIPYGLSQYILPVPVYRVGSNLIKADLNLTQSVLASSLWQYWQRGFCASFPLPLSVQRVLPSDAPFFQAGDGRIADFDRNRQLLKFRMLDSRKNKIVQGSVDIEFFLEAALDLYCGKVNKPDRIKALSFLARSIEADPSTVILWVFYLHIYYQKDEGLGKDDMFSDAVNYLLVALLPFSSSLKHFMLECISYKHFFSFLFLLLHCLF

SEQ ID NO: 158402 - protein, 1679 aa, Zea Mays
MTGSKPAPAASQNPSAVPHRRPPPPPPPPPPPPVTAVARVREEGELSSGADDDETLQTQLGAASILGKFVEAGSQVPSASLLGKGSNTLIVSNALNHKASAPSYKKIMRVNQGQFKPGTNRNLSWQKPVSSDNLLITFSDDDSGADSGKTGRDKVRKASSQGTQRTGNSMQTRIMREEVSQQKNLGSKVGPAHLPAFPFTHRNVGAGRASGNTFFRKELPVRQVNPLKSKQKVQNGVGVHSEDHRLEILRHKIAAKENELKGQKRPLSAVATKNADFSSNQPRLPSEKIRLEASSIGEYSRFNSLSEHSGGPNKRLKLNQQYNQFCSDLTPLAPIGSISGKTNVQSSEVTNRSENGITMNLNVNETDTTDTTELADQIQQGGATKSLRHHKDSGGAENHVMLESHDGLAAQPPFTDTQTIPEDTSALAPVTSAQARQQVLAVGTSPVLDGTPQLQPGKENDECLNSSGQIGVETQNTILFSLLEMEELQDKELEDAQEHRQKCEAEEREALRAYRKAQRALLEANERCAILRRKREICSSQVHGLIAENSSLVQSLSIRNPEDGLAMPSLLNSQIHAVSQIPENQGGRHRLCPEEPSQQQIDKHEDEARPHYCDKLAASTADPSSVSAVNADSILSDYMEDDLLFPTRQARSECALDVENQMEETIHVYAEENRQVSGDGGEDYELLEASLRSRLVERFGKKSCLNGTIDEGTEGLAVGKVAAEHGKQSAYVGHQLQEAEQNIMTTTLEGTMELENDGAEKTVGLSNSCSGPSMGNCDPEDNISSLKELCMPLVMDSLIFPSSAPLNAARQIKRAFPGICKELSDYKNDHLTSDAVSEVTGSVQDMIHDLVGENMKMLPTTQNDNNMVHSVIDPFWPFCMFELRGKCNDEECQWQHFEHHDWRKLELTKHSMISVSGQIPYGLSQYILPVPVYRVGSNLIKADLNLTQSVLASSLWQYWQRGFCASFPLPLSVQRVLPSDAPFFQAGDGRIADFDRNRQLLKFRMLDSRKIVQGSVDIEFFLEAALDLYCGKVNKPDRIKALSFLARSIEADPSTVILWVFYLHIYYQKDEGLGKDDMFSDAVQHNVYSYELWLMYINSRLRVDDRLDAYNDALSMLCQMTAETDKDLQERSAFILDIFLQMIYFLCMSGNIDKAVSRIIGILPTAMPDNSGDKLLADVISCLTMSDRCIFWISCLYVLIYRNLPEEIIDQLEFQKALPRALIWPSIDPSVDNRDKITDLLNFAACKMAEDISECVKNGDPSYLMLSQFLAVNHISCLAAIGGLKSSVDMLVTYMKEYPMCPQILLISARLDRKHGTCPGLKSFDELILNWPKEAQGIQYMWNQYVEHALATDAELAEKVLTCWFEEHGKDCDIQSNAAICIELSSEEPGTSSLVSPQAVGSGPSISEDLVFRLLNLSLYKILENNLQEAQMAASKALKLAHGEWYEHCIREHAAIHALELEKSSSSTDAQTRATFSLIIGYLADHCNLPTRELLSRRFCQNIKKHRLRQLIDDTIGSVPADSSLINSVLEVCFGPSLLPKSISDVKYLVDFVETVMEALPANYRLGLAVGGFVAKHFTGYGAASTGTRFWASSVLINAIFRAVPVAPESVWLEGAGLLEKLHATEILKRFYQQAASVYPFSFKLWHAHLNYCKASGSNTESILESARQRGIELNLTPT

SEQ ID NO: 158403 - protein, 938 aa, Zea Mays
MTGSKPAPAASQNPSAVPHRRPPPPPPPPPPPPVTAVARVREEGELSSGADDDETLQTQLGAASILGKFVEAGSQVPSASLLGKGSNTLIVSNALNHKASAPSYKKIMRVNQGQFKPGTNRNLSWQKPVSSDNLLITFSDDDSGADSGKTGRDKVRKASSQGTQRTGNSMQTRIMREEVSQQKNLGSKVGPAHLPAFPFTHRNVGAGRASGNTFFRKELPVRQVNPLKSKQKVQNGVGVHSEDHRLEILRHKIAAKENELKGQKRPLSAVATKNADFSSNQPRLPSEKIRLEASSIGEYSRFNSLSEHSGGPNKRLKLNQQYNQFCSDLTPLAPIGSISGKTNVQSSEVTNRSENGITMNLNVNETDTTDTTELADQIQQGGATKSLRHHKDSGGAENHVMLESHDGLAAQPPFTDTQTIPEDTSALAPVTSAQARQQVLAVGTSPVLDGTPQLQPGKENDECLNSSGQIGVETQNTILFSLLEMEELQDKELEDAQEHRQKCEAEEREALRAYRKAQRALLEANERCAILRRKREICSSQVHGLIAENSSLVQSLSIRNPEDGLAMPSLLNSQIHAVSQIPENQGGRHRLCPEEPSQQQIDKHEDEARPHYCDKLAASTADPSSVSAVNADSILSDYMEDDLLFPTRQARSECALDVENQMEETIHVYAEENRQVSGDGGEDYELLEASLRSRLVERFGKKSCLNGTIDEGTEGLAVGKVAAEHGKQSAYVGHQLQEAEQNIMTTTLEGTMELENDGAEKTVGLSNSCSGPSMGNCDPEDNISSLKELCMPLVMDSLIFPSSAPLNAARQIKRAFPGICKELSDYKNDHLTSDAVSEVTGSVQDMIHDLVGENMKMLPTTQNDNNMVHSVIDPFWPFCMFELRGKCNDEECQWQHFEHHDWRKLELTKHSMISVSDPLWFVSVYSSSASVSCWFKSY

SEQ ID NO: 158404 - protein, 236 aa, Zea Mays
MPGVNDADYTMRIFNSDGSEPEMCGNGVRCFARFIGELENLQGTHSFTIHTGAGKIIPEIQSDGQVKVDMGEPILSGADIPTKLVATKNKAVIQAELAVEGLTWHVTCVSMGNPHCVTFGANELKTLQIDDLKLSEIGPKFEHHEMFPARTNTEFVQVLSRSHLKMRVWERGAGATLTCGTGACAVVVAAVLEGRAERKCVVDLPGGPLEIEWREDDNHVYMTGPAEAVFYGSVVH

SEQ ID NO: 158405 - protein, 128 aa, Zea Mays
MGSLVLCCGDGAVMNSTNLGLLRHGVSIWIDVPLEMAANDMLKSTGTQATTDPDSFSQAMSKLRQRYDELKERYGVSDITVSVQNVASQRGYSSIDLVTLEDMVLEIVRQIEKLIRAKEMMEAAGKPF

SEQ ID NO: 158406 - protein, 88 aa, Zea Mays
MLKSTGTQATTDPDSFSQAMSKLRQRYDELKERYGVSDITVSVQNVASQRGYSSIDLVTLEDMVLEIVRQIEKLIRAKEMMEAAGKPF

SEQ ID NO: 158407 - protein, 144 aa, Zea Mays
MGRVIRAQRKGAGSVFKSHTHHRKGPARFRSLDFGERNGYLKGVVTFRHPFRYKHQKELFVAAEGMYTGQFVYCGRRATLSIGNVLPLRGIPEGAVVCNVEHHVGDRGVFARASGDYAIVISHNPDNGTSRSEHDHEPSYFIDL

SEQ ID NO: 158408 - protein, 321 aa, Zea Mays
MNQAVSSTSTRGRGKSERVWTYFEDEALLKALFELSLDPKWKSEGSFKNGYLSVLKATLAEKIPGCGLTAVPHIESRVRHFRTKYGAIEVMLANSGFSWDENRKMVQCEKQQYEDHCKRHPDAKGLYGISFPHLDTLAAIYGKDIATGKGAEGLGDAISNLEKEITLEESHDREVEEDSMSRETPRWASDRNLLDSTSSTSKRRKRDKGNEVRKSSDPFLDMLGEFRDDLKNASNHFGKMTEIMEREAKLQEEAAHKDPMQVLQQKSITELTRLGFTSTELVKAASVFVNVPNQMTMLFALPETLRRGFILNMLANEAQKN

SEQ ID NO: 158409 - protein, 69 aa, Zea Mays
MESSLARSNVSKWNYLVYARSTLMDSTGPLLAGRRSSKHGSSEMGDCIFSSMRHFLQLVNQLLGEFVRY

SEQ ID NO: 158410 - protein, 542 aa, Zea Mays
MNPINTVFDAKRLIGRRFSDASVQSDIKLWPFKVIPGPGEKPMIVVQHKGEEKQFAAEEISSMVLIKMREIAEAYLGSTIKNAVVTVPAYFNDSQRQATKDAGVIAGLNVLRIINEPTAAAIAYGLDKKATSVGEKNVLIFDLGGGTFDVSLLTIEEGIFEVKATAGDTHLGGEDFDNRMVNHFVQEFKRKNKKDITGNPRALRRLRTSCERAKRTLSSTAQTTIEIDSLYEGIDFYSTITRARVQQLLQDFFNGKELCKNINPDEAVAYGAAVQAAILSGEGNEKVQDLLLLDVTPLSLGLETAGGVMTVLIPRNTTIPTKKEQVFSTYSDNQPGVLIQVYEGERTRTRDNNLLGKFELSGIPPAPRGVPQITVCFDIDANGILNVSAEDKTTGQKNKITITNDKGRLSKEEIEKMVQDAEKYKSEDEEHKKKVESKNSLENYAYNMRNTIKDEKIASKLAADDKKKIEDAIDAAISWLDANQLAEADEFDDKMKELESLCNPIIAKMYQGAGADMGGSGGMDEDAPAGSGGPGPKIEEVD

SEQ ID NO: 158411 - protein, 574 aa, Zea Mays
MAGKGDGPAIGIDLGTTYSCVGVWQHDRVEIIANDQGNRTTPSYVAFTDSERLIGDAAKNQVAMNPINTVFDAKRLIGRRFSDASVQSDIKLWPFKVIPGPGEKPMIVVQHKGEEKQFAAEEISSMVLIKMREIAEAYLGSTIKNAVVTVPAYFNDSQRQATKDAGVIAGLNVLRIINEPTAAAIAYGLDKKATSVGEKNVLIFDLGGGTFDVSLLTIEEGIFEVKATAGDTHLGGEDFDNRMVNHFVQEFKRKNKKDKSSVHDVVLVGGSTRIPRVQQLLQDFFNGKELCKNINPDEAVAYGAAVQAAILSGEGNEKVQDLLLLDVTPLSLGLETAGGVMTVLIPRNTTIPTKKEQVFSTYSDNQPGVLIQVYEGERTRTRDNNLLGKFELSGIPPAPRGVPQITVCFDIDANGILNVSAEDKTTGQKNKITITNDKGRLSKEEIEKMVQDAEKYKSEDEEHKKKVESKNSLENYAYNMRNTIKDEKIASKLAADDKKKIEDAIDAAISWLDANQLAEADEFDDKMKELESLCNPIIAKMYQGAGADMGGSGGMDEDAPAGSGGPGPKIEEVD

SEQ ID NO: 158412 - protein, 107 aa, Zea Mays
MDSKTKFSDVKGVDEAKAELEEIVHYLRDPKAALEEILYQFEEKLQVEREEAARKQEELQAQLQAQQVALEENQSLLRQAQVEVKGMHTKFEETNALLRVVLKLQKD

SEQ ID NO: 158413 - protein, 297 aa, Zea Mays
MQMQMQQQSPLQCLLGSGGGSDHHHLMPPPSGLAPLPGGPADTAASGPAGGGSSTSASVQAAAGAGAGAQPRPVVSMAERARLARVPLPEPGTLRCPRCDSTNTKFCYFNNYSLSQPRHFCKACRRYWTRGGALRNVPVGGGCRRNTKRSSKKSSRGGGAGATAATSSSSTTSTSTTATTTTTTSAALEASLEGYHHYLPLQMQPQFLQQAGLHGYHFADDGTGVLAADGFPRGVVASGLLAQLAAVKMEEHGSNGGGAIAAHHEQQSYWPGSTGGGGGWPVEFLSGFSSSSSGNVL

SEQ ID NO: 158414 - protein, 80 aa, Zea Mays
MAKIDSSSSCNRGLKKSRLFKDIGLCNTRSEGIKLTFELVQHLLMGADTLLLPNQESAHSLKELHRLSPPPLRAIQGQVP

SEQ ID NO: 158415 - protein, 75 aa, Zea Mays
MQIRLFAFRFARSRSSAAADLCSSGSAEHNLERRASMLARSLEEHEDVGLSGCVERFGGSIPLASHHCAIRLLRT

SEQ ID NO: 158416 - protein, 858 aa, Zea Mays
MAESKRFDTKSTGCLEGLFNFLALNQRLQMPKTIAYRRHSEGSDNTLRMKVPKPKTCSEKDENIPLQKETSSDPQIDKANMFVWRTLMFKRKTLGKDKKKSSSPASSPSSSRLLRSRSIHHSKCFDYEVPDELAAHYHAMNNSGSIEMGSCHSEPTPLPHECPQHPTVQEPCRACGSMDGKGSIDMEAPSETAPGNLTDESEALATQKTRDAATHPSKEFLDFLELFNAHRELFLKILHDPSLLGTPEQQGQEASSSGSVPLNKLESFPRPGGSSGKRNPIFDRSDSEKNMPEIQRSPSRPTSDPEAAKVISTRMPTGVDSSAVSLAESRSLKKAGTASNRFKAIRRKIKDVVRENRKELARITKDGVFHKLPYGQKMTGLTRSSSMEKFVQEEKQIRRTYSIAESVDKYSTLYESISRDSRISLERLNITMEGGANLNDKKTPTSLKRITSLPEMRLCSSQLEVLPEVSASRIGSKIWNVESDRFSSRGTDAFSICAEGNSYPDDVTEKSENIHIELNCGGFLEEDFRSILRTPSSLGRSFSHRRINSLPSFDRSFFQDRTGSFTECSIADSEPQFENLQLEDEDWLVKPPLSAGAYAANFNDEEWLVTPLKRSRVMNGIDHEDEEWLVKATKLSGAKDADLEAEEWLVKSGQPNDALDSDFRFIHEFSEQGAAEPLHIYVSDKNEADFQYVKDILKKSGFSCGDVDWYASNQPVSPVVFDEAECSCQEVSMASDEPHSIVRRMLLFDLINEVLLDIYDSSLVIGPWHSRFDLRTRPIPMGYHVLEEVWAKVSCYLSLHWKEGQTVEDIVAHDLMRKDGWMNLVYDAECTALDMEDLMVEDLLDDVVIQIVLESIDE

SEQ ID NO: 158417 - protein, 469 aa, Zea Mays
MERVKHENFCRAVAEDNTALLLSAVGNFRKEALCRIRKGSDASRVLDQEMSVRLLHLACKHDAVECATLLLEGGSGITAAPIDARDQLTRTPLHVAAETHSARCIELLLSKNARTDLRVVDGRPLLPLEIALMSRRVQTNWSVDNPIEDLLSFLKQRDLNAVRLLAEKTRVVGELAYRYAMEGCVPALTMLLLVVEEKISSQVSVVIEGVRTKRSIYNSIVDEALSTGDTSARDGHERRKALLCEIQLLNQFGSASWRDHNDKRTLPPLLRAAKVGDMNVIKMLLMGNVDVNEADSEGNTALHWCLSGASCTKEPRIVWLLLKNGARVFQGNKLGLTPVHSAAAKGNYKALQSLLLHAQDCVDIPTKTKETPLFFAVKNGSVDCAKLLLRFGADTKARNLRKQRPIDVATSQDMRFILSSANVLLFSGNHNSPQKNRVMRKEIYKELGDEFDDFDKDSCDESYTGLKTS

SEQ ID NO: 158418 - protein, 499 aa, Zea Mays
MSCLGLVQMNCPLSSQNSSEETSGAGTRASMERVKHENFCRAVAEDNTALLLSAVGNFRKEALCRIRKGSDASRVLDQEMSVRLLHLACKHDAVECATLLLEGGSGITAAPIDARDQLTRTPLHVAAETHSARCIELLLSKNARTDLRVVDGRPLLPLEIALMSRRVQTNWSVDNPIEDLLSFLKQRDLNAVRLLAEKTRVVGELAYRYAMEGCVPALTMLLLVVEEKISSQVSVVIEGVRTKRSIYNSIVDEALSTGDTSARDGHERRKALLCEIQLLNQFGSASWRDHNDKRTLPPLLRAAKVGDMNVIKMLLMGNVDVNEADSEGNTALHWCLSGASCTKEPRIVWLLLKNGARVFQGNKLGLTPVHSAAAKGNYKALQSLLLHAQDCVDIPTKTKETPLFFAVKNGSVDCAKLLLRFGADTKARNLRKQRPIDVATSQDMRFILSSANVLLFSGNHNSPQKNRVMRKEIYKELGDEFDDFDKDSCDESYTGLKTS

SEQ ID NO: 158419 - protein, 486 aa, Zea Mays
MSCLGNSSEETSGAGTRASMERVKHENFCRAVAEDNTALLLSAVGNFRKEALCRIRKGSDASRVLDQEMSVRLLHLACKHDAVECATLLLEGGSGITAAPIDARDQLTRTPLHVAAETHSARCIELLLSKNARTDLRVVDGRPLLPLEIALMSRRVQTNWSVDNPIEDLLSFLKQRDLNAVRLLAEKTRVVGELAYRYAMEGCVPALTMLLLVVEEKISSQVSVVIEGVRTKRSIYNSIVDEALSTGDTSARDGHERRKALLCEIQLLNQFGSASWRDHNDKRTLPPLLRAAKVGDMNVIKMLLMGNVDVNEADSEGNTALHWCLSGASCTKEPRIVWLLLKNGARVFQGNKLGLTPVHSAAAKGNYKALQSLLLHAQDCVDIPTKTKETPLFFAVKNGSVDCAKLLLRFGADTKARNLRKQRPIDVATSQDMRFILSSANVLLWNHNSPQKNRVMRKEIYKELGDEFDDFDKDSCDESYTGLKTS

SEQ ID NO: 158420 - protein, 489 aa, Zea Mays
MLVKVPIKNSSEETSGAGTRASMERVKHENFCRAVAEDNTALLLSAVGNFRKEALCRIRKGSDASRVLDQEMSVRLLHLACKHDAVECATLLLEGGSGITAAPIDARDQLTRTPLHVAAETHSARCIELLLSKNARTDLRVVDGRPLLPLEIALMSRRVQTNWSVDNPIEDLLSFLKQRDLNAVRLLAEKTRVVGELAYRYAMEGCVPALTMLLLVVEEKISSQVSVVIEGVRTKRSIYNSIVDEALSTGDTSARDGHERRKALLCEIQLLNQFGSASWRDHNDKRTLPPLLRAAKVGDMNVIKMLLMGNVDVNEADSEGNTALHWCLSGASCTKEPRIVWLLLKNGARVFQGNKLGLTPVHSAAAKGNYKALQSLLLHAQDCVDIPTKTKETPLFFAVKNGSVDCAKLLLRFGADTKARNLRKQRPIDVATSQDMRFILSSANVLLWNHNSPQKNRVMRKEIYKELGDEFDDFDKDSCDESYTGLKTS

SEQ ID NO: 158421 - protein, 207 aa, Zea Mays
MELPDERVQVDALERHLLAGLSSNDYDGSFEDEVLYDASFAEMEDNFVKDFRSRKLYLTPHAVIYKVNKPFAFPCFGVSKKEKYWILPSISDVVVEQDYLQSIFGVYSIRIENISVRKPPSCDVKITGVAHPHDFRKAVVVHLLNTRNQKTSSDDQQSTNLNYAASSSEASLGDLMLEKLDEVEISVKKMQALLQGPEISKFKTTSG

SEQ ID NO: 158422 - protein, 722 aa, Zea Mays
MGSSYDPYPSPAADDLFLYLSDLGPASPSAYLDLPPTPQPQPYPQSQQQQQGSKGPTQDMLLPYISSMLMEDDIDDTFFYDYPDNPALLQAQQSFLDILSDDASSPTTTTGTTNSSASVNHSSSDASASAPLTPAAVDSYSPAPAVQFDGFDLDPAAFFSNGANSDLMSSAFLKGMEEANKFLPSEDKLVIDLDPPDDPKRFVLPTRAAENLAPGFNAAAATTAPAAVAMAVKEEEVILAAPDAALGSGGVVLGRGRRNRLDDDEEDLELQRRSSKQSALQGDGDERDVFEKYIMTCPETCTEQMQQLRIAMQEEAAKEAAVAAGNGKAKGRRGGREVVDLRTLLVHCAQAVASDDRRSATELLRQIKQHASPQGDATQRLAHCFAEGLQARLAGTGSMVYQSLMAKRTSAADILQAYQLYMAAICFKRVVFVFSNNTIYNAALGKMKIHIVDYGIHYGFQWPCFLRWIADREGGPPEVRITGIDLPQPGFRPTQRIEETGRRLSKYAQQFGVPFKYQAIAASKMESIRAEDLNLDPEEVLIVNCLYQFKNLMDESVVIESPRDIVLNNIRKMRPHTFIHAIVNGSFSAPFFVTRFREALFFYSALFDALDTTTPRDSNQRMLIEENLFGRAALNVIACEGTDRVERPETYKQWQVRNQRAGLKQQPLNPDVVQVVRNKGPVWYGACGATACLSCGARIGRHTCGGKTMVRRGGLVHAPNSP

SEQ ID NO: 158423 - protein, 531 aa, Zea Mays
MTVTWTSGYDITEAVPFVEWGEKGGRRFLAPAGTLTFDRNSMCGAPARTVGWRHPGYIHTSYLKDLWPDSRYTYRLGHRLMNGTRVWSKSYSFRASPYPGQDSLQRVVIFGDMGKAEADGSNEFNNFQPGSLNTTYQITSDIENIDMVVHIGDICYANGYLSQWDQFTAQIEPIASTVPYMVGSGNHERDWPGTGSFYGNLDSGGECGVPAQTVFYTPAENRAKFWYATDYGMFRFCVAHTEEDWRPGTEQYRFIERCLSSVDRQKQPWLVFLAHRVLGYSSCAYYESEGTFEEPMGREALQELWQKYKVDLAFYGHVHSYERTCPVYQVRLHQLPSTASEQVLVIHPTESLDCNLPTNFSAEPVRRRRVGPLQRAVPGDDARRGRRRGSQPLGVRRLEDPVEPLHRLRPRLRQAHRLQPLVAAVRVQEEPRRQRVRPFHHLARLPGRPRLLRRQLPPDHTGLMKPHDRGGFHFSDKGFGPCGGSLAGQQRFKLLYIVFFFFFSFFGSAPINEAFSLLPPLPACETMLFYP

SEQ ID NO: 158424 - protein, 436 aa, Zea Mays
MLGDILHPAINWADKESHLDPDEMAKMKSAFIGNLPEDVNEEYLRKLFGQFGEVVRVAISRKGQCPVAFVHFAKRSELENAIEEMDGKTVRGPGRGPSFKIQVSVARPTADNDKKRSREEVRTRRSNASGDRRDYSHGRYGHDSLDRQVKAPRLSNYVADAADPYESAVNSLPSAVKEVLLRILRLRIGTRYDIDIHCVKSLDELPESSALAVLNQFLISGGDKHNKGDYFASLVAKHQAETFGLTHALHGTTYLSRNPEMHSKRYPHEDYDFVTPSRYDSSAHHPSTYYEDDPPVSESRVRRYAEERSTIVRSPEPRPRYDETDIRINPEPRLPYESRHNAEKHLDRRYIQEHSSNIERPAEEALLSRERRFLPAAGYMPNPGGSDFRSRSPAEYSAQRQQMRFDPFTGEPYKFDPFTGEPIRPDPNQRRSGSLY

SEQ ID NO: 158425 - protein, 422 aa, Zea Mays
MLGDILHPAINWADKESHLDPDEMAKMKSAFIGNLPEDVNEEYLRKLFGQFGEVVRVAISRKGQCPVAFVHFAKRSELENAIEEMDGKTVRGPGRGPSFKIQVSVARPTADNDKKRSREEVRTRRSNASGDRRDYSHGRYGHDSLDRQVKAPRLSNYVADAADPYESAVNSLPSAVKEVLLRILRLRIGTRYDIDIHCVKSLDELPESSALAVLNQFLISGGDKHNKGDYFASLVAKHQAETFGLTHALHGTTYLSRNPEMHSKRYPHEDYDFVTPRSSRYDSSAHHPSTYYEDDPPVSESRVRRYAEERSTIVRSPEPRPRYDETDIRINPEPRLPYESRHNAEKHLDRRYIQEHSSNIERPAEEALLSRERRFLPAAGYMPNPGGSDFRSRGAHQARSEPAPLRKPVLIRLVGAICQIRP

SEQ ID NO: 158426 - protein, 217 aa, Zea Mays
MLGDILHPAINWADKESHLDPDEMAKMKSAFIGNLPEDVNEEYLRKLFGQFGEVVRVAISRKGQCPVAFVHFAKRSELENAIEEMDGKTVRGPGRGPSFKIQVSVARPTADNDKKRSREEVRTRRSNASGDRRDYSHGRYGHDSLDRQVKAPRLSNYVADAADPYESAVNSLPSAVKEVLLRILRLRIGTRYDVETNTTKEIILHRWLLSTRLRPLA

SEQ ID NO: 158427 - protein, 178 aa, Zea Mays
MHSKRYPHEDYDFVTPRSSRYDSSAHHPSTYYEDDPPVSESRVRRYAEERSTIVRSPEPRPRYDETDIRINPEPRLPYESRHNAEKHLDRRYIQEHSSNIERPAEEALLSRERRFLPAAGYMPNPGGSDFRSRSPAEYSAQRQQMRFDPFTGEPYKFDPFTGEPIRPDPNQRRSGSLY

SEQ ID NO: 158428 - protein, 415 aa, Zea Mays
MLGDILHPAINWADKESHLDPDEMAKMKSAFIGNLPEDVNEEYLRKLFGQFGEVVRVAISRKGQCPVAFVHFAKRSELENAIEEMDGKTVRGPGRGPSFKIQVSVARPTADNDKKRSREEVRTRRSNASGDRRDYSHGRYGHDSLDRQVKAPRLSNYVADAADPYESAVNSLPSAVKEVLLRILRLRIGTRYDFLISGGDKHNKGDYFASLVAKHQAETFGLTHALHGTTYLSRNPEMHSKRYPHEDYDFVTPRSSRYDSSAHHPSTYYEDDPPVSESRVRRYAEERSTIVRSPEPRPRYDETDIRINPEPRLPYESRHNAEKHLDRRYIQEHSSNIERPAEEALLSRERRFLPAAGYMPNPGGSDFRSRSPAEYSAQRQQMRFDPFTGEPYKFDPFTGEPIRPDPNQRRSGSLY

SEQ ID NO: 158429 - protein, 607 aa, Zea Mays
MASPRGGFDEQDRRTEKGTEVFVGGLPRSATESTLREIFSSCGEIIDARIMKDQSGHSKGYGFVRFAKRDYANTAKRQKNGIEVQGKRLVVELSMDQDTVFFGNLCKEWTLEEFEELIHKAFKDVVSVDLAMASNLGSSNKKNINRGFGFVRFSSHAAAARVIRIGSRTDFMLGDILHPAINWADKESHLDPDEMAKMKSAFIGNLPEDVNEEYLRKLFGQFGEVVRVAISRKGQCPVAFVHFAKRSELENAIEEMDGKTVRGPGRGPSFKIQVSVARPTADNDKKRSREEVRTRRSNASGDRRDYSHGRYGHDSLDRQVKAPRLSNYVADAADPYESAVNSLPSAVKEVLLRILRLRIGTRYDIDIHCVKSLDELPESSALAVLNQFLISGGDKHNKGDYFASLVAKAETFGLTHALHGTTYLSRNPEMHSKRYPHEDYDFVTPRSSRYDSSAHHPSTYYEDDPPVSESRVRRYAEERSTIVRSPEPRPRYDETDIRINPEPRLPYESRHNAEKHLDRRYIQEHSSNIERPAEEALLSRERRFLPAAGYMPNPGGSDFRSRSPAEYSAQRQQMRFDPFTGEPYKFDPFTGEPIRPDPNQRRSGSLY

SEQ ID NO: 158430 - protein, 409 aa, Zea Mays
MASPRGGFDEQDRRTEKGTEVFVGGLPRSATESTLREIFSSCGEIIDARIMKDQSGHSKGYGFVRFAKRDYANTAKRQKNGIEVQGKRLVVELSMDQDTVFFGNLCKEWTLEEFEELIHKAFKDVVSVDLAMASNLGSSNKKNINRGFGFVRFSSHAAAARVIRIGSRTDFMLGDILHPAINWADKESHLDPDEMAKMKSAFIGNLPEDVNEEYLRKLFGQFGEVVRVAISRKGQCPVAFVHFAKRSELENAIEEMDGKTVRGPGRGPSFKIQVSVARPTADNDKKRSREEVRTRRSNASGDRRDYSHGRYGHDSLDRQVKAPRLSNYVADAADPYESAVNSLPSAVKEVLLRILRLRIGTRYDIDIHCVKSLDELPESSALAVLNQVETNTTKEIILHRWLLRLRPLA

SEQ ID NO: 158431 - protein, 577 aa, Zea Mays
MASPRGGFDEQDRRTEKGTEVFVGGLPRSATESTLREIFSSCGEIIDARIMKDQSGHSKGYGFVRFAKRDYANTAKRQKNGIEVQGKRLVVELSMDQDTVFFGNLCKEWTLEEFEELIHKAFKDVVSVDLAMASNLGSSNKKNINRGFGFVRFSSHAAAARVIRIGSRTDFMLGDILHPAINWADKESHLDPDEMAKMKSAFIGNLPEDVNEEYLRKLFGQFGEVVRVAISRKGQCPVAFVHFAKRSELENAIEEMDGKTVRGPGRGPSFKIQVSVARPTADNDKKRSREEVRTRRSNASGDRRDYSHGRYGHDSLDRQVKAPRLSNYVADAADPYESAVNSLPSAVKEVLLRILRLRIGGDKHNKGDYFASLVAKHQAETFGLTHALHGTTYLSRNPEMHSKRYPHEDYDFVTPRSSRYDSSAHHPSTYYEDDPPVSESRVRRYAEERSTIVRSPEPRPRYDETDIRINPEPRLPYESRHNAEKHLDRRYIQEHSSNIERPAEEALLSRERRFLPAAGYMPNPGGSDFRSRSPAEYSAQRQQMRFDPFTGEPYKFDPFTGEPIRPDPNQRRSGSLY

SEQ ID NO: 158432 - protein, 607 aa, Zea Mays
MASPRGGFDEQDRRTEKGTEVFVGGLPRSATESTLREIFSSCGEIIDARIMKDQSGHSKGYGFVRFAKRDYANTAKRQKNGIEVQGKRLVVELSMDQDTVFFGNLCKEWTLEEFEELIHKAFKDVVSVDLAMASNLGSSNKKNINRGFGFVRFSSHAAAARVIRIGSRTDFMLGDILHPAINWADKESHLDPDEMAKMKSAFIGNLPEDVNEEYLRKLFGQFGEVVRVAISRKGQCPVAFVHFAKRSELENAIEEMDGKTVRGPGRGPSFKIQVSVARPTADNDKKRSREEVRTRRSNASGDRRDYSHGRYGHDSLDRQVKAPRLSNYVADAADPYESAVNSLPSAVKEVLLRILRLRIGTRYDIDIHCVKSLDELPESSALAVLNQFLISGGDKHNKGDYFASLVAKHQAETFGLTHALHGTTYLSRNPEMHSKRYPHEDYDFVTPSRYDSSAHHPSTYYEDDPPVSESRVRRYAEERSTIVRSPEPRPRYDETDIRINPEPRLPYESRHNAEKHLDRRYIQEHSSNIERPAEEALLSRERRFLPAAGYMPNPGGSDFRSRSPAEYSAQRQQMRFDPFTGEPYKFDPFTGEPIRPDPNQRRSGSLY

SEQ ID NO: 158433 - protein, 602 aa, Zea Mays
MASPRGGFDEQDRRTEKGTEVFVGGLPRSATESTLREIFSSCGEIIDARIMKDQSGHSKGYGFVRFAKRDYANTAKRQKNGIEVQGKRLVVELSMDQDTVFFGNLCKEWTLEEFEELIHKAFKDVVSVDLAMASNLGSSNKKNINRGFGFAAARVIRIGSRTDFMLGDILHPAINWADKESHLDPDEMAKMKSAFIGNLPEDVNEEYLRKLFGQFGEVVRVAISRKGQCPVAFVHFAKRSELENAIEEMDGKTVRGPGRGPSFKIQVSVARPTADNDKKRSREEVRTRRSNASGDRRDYSHGRYGHDSLDRQVKAPRLSNYVADAADPYESAVNSLPSAVKEVLLRILRLRIGTRYDIDIHCVKSLDELPESSALAVLNQFLISGGDKHNKGDYFASLVAKHQAETFGLTHALHGTTYLSRNPEMHSKRYPHEDYDFVTPRSSRYDSSAHHPSTYYEDDPPVSESRVRRYAEERSTIVRSPEPRPRYDETDIRINPEPRLPYESRHNAEKHLDRRYIQEHSSNIERPAEEALLSRERRFLPAAGYMPNPGGSDFRSRSPAEYSAQRQQMRFDPFTGEPYKFDPFTGEPIRPDPNQRRSGSLY

SEQ ID NO: 158434 - protein, 237 aa, Zea Mays
MASNEWVMLFDLKPARNLLALQILNLRNYMLQYEILGTEVLQCFQTHAELYTQNVLMKIIQQVGGTADLCSGSIAASLYGQSEDGFECTSGTDPLSLHIVGTGNSGGGVTGGKGGSGSGGSPCCNVLGGEEQVNMCNREFGSSLVIGKSMPVTILGLLVTSSSMKSEIPKELSAAAILPLEGEVTEESSKWRTVCLQPGLKEQDPSALICSCSDIRVLEQFWVQESCGGGSGGGYGG

SEQ ID NO: 158435 - protein, 524 aa, Zea Mays
MGACVSSSKKRRSQRSCCIYRRYRGKVLTNTPIVRVGEVENLASSGAAVHLGTSAAARRRSDGSNVTFHLTQLQWRHSELDTENGNVVCQEEAWFDSVSILGSDSDEDFSSVNGDFPAMSNSTGTQLMQCEDASSIADAIQKFELIFDGSSVAQAVGQYLKRDANKIEAERPRVASPEACDVSSGKVEDAKTRNEGIKKVRRGEDACNTLKSFKDGEKPHESIFKSLTPVCTPRHANKVQPLAVASPRGQKKKSAVVRLSFKRQSFDGEQTTEICSSRRYLIRPRAGLLVPQAGEKISEGCWSVLEPSAFKLRGESFFKDKKKSPAPACSPYTSFGVDIFMSPRKIHHIAQHIELPSVKPNDKIPSLLIVNIQMPTYPAAMFLGDSDGEGINLVLYFKLNDNFEKEISPQFHDSIKRLVSDETEKVKGFPLDSTVPFRERLKILAGLVNPDDMNLSSAERKLVQAYNEKPVLSRPQHNFYVGSNYLEIDLDVHRFSFISRKGLEAFRERLKHGMIDLGLTIQVG

SEQ ID NO: 158436 - protein, 343 aa, Zea Mays
MQIRLSPSMRSITISTSHGLLDLMRFKVAARHFSYRTVFHTVLILAFLLPFVFILTAVMTLEGFNKCSSLDCLGRRLGPRLLGRGNDGSMRLVRDLYVMLDEVNSEEAPLNLKVPETFDEFIWDMKNNDYDLRSFAFKLKATMESMDKELRSSRLSEQLNKHYAAIAIPKGLYCLSLRLTDEYSSNALARKQLPPPELVPSLSDNSYYHFVLASDNILAASVVVRSTVRSSLKPERIVFHVITDKKTYPAMHSWFALNSLSPAIVEVKGVHQFDWLTKENVPVLEAIETQRTARDRYHGSHRPRTSASDNPRVFAAKLQAGSPTYTNVLNHIRIYLPEVLEFS

SEQ ID NO: 158437 - protein, 116 aa, Zea Mays
MAQQGEFLIGLLNELACWALAPGAESFFRSLLLGRIWMRSLFECSKYENQADSCTFELPLTWRTFSVSSICRNVLRRLGAFMLVNLPKKKGVLRLQMLLVCLHCNRNSSQLNMLTC

SEQ ID NO: 158438 - protein, 264 aa, Zea Mays
MPHNVFLHSALVQSRKIDQNKEYQVREALRYYSIESTIALVVSFMINLFVTTVFAKGFYGSKEAGNIGLENAGQYLQEKFGGGFFPILYIWGIGLLAAGQSSTITGTYAGQFIMGGFLNLRLKKWVRALITRSFAIVPTITVALFFDTSDSALDILNEWLNVLQSIQIPFALIPLITLVSKEQVMGVFKIGPNTQAVTWTVATLLITINGYLLMDFFSSEIRGPLSGSLLCVAVLIYASFVLYLILRGTELSEKIAKAIRGSFS

SEQ ID NO: 158439 - protein, 525 aa, Zea Mays
MDNSAYYCYCCLLALLPPLYFLVKFWWRTSCARRSHGLRLPPGPWQLPIIGSIHHLRGSLVHRALRDLSLRHGPLMFLRLGEVPVVVASTPDAAKEFMKTHDATFATRPMTLSAKVFAKDGPGIVVAPYGGDHWRQLRKICIVELLSARRVRSFGPVREEEAARLVQAVAGASTRRAPAPAPLVDLGRLAAVYVADASVRAIVGRRFGETDALLRFVDESVSLAGGFTPVDLFPSSLLVRVLTLRRTVRRLEHFRESLFGFMDGVVREHLERKQSSRGGGGGEEEEEADMVDVLLRIQQEGNLKFPLTMRIIEAVIFDLIAGGIETASSTLQWAMAELMRNPAAMSKAQAEVRGVYAGQTKVTEDRLGELPYLQLVIKETLRLHVPGPLLIPRECQEHCRVLGYDVPKGAMVLVNAWAIARSPEYWEEPDAFDPDRFAGDAARDFRGNDFEFIPFGAGRRICPGMAFGLANIELGLASLLFHFDWSLPEGVVPSEMDMAETMGITARRKADLLLSATPRVVPRPS

SEQ ID NO: 158440 - protein, 203 aa, Zea Mays
MERGDEASSVVSKASTAEQRLTREQHGDGAAWLNLTLGASESPSPSPSPDAASCSADSESGSGSGSAAKPPPHKVFSCNFCLRKFFSSQALGGHQNAHKRERSAAKRSSYHAQRVVVGGLPLHAHAALMRSLRANPAPAPAVRTAARFLEGGVAAAAWATVPCEEAPSSAWPGSFRLRAPHSEYEQACEPIQPRPSSRFMFIC

SEQ ID NO: 158441 - protein, 180 aa, Zea Mays
MGAKIFALLALLALSASAATSTFIPQCSQQYLSPVTAAGFQYPTIQSYMVQEAIQASILRSLALTLQQPYALLQQPSLVHLYLQRIAAQQLQQQLLPTINQVVAANLAAYLQQQQFLPFNQLAGVNPAIYLQAQQLLPFNQLVGSPYAFLQQQQLLPFSQHALTNPTTLLQPPTIGGAIF

SEQ ID NO: 158442 - protein, 230 aa, Zea Mays
MGAKIFALLALLALSASAATSTFIPQCSQQYLSPVTAAGFQYPTIQSYMVQEAIQASILRSLALTLQQPYALLQQPSLVHLYLQRIAAQQLQQQLLPTINQVVAANLAAYLQQQQFLPFNQLAGVNPAIYLQAQQLLPFNQLVGSPYAFLQQQQLLPFYPQNVANIVAFLQQQQLLPFSQLALTNPTSLLQQLSHPVLEGKPNANHVRARISYSRTQQLHNMDIITQCSK

SEQ ID NO: 158443 - protein, 250 aa, Zea Mays
MGAKIFALLALLALSASAATSTFIPQCSQQYLSPVTAAGFQYPTIQSYMVQEAIQASILRSLALTLQQPYALLQQPSLVHLYLQRIAAQQLQQQLLPTINQVVAANLAAYLQQQQFLPFNQLAGVNPAIYLQAQQLLPFNQLVGSPYAFLLQQQLLPFHLQAVANIVAFLRQQHLLPFYPQVVGNINAFLQQQQLLPFSQLALTNPTSLLQQLSHPVLEGKPNANHVRARISYSRTQQLHNMDIITQCSK

SEQ ID NO: 158444 - protein, 191 aa, Zea Mays
MAAKIFAILALLALSASVATATIIPQCSQQYLSPVTAARFEYPTIQSYRLQEAIAASILRSLALTVQQPYALLQQPSLMNLYLQRIAAQQLQQQLLPIINQVVAANLAAYLQQQQFLPFNQLAGVNPAAYLQAQQLLPFNQLVRSPAAFLQQQQLLPFYPHDVENIVTFLQQQQWLPFSQLALTNPTTLLQ

SEQ ID NO: 158445 - protein, 453 aa, Zea Mays
MSDGQLEILQENLDYLAEMILLENTRKGWKTLKRMLEWNSQMLLGDRSRYSAANAVYIRQSDNPTEWQTEEAPDPHDVYWPFFSTSFMERWIAKFVVFVASVLLILVFLLVVAFVQGLTYLEQLEKWLPFLRNILEIAVVSQLVTGYLPSVILHVLSSCVPSIMKLFSTMQGFVSVSGIEQSACNKMLRFTIWTAFFANVLTGSALVQFEIFLNPKELPSKLAVLVPAQASFFIAYVVTSWTSITSELTQITALFCHLWGKCAKCCKRDYSKAPSMPYYSEIPRILLFGLIGLAYFIVAPLILPFVLVYFCLGYFIFRNQLFNVYAPKYDTGGKFWPVVHNTTIFSLVVLHIIAIGVFGIKKLPLASSLLLPLPPLTLLFNEFCRNRFLPIFEAYSTESLLKKDREEQSKPDMAEFFSNLVTAYCDPALKPFQRASNSDERTAPLLASLSSSR

SEQ ID NO: 158446 - protein, 580 aa, Zea Mays
MILSALTTSVGINLALTVLLAAAYSLLRRRPPYVEVYSPRRPYAPLEPWLAAAWRRAEEDIHAAAGLDGVVFIRIFVFSIRVFAAAAVLGVGVLLPVNFLGDQLREIDFTDLPNKSIDLFSISNVQDGSSKLWLHFSAVYIITGITCYLLYHEYKYISGKRLEYFMISKPLPQHFTVLVRAIPVSDGVSVGDAVDKFFKEYHASTYLSHTIVRQTGKLRRLLNDAESICTKLTNLNHVRRSTGDPPRKLGLFSRNDLVGEYQKRLEDLEENVRMEQSDATRRQEIPAAFVSFRSRYSAANAVYIRQSDNPTEWQTEEAPDPHDVYWPFFSTSFMERWIAKFVVFVASVLLILVFLLVVAFVQGLTYLEQLEKWLPFLRNILEIAVVSQLVTGYLPSVILHVLSSCVPSIMKLFSTMQGFVSVSGIEQSACNKMLRFTIWTAFFANVLTGSALVQFEIFLNPKELPSKLAVLVPAQASFFIAYVVTSWTSITSELTQITALFCHLWGKCAKCCKRDYSKAPSMPYYSEIPRILLFGLIGLAYFIVAPLILPFVLVYFCLGYFIFRNQVRTLQLFSVLKKSS

SEQ ID NO: 158447 - protein, 426 aa, Zea Mays
MEQSDATRRQEIPAAFVSFRSRYSAANAVYIRQSDNPTEWQTEEAPDPHDVYWPFFSTSFMERWIAKFVVFVASVLLILVFLLVVAFVQGLTYLEQLEKWLPFLRNILEIAVVSQLVTGYLPSVILHVLSSCVPSIMKLFSTMQGFVSVSGIEQSACNKMLRFTIWTAFFANVLTGSALVQFEIFLNPKELPSKLAVLVPAQASFFIAYVVTSWTSITSELTQITALFCHLWGKCAKCCKRDYSKAPSMPYYSEIPRILLFGLIGLAYFIVAPLILPFVLVYFCLGYFIFRNQLFNVYAPKYDTGGKFWPVVHNTTIFSLVVLHIIAIGVFGIKKLPLASSLLLPLPPLTLLFNEFCRNRFLPIFEAYSTESLLKKDREEQSKPDMAEFFSNLVTAYCDPALKPFQRASNSDERTAPLLASLSSSR

SEQ ID NO: 158448 - protein, 647 aa, Zea Mays
MILSALTTSVGINLALTVLLAAAYSLLRRRPPYVEVYSPRRPYAPLEPWLAAAWRRAEEDIHAAAGLDGVVFIRIFVFRLWLHFSAVYIITGITCYLLYHEYKYISGKRLEYFMISKPLPQHFTVLVRAIPVSDGVSVGDAVDKFFKEYHASTYLSHTIVRQTGKLRRLLNDAESICTKLTNLNHVRRSTGDPPRKLGLFSRNDLVGEYQKRLEDLEENVRMEQSDATRRQEIPAAFVSFRSRYSAANAVYIRQSDNPTEWQTEEAPDPHDVYWPFFSTSFMERWIAKFVVFVASVLLILVFLLVVAFVQGLTYLEQLEKWLPFLRNILEIAVVSQLVTGYLPSVILHVLSSCVPSIMKLFSTMQGFVSVSGIEQSACNKMLRFTIWTAFFANVLTGSALVQFEIFLNPKELPSKLAVLVPAQASFFIAYVVTSWTSITSELTQITALFCHLWGKCAKCCKRDYSKAPSMPYYSEIPRILLFGLIGLAYFIVAPLILPFVLVYFCLGYFIFRNQLFNVYAPKYDTGGKFWPVVHNTTIFSLVVLHIIAIGVFGIKKLPLASSLLLPLPPLTLLFNEFCRNRFLPIFEAYSTESLLKKDREEQSKPDMAEFFSNLVTAYCDPALKPFQRASNSDERTAPLLASLSSSR

SEQ ID NO: 158449 - protein, 296 aa, Zea Mays
MILSALTTSVGINLALTVLLAAAYSLLRRRPPYVEVYSPRRPYAPLEPWLAAAWRRAEEDIHAAAGLDGVVFIRIFVFSIRVFAAAAVLGVGVLLPVNFLGDQLREIDFTDLPNKSIDLFSISNVQDGSSKLWLHFSAVYIITGITCYLLYHEYKYISGKRLEYFMISKPLPQHFTVLVRAIPVSDGVSVGDAVDKFFKEYHASTYLSHTIVRQTGKLRRLLNDAESICTKLTNLNHVRRSTGDPPRKLGLFSRNDLVGEYQKRLEDLEENVRMEQSDATRRQLWHLFKDSPIWNN

SEQ ID NO: 158450 - protein, 290 aa, Zea Mays
MLGSTVMLATAIVPAMGGNAGDKARVIQSFLFMSGINTLLQTLIGTRLPTVMNASFAFVVPVLSIAKEIESNNFLNDHERFKHTMRTAQGALIVASILNMILGFSTIWGAYAKKFSPVIMTPVVCVVGLGLFQLGFPQVGKCVEIGLPMLILAVVVQQYVPNYFSYIHQRVTFLFERYSLLLCIGIVWAFAAILTAAGAYDHASPKTQQHCRTDKSFLMSSAPWIKIPLPFEWGPPIFTAGHSFGMMGAVLVAAFESTGAHFATARLAGATPPPAYVLSRSVGLQVGSVP

SEQ ID NO: 158451 - protein, 492 aa, Zea Mays
MLGSTVMLATAIVPAMGGNAGDKARVIQSFLFMSGINTLLQTLIGTRLPTVMNASFAFVVPVLSIAKEIESNNFLNDHERFKHTMRTAQGALIVASILNMILGFSTIWGAYAKKFSPVIMTPVVCVVGLGLFQLGFPQVGKCVEIGLPMLILAVVVQQYVPNYFSYIHQRVTFLFERYSLLLCIGIVWAFAAILTAAGAYDHASPKTQQHCRTDKSFLMSSAPWIKIPLPFEWGPPIFTAGHSFGMMGAVLVAAFESTGAHFATARLAGATPPPAYVLSRSVGLQGIGMFLEGIFSVPAGSSVSVENIGLLGLTKVGSRRVIQISTGFMIFFSIFGKFGAFFASIPLPIFAAIYCILFGIVAAVGVSFMQFANKNSMRNIYIIGLSLFLGISVPQYFNGYTSSAGGHGPARTNAGWFNDIINTVFASGPTVALIVASVLDNTLEFRGYEADRGLSWFQPFLRRHKGYSDPRNEEFYSFPISVYDVIPDRFRR

SEQ ID NO: 158452 - protein, 131 aa, Zea Mays
MFGSVAYRLLLLLFRRRRCRCSLGEPVVASPGPTTPSSACEQGTPLSLVQGELLPWRLFFAGTSSARLQSWMSWPGAYFPLPPSTRDSTSPPHDTTHPLFFLPSSRRLASAPSTPPSMPGSSTRWLPEGVE

SEQ ID NO: 158453 - protein, 76 aa, Zea Mays
MSHARARRADAQQPISCSKFSSCPKLLLSRSRATAPGFFSRLRSVPELRGIDGQASATKRSNSSSSTRLKILSICL

SEQ ID NO: 158454 - protein, 558 aa, Zea Mays
MREVVTVQVGGFANFVGSHFWNFQDELLGLADDPGADPVFRTAALDMDVLYRAGETHQYSGDLILSDERAQIRNSVIGSWNLVITGLSCCRSGKVTKSVAKPHERNLFLQSLSEEEQNPSSSDGQNNASVEDKDLVANLENGVKFWTDYSKVQYHPQSLYELYGSWTDFDRFDNYGTAKEVVSEWSQMEEMNERLRFFVEECDHIQGIQFLVDDSGGFASVAAQFLESIVDDYTNTPVMLYCVRNPDSYGSSRNQCETIIRSLHDAVSLSKLSYYCNLMVPIGLPSLSYLSPLLSIKDEKHFHSSAICAAAMHSLSIPFRLQHVGPASDSAHSSGKLDIGELVHILSDQGRQNMITALDVAMPAPSLTDRTDLRNIQRSLHSLTPEISDEDEDPYAVESMVVHGVLDAGGKRASISQVKESICSALEGRATKPKFSHLSVSRCPLPIPLPFPSIFSSSVGQQGEILGTSHAGARPKGPLAVGSVPMAARLRSSSAIAPFIERRSASLQRLGVARGTLGSQVLHDWGFGREEVEDMAEHLAKMLRPFYPEMDLTSDSDD

SEQ ID NO: 158455 - protein, 313 aa, Zea Mays
MREVVTVQVGGFANFVGSHFWNFQDELLGLADDPGADPVFRTAALDMDVLYRAGETHQSVASYCPRLVSVGSRGSLGSLSSSGTLGSSSAAADEPNIFTWSGKVTKSVAKPHERNLFLQSLSEEEQNPSSSDGQNNASVEDKDLVANLENGVKFWTDYSKVQYHPQSLYELYGSWTDFDRFDNYGTAKEVVSEWSQMEEMNERLRFFVEECDHIQGIQFLVDDSGGFASVAAQFLESIVDDYTNTPVMLYCVRNPDSYGSSRNQCETIIRSLHDAVSLSKLSYYCNLMVPIGLPSLSMLLIAYNLLRRLPYNM

SEQ ID NO: 158456 - protein, 543 aa, Zea Mays
MSCSGSPTTPAPTRYSGPPRSTWTSCTAPARHTRSVASYCPRLVSVGSRGSLGSLSSSGTLGSSSAAADEPNIFTWSGKVTKSVAKPHERNLFLQSLSEEEQNPSSSDGQNNASVEDKDLVANLENGVKFWTDYSKVQYHPQSLYELYGSWTDFDRFDNYGTAKEVVSEWSQMEEMNERLRFFVEECDHIQGIQFLVDDSGGFASVAAQFLESIVDDYTNTPVMLYCVRNPDSYGSSRNQCETIIRSLHDAVSLSKLSYYCNLMVPIGLPSLSYLSPLLSIKDEKHFHSSAICAAAMHSLSIPFRLQHVGPASDSAHSSGKLDIGELVHILSDQGRQNMITALDVAMPAPSLTDRTDLRNIQRSLHSLTPEISDEDEDPYAVESMVVHGVLDAGGKRASISQVKESICSALEGRATKPKFSHLSVSRCPLPIPLPFPSIFSSSVGQQGEILGTSHAGARPKGPLAVGSVPMAARLRSSSAIAPFIERRSASLQRLGVARGTLGSQVLHDWGFGREEVEDMAEHLAKMLRPFYPEMDLTSDSDD

SEQ ID NO: 158457 - protein, 298 aa, Zea Mays
MLHSSPQITHTPTVGECNAHSIITQPYGYLSPLLSIKDEKHFHSSAICAAAMHSLSIPFRLQHVGPASDSAHSSGKLDIGELVHILSDQGRQNMITALDVAMPAPSLTDRTDLRNIQRSLHSLTPEISDEDEDPYAVESMVVHGVLDAGGKRASISQVKESICSALEGRATKPKFSHLSVSRCPLPIPLPFPSIFSSSVGQQGEILGTSHAGARPKGPLAVGSVPMAARLRSSSAIAPFIERRSASLQRLGVARGTLGSQVLHDWGFGREEVEDMAEHLAKMLRPFYPEMDLTSDSDD

SEQ ID NO: 158458 - protein, 272 aa, Zea Mays
MSCSGSPTTPAPTRYSGPPRSTWTSCTAPARHTRASPATALAWYQSVLEGSLGSLSSSGTLGSSSAAADEPNIFTWSGKVTKSVAKPHERNLFLQSLSEEEQNPSSSDGQNNASVEDKDLVANLENGVKFWTDYSKVQYHPQSLYELYGSWTDFDRFDNYGTAKEVVSEWSQMEEMNERLRFFVEECDHIQGIQFLVDDSGGFASVAAQFLESIVDDYTNTPVMLYCVRNPDSYGSSRNQCETIIRSLHDAVSLSKLSYYCNLMVTCHLCFL

SEQ ID NO: 158459 - protein, 247 aa, Zea Mays
MHSLSIPFRLQHVGPASDSAHSSGKLDIGELVHILSDQGRQNMITALDVAMPAPSLTDRTDLRNIQRSLHSLTPEISDEDEDPYAVESMVVHGVLDAGGKRASISQVKESICSALEGRATKPKFSHLSVSRCPLPIPLPFPSIFSSSVGQQGEILGTSHAGARPKGPLAVGSVPMAARLRSSSAIAPFIERRSASLQRLGVARGTLGSQVLHDWGFGREEVEDMAEHLAKMLRPFYPEMDLTSDSDD

SEQ ID NO: 158460 - protein, 390 aa, Zea Mays
MEEMNERLRFFVEECDHIQGIQFLVDDSGGFASVAAQFLESIVDDYTNTPVMLYCVRNPDSYGSSRNQCETIIRSLHDAVSLSKLSYYCNLMMLHSSPQITHTPTVGECNAHSIITQPYGYLSPLLSIKDEKHFHSSAICAAAMHSLSIPFRLQHVGPASDSAHSSGKLDIGELVHILSDQGRQNMITALDVAMPAPSLTDRTDLRNIQRSLHSLTPEISDEDEDPYAVESMVVHGVLDAGGKRASISQVKESICSALEGRATKPKFSHLSVSRCPLPIPLPFPSIFSSSVGQQGEILGTSHAGARPKGPLAVGSVPMAARLRSSSAIAPFIERRSASLQRLGVARGTLGSQVLHDWGFGREEVEDMAEHLAKMLRPFYPEMDLTSDSDD

SEQ ID NO: 158461 - protein, 897 aa, Zea Mays
MESYLEERFGGVQAKNSSEEALRRWRRLCSVVKNPKRRFRFTANLEKRGEAEAIKHANHEKLRVAVLVSKAALQFLHGLTLRSEYVVPEEVKAAGFQICADELGSIVEGHDSKKLITQGGVDGIAEKLATSKTDGLSTADDSIKRRQDIYGVNRFTESEVRSFWVFVWEALQDTTLIILAVCAFVSLVVGIVVEGWPKGAHDGLGIVASILLVVFVTATSDYRQSLQFKDLDKEKKKIHVQVTRNGFRQRLSIYDLLPGDVVHLAIGDQVPADGLFIYGFSLLINESSLTGESEPVAVNEDNPFLLSGTKVQDGSCKMLVTTVGMRTQWGKLMATLSEGGDDETPLQVKLNGVATIIGQIGLFFAVITFIVLSQGLFSKKYHEQMLLSWSGDDALELLEHFAIAVTIVVVAVPEGLPLAVTLSLAFAMKKMMNDKALVRHLAACETMGSATTICSDKTGTLTTNHMAVVKACICGNIKEVNGSQNASKLRSELPEIVIKTLLESIFNNTGGEVVINQDGKYQILGTPTETALLEFALSLGGDFKAKRDETKIVKVEPFNSTKKRMSVILELPGGGCRAHCKGASEIVLAACDKFVDETGGVHPLDKITADKLNGIIDSFAGEALRTLCLAYKDMEEGFSNADHIPLQGYTCIGIIGIKDPVRPGVKESVATCRAAGIMVRMVTGDNINTAKAIARECGILTEDGIAIEGPEFREKSLAELLELVPKIQVMARSSPLDKHTLVKHLRTTFNDVVAVTGDGTNDAPALHEADIGLAMGIAGTEVAKESADVIILDDNFSTIVTVAKWGRSVYINIQKFVQFQLTVNVVALLVNFSSACFTGNAPLTAVQLLWVNMIMDTLGALALATEPPNDDLMKREPVGRTGKFITNVMWRNILGVQ

SEQ ID NO: 158462 - protein, 782 aa, Zea Mays
MESYLEERFGGVQAKNSSEEALRRWRRLCSVVKNPKRRFRFTANLEKRGEAEAIKHANHEKLRVAVLVSKAALQFLHGLTLRSEYVVPEEVKAAGFQICADELGSIVEGHDSKKLITQGGVDGIAEKLATSKTDGLSTADDSIKRRQDIYGVNRFTESEVRSFWVFVWEALQDTTLIILAVCAFVSLVVGIVVEGWPKGAHDGLGIVASILLVVFVTATSDYRQSLQFKDLDKEKKKIHVQVTRNGFRQRLSIYDLLPGDVVHLAIGDQVPADGLFIYGFSLLINESSLTGESEPVAVNEDNPFLLSGTKVQDGSCKMLVTTVGMRTQWGKLMATLSEGGDDETPLQVKLNGVATIIGQIGLFFAVITFIVLSQGLFSKKYHEQMLLSWSGDDALELLEHFAIAVTIVVVAVPEGLPLAVTLSLAFAMKKMMNDKALVRHLAACETMGSATTICSDKTGTLTTNHMAVVKACICGNIKEVNGSQNASKLRSELPEIVIKTLLESIFNNTGGEVVINQDGKYQILGTPTETALLEFALSLGGDFKAKRDETKIVKVEPFNSTKKRMSVILELPGGGCRAHCKGASEIVLAACDKFVDETGGVHPLDKITADKLNGIIDSFAGEALRTLCLAYKDMEEGFSNADHIPLQGYTCIGIIGIKDPVRPGVKESVATCRAAGIMVRMVTGDNINTAKAIARECGILTEDGIAIEGPEFREKSLAELLELVPKIQVMARSSPLDKHTLVKHLRTTFNDVVAVTGDGTNDAPALHEADIGLAMGIAGTEV

SEQ ID NO: 158463 - protein, 435 aa, Zea Mays
MLVTTVGMRTQWGKLMATLSEGGDDETPLQVKLNGVATIIGQIGLFFAVITFIVLSQGLFSKKYHEQMLLSWSGDDALELLEHFAIAVTIVVVAVPEGLPLAVTLSLAFAMKKMMNDKALVRHLAACETMGSATTICSDKTGTLTTNHMAVVKACICGNIKEVNGSQNASKLRSELPEIVIKTLLESIFNNTGGEVVINQDGKYQILGTPTETALLEFALSLGGDFKAKRDETKIVKVEPFNSTKKRMSVILELPGGGCRAHCKGASEIVLAACDKFVDETGGVHPLDKITADKLNGIIDSFAGEALRTLCLAYKDMEEGFSNADHIPLQGYTCIGIIGIKDPVRPGVKESVATCRAAGIMVRMVTGDNINTAKAIARECGILTEDGIAIEGPEFREKSLAELLELVPKIQVRYLHDILLSFKHFNHQSTSLTYF

SEQ ID NO: 158464 - protein, 123 aa, Zea Mays
MFQDITTLLLDPKAFRDTIDLFVERYKDQGITVVAGEVISEEYSLEYGTDKIEMHVGAVQANDRALVVDDLIATGGTLCAAVKLIERVGAKVVECACVIELPELKGRDKLGDRPVFVLVEADA

SEQ ID NO: 158465 - protein, 110 aa, Zea Mays
MCLVQELNLLCDSVNLIAAIFRFSKQLHYRYVWTGNFLPKFWTEKVDTASASHSFLSACLNLGLKFSTYSFWMLITRAKKRSPRGMEIGNASPSRLVGGKNFLVYIHMKE

SEQ ID NO: 158466 - protein, 63 aa, Zea Mays
MNKYELMLHYRLTHSLACRTRKWCCKETVFDFCCNLTEETSLFIISQTYSYMLSTAHFFLQWQ

SEQ ID NO: 158467 - protein, 637 aa, Zea Mays
MHLSLWKPLSHCAAVLLAKNHRRRGGGGGSNGRRDDSSAFLRQLRDALDAASEDGSLCPPPDAGGADADAAVSRSRSLARLRAQRDFLRATALATAAGPFRSLSDLPLLPHAIATFLAMYPDYASTADVDRLRVDHYSHLDAPGAGRVCLDYCGFGLFDSGWDSSSSSFTLHELNANLSNHALYGGAEPGTVENDIKERILEYLNVPASEYALVFTVSRGSAFRLLAECYPFETNRRLLTMFDHESQSVNWMAQSARAKGAKTRTAWFRWPTLKLCSTELRKEIVGKKKGRRRDAAVGLFVFPAQSRVTGAKYSYQWMALAQQNGWHVMLDAGALGPKDMDSLGLSLFRPDFIITSFYRVFGADPTGFGCLLIKKSVIGTLQGRNGCNASGMVRIVPVFPQYLSDSVDGFDAFDGFEDDPGVDKDEKPSSNAQNGSQLPAFSGVYTSAQVRETFESDPGRDSSSDRDGASTIFEETESVSMGEIMRSPAFSEDCSSENSFWVDVGHSPLGSEKSGQFKKGKLGSPLPSSWFNGRKCNKRMSPNLSSRISRSPLYDGHVISFDAAVLSVSQDADCLKEDPEEENFENGRRAHFRQVSEIQEEPEAEEVACQRAMNGGAEHKESAIRRETEGEFRLLGG

SEQ ID NO: 158468 - protein, 109 aa, Zea Mays
MGKQFNDVVRRHGVHHSVTVSDSEDTVAPSQLVRSPRNALPLKEPSGKARPSKYESPNSSNFIVRHVATGKEGTDDEYANSNYYYSLSANRLGDEEKEEIIDHPKQVCC

SEQ ID NO: 158469 - protein, 82 aa, Zea Mays
MHQTQATHNTIYKNQNGPGRLHHSTLQKQLNSHTRRTICDGTDGGTALRERAGEERNAQIFTPLLLHTTKEGQAVKELGSSL

SEQ ID NO: 158470 - protein, 113 aa, Zea Mays
MFPLTSPCTSVTFSDRLLLCVSASQILFNLLLMGFNSSSTWISWAGQCTVTANFRLHGKAADAQIGEGRLCVCVLLAPTDYLSTRSKSKQMVCASVENSGLMLRDIGICRRLN

SEQ ID NO: 158471 - protein, 69 aa, Zea Mays
MVITSASYILYASRSFFINHILEMMFAPRRIGSKVVAALIHDRNARHQYWEPSTSVSSIAHQFLKYNCA

SEQ ID NO: 158472 - protein, 98 aa, Zea Mays
MKWVGCPHDKRRRQQLRKSMKEYCPERLLLISKHKFTMSGMASDDSPAQVNVEGDVSEKKVEVQDQNEVGGMPSRQEEEAAIKKKYGGFIPRKTPFIS

SEQ ID NO: 158473 - protein, 67 aa, Zea Mays
MKWVGCPHDKRRRQQLRKSMKEYCPERLLLISKHKFTMSGMASDDSPAQVNVEGDVSEKKSRSSRPE

SEQ ID NO: 158474 - protein, 59 aa, Zea Mays
MKWVGCPHDKRRRQRLRNSMKEYCPERLALISKVNSIALYLTDNVKSCLFNFNRNQIPH

SEQ ID NO: 158475 - protein, 103 aa, Zea Mays
MKWVGCPHDKRRRQQLRKSMKEYCPERLLLISKQHQSSAQVQMSVVINAMSRDLLGFTCIYINPQALLCYSILELNLGANKIGSLHFGKLVYISLSRDQQLDT

SEQ ID NO: 158476 - protein, 346 aa, Zea Mays
MKWDNYTYLDVDDDVPFSVRDRLASGASSQHVIINVDKIVFTITHEVSDTDIFFPLVQTCISDIRVVTQIFPSKIRILSSFKVSAQYFIARRNLWEELISPITSYTFFRFKFFTPDPVTKYGKTAMRFFFQLKQVDVFINELSFDILLYLVGKLNLMGPYAVKSSAIFPNSCKIENSSRLALVCHFKDNGDALIPGQQSTSVFLSHLTFDDNISHDQMVSICLLKEGVFSTIPISISLHESGIFAWRTRVSPVKDLTTFSGPFIVVKVSHSSEEGLSLSVQPLVRIHNKSDFPLELRFQRPNKASEEAAFVTVRSGDMVDESTGVFDAMDLSGGPKRALMSLALGK

SEQ ID NO: 158477 - protein, 140 aa, Zea Mays
MKWDNYTYLDVDDDVPFSVRDRLASGASSQHVIINVDKIVFTITHEVSDTDIFFPLVQTCISDIRVVTQIFPSKIRILSSFKVSAQYFIARRNLWEELISPITSYTFFRFKFFTPDPVTKYGKTAMRFFFQLKQKVHLRS

SEQ ID NO: 158478 - protein, 235 aa, Zea Mays
MKWDNYTYLDVDDDVPFSVRDRLASGASSQHVIINVDKIVFTITHEVSDTDIFFPLVQTCISDIRVVTQIFPSKIRILSSFKVSAQYFIARRNLWEELISPITSYTFFRFKFFTPDPVTKYGKTAMRFFFQLKQVDVFINELSFDILLYLVGKLNLMGPYAVKSSAIFPNSCKIENSSRLALVCHFKDNGDALIPGQQSTSVFLRKVYFQLFQSAFLSTSLVFLHGEPVCHQSKT

SEQ ID NO: 158479 - protein, 281 aa, Zea Mays
MKWDNYTYLDVDDDVPFSVRDRLASGASSQHVIINVDKIVFTITHEVSDTDIFFPLVQTCISDIRVVTQIFPSKIRILSSFKVSAQYFIARRNLWEELISPITSYTFFRFKFFTPDPVTKYGKTAMRFFFQLKQVDVFINELSFDILLYLVGKLNLMGPYAVKSSAIFPNSCKIENSSRLALVCHFKDNGDALIPGQQSTSVFLRKVYFQLFQSAFLSTSLVFLHGEPVCHQSKRPNKASEEAAFVTVRSGDMVDESTGVFDAMDLSGGPKRALMSLALGK

SEQ ID NO: 158480 - protein, 736 aa, Zea Mays
MLEDGIKRDPLNAGKLKLFASVDVAQETTSFVLHFTKPPKVTLPYRIENYLSESSILYFQKDSVDSDVLHPQESEQYAWDDLSSPRKLVVRIVDTPALREIKIDKISPWKPFLKMRQNSRLNLDFSFSGGLNSRKQRFDESFGLRVFKIGYEVYADGLTRVLRICEHADNPKIEKIQWPIANIQFRISYVCIHLLDKDQNGENVQLPSTILAARLQHVSSDSVVTNRFKQVSVAIHSLNVDEKWEGASIGTILRRNKLQDATLDENILRMIFVLNSTDSSVKQIQYCAIILQPVDLKIDEETLMKLVPFWRASLAPSGTTSTQFYFRRFEVHPIKIIASFRPGGRRTTYSSAQEALRALLHSVIKVPEISNSAVELNGVLLNHALVTFRELLLKCAQHYSWYVLRAIYVTKGSKLLPPSFASIFDDSASSVLDVFFDPSDGSLNVPGLTIGMFKFISKNMKSGGFSGTKRYLGDLGKTVKTASSNALFAAVTEISDSVVRGAETNGLNGMVTGFHQGMLRLAMEPSVLGQAIMEGGPDRKIKLDHSPGLDELYIEGYLQAMLDVMYKQEYLRVRVIDDQVILKNLPPNSALINEIVDNVKSFLVSKALLKGDSSTVRPMRHLRNEPEWRIAPTVLTLCEHLFVSFAVRVLHREASKAIAGVMSRVKKPTGEEVEGDSPASGGVLCKRNRLWTVGRFAVSGMVAYVDGRLCRHIPNPIARRIVSGFLLSFIENRGNE

SEQ ID NO: 158481 - protein, 622 aa, Zea Mays
MRQNSRLNLDFSFSGGLNSRKQRFDESFGLRVFKIGYEVYADGLTRVLRICEHADNPKIEKIQWPIANIQFRISYVCIHLLDKDQNGENVQLPSTILAARLQHVSSDSVVTNRFKQVSVAIHSLNVDEKWEGASIGTILRRNKLQDATLDENILRMIFVLNSTDSSVKQIQYCAIILQPVDLKIDEETLMKLVPFWRASLAPSGTTSTQFYFRRFEVHPIKIIASFRPGGRRTTYSSAQEALRALLHSVIKVPEISNSAVELNGVLLNHALVTFRELLLKCAQHYSWYVLRAIYVTKGSKLLPPSFASIFDDSASSVLDVFFDPSDGSLNVPGLTIGMFKFISKNMKSGGFSGTKRYLGDLGKTVKTASSNALFAAVTEISDSVVRGAETNGLNGMVTGFHQGMLRLAMEPSVLGQAIMEGGPDRKIKLDHSPGLDELYIEGYLQAMLDVMYKQEYLRVRVIDDQVILKNLPPNSALINEIVDNVKSFLVSKALLKGDSSTVRPMRHLRNEPEWRIAPTVLTLCEHLFVSFAVRVLHREASKAIAGVMSRVKKPTGEEVEGDSPASGGVLCKRNRLWTVGRFAVSGMVAYVDGRLCRHIPNPIARRIVSGFLLSFIENRGNE

SEQ ID NO: 158482 - protein, 890 aa, Zea Mays
MANVPLPSHKDATTVSHRRSSKLRISPQSEKGSEVIIDLEALSGFTEFFLEIQDNIFPHRIAAFGVSLQPVSYNLPVPSQVVLIAPRYVLSNESDAAIAVRQCFVEHGIDGLTVEAKQRAALQTWKPGKKREVNYFDLFVKKHRNVFEDSHIFIQFCPKEPGYSWSGPICVSSIGRFFLKFRRLEGMLEDGIKRDPLNAGKLKLFASVDVAQETTSFVLHFTKPPKVTLPYRIENYLSESSILYFQKDSVDSDVLHPQESEQYAWDDLSSPRKLVVRIVDTPALREIKIDKISPWKPFLKMRQNSRLNLDFSFSGGLNSRKQRFDESFGLRVFKIGYEVYADGLTRVLRICEHADNPKIEKIQWPIANIQFRISYVCIHLLDKDQNGENVQLPSTILAARLQHVSSDSVVTNRFKQVSVAIHSLNVDEKWEGASIGTILRRNKLQDATLDENILRMIFVLNSTDSSVKQIQYCAIILQPVDLKIDEETLMKLVPFWRASLAPSGTTSTQFYFRRFEVHPIKIIASFRPGGRRTTYSSAQEALRALLHSVIKVPEISNSAVELNGVLLNHALVTFRELLLKCAQHYSWYVLRAIYVTKGSKLLPPSFASIFDDSASSVLDVFFDPSDGSLNVPGLTIGMFKFISKNMKSGGFSGTKRYLGDLGKTVTGFHQGMLRLAMEPSVLGQAIMEGGPDRKIKLDHSPGLDELYIEGYLQAMLDVMYKQEYLRVRVIDDQVILKNLPPNSALINEIVDNVKSFLVSKALLKGDSSTVRPMRHLRNEPEWRIAPTVLTLCEHLFVSFAVRVLHREASKAIAGVMSRVKKPTGEEVEGDSPASGGVLCKRNRLWTVGRFAVSGMVAYVDGRLCRHIPNPIARRIVSGFLLSFIENRGNE

SEQ ID NO: 158483 - protein, 467 aa, Zea Mays
MIFVLNSTDSSVKQIQYCAIILQPVDLKIDEETLMKLVPFWRASLAPSGTTSTQFYFRRFEVHPIKIIASFRPGGRRTTYSSAQEALRALLHSVIKVPEISNSAVELNGVLLNHALVTFRELLLKCAQHYSWYVLRAIYVTKGSKLLPPSFASIFDDSASSVLDVFFDPSDGSLNVPGLTIGMFKFISKNMKSGGFSGTKRYLGDLGKTVKTASSNALFAAVTEISDSVVRGAETNGLNGMVTGFHQGMLRLAMEPSVLGQAIMEGGPDRKIKLDHSPGLDELYIEGYLQAMLDVMYKQEYLRVRVIDDQVILKNLPPNSALINEIVDNVKSFLVSKALLKGDSSTVRPMRHLRNEPEWRIAPTVLTLCEHLFVSFAVRVLHREASKAIAGVMSRVKKPTGEEVEGDSPASGGVLCKRNRLWTVGRFAVSGMVAYVDGRLCRHIPNPIARRIVSGFLLSFIENRGNE

SEQ ID NO: 158484 - protein, 848 aa, Zea Mays
MNNQIVYQDLTKVLGLDRFDSENLLDVSTTVLPLKSVAMDPTNLLHLKTVPSENGLKLVENSSDNLQDLACESPLAGKVKFMCSFGGKILPRPSDGKLRYVGGETRLISITRNFSWNELVQKTLTIYSQPHIIKYQLPDEDLDALISLSCDEDFQNMMEEYCSLEKANGSVRLRMFLVSLNECEDSSLDAKSLESEPEYHFVVAVNNLAHLGRSISGNNLMSQPSHQLDPSPHSFRDSPVCQANTEVKAKDSVGATLNESSSQFFLAPYTQQLVVEPSTTPSPSLSQQRTMKQSRKQPPADELTTNQEHVSRSEVSSSSNLKTMLPNHLDKKHNDADKGIGTGSPLKHLHIRRQVKDWAGNGIDLIPHTNYDVSTPVEASLYSEKVIMHPENAGGTSGLQEHAGQILGMPHAFSDPLLKNLNDLPASNLSLPAGSYITQSFSQKICHTNELERTISRTGPAFECVKPPDIARADESNYLVSNHIDQRYNQGIIGPASSQPPVYYQDESLSSNVTQKCHDGYHVVQQQDKFFHQDKSAGPIIAPWNNFVQTGLIYNAHGAKLPSDNLDALESSVPKPMHATDHSLSYLLNVSQGDNSESGSHVEKLNSGPVTKDYGTTGYVHGTDKVAPNPQDLLHIKSSEAFITQRSMGNGESGVYQNDNLHKSSVLHTGLIDTDPSVNLHDNGGLSVSSSQNPVVDCVSRREDPLRDWGNIACSEGIIGCDHTTTDNEHIKLAHRLHDNVQMNVPVIVEDVTDNVPSGIPSSRPVVPQVVMAAEEHQEVILSSQKDDDSRTNRPELANEDHDGVADGSISDAVVAELEASMYGLQIIKNGDLEELRELGSGTFGTVY

SEQ ID NO: 158485 - protein, 465 aa, Zea Mays
MVKPPPPPPTSTCTSDTPLPTPGGLLGSLSSSAHSLLAAARRSPVTTLVAAFFLLALFMYGEDVRTIAELSIDDYLYPDADFYNVSALPPLALPPATCDLSRGRWVFDNVSLPAYREKDCTFLTKQVTCLANGRPDDLWQYWKWQPNECSLPTFDARRFMEAMRGKRLMFVGDSLNRNQWESLVCLVQPILSKGRKKIVKRGSLTVFHAKEYRATLEFYWAPFLVESNSDNPKIHSIEHRIIRPERIEGHAKYWRGVDYLIFNTYIWWMNTADMKVRRPNSRYWSEHDEVPRIEAYGLVFKTWSDWLNDNIDPDRTLVFFMTISPLHISPHNWGNPDGIRCVKETLPYQNYSQPLDLYHDMRMHDLVVKVASAMAKVPVTVINITRMSDYRKDAHTGLYSIRQGKLLTPEQKGDPEKFADCIHWCLPGVPDVWNQILYTRILSKPPSWGSSNVSPLSPSQSLPPR

SEQ ID NO: 158486 - protein, 392 aa, Zea Mays
MRLLSEAATSSGVPVYSYGEIARATNSFSHTHRLGTGAYGTVYVGKLPGTGSAPALVAIKRLRRRHHHDEDEDAAAEAALLLNEIKLISSVSHPNLVRLLGCCLDGGEQVLVYEYVPNGTLSQHLHSAGASTGGRGALTWRARLGVAVETAGAIAHLHGMRPPIFHRDVKSSNILLDAALRPKLADFGLSRAVDRLEAARSHVSTAPQGTPGYVDPEYHQNFHLSDKSDVYSFGVVLLELVTAMKVVDFDRPPAEVNLASLALDRIGKGQVAEIVDPALLGAGEDWVMGSVRHVSELAFRCLAFQKDVRPSMREVAAELQRIRSAAPDGADPEEPAGSRLRPVSMMDIQIDVSLGGPDTAAKKAASPVSVQEVWVSDRSSPSTNGSMPRFAA

SEQ ID NO: 158487 - protein, 60 aa, Zea Mays
MRRPATVLMAGGRVPRPRGGVASGSAPSSTHSLPRATALGSAAQRSAVSSALSSRLTMGV

SEQ ID NO: 158488 - protein, 155 aa, Zea Mays
MIIGPYKLSRRCEVTAILILYGLPRLQTGSILAHEMMHAYLRLKGFRNLSIEVEEGICQVLSHLWLESEIIAGSSSNVASSSEASSSSSSSAPTSSKKGAKTEFEKKLGAFIKHQIETDSSEAYGGGFRAGYPAVERYGLKRTLDHMKLTGSFPY

SEQ ID NO: 158489 - protein, 248 aa, Zea Mays
MVQCLDGVRQLLAVLLKCCDVELKQPPGLEDPQVLARETVFSVSEVEALYELFKKISSAVIDDGLINKEEFQLALFKTSKKESLFADRVFDLFDTKHNGILGFEEFARALSVFHPNAPLDEKIDFSFRLYDLKQQGYIERQEVKQMVVATLAESGMNLSDEIVESIIDKASRRPKDPRRPRRLGEKQQEGIGEGKGALLFQGGSTESGAAEAKSRAAEAKSRAAEAESSAAASKSSAAAANLRWRRRI

SEQ ID NO: 158490 - protein, 171 aa, Zea Mays
MVQCLDGVRQLLAVLLKCCDVELKQPPGLEDPQVLARETVFSVSEVEALYELFKKISSAVIDDGLINKEEFQLALFKTSKKESLFADRVFDLFDTKHNGILGFEEFARALSVFHPNAPLDEKIDFSFRLYDLKQQGYIERQEVKQMVVATLAESGMNLSDEIVESIIDKVC

SEQ ID NO: 158491 - protein, 285 aa, Zea Mays
MELSELHDGFIVQDALTIKAQVQVIREKIDRPFRCLDGQYRRELIRVYLSTVEQIYRRFIDEKRRMFSRLIEDKLGWSSFSGFWLAMDPSVRRHMTREKTETILKVVVKQFFIEKEVTSTLVFDSLYSGLKALEYQSNNKKGIPKITEADARSTPMVLIDQDMFVLADDALLLFERAALDTQSHQPLPKKDDKGSPNRTKDDTSSDEFDKDSIERDDRWLEELGCKTLELFAVTHIFSRAEAAYQEAMALQLQEELIREEASERAGTELKPKRRAADKKRRGKNM

SEQ ID NO: 158492 - protein, 862 aa, Zea Mays
MDPSVRRHMTREKTETILKVLVKQFFIEKEVTSTLVIDSLYSGLKALEYQSKNKKGIPKLTETDARSTPMVLIDQDMFVLADDVILLLERAALDTLPHQPLPTKDDKSSQNRTKDGNSGEEFSKDSIERDDRRLIELGWKTLELFALTHIFSRIEVAHQEAVALKRQEELIREEEAAGLAEIELKAKRSAAEKEKRAKKKQKKNSRRSNKGKSGKSDINKEILMYSSPSGDRILDDFSGQTEEMSSNADNPEEVSDISDSRDDNSDALHVDIEDRESSPVNWETDASETQATVPGSSEVQNDHAGKRTSTVDDSSSTCSSDSVPSVIVNGSYTGGAWTSVRSLSNRGNNRRNKDTEARAALAQGGSSSAHNGFIGSGGSASGHSKERYEPEDDKVVMQRKQHARHIDVISPSKSRMAVSSFSSVSPVKKQPNLSHQPKFLLESTNSSNHRASEVSGAVTATTTAGASSTLAAQLVSNKGPVSSAATRNEKPVLVTNKPLQVLVPSKSEAQKQASLTGSASTQVVSVSRPLSAPQVPAAKQSVPATTAQNAPLLSRSVSAVGRLGNEPSANAPSFIPRSRTYRNAMMEKSSGGVSSLTHQQGSSEQAVAPSQSMFTSQPSILSSETLSMKEETSLRPGFTFGTVKPESLNPYQGREENSLQASSSSSSDCTPSSSNIRSEIAKLSLNGRSRSKQLLSEISTRFTPYQPQGLVADEFPHLDIINDLLDEEQSDRRRVLQPGFVQQFSVHNGVSAPDYGLFSEPYLFDRSEQYFDEEPPRFYSPLSSAPRRMRDRSYSHFDLPSYSRSSQLDGLLMSQWPPYSRADLAMPGFGSDTGGYSYQPQGFPSPASAASRYPSYRPANGH

SEQ ID NO: 158493 - protein, 118 aa, Zea Mays
MDPSVRRHMTREKTETILKVLVKQFFIEKEVTSTLVIDSLYSGLKALEYQSKNKKGIPKLTETDARSTPMVLIDQDMFVLADDVILLLERAALDTLPHQPLPTKDDKSSQNRTKMLLL

SEQ ID NO: 158494 - protein, 332 aa, Zea Mays
MIKVHKTARSRIEVAHQEAVALKRQEELIREEEAAGLAEIELKAKRSAAEKEKRAKKKQAKQKKNSRRSNKGKSGKSDINKEILMYSSPSGDRILDDFSGQTEEMSSNADNPEEVSDISDSRDDNSDALHVDIEDRESSPVNWETDASETQATVPGSSEVQNDHAGKRTSTVDDSSSTCSSDSVPSVIVNGSYTGGAWTSVRSLSNRGNNRRNKDTEARAALAQGGSSSAHNGFIGSGGSASGHSKERYEPEDDKVVMQRKQHARHIDVISPSKSRMAVSSFSSVSPVKKQPNLSHQPKFLLESTNSSNHRASEVSGAVTATTTAGSCTIKI

SEQ ID NO: 158495 - protein, 158 aa, Zea Mays
MDVPVDDPVENLTGSPSTLGNEEEATTYANVQDQSKEEPEKLYEEPKDPMQDELGNQGHVSMNNEDVGGQNKVDQATPTEHGEEAGVKQHDATVPDDKKWPGWPGESVFRILVPTTKVGAVIGRKGDFIKKMCEESRARIKVLEGPPAVPERAVLTAV

SEQ ID NO: 158496 - protein, 208 aa, Zea Mays
MKMWEARTKWTKLPPPPSPWGHPPPNLPPGGPGYVGNPHYMPPRPQENYYPPPDVPPVEKQPHYGISSYGRDAPPSAPPGNQNQAHGSSQVTHSMQVPLSYADAVIGAAGASISYIRRHSGATISIQEGAPGEMTVEITGSASQVQTAQQLIKGPPAPGPHGQPVDTGYGSYPPYGGASYGSPPGAPAPAPHNGGSYGAAPYSSSYGY

SEQ ID NO: 158497 - protein, 77 aa, Zea Mays
MLGIPVRAWERQERLEESAGRVVARGDCPDPGKFLSGDRYRGLAAVCRRCESALHGCRSVVARNLKTHLVKHLESQV

SEQ ID NO: 158498 - protein, 807 aa, Zea Mays
MKKREKLTTKPPPAHKSTKPSAVQRQQKSPVQYTTPQSPALQPATSSPNTKPQNPSRQPSTPVASPLQKKKNRTFNVYEDSKNMMMTEEDERGKEIEKVGYMDLMMEQIYNSQGESVSEVGNEMQSGLCTQNETMNNNLLGEPCETYTQMILEEDSLLASADISKEIFGECNEADTSKYGEAVYHRDLFEIMHVQQLTECAQNDDGKETKTSSASANFDDADAETTNAGDEELTEDQIDAFIMSEQIATTEGNNASIDSKYTPQVGMEFKTRGDAEHFLFFYGFLAGFKPAITHSFRTSNKKRSNEVTKVELKCNKHGKTKKTNQQEQDICIEKKRCEKGPKRNTNVQVKTDCRVFMVIKEHGQKWVIDKLDLEHNHELRPADSNNMFSGHKYMTDMEKGIIRTLNHNNIPTRKMIAILSYLRGGMPEDFEDIVNYSLTVSEFERDWKQMVEDYHLENNKYFSKMWETRARFIPVYFKNDFFPFLQSTGRSEGTNSRFKDNVTSTYSVISFLREYQRIVEQVNVSEEYEDNESNRKRPKELMFGYTIERQAQEVYNRNIFKKFQFQLQSTPRLSYSRTSNLHTFEVYPKSNQEEKPHKLRRYLVMANLTYGMEEFTCVCGKFDKDGILCSHILKVIIEEGLTKIPEQYILNRWKKKQKQIDGPLLRASMPTHPVLRHNLLSRKVALLTSAAAKTEKTMEFICEELDKLQEKVCQMLSSEEDVIAGPSTGREKEDNAAKHTGPVVENLHNPEAVKQKGRPKKPTRLKPLVEEIHIKMKKAEQKKNKKTSNAAASPQGKEKKKMKRTAP

SEQ ID NO: 158499 - protein, 791 aa, Zea Mays
MMMTEEDERGKEIEKGGYMDLMMEQIRNSQGESVSELGNEMQSALCTQNETMNKNLLVAPCETYTQMILEEDSMLANADISKVGYMDLMMEQIYNSQGESVSEVGNEMQSGLCTQNETMNNNLLGEPCETYTQMILEEDSLLASADISKEIFGECNEADTSKYGEAVYHRDLFEIMHVQQLTECAQNDDGKETKTSSASANFDDADAETTNAGDEELTEDQIDAFIMSEQIATTEGNNASIDSKYTPQVGMEFKTRGDAEHFLFFYGFLAGFKPAITHSFRTSNKKRSNEVTKVELKCNKHGKTKKTNQQEQDICIEKKRCEKGPKRNTNVQVKTDCRVFMVIKEHGQKWVIDKLDLEHNHELRPADSNNMFSGHKYMTDMEKGIIRTLNHNNIPTRKMIAILSYLRGGMPEDFEDIVNYSLTVSEFERDWKQMVEDYHLENNKYFSKMWETRARFIPVYFKNDFFPFLQSTGRSEGTNSRFKDNVTSTYSVISFLREYQRIVEQVNVSEEYEDNESNRKRPKELMFGYTIERQAQEVYNRNIFKKFQFQLQSTPRLSYSRTSNLHTFEVYPKSNQEEKPHKLRRYLVMANLTYGMEEFTCVCGKFDKDGILCSHILKVIIEEGLTKIPEQYILNRWKKKQKQIDGPLLRASMPTHPVLRHNLLSRKVALLTSAAAKTEKTMEFICEELDKLQEKVCQMLSSEEDVIAGPSTGREKEDNAAKHTGPVVENLHNPEAVKQKGRPKKPTRLKPLVEEIHIKMKKAEQKKNKKTSNAAASPQGKEKKKMKRTAP

SEQ ID NO: 158500 - protein, 400 aa, Zea Mays
MPALSDVALQAAIAGNLRLLKLVASKMNLREAKDAAGRNALHLAAEMGRLEVCRFLVEESGFEVNFACAEGGSPVHCAAAGGSESVLGYLLDHGGDPVMPDSMGSTPLHDAAEEGHCAAVRMLLSKGVDVDPHGCRGTPLHLACSNDRDQVVRILLEHGADPNKVVGHVLPPLMMAYCGGSLRCMKLLIEAGADVNLIAPSGVILAQAVCDGSTEIVKFLLEVGADPNIPDEDGKIPIMYPAFNGHRELVEILFPKTRPVSSLPDWSVDGIIRSMKDLFFKPQDAAVVEKKIADAKSQGKEAFARGEYPAAVYFYTMVLENDLDATAFANRSLCWLRLREGAKALLDAQQCKMIRPRWSKAWYREGAALSLLKDYQGAVNAFTEALKLDPASLEIKKALR

SEQ ID NO: 158501 - protein, 289 aa, Zea Mays
MPALSDVALQAAIAGNLRLLKLVASKMNLREAKDAAGRNALHLAAEMGRLEVCRFLVEESGFEVNFACAEGGSPVHCAAAGGSESVLGYLLDHGGDPVMPDSMGSTPLHDAAEEGHCAAVRMLLSKGVDVDPHGCRGTPLHLACSNDRDQVVRILLEHGADPNKVVGHVLPPLMMAYCGGSLRCMKLLIEAGADVNLIAPSGVILAQAVCDGSTEIVKFLLEVGADPNIPDEDGKIPIMYPAFNGHRELVEILFPKTRPVSSLPDWSVDGIIRSMKDLFFKPQLWWKKR

SEQ ID NO: 158502 - protein, 140 aa, Zea Mays
MEVAAAASYSYYGLEAADDDVDNLRATELRLGLPGTEAAEEEEEARQAQKVAAPPPSTPRGKKRDGVSGGIDAAPPAAKAQVVGWPPVRSYRKSCFQQQQAGAKGKPAAADEGAPGPAGGGVFVKHVHRHLQAAEDHEGV

SEQ ID NO: 158503 - protein, 139 aa, Zea Mays
MTQKYKDASVDNKNLTVDVETMRRKVNIAEEAVRRLTGITLMLPTAFEKPTSSAPLSSCPSDAASASASAAIEDSVKHFLQAPLENSGIIPNAAVFQTKPASLHRVASLENLQKRIVGDAMYSETASTTFSDPEALADR

SEQ ID NO: 158504 - protein, 181 aa, Zea Mays
MVSNRESARRSRKRKQAHLTDLESQVSRLTSENASLLKRLADMTQKYKDASVDNKNLTVDVETMRRKVNIAEEAVRRLTGITLMLPTAFEKPTSSAPLSSCPSDAASASASAAIEDSVKHFLQAPLENSGIIPNAAVFQTKPASLHRVASLENLQKRIVGDAMYSETASTTFSDPEALADR

SEQ ID NO: 158505 - protein, 103 aa, Zea Mays
MNTIYIHRCCIIKAKTKQKDYRKLIVNELIKENEKKGNKKKRTPTLPAGRMPRSRVAGAAGHVPGRVDLRESPTAPTCCSKTAARPFTRPPFVFTTQPGNSTT

SEQ ID NO: 158506 - protein, 246 aa, Zea Mays
MAALDHVVVDEHGFAHSVCLHWEGFPAILWDLLRTVGYTTPPHYVGYEFEEHGVPRCRVQLTLWSHPVYPEWPSLDTETEGFRLGDTWEASALHALVAFCEYMGLFPLKQQDDPLWLDRIANIVLLGFSCPQEAILMATRCIRALQHLQALQSQAMTYLVALAQTTRQILSERQVRIINLSTELSDRKLQIEAMGVQVHELQEQEHVEMEADLEDADMDEEEEDPEEIEGVSELTTESGAPLPPVD

SEQ ID NO: 158507 - protein, 490 aa, Zea Mays
MEESDAAEGVAVQLIDGEGEFAAEGAERFMAAAGVAGCGLSYAVVSIMGPQSSGKSTLLNQLFGTNFREMDAFRGRSQTTKGIWIARCVGVEPCTVVLDLEGTDGRERGEDDTAFEKQSSLFALAISDIVLINMWCHDIGREQAANKPLLKTVFQVMMRLFSPRKTTLLFVIRDKTRTPLEHLEPVLREDIQKIWNSVAKPEAHKDTPINEFFNVQVTALSSFEEKEDQFREQVQQLRQRFSNSIAPGGLAGDRRGVVPASGFLFSSQQIWKVIRENKDLDLPAHKVMVATVRCDEIANEKFGCITSDTEWLDVESAVQSGPVPGFGKKLGNIVDVHLQEYDKEAVYFDEAVRKGKRQHLESRILNLVQPAFQKMLTHLRVKALEKFKTGLNSSLESGKGFAVSARDNTECSLKEFEQGCADAIIKQANWDCSKMLEKVRRDIEDHALSIRESKLSEMTRHAKVMYGKLKEILITSLAMHNFLLDLFAYL

SEQ ID NO: 158508 - protein, 573 aa, Zea Mays
MMRLFSPRKTTLLFVIRDKTRTPLEHLEPVLREDIQKIWNSVAKPEAHKDTPINEFFNVQVTALSSFEEKEDQFREQVQQLRQRFSNSIAPGGLAGDRRGVVPASGFLFSSQQIWKVIRENKDLDLPAHKVMVATVRCDEIANEKFGCITSDTEWLDVESAVQSGPVPGFGKKLGNIVDVHLQEYDKEAVYFDEAVRKGKRQHLESRILNLVQPAFQKMLTHLRVKALEKFKTGLNSSLESGKGFAVSARDNTECSLKEFEQGCAVFSHDKDSIPRVWTGKEDVRAIAKEARSAALKLLSVMAAIRWDDEPDRIESILTSTLLEGSVVSKIASAASADPLASTTWEEIAPKHTMITPSQCKSLWKQFKAETEFTITQAVSTQQAHRRGNSKLPPPWAIVAIAILGFNEIMVLIRNPIYLFLLFVGYLMVKALAMQLDVSREFQNGVVPGIISVSVKLLPAIQNLVNKVAAEQQAEHQQQHPHPHPHTQAPGPPQPQMQPPPLLLSPRSPMSELRRLHMPRSPRSPRKVASPAPSSSSSSSAVSSPRHVGEDQKPRPGAVGAPENEATVADSIV

SEQ ID NO: 158509 - protein, 459 aa, Zea Mays
MLRVGVALLTPNFVDTVMVATVRCDEIANEKFGCITSDTEWLDVESAVQSGPVPGFGKKLGNIVDVHLQEYDKEAVYFDEAVRKGKRQHLESRILNLVQPAFQKMLTHLRVKALEKFKTGLNSSLESGKGFAVSARDNTECSLKEFEQGCAVFSHDKDSIPRVWTGKEDVRAIAKEARSAALKLLSVMAAIRWDDEPDRIESILTSTLLEGSVVSKIASAASADPLASTTWEEIAPKHTMITPSQCKSLWKQFKAETEFTITQAVSTQQAHRRGNSKLPPPWAIVAIAILGFNEIMVLIRNPIYLFLLFVGYLMVKALAMQLDVSREFQNGVVPGIISVSVKLLPAIQNLVNKVAAEQQAEHQQQHPHPHPHTQAPGPPQPQMQPPPLLLSPRSPMSELRRLHMPRSPRSPRKVASPAPSSSSSSSAVSSPRHVGEDQKPRPGAVGAPENEATVADSIV

SEQ ID NO: 158510 - protein, 220 aa, Zea Mays
MLRVGVALLTPNFVDTVMVATVRCDEIANEKFGCITSDTEWLDVESAVQSGPVPGFGKKLGNIVDVHLQEYDKEAVYFDEAVRKGKRQHLESRILNLVQPAFQKMLTHLRVKALEKFKTGLNSSLESGKGFAVSARDNTECSLKEFEQGCADAIIKQANWDCSKMLEKVRRDIEDHALSIRESKLSEMTRHAKVMYGKLKEILITSLAMHNFLLDLFAYL

SEQ ID NO: 158511 - protein, 237 aa, Zea Mays
MDLIRRKCTCKKSGCLKKYCDCYQGGAGCSINCKCDDCRNPFGRKVGVILDGKSSLTAPILHERNGTEVDSSDEEDDFYMNRQLSPIPPSPVSRESSFQQETLVGVEVQTMNGHLYPKPLTQVRPEPSSWQLSRRPIEEPRGEIWRFSRRPSEDGTSDAMEVHAVAPRESKKAAEVRGDRFGIPRCIEVMSAMAELSPVEKSLAPDVFLDASNREIFLSLSVDIRPIWLRRKMKSLV

SEQ ID NO: 158512 - protein, 390 aa, Zea Mays
MEAEVGPPNPPRPEPAGSEPDDARLSPPPPAPAPPPPPPPPPAAEAAAAPTASAAFSLQAPAPAPAEANGSSDRKRRRKAEDGDGCKTCSCKKSSYCVCFASGLHCTESCGCEPCHNKPQLQGTLRMATVLPLKPVQTFEAGQDIVEQVIRSPMDLIRRKCTCKKSGCLKKYCDCYQGGAGCSINCKCDDCRNPFGRKVGVILDGKSSLTAPILHERNGTEVDSSDEEDDFYMNRQLSPIPPSPVSRESSFQQETLVGVEVQTMNGHLYPKPLTQVRPEPSSWQLSRRPIEEPRGEIWRFSRRPSEDGTSDAMEVHAVAPRESKKAAEVRGDRFGIPRCIEVMSAMAELSPVEKSLAPDVFLDASNREIFLSLSVDIRPIWLRRKMKSLV

SEQ ID NO: 158513 - protein, 340 aa, Zea Mays
MASRLLLHLHLRRRGRGIPGCPVPALPLHAARLLSSSPPTAAAASSSAAGGGGIEKVLVANRGEIACRVMRTARRLGVATVAVYSDADRGALHVRAADEAVRIGPPPARESYLNARAIIEAALRTGAQAIHPGYGFLSESADFAQLCEAEGLKFIGPPASAIRDMGDKSASKRIMGAAGVPLVPGYHGADQDVELLKLEADKIGYPVLIKPTHGGGGKGMRIVERPDEFVDSVLSAQREAAASFGVNTLLIEKYITQPRHVEVQVFGDQHGNAIYLYERDCSLQRRHQKIIEEAPAPNVPAEFRSHIGGAAVSAAKLVTTMLEQWSLLWTLFLESSTSWR

SEQ ID NO: 158514 - protein, 417 aa, Zea Mays
MRTARRLGVATVAVYSDADRGALHVRAADEAVRIGPPPARESYLNARAIIEAALRTGAQAIHPGYGFLSESADFAQLCEAEGLKFIGPPASAIRDMGDKSASKRIMGAAGVPLVPGYHGADQDVELLKLEADKIGYPVLIKPTHGGGGKGMRIVERPDEFVDSVLSAQREAAASFGVNTLLIEKYITQPRHVEVQVFGDQHGNAIYLYERDCSLQRRHQKIIEEAPAPNVPAEFRSHIGGAAVSAAKAVGYYNAGTVEFIVDTLSGEFYFMEMNTRLQVEHPVTEMIVGQDLVEWQIRVANGERLPLSQEQVPLNGHAFEARIYAENVPRGFLPATGTLHHYRPVPSDPTVRVETGVEEGDTVSMHYDPMIAKLVVWGESRTAALVKLKKCLSTFQVCQPMLISSKNSQATVPLKKA

SEQ ID NO: 158515 - protein, 97 aa, Zea Mays
MHHFARHPLDLELEENDGFSEKLLKLFITHKFDGSYFIETEDGTSGLDVKVDHKGDHDFRVDVSGLQTDVTLASYSKQTHTCLAWESSPPLQTDCKS

SEQ ID NO: 158516 - protein, 203 aa, Zea Mays
MTSTAAGASSSAAKSESYLRADKIDLESLDIQLEKQLAKTWEKHKGSYNQGPREDWEIDLAKLEIRYVIAQGTYGTVYRGTYDGQDVAVKLLDWGEDGFASETETATLRASFKQEVAVWHELNHPNVTKFVGASMGTTDLKIPANSSNSGGRTELPPRACCVVVEYLAGGSLKQYLIKNRRRKLAYKIELSTFKKDSTSGCKN

SEQ ID NO: 158517 - protein, 619 aa, Zea Mays
MGRRNDDIDWKSVFLSYFSHGASSDPAATRASGVAMAASSDDDERRRGSPGLHQRSEEPRSELERRFGKCCRPGAQVDGGAQAQHCRVTRAAAKAAVGLGPDVSSASNVVYDLSPINDDKEGEHVHDKNYSKLSPKFSEKKNYGQVPLSKQKSQGHGGKRKSIPVAKIYSSQPNSTTHAIDLKEPDHQSSLPSKFSKRRKQQLQKSSSIYSRKVQDVVLLDDEDIEPKEEVKLEMSDRLNEPKIYYPSRDDQEVVELTRSDIRCLDPEVFLSSQVINFYIKYIKMTRLCDENFRDKFYIFNTYFYGKLEEALRRPRDFPKLRRWSKGVNIFNNAYIILPIHGKEHWSLVIICLPPKERTSSEPIIILHLDSLGMHPSTKILNTVGRYLEKEWRFLSVAWPCLLNDIRKEAVQVPQQNNAYDCGIFMLYYIEQFIKKAPARFTTDKLGMFNRSWFKPEEASGLRQRIRELLLQEFGSARPDEAASEADVAAKRKEGISAAEWNEEEAGRVVSESDSCSYGAGDEKGTVKADSGSAEAEKEGGLVVTASSQKRSKGTAEEEEEVRGSSMPVPDAVCEITGTKVWIKRVYRRTGWPPGNWCWSSGGSSRDARRAFIEQFSRK

SEQ ID NO: 158518 - protein, 216 aa, Zea Mays
MGRRNDDIDWKSVFLSYFSHGASSDPAATRASGVAMAASSDDDERRRGSPGLHQRSEEPRSELERRFGKCCRPGAQVDGGAQAQHCRVTRAAAKAAVGLGPDVSSASNVVYDLSPINDDKEGEHVHDKNYSKLSPKFSEKKNYGQVPLSKQKSQGHGGKRKSIPVAKIYSSQPNSTTHAIDLKEPDHQSSLPSKFSKRRKQQLQKSSSIYSRKVGI

SEQ ID NO: 158519 - protein, 385 aa, Zea Mays
MSDRLNEPKIYYPSRDDQEVVELTRSDIRCLDPEVFLSSQVINFYIKYIKMTRLCDENFRDKFYIFNTYFYGKLEEALRRPRDFPKLRRWSKGVNIFNNAYIILPIHGKEHWSLVIICLPPKERTSSEPIIILHLDSLGMHPSTKILNTVGRYLEKEWRFLSVAWPCLLNDIRKEAVQVPQQNNAYDCGIFMLYYIEQFIKKAPARFTTDKLGMFNRSWFKPEEASGLRQRIRELLLQEFGSARPDEAASEADVAAKRKEGISAAEWNEEEAGRVVSESDSCSYGAGDEKGTVKADSGSAEAEKEGGLVVTASSQKRSKGTAEEEEEVRGSSMPVPDAVCEITGTKVWIKRVYRRTGWPPGNWCWSSGGSSRDARRAFIEQFSRK

SEQ ID NO: 158520 - protein, 277 aa, Zea Mays
MDYLEAGANIIITASYQATIQGFESKGFSKEQSENLLTKSVEIALEAREMFLKEHLEKSTPIQHPVLVAASLGSYGAYLADGSEYSGDYGEAGTKEFLKDFHRRRLQVLAEAGPDLIAFETIPNKLEAEAYVELLEECNINIPAWFSFNSKDGVHIVSGDSLIECTTIADKCAKVGAVGINCTPPRFIHGLILSIRKVTDKPILIYPNSGERYDGEKKEWVESTGVSDGDFVSYVNEWCKDGAVLIGGCCRTTPNTIRAIHRTLNKSPNKQQLPAVE

SEQ ID NO: 158521 - protein, 83 aa, Zea Mays
MAGKSAGTKRSELGEHGSKMGVRPTWRAGARRVWGLGRAPVEGESVGRPRHRGWAPWELGKEEKKNWVRCAWPEEKRLGKIRT

SEQ ID NO: 158522 - protein, 105 aa, Zea Mays
MIGSTLIQYGGVKSWKASELTQVTETAKSGSKPVATHDSGELGKMGSNDHWREESQENDTHTKTILGATDMRETCSMDRRNSAPLLAEASALGHGHRGEERKTRT

SEQ ID NO: 158523 - protein, 84 aa, Zea Mays
MRRTRLYPLNTGVTEVVSEEMLTVGRNLDKTGKSPYLLMFTLILSILILIMSHLWLFYSDYSYLFYSRKAKRVSHLGMLQLQTP

SEQ ID NO: 158524 - protein, 455 aa, Zea Mays
MPNMEVMRSIAGIKLPIASPNLGGSNRAVYGFDYTNRLVAIPTEDYCIQFYNLFENAEVSEVQVCERNFQPIDDITMYISMVSLSIDGDLMCTVDVKLPEEGLGGLVTLKFWNHGSRAGHYFLSTVIYEPHSDDGVSSVAFRPGRNMAVSSSFGGNFKVWVQSLSSQSNDERNCSGWRCQSVGSYKKKPMTSAAFSADGSVLAVAAESTITLWDPDNNALVGVIAETLSPVTNLSFVGTSVFLMSLCQSSRPQIALWNVSNLSMQWSYSIYAEAACCSPDGSEFAVLALLSCPDGEASTQQDGVILLFDAESSNPIASWSVKKASGGSISFVKGDVPLDANADSSRDKEPMLLVYVNGSHEYAIFDPRESEEVVISKNKHKKIQAEEPAPIGYASIYGELTKLEPKKEVSDVPFVPSDRPWETIFSGSSHVLPPLTKLCSAFLSSLLEKRPVANE

SEQ ID NO: 158525 - protein, 422 aa, Zea Mays
MITGGQSYVSAPPAFSADGRLLLVCSGRAVSVFSTATAMLVSELEGHEGDVTAVVVVAPPAQATAAAKLASYCWTAGLDGVLIYWDFLAAEVMRKVQVGLPVHSMVVPDIYRTSKGVEVSSPFAFISVEDTSKLASEPKALCGQMRVYDLTKGRQVGGLLAETRKPEKIVASSSGEFLGITNKRKLHIWRIPTKDFKPDKIRKIKLRHTKHLTTLAFHPTERTVAGGDVTGRILIWRCFGNSKFSESSVQSKEDDGRDGVRGDDDADTCTTWHWHSSSVRFLKFSSDGAYLFSGGLEGVIVVWQLDTGKRRYKPRLGSPLLFFVDSPDSSISCVSCTNNQVYLLKMPNMEVMRSIAGIKLPIASPNLGGSNRAVYGFDYTNRLVAIPTEDYCIQFYNLFENAEVSEVQVCERNFQPIDDITV

SEQ ID NO: 158526 - protein, 321 aa, Zea Mays
MITGGQSYVSAPPAFSADGRLLLVCSGRAVSVFSTATAMLVSELEGHEGDVTAVVVVAPPAQATAAAKLASYCWTAGLDGVLIYWDFLAAEVMRKVQVGLPVHSMVVPDIYRTSKGVEVSSPFAFISVEDTSKLASEPKALCGQMRVYDLTKGRQVGGLLAETRKPEKIVASSSGEFLGITNKRKLHIWRIPTKDFKPDKIRKIKLRHTKHLTTLAFHPTERTVAGGDVTGRILIWRCFGNSKFSESSVQSKEDDGRDGVRGDDDADTCTTWHWHSSSVRFLKFSSDGAYLFSGGLEGVIVVWQLDTGKRRCHVQITKSIF

SEQ ID NO: 158527 - protein, 576 aa, Zea Mays
MITGGQSYVSAPPAFSADGRLLLVCSGRAVSVFSTATAMLVSELEGHEGDVTAVVVVAPPAQATAAAKLASYCWTAGLDGVLIYWDFLAAEVMRKVQVGLPVHSMVVPDIYRTSKGVEVSSPFAFISVEDTSKLASEPKALCGQMRVYDLTKGRQVGGLLAETRKPEKIVASSSGEFLGITNKRKLHIWRIPTKDFKPDKIRKIKLRHTKHLTTLAFHPTERTVAGGDVTGRILIWRCFGNSKFSESSVQSKEDDGRDGVRGDDDADTCTTWHWHSSSVRFLKFSSDGAYLFSGGLEGVIVVWQLDTGKRRYKPRLGSPLLFFVDSPDSSISCVSCTNNQVYLLKMPNMEVMRSIAGIKLPIASPNLGGSNRAVYGFDYTNRLVAIPTEDYCIQFYNLFENAEVSEVQVCERNFQPIDDITMYISMVSLSIDGDLMCTVDVKLPEEGLGGLVTLKFWNHGSRAGHYFLSTVIYEPHSDDGVSSVAFRPGRNMAVSSSFGGNFKVWVQSLSSQSNDERNCSGWRCQSVGSYKKKPMTSAAFSADGSVLAVAAESTITLWDPDNNALVGVIAETLSCF

SEQ ID NO: 158528 - protein, 324 aa, Zea Mays
MGQELDIIFCPPSFMSLTVMMGFLLLHSAQEEIWPLALLLVVTLRFGSRVCLHNQMMKEIVLVGDANQLAHTIAAESTITLWDPDNNALVGVIAETLSPVTNLSFVGTSVFLMSLCQSSRPQIALWNVSNLSMQWSYSIYAEAACCSPDGSEFAVLALLSCPDGEASTQQDGVILLFDAESSNPIASWSVKKASGGSISFVKGDVPLDANADSSRDKEPMLLVYVNGSHEYAIFDPRESEEVVISKNKHKKIQAEEPAPIGYASIYGELTKLEPKKEVSDVPFVPSDRPWETIFSGSSHVLPPLTKLCSAFLSSLLEKRPVANE

SEQ ID NO: 158529 - protein, 794 aa, Zea Mays
MITGGQSYVSAPPAFSADGRLLLVCSGRAVSVFSTATAMLVSELEGHEGDVTAVVVVAPPAQATAAAKLASYCWTAGLDGVLIYWDFLAAEVMRKVQVGLPVHSMVVPDIYRTSKGVEVSSPFAFISVEDTSKLASEPKALCGQMRVYDLTKGRQVGGLLAEIVASSSGEFLGITNKRKLHIWRIPTKDFKPDKIRKIKLRHTKHLTTLAFHPTERTVAGGDVTGRILIWRCFGNSKFSESSVQSKEDDGRDGVRGDDDADTCTTWHWHSSSVRFLKFSSDGAYLFSGGLEGVIVVWQLDTGKRRYKPRLGSPLLFFVDSPDSSISCVSCTNNQVYLLKMPNMEVMRSIAGIKLPIASPNLGGSNRAVYGFDYTNRLVAIPTEDYCIQFYNLFENAEVSEVQVCERNFQPIDDITMYISMVSLSIDGDLMCTVDVKLPEEGLGGLVTLKFWNHGSRAGHYFLSTVIYEPHSDDGVSSVAFRPGRNMAVSSSFGGNFKVWVQSLSSQSNDERNCSGWRCQSVGSYKKKPMTSAAFSADGSVLAVAAESTITLWDPDNNALVGVIAETLSPVTNLSFVGTSVFLMSLCQSSRPQIALWNVSNLSMQWSYSIYAEAACCSPDGSEFAVLALLSCPDGEASTQQDGVILLFDAESSNPIASWSVKKASGGSISFVKGDVPLDANADSSRDKEPMLLVYVNGSHEYAIFDPRESEEVVISKNKHKKIQAEEPAPIGYASIYGELTKLEPKKEVSDVPFVPSDRPWETIFSGSSHVLPPLTKLCSAFLSSLLEKRPVANE

SEQ ID NO: 158530 - protein, 297 aa, Zea Mays
MSSQLVKAMPSLIFTKVQEDNCTSSMCAICLEDYSVGEKLRVLPCRHKFHAACVDLWLTSWRTFCPVCKRDATSGVSELPATEATPLLSSAVRLPSQPSSFRSSVAASPPRPISRHPSSHSVSRAYSVSSTPHSPNPFRSHTNLPGVIHASRSTTDLANMSSPHPRISHLSSSTHSLVGSHLSPPISIRYPLPHSRHESPSPHVSSPYISNSGYGSSSYYYLGGSSQHGSYLRRCGESGPSLSTMVPRSSQQQFQSEANVAAGASSAQSSRQSYLRRCGDSDASLSDMASAQSLPGC

SEQ ID NO: 158531 - protein, 75 aa, Zea Mays
MKVQLTNMSARHCGAPSSPTTFHATACSYDACRPMLDLHTPPGRYARPCSQRVKGKAFTYLATPTPSRLRTSRQS

SEQ ID NO: 158532 - protein, 86 aa, Zea Mays
MLRNFPQARRLLRRMGFEKEDAYFWKQMGKAMLCTYTLFGVVWLWNETSPLGWWTLKPRPKKERWHTSMSAGSSRTLAMMRRSRSL

SEQ ID NO: 158533 - protein, 142 aa, Zea Mays
MELDQLVHNAYLRDKPAYIQPFDMETLGQAFQLRETALVDLPSTEKGIPTISGKPKSESKDKEKKHKRHKDKDKEHKKHKHRHKDRSKDKDKDKDKDKKKDKSGHHEKKRKHEGTEDSVDVHKHKKSKHKSSKTDEMGNGVS

SEQ ID NO: 158534 - protein, 208 aa, Zea Mays
MDPDDKKFGNGPRELTGAVDLISHYKLLPHHDFFCKKPLPLAISDTHYLHNVVGDTEIRKGEGMELDQLVHNAYLRDKPAYIQPFDMETLGQAFQLRETALVDLPSTEKGIPTISGKPKSESKDKEKKHKRHKDKDKEHKKHKHRHKDRSKDKDKDKDKDKKKDKSGHHEKKRKHEGTEDSVDVHKHKKSKGIMNGSSYFCRVHCEEN

SEQ ID NO: 158535 - protein, 712 aa, Zea Mays
MTVLDTLANIGLLFFLFLVGLELDISAIRRTGKKALAIALAGISAPFALGIGTSFAFRATIVKGTPQGPFLVFMGVALSITAFPVLARILAELKLLTTDLGRMAMSAAAVNDVAAWILLALAIALSGSGSPIVSLWVLLTAAGFVVAVSLFLRPVLAWMARRSPEGEPVKEVYICATLAIVLAAGFVTDTIGIHALFGAFMVGIVVPKDGPFAGVLIEKVEDLISGLLLPLYFVSSGLKTDVATIKGAKSWGLLVLVIANACLGKIGGTVITSLLVKIPVREAVTLGFLMNTKGLVELIVLNIGRDRKVLNDEAFAILVLMALFTTFITTPIVMAIYKPARRAVPYKRRTVECAAGDADGELRVLACFHTNRHIPTLLNLVEASRGTARRRLTMYAMHLVELSERSSAISLVQRARRDGMPFFSGGKEQRAEQVVVAFEAFQQLSSVRVRAMTAISDLDTIHRDVIDSAADKRAAIVVMPYHRALGHDGSFASLGSAYHAVNKRVLREAPCSVAILVDRGLGGHAQVSAKNVSFSVAVLFFGGPDDREALAYATRMAEHPGVAVTLARLQPSRPPLLDEAESAADEAAVEAFKARVGAVKDGSVRFEEPEACTREQVLETIESLSGFNVFVVGRMPPVAPLVERPDELGPVGSYLVSPEFRTSASVLVIKRYDPATNPKSKRFDPKAGPPVATEEDVLDEEMGMGRATVVPV

SEQ ID NO: 158536 - protein, 168 aa, Zea Mays
MALRPQLLRLLLPSPPHRNPPPPPSSPSVAPIGRRTAAAAVLLLAAGVSAPPPRAARAEPDGEDVDEARIVRLFQEASPSVVFIKDLVVAGPQGRRVGEDEDGDEEGGGAKVEGTGSGFVWDSTGHIVTNYHVVAKLAGDGSASHRCKVAHWCFWRVLVAKVTQRKRG

SEQ ID NO: 158537 - protein, 224 aa, Zea Mays
MALRPQLLRLLLPSPPHRNPPPPPSSPSVAPIGRRTAAAAVLLLAAGVSAPPPRAARAEPDGEDVDEARIVRLFQEASPSVVFIKDLVVAGPQGRRVGEDEDGDEEGGGAKVEGTGSGFVWDSTGHIVTNYHVVAKLAGDGSASHRCKVFLEGSGGKSYSKEARLIGCDPAYDLAVLKIDADRDQLRPALIGTSRSLRVGQSCFAIGNPYGYEHTLTTGFLVGY

SEQ ID NO: 158538 - protein, 139 aa, Zea Mays
MALRPQLLRLLLPSPPHRNPPPPPSSPSVAPIGRRTAAAAVLLLAAGVSAPPPRAARAEPDGEDVDEARIVRLFQEASPSVVFIKDLVVAGPQGRRVGEDEDGDEEGGGAKVEGTGSGFVWDSTGHIVSVFLSPVYASC

SEQ ID NO: 158539 - protein, 332 aa, Zea Mays
MSAISRQQGKLGGGSLRHGVQAYSRHQQQPMANAADDPMVDEAGVEDAFTHEITDYLYVPRYHVLSWMETVEGMVAGVAALPPVYLILNRDLLETGWGWKRLVPYRPGYVEWHVFKKYLGDYFDHNREAFLCAEQKPDPFGWIIAEKSALIAAAKLCLKMEKALLRYCASFLTPDDKRLILGIKDQAKQMIQSEVLQAMVQMGVLVPTGDMTVVRRTAQFFLNSFQECLTAQRKEREMATAELGFKKQLTKEEKFEKRKQRLATIGEDLLAIAADQPFRFPATFTFVVRAFSVLDGTGKGLHPRNAKELLRFNDAGVEIVVKVCGETCVFLL

SEQ ID NO: 158540 - protein, 345 aa, Zea Mays
MSAISRQQGKLGGGSLRHGVQAYSRHQQQPMANAADDPMVDEAGVEDAFTHEITDYLYVPRYHVLSWMETVEGMVAGVAALPPVYLILNRDLLETGWGWKRLVPYRPGYVEWHVFKKYLGDYFDHNREAFLCAEQKPDPFGWIIAEKSALIAAAKLCLKMEKALLRYCASFLTPDDKRLILGIKDQAKQMIQSEVLQAMVQMGVLVPTGDMTVVRRTAQFFLNSFQECLTAQRKEREMATAELGFKKQLTKEEKFEKRKQRLATIGEDLLAIAADQPFRFPATFTFVVRAFSVLDGTGKGLHPRNAKELLRFNDAGVEIVVKGVWRDMCIPPMTNSSGSMKVSLS

SEQ ID NO: 158541 - protein, 243 aa, Zea Mays
MSAISRQQGKLGGGSLRHGVQAYSRHQQQPMANAADDPMVDEAGVEDAFTHEITDYLYVPRYHVLSWMETVEGMVAGVAALPPVYLILNRDLLETGWGWKRLVPYRPGYVEWHVFKKYLGDYFDHNREAFLCAEQKPDPFGWIIAEKSALIAAAKLCLKMEKALLRYCASFLTPDDKRLILGIKDQAKQMIQSEVLQAMVQMGVLVPTGDMTVVRRTAQFFLNSTKEGERNGNRRTGFQKAIN

SEQ ID NO: 158542 - protein, 222 aa, Zea Mays
MSAISRQQGKLGGGSLRHGVQAYSRHQQQPMANDDPMVDEAGVEDAFTHEITDYLYVPRYHVLSWMETVEGMVAGVAALPPVYLILNRDLLETGWGWKRLVPYRPGYVEWHVFKKYLGDYFDHNREAFLCAEQKPDPFGWIIAEKSALIAAAKLCLKMEKALLRYCASFLTPDDKRLILGIKDQAKQMIQSEVLQAMVQMGVLVPTGDMTVVRRTAQFFLNR

SEQ ID NO: 158543 - protein, 115 aa, Zea Mays
MVQMGVLVPTGDMTVVRRTAQFFLNSFQECLTAQRKEREMATAELGFKKQLTKEEKFEKRKQRLATIGEDLLAIAADQPFRFPATFTFVVRAFSVLDGTGKGLHPRFHITEIAKP

SEQ ID NO: 158544 - protein, 57 aa, Zea Mays
MALRLSDFVFGSDACKKDSQCFCCSCDPVRTHMREIFSLLMANLVLCSCLCLSDQAL

SEQ ID NO: 158545 - protein, 93 aa, Zea Mays
MIKGLSLKSTNGLGTLSVNRRRRMPKPLTRMRAFMALGCRVVEGGGGAEAENADRSSLLGISSGGFDFEAVRMELDVVVGVEPASKDKWSVEA

SEQ ID NO: 158546 - protein, 247 aa, Zea Mays
MEGATSAPNSPGKAWSTLHGLPQSTVSHPTTTTLPWLPMEGHGRCDRAPAQHGRRDPLSSPHHRRPLSIKESRLPSPPSPQMVGEPIATVPTGPESVAEADRLLALAESELSAGRLRATRRHALHAARLYPTSPRAPVVATTANVLLADASSHHAALLLPEPDDPDASPLFASELRRHFKSLVKSLRVGLNAATAAAYPSVAAAAEEALGHATEAYEALTTPTPGTFWTACAGCRLLHEFERNSGNC

SEQ ID NO: 158547 - protein, 64 aa, Zea Mays
MEAVQDRDHKFLTKTVEEAYRGVDCGDGGPFGVVVVRNDEVVVSCHNMVLKHTDPTAHAEVTAI

SEQ ID NO: 158548 - protein, 74 aa, Zea Mays
MPLGLTLGSLGRAMRQKRPSSLDILSSKRAPRDYYKGKNCKPTGFHTRKGGYVVVDEKLPRFAVPDNDSFQGRG

SEQ ID NO: 158549 - protein, 104 aa, Zea Mays
MALISLLSFSFCCMFRSAKRVRKLFSSSLALSSLEDSYLVEDLDLTFFLLPSFAMRHLWPTLGKRSPLVTAMLAASSSEEEESVELSSESHTRHVWASPPFLLC

SEQ ID NO: 158550 - protein, 126 aa, Zea Mays
MLSMVTVRCGHCTNLLSVNLRALMHSVPEQDQLQENIRVHGTLREHHQCGGGHHLELGSSSSSRFRLPMMMSYAPQNEHLLQEQTLNNARRKRFAGSRRTTPTLATGKPSAQQPRTGHIIRTSISA

SEQ ID NO: 158551 - protein, 626 aa, Zea Mays
MAQAAVEPALNGGSLIGRQPVVPRMKRKTPSELRGEQLKRRTSEKLGDDLLPSATLDRSNNGLRNTEQQKISKYINTRVTEVFPVRKARNLGKENSKDVLQNNEKVSKFVNGTPASNFASSSLLCGHGDTAKLDTLVPTMEAAKPGFKKVEKCSENALRSVSELHVGDEKQTGSNKFDMVLKGFGARDAFVASGLNGPNGQVGGTVSKPSDICPSKITVPGEKAPLDFTLKTSLQFVSSSSVKWCHKLNTSFGRSSITGAIGQSCPRGCQNLECSKLESKKEFLFSKALQSWVYPQSLLPSSIISAMLSSTAGGESDFLLKRHQDWEDSFQNLYYMLRKNMLNIFYVYTTQFVALFISGSCLEKKQSSNAYLSQSTRGLRSLLRKHGVCFSMPLCSTEVEQATEDDLIELSEIERRNVGQALHLDALSDVDNTTQSLLSFTGNENVHGLYDVLLNYKSLLNSLSAVDVPVLYSPQPFQNGCLHIPEVKCREMRRADMSSGGFDTEQGSAFASTAGNVCYSMEVKDAVLPPWVVSGLCAAMSLDATSFDLTIATEPSSMGLNVALDSMGTTTTDVQPEGSTPSSCSAPTTPLVGAVPDAALVPALHSASLRRLTYTDGGGYVAHTTV

SEQ ID NO: 158552 - protein, 623 aa, Zea Mays
MAQAAVEPALNGGSLIGRQPVVPRMKRKTPSELRGEQLKRRTSEKLGDDLLPSATLDRSNNGLRNTEQQKISKYINTRVTEVFPVRKARNLGKENSKNNEKVSKFVNGTPASNFASSSLLCGHGDTAKLDTLVPTMEAAKPGFKKVEKCSENALRSVSELHVGDEKQTGSNKFDMEKVLKGFGARDAFVASGLNGPNGQVGGTVSKPSDICPSKITVPGEKAPLDFTLKTSLQFVSSSSVKWCHKLNTSFGRSSITGAIGQSCPRGCQNLECSKLESKKEFLFSKALQSWVYPQSLLPSSIISAMLSSTAGESDFLLKRHQDWEDSFQNLYYMLRKNMLNIFYVYTTQFVALFISGSCLEKKQSSNAYLSQSTRGLRSLLRKHGVCFSMPLCSTEVEQATEDDLIELSEIERRNVGQALHLDALSDVDNTTQSLLSFTGNENVHGLYDVLLNYKSLLNSLSAVDVPVLYSPQPFQNGCLHIPEVKCREMRRADMSSGGFDTEQGSAFASTAGNVCYSMEVKDAVLPPWVVSGLCAAMSLDATSFDLTIATEPSSMGLNVALDSMGTTTTDVQPEGSTPSSCSAPTTPLVGAVPDAALVPALHSASLRRLTYTDGGGYVAHTTV

SEQ ID NO: 158553 - protein, 496 aa, Zea Mays
MAQAAVEPALNGGSLIGRQPVVPRMKRKTPSELRGEQLKRRTSEKLGDDLLPSATLDRSNNGLRNTEQQKISKYINTRVTEVFPVRKARNLGKENSKDVLQNNEKVSKFVNGTPASNFASSSLLCGHGDTAKLDTLVPTMEAAKPGFKKVEKCSENALRSVSELHVGDEKQTGSNKFDMEKVLKGFGARDAFVASGLNGPNGQVGGTVSKPSDICPSKITVPGEKAPLDFTLKTSLQFVSSSSVKWCHKLNTSFGRSSITGAIGQSCPRGCQNLECSKLESKKEFLFSKALQSWVYPQSLLPSSIISAMLSSTAGESDFLLKRHQDWEDSFQNLYYMLRKNMLNIFYVYTTQFVALFISGSCLEKKQSSNAYLSQSTRGLRSLLRKHGVCFSMPLCSTEVEQATEDDLIELSEIERRNVGQALHLDALSDVDNTTQSLLSFTGNENVHGLYDVLLNYKSLLNSLSAVDVPVLYSPQPFQNGCLHIPEKGDHVSATC

SEQ ID NO: 158554 - protein, 630 aa, Zea Mays
MAQAAVEPALNGGSLIGRQPVVPRMKRKTPSELRGEQLKRRTSEKLGDDLLPSATLDRSNNGLRNTEQQKISKYINTRVTEVFPVRKARNLGKENSKDVLQNNEKVSKFVNGTPASNFASSSLLCGHGDTAKLDTLVPTMEAAKPGFKKVEKCSENALRSVSELHVGDEKQTGSNKFDMEKVLKGFGARDAFVASGLNGPNGQVGGTVSKPSDICPSKITVPGEKAPLDFTLKTSLQFVSSSSVKWCHKLNTSFGRSSITGAIGQSCPRGCQNLECSKLESKKEFLFSKALQSWVYPQSLLPSSIISAMLSSTAGGESDFLLKRHQDWEDSFQNLYYMLRKNMLNIFYVIVYTTQFVALFISGSCLEKKQSSNAYLSQSTRGLRSLLRKHGVCFSMPLCSTEVEQATEDDLIELSEIERRNVGQALHLDALSDVDNTTQSLLSFTGNENVHGLYDVLLNYKSLLNSLSAVDVPVLYSPQPFQNGCLHIPEVKCREMRRADMSSGGFDTEQGSAFASTAGNVCYSMEVKDAVLPPWVVSGLCAAMSLDATSFDLTIATEPSSMGLNVALDSMGTTTTDVQPEGSTPSSCSAPTTPLVGAVPDAALVPALHSASLRRLTYTDGGGYVAHTTV

SEQ ID NO: 158555 - protein, 628 aa, Zea Mays
MAQAAVEPALNGGSLIGRQPVVPRMKRKTPSELRGEQLKRRTSEKLGDDLLPSATLDRSNNGLRNTEQQKISKYINTRVTEVFPVRKARNLGKENSKDVLQNNEKVSKFVNGTPASNFASSSLLCGHGDTAKLDTLVPTMEAAKPGFKKVEKCSENALRSVSELHVGDEKQTGSNKFDMEKVLKGFGARDAFVASGLNGPNGQVGGTVSKPSDICPSKITVPGEKAPLDFTLKTSLQFVSSSSVKWCHKLNTSFGRSSITGAIGQSCPRGCQNLECSKLESKKEFLFSKALQSWVYPQSLLPSSIISAMLSSTAGGESDFLLKRHQDWEDSFQNLYYMLRKNMLNIFYVYTTQFVALFISGSCLEKKQSSNAYLSQSTRGLRSLLRKHGVCFSMPLCSTEVEQATEDDLIELSEIERRNVGQALHLDALSDVDNTTQSLLSFTGNENVHGLYDVLLNYKSLLNSLSAVDVPVLYSPQPFQNGCLHIPEVKCREMRRADMSSGGFDTEQGSAFASTAGNVCYSMEVKDAVLPPWVVSGLCAAMSLDATSFDLTIATEPSSMGLNVALDSMGTTTTDVQPEGSTPSSCSAPTTPLVGAVPDAALVPALHSASLRRLTYTDGGGYVAHTTV

SEQ ID NO: 158556 - protein, 83 aa, Zea Mays
MALALAPLHVLARSHHCRAKTRTGLPYVSHYSSATARTHEVKDAATYASGVRTVIPRSTCSPCPPLWSRGARGRRGSRRAPWR

SEQ ID NO: 158557 - protein, 681 aa, Zea Mays
MGRAPLRIWRRLLPTSGPVSGSRWLMLGSSTSPATLSRTMTRGNATVPAMEMTKWFDTNYHFIVPELGPNTKFSYASHKAVNEYKEAKALGVDTVPVLVGPVSYLLLSKPAKGVEKGFPLLSLLSSILPVYKEVIAELKAAGASWIQFDEPTLVLDLDSDKLAAFSAAYAELESVLSGLNVLVETYFADVPAESYKTLTSLSSVTAYGFDLVRGTQTLGLVTSAGFPAGKYLFAGVVDGRNIWADDLATSLSTLQSLEAVVGKDKLVVSTSCSLMHTAVDLVNETKLDSEIKSWLAFAAQKVVEVDALAKALAGQKDEAYFAANAAAQASRKSSPRVTNEEVQKAAAALKGSDHRRGTNVSARLDAQQKKLNLPILPTTTIGSFPQTVELRRVRREYKAKKISEEEYVTAIKEEINKVVKLQEELDIDVLVHGEPERNDMVEYFGEQLSGFAFTANGWVQSYGSRCVKPPIIYGDVSRPNPMTVFWSKTAQSMTSRPMKGMLTGPVTILNWSFVRNDQPRFETCYQIALAIKKEVEDLEAGGIQVIQIDEAALREGLPLRKAEHAFYLDWAVHSFRITNCEIQDTTQIHTHMCYSNFNDIIHSPRIPSAEEIADRIDKMLAVLDTNILWVNPDCGLKTRKYTEVKPALTNMVSAAKLIRTQLASANGCGCFCLFFGCSSAP

SEQ ID NO: 158558 - protein, 186 aa, Zea Mays
MATASWSPVRSVLLTPCARAQPKSPACSSRPARHSACRARPSTSCSVPGAWSCPSARHDVSNSCTKSFSQLTRPDFTARAVFPSSDSASHRCPIRVNTRPWSCSSSSPTLCCRFDCRRCWVPHCVPAECCLLYLITRACRWLALTITRLLVVTAAHSLFVHRTSRVLAFVVELLNPSSLARDFVVA

SEQ ID NO: 158559 - protein, 72 aa, Zea Mays
MSLTLNPFKSSIPLRVFSLVGSVLLSNPILRVLFPLLLQEKLSTRMSFVKLIMATFTYVHYVCTAGRWFLDS

SEQ ID NO: 158560 - protein, 93 aa, Zea Mays
MTGDGAFEGRPLAAVMAPSFTQPHTQSLRGTSGASRGARYHAGQRWTDGDIDFCGMGTGGDRCSVTARAYLKSGVSLSLLWWPHTCRGPSCSR

SEQ ID NO: 158561 - protein, 98 aa, Zea Mays
MVSDWDSDSDCEVRMIDYPRERRAGAATQAEKGKAMVDAGTSSSVAGVMVMDRYGKPVKLNGPIDVTWSHGEPYPGPHGAGFKCFYCLTTKKGGGCLD

SEQ ID NO: 158562 - protein, 609 aa, Zea Mays
MLVLRKKHCASAVAKKCRFGEWGFRLVWSYIEETKTMLERDGAVLRGRNLITFAVGLLGSESLHDRRSALRMLDTFVGDKVSVAPCLLPCRGPLENLMEALEVGDGETRERAARIVAALAGDLRRIDQLPRALHHMASLLQASDYRFPRPRTTTATDARTTTTSMQEQRQRQAAESKRGRFGLLFWAILSCLNFWEVLAKEKKEDTFPSGGGPKQLVSQGLLIVERLARHPANRAQICNNSVLLSKLTAPLFSHAFLDTAEHGRGWVVGMLATSLRIITRLLIRAPGEASRGLRDGITSNAQAVSNLSRVLEEEDDAKFGPELKAAAVDILAELALPSSDRSSTSRLGKADIVRGLWCIFLVQVDDGVDGSNTQGEEQRQQDSTLRKKASEALAQMLSAELRHVAGRLTDMLAKSKGSTSRVRTARTLECLCSHISTEHGQPPRLDAIEMLTKVLQLILRIPCESNKLETADEEQQEEEEFLVALLSLAVVICDGMVDEHGFSCAAPPQDMVPLVRKLKDIIQANNTTTVECLRTVKLTCKLVVSMAQLKPMCIKDFTEHNFMDVLLESLKTLSDLDNCLVLFEVDNHYQVTKTDKPLVSLVKKAHQLF

SEQ ID NO: 158563 - protein, 886 aa, Zea Mays
MSRMVASQPTKDAESSSVVNNIGLRAESREQPQVGRIAHTCSRDRPDQMPSSSSASGVGLGRRRPPIAAGGPRRSDSRWWWARLMEKNYSDAESYRARRPEERLINDYLLLESAARKVATGLAYLLLTWSTVVLLGGFVSALKLIDFWCLAAISTSFAVNSLADLFEYTRGYMLAAASVYAGLRDDRPSSRSCRLGVHVSILLAEALLGVLITVHFVVVQVLTFAPVVAIVLSLSRLIANNYGNVGDDAANSAKLKASLQIFYSLTLVQINAFYFWKMLVLRKKHCASAVAKKCRFGEWGFRLVWSYIEETKTMLERDGAVLRGRNLITFAVGLLGSESLHDRRSALRMLDTFVGDKVSVAPCLLPCRGPLENLMEALEVGDGETRERAARIVAALAGDLRRIDQLPRALHHMASLLQASDYRFPRPRTTTATDARTTTTSMQEQRQRQAAESKRGRFGLLFWAILSCLNFWEVLAKEKKEDTFPSGGGPKQLVSQGLLIVERLARHPANRAQICNNSVLLSKLTAPLFSHAFLDTAEHGRGWVVGMLATSLRIITRLLIRAPGEASRGLRDGITSNAQAVSNLSRVLEEEDDAKFGPELKAAAVDILAELALPSSDRSSTSRLGKADIVRGLWCIFLVQVDDGVDGSNTQGEEQRQQDSTLRKKASEALAQMLSAELRHVAGRLTDMLAKSKGSTSRVRTARTLECLCSHISTEHGQPPRLDAIEMLTKVLQLILRIPCESNKLETADEEQQEEEEFLVALLSLAVVICDGMVDEHGFSCAAPPQDMVPLVRKLKDIIQANNTTTVECLRTVKLTCKLVVSMAQLKPMCIKDFTEHNFMDVLLESLKTLSDLDNCLVLFEVDNHYQVTKTDKPLVSLVKKAHQLF

SEQ ID NO: 158564 - protein, 876 aa, Zea Mays
MSRMVASQPTKDAESSSVVNNIGLRAESREQPQVGRIAHTCSRDRPDQMPSSSSASGVGLGRRRPPIAAGGPRRSDSRWWWARLMEKNYSDAESYRARRPEERLINDYLLLESAARKVATGLAYLLLTWSTVVLLGGFVSALKLIDFWCLAAINLFEYTRGYMLAAASVYAGLRDDRPSSRSCRLGVHVSILLAEALLGVLITVHFVVVQVLTFAPVVAIVLSLSRLIANNYGNVGDDAANSAKLKASLQIFYSLTLVQINAFYFWKMLVLRKKHCASAVAKKCRFGEWGFRLVWSYIEETKTMLERDGAVLRGRNLITFAVGLLGSESLHDRRSALRMLDTFVGDKVSVAPCLLPCRGPLENLMEALEVGDGETRERAARIVAALAGDLRRIDQLPRALHHMASLLQASDYRFPRPRTTTATDARTTTTSMQEQRQRQAAESKRGRFGLLFWAILSCLNFWEVLAKEKKEDTFPSGGGPKQLVSQGLLIVERLARHPANRAQICNNSVLLSKLTAPLFSHAFLDTAEHGRGWVVGMLATSLRIITRLLIRAPGEASRGLRDGITSNAQAVSNLSRVLEEEDDAKFGPELKAAAVDILAELALPSSDRSSTSRLGKADIVRGLWCIFLVQVDDGVDGSNTQGEEQRQQDSTLRKKASEALAQMLSAELRHVAGRLTDMLAKSKGSTSRVRTARTLECLCSHISTEHGQPPRLDAIEMLTKVLQLILRIPCESNKLETADEEQQEEEEFLVALLSLAVVICDGMVDEHGFSCAAPPQDMVPLVRKLKDIIQANNTTTVECLRTVKLTCKLVVSMAQLKPMCIKDFTEHNFMDVLLESLKTLSDLDNCLVLFEVDNHYQVTKTDKPLVSLVKKAHQLF

SEQ ID NO: 158565 - protein, 810 aa, Zea Mays
MSRMVASQPTKDAESSSVVNNIGLRAESREQPQVGRIAHTCSRDRPDQMPSSSSASGVGLGRRRPPIAAGGPRRSDSRWWWARLMEKNYSDAESYRARRPEERLINDYLLLESAARKVATGLAYLLLTWSTVVLLGGFVSALKLIDFWCLAAISTSFAVKLIANNYGNVGDDAANSAKLKASLQIFYSLTLVQINAFYFWKMLVLRKKHCASAVAKKCRFGEWGFRLVWSYIEETKTMLERDGAVLRGRNLITFAVGLLGSESLHDRRSALRMLDTFVGDKVSVAPCLLPCRGPLENLMEALEVGDGETRERAARIVAALAGDLRRIDQLPRALHHMASLLQASDYRFPRPRTTTATDARTTTTSMQEQRQRQAAESKRGRFGLLFWAILSCLNFWEVLAKEKKEDTFPSGGGPKQLVSQGLLIVERLARHPANRAQICNNSVLLSKLTAPLFSHAFLDTAEHGRGWVVGMLATSLRIITRLLIRAPGEASRGLRDGITSNAQAVSNLSRVLEEEDDAKFGPELKAAAVDILAELALPSSDRSSTSRLGKADIVRGLWCIFLVQVDDGVDGSNTQGEEQRQQDSTLRKKASEALAQMLSAELRHVAGRLTDMLAKSKGSTSRVRTARTLECLCSHISTEHGQPPRLDAIEMLTKVLQLILRIPCESNKLETADEEQQEEEEFLVALLSLAVVICDGMVDEHGFSCAAPPQDMVPLVRKLKDIIQANNTTTVECLRTVKLTCKLVVSMAQLKPMCIKDFTEHNFMDVLLESLKTLSDLDNCLVLFEVDNHYQVTKTDKPLVSLVKKAHQLF

SEQ ID NO: 158566 - protein, 145 aa, Zea Mays
MAGKDSTGPEEQGARSEPRRRPKQARPDEDWSKNSARRGAGGAELRPSAPWELQPTLKKTSRKGVSQGDPVGHGAGERAGRRGQGRAPWRAGSARGHQRRSCARQGAGAKQPPWGSRAAGDLPWAASTERGGRGRAEGAREWSAC

SEQ ID NO: 158567 - protein, 679 aa, Zea Mays
MATYYSSQGSEREPSQNMYSRDPGNGTASYPPLPSALGNLLYLNSPASGGPYTDFGGVQQDCIEMPEPGHPSVMSHDSSAREIEPDMLGQQRRSFGLARGMKDEVLMRMMDGSGSHSSAADAIHDDAPNGIQLDFGVLGSHGPPAQGGQGSLSLSLNTHIMAPALPYWPVVKADMLSPHSYDHGCGGGSGGLGSEPSRAIRNSRYLKAAQELLDEVVNVWNSIKQKAQKEQVEAGKTEGKENEGGGPKSEGPQESGANAAPELSTAEKQELQNKMAKLMAMLDEVDRKYKHYYHQMQSVVSSFDMVAGAGAAKPYTAVALQTISRHFRCLKDAINDQISVIRKKLGEEESSSGREGRLTRLRYIDQQLRQQRAFQQYGMIPQNAWRPQRGLPENSVTILRAWLFEHFLHPYPKDSEKLMLARQTGLTRSQISNWFINARVRLWKPMIEDMYKEETGDIEQDSNSSSDNAPAGSKAKTASSRDKEDHLARSCCTPRAVCESSSQLSEPPGGASMRAMSVAAAAAGAPMGLFQNEPGHDHDHDDSFMSLMLKEQRPNDGGGGLLLHHSAVAQHQDENARFMAYHLAELGRYGNGNVSLTLGLQRSSSSLSVPHAQQSFPGVGIGVGDDDIYNATAAPLGVSVASPDYESMSQMDQRQRSVLSYHLSNRRKICYDLGTLPTL

SEQ ID NO: 158568 - protein, 104 aa, Zea Mays
MGHRRLFVLSLGLAHLLLIATAHAGGGHARGAATDDAVAHQGFKARYASDVTWQHEQGMSMVGSRPPSCAGRCWWCGARRCEAVQACMDDGSSSERVLACSVVC

SEQ ID NO: 158569 - protein, 132 aa, Zea Mays
MAAEGKRKGVPALGWWLMLVGSLRLASVWFGFFDIWALRVAVFSQTEMTDVHGRTFGVWTLLTCTLCFLCALNLENRPLYLATFLSFIYALGHFLTEYLIYHTMAAANLSTVGFFAGLSFKPFQDLISTLLL

SEQ ID NO: 158570 - protein, 77 aa, Zea Mays
MDASAVEFSWEPPGFLCWEAVMTDARVVRLMWSGPARGRRMVEESSLESRLMMALRHLYFSFQLFIMLFRCMRRSSD

SEQ ID NO: 158571 - protein, 54 aa, Zea Mays
METPLTSAFQCRTSPASMLCCLLGSSVAALCSSGCYGGQSNVLTIHVEKFGLNS

SEQ ID NO: 158572 - protein, 111 aa, Zea Mays
MGRGKFKGKPTGRRNFSTLEEIGDEPCDPGDDAGGVHPVLHLPGGRGGRGVPRVPDPQGLEGVAPVPEQPPQPRPLPLPGQVRPFPIRGCSQAQHVHAVHAKMLLNSGILS

SEQ ID NO: 158573 - protein, 878 aa, Zea Mays
MSSTSASRPAAPGPGGAGAADGGGAGTATPSASSRTSPRRYEDKYVIGSREREFAILKDLIINKEGDMPHRAVISIFGERGIGKTTLAKQLYNDPDIIKHFEVHAWVCLPPHVRFRDYVEIMHMQVNPQIPEASEKNDNTTFALGNEETTDMEFNLRQNLENRRYLVVLDGLVSISDWNSLFAVLPHTNANGSRILLTTHLNVKEINHIDPQIAPVKLPYLDEKHGEELFCQRVFGTIEPPQIYRSKVYYKKVHNISTGLPLAITVLAGILRSKFIPMEWDVIFEQLESNGQPKPVRSIWSLAFDDLPHYLKSCFLYLASVSENVILYPDRLVRLWIAEGFVMPKKAETLEDVGFDYLKELVARGLVQVVQKDAGGSIKLVAIHNLLHAFVESEAQDSSFLEIHHHANVVNPNAVRRLAIQNYVDAYVHIPNVFPKLRSLLCDFAEDQQRGSSSSGELQPQSLWGNLAELCSRACGTSENVGSSTLHGLHFLQGSRYLRVVDLYGLKTRKLPDEIGSIIHLRYLGIRNSNLVELPSSIYKLDSLQTLDVRKTNVAKAVDEFWDIEALRHVLAEKMILPDCSVVPLNNLMTLNGVVPCGPWDEKSCPLNSMIYLRSLSLSDISAAHTAALSAALRKMEFLLYLNLSGEFLPSSMFTSSSMRRLQTLILHGKLQGINDLPSDDRYVLPNLTMLYLHGSEVSQQFVHKLGTLPCLVEMELSAVSYSEGEMKLFLDGFPSLARLKLKNVSMLQEVEIRGGAMPMLSILAMYDCDSLKTFKNLNSLEHLQEVAIYNTPPEIVDNIKLEDEKLFSKIKLLTNPMMTADRDFPGHVVRMRIKMLDEPAHDLRVAVASEPHCSDMEGDYHGERKATDQVHYGPGLL

SEQ ID NO: 158574 - protein, 573 aa, Zea Mays
MTTTTKKMVEEQLSDDAGGGGELPEQNYRGWKAMPYVIGNETCEKLGTIGTTANLLVYLTTVYGMSGASAATLLSLWSGTVNLAPLLGAFLSDTYMGRYATIAFASMASFLGMIVLTLTAAVPSLHPAANSSTTGGPSSLQMAVLLASFALLAVGAGGIRPCNLAFGADQFDPRTPAGRRGINSFFNWYYFTFTIAMMVSATVIIYLQSDVSWALGLAVPATLMGLSCALFFMGTRLYVRVPPEGSPFTSFAQVLVAAARKRRLPAPRADLYDPPHRSSLISKIAYTDQFLCLDKAAVRTPEDGPAPNPWRLCTLQQVEEVKCLARLLPVWSSGIVYYIVLTNLGNYNVLQAMQTDRRVGRGGFHIPAGSFVVFNMLALTLWLPFYDGVLVPAMQRLTGREGGITQLQRIGTGIVLSIVTMLVAAAVERHRRRLGDSASCFLLVPQQMLAGLSEAFGIIGQVDFYYKQFPENMRSVAGAMLFLAFAIASYASGLMVSVVHRTTGGPDGRPDWLAQDLNQGHVDLYYLLIAAMAAVNLVYFVACARWYRFKNPAAADVEQLELELEGKAAAPPV

SEQ ID NO: 158575 - protein, 350 aa, Zea Mays
MPPWPPCLQPTLTTARRATVFSRTRCLSSTPASPTYEQGQHEEEPSLVVVGGGAAGVYASIRAKTLAPHLNVAVVEKGRFLSKVKISGGGRCNVTNGHHLEPMGLARNYPRGNKELRGSFFTAHGPQDTMRWFTDHGVKLKTEDDGRVFPVTDNSASVVDCLLNEARRLGVSLQAGKTVSSASVAQDGKFVLKVEKRTADLVDYINANYILVATGSSQHGYSIAAQLGHSIIAPVPSLFTFKIADKRLADLAGVTFPIVKAKLKLDGVQKSVPELTQTGPMLVTHWGLSGPVVLRLSAWGARELHQCNYQGNLMVDFVPDIHIEDVKRVLFHYKDQHAVHFFLCSFSFTH

SEQ ID NO: 158576 - protein, 233 aa, Zea Mays
MAQPPPPPEMERPAASGALIYAMVARGTVAVAEHTSYTGNFRDIAAQCLHKLPAGNNRFTYTCDAHTFNFLVSDGYAYCVVATESAGRQIPMAFLEMIKEEFNRRYSGGEAGTATANSLTRDFGPRLRDQMQYCTDHPEEVSKLSRVKAQVDQVKSIMMENIDKAFDRGQQIDGLVTRTEQLHDEAVDFRRQGVQLRRRMWYQNMKVKLIVLGVVVALILIIVLSICHGGCSK

SEQ ID NO: 158577 - protein, 57 aa, Zea Mays
MEEDMEVTPANTDKASQQPRATMMMSKNDDPSRKKKKKGLKSLVKSCLRHQRQPQTF

SEQ ID NO: 158578 - protein, 136 aa, Zea Mays
MPLPAAESPTPPHPCRAIHAHPGLFLIFVPTRLWLALLNSCCMSVVSPLRGHRAKRRQKASAEKKAAVAARGKQHRRSAGVAHLCSSHRKHLFCLHAVGDFRIVSEGTRTACLCLPLSPPRHRTHAEQSMPIPASS

SEQ ID NO: 158579 - protein, 87 aa, Zea Mays
MPLLAAESPTPPHPRRAIHAHPGLFLIFIPTRLWLALLNSCRMSIVSSLRGRRAKRRQKASIENKATVGARGKQKLPPTLDEGKQAT

SEQ ID NO: 158580 - protein, 75 aa, Zea Mays
MPLLAAESPTPPHPRRAIHAHPGLFLIFIPTRLWLALLNSCRMSIVSSLRGRRAKRRQKASIENKATVGARGKQV

SEQ ID NO: 158581 - protein, 86 aa, Zea Mays
MPLLAAESPTPPHPRRAIHAHPGLFLIFIPTRLWLALLNSCRMSIVSSLRGRRAKRRQKASIENKATVGARGKQLPPTLDEGKQAT

SEQ ID NO: 158582 - protein, 62 aa, Zea Mays
MFTFQFESSTTYFNNFRLSFRTKGALCILTVCNFHSEQVWFYLYFWTCICSRNAFKHIVVSS

SEQ ID NO: 158583 - protein, 561 aa, Zea Mays
MIYKKTKAELRNQEQPFDMGKKKKRNKNVPAVVWYPTRVIEFLGRRTPIILKEKDTRCSLVAICFTLTSWSLLEMPRTEFIHFLFLCHCRQRSPAWRENNPRFRYQESVGEPSHPSCPEASFVWQYTNAGMQLYICKCFENECPLTQKLSYCPLILQLEQNLELSEFNKQVLGVLPKLTCSLYFDVTFSSSCGLEKTFETALFGFLGVPLRHGWLVDPQGPQLTRYGFSSLHNDLRALQPTVLIWNENLITISKFEDKIYVLLNDLSLLRTETDAVWERLTQANGDGVFVDCNFVPTDSKIQSVLPLTKTERKKRIKEKMDLKKKEKDSNKDKDDEDTKDKDDGKEEDSNEDRDDEETEEKDDGNVAPQTYFLQGRHINLNVRPINFLGLSTHVIHQINDGPCALIAAMFYSQGDISFEPHETVVSMEYLLGLVLALLGGSVKMQDYSDERKSQILNVVKSLAGGFDMDVIFTRTDGFTMTPEWLLLDCLDLNLRHGWIAARINGVLNSLVTDSNYLETRVVWQTLDGVNGDGVYLDSNFTPIYMGLDAAASIYLMWPKIN

SEQ ID NO: 158584 - protein, 507 aa, Zea Mays
MIYKKTKAELRNQEQPFDMGKKKKRNKNVPAVVWYPTRVIEFLGRRTPIILKEKDTRCSLVAICNVLLLGEKITLDLDIKKVLESHLIHLVQRPLLCGNTQMQLEQNLELSEFNKQVLGVLPKLTCSLYFDVTFSSSCGLEKTFETALFGFLGVPLRHGWLVDPQGPQLTRYGFSSLHNDLRALQPTVLIWNENLITISKFEDKIYVLLNDLSLLRTETDAVWERLTQANGDGVFVDCNFVPTDSKIQSVLPLTKTERKKRIKEKMDLKKKEKDSNKDKDDEDTKDKDDGKEEDSNEDRDDEETEEKDDGNVAPQTYFLQGRHINLNVRPINFLGLSTHVIHQINDGPCALIAAMFYSQGDISFEPHETVVSMEYLLGLVLALLGGSVKMQDYSDERKSQILNVVKSLAGGFDMDVIFTRTDGFTMTPEWLLLDCLDLNLRHGWIAARINGVLNSLVTDSNYLETRVVWQTLDGVNGDGVYLDSNFTPIYMGLDAAASIYLMWPKIN

SEQ ID NO: 158585 - protein, 242 aa, Zea Mays
MDLKKKEKDSNKDKDDEDTKDKDDGKEEDSNEDRDDEETEEKDDGNVAPQTYFLQGRHINLNVRPINFLGLSTHVIHQINDGPCALIAAMFYSQGDISFEPHETVVSMEYLLGLVLALLGGSVKMQDYSDERKSQILNVVKSLAGGFDMDVIFTRTDGFTMTPEWLLLDCLDLNLRHGWIAARINGVLNSLVTDSNYLETRVVWQTLDGVNGDGVYLDSNFTPIYMGLDAAASIYLMWPKIN

SEQ ID NO: 158586 - protein, 415 aa, Zea Mays
MLSWTPRYVEAPTPNFRIILLSMNQFDPKTNSGPQKHGRYEDDMFYTALAFSKTGSEKELDSTSCATISTFLQGPQLTRYGFSSLHNDLRALQPTVLIWNENLITISKFEDKIYVLLNDLSLLRTETDAVWERLTQANGDGVFVDCNFVPTDSKIQSVLPLTKTERKKRIKEKMDLKKKEKDSNKDKDDEDTKDKDDGKEEDSNEDRDDEETEEKDDGNVAPQTYFLQGRHINLNVRPINFLGLSTHVIHQINDGPCALIAAMFYSQGDISFEPHETVVSMEYLLGLVLALLGGSVKMQDYSDERKSQILNVVKSLAGGFDMDVIFTRTDGFTMTPEWLLLDCLDLNLRHGWIAARINGVLNSLVTDSNYLETRVVWQTLDGVNGDGVYLDSNFTPIYMGLDAAASIYLMWPKIN

SEQ ID NO: 158587 - protein, 216 aa, Zea Mays
MDLKKKEKDSNKDKDDEDTKDKDDGKEEDSNEDRDDEETEEKDDGNVAPQTYFLQGRHINLNVRPINFLGLSTHVIHQINDGPCALIAAMFYSQGDISFEPHETVVSMEYLLGLVLALLGGSVKMQDYSDERKSQILNVVKSLAGGFDMDVIFTRTDGFTMTPEWLLLDCLDLNLRHGWIAARVSKFIMSIDYVVSANFRIQCASILYDVVHDTNY

SEQ ID NO: 158588 - protein, 210 aa, Zea Mays
MDLKKKEKDSNKDKDDEDTKDKDDGKEEDSNEDRDDEETEEKDDGNVAPQTYFLQGRHINLNVRPINFLGLSTHVIHQINDGPCALIAAMFYSQGDISFEPHETVVSMEYLLGLVLALLGGSVKMQDYSDERKSQILNVVKSLAGGFDMDVIFTRTDGFTMTPEWLLLDCLDLNLRHGWIAARINGVLNSLVTDSNYLETRVVWQTLDGM

SEQ ID NO: 158589 - protein, 203 aa, Zea Mays
MEYLLGLVLALLGGSVKMQDYSDERKSQILDVVKSLAGGFDMDVIFTRTDGFTMTQEWLLLDCLDLNLRHGWIAARDLLTGPEVSFESLTLASNEPGFPHAEEIKNFLRGPQLTPIGLVSLQEDFVENVPCILFWNKHYHTIVMINGVLNSLVTDSNYLETRIVWQTLDGVNGDGVYLDNNFTPVYVGLDAATSVYVMWPKIN

SEQ ID NO: 158590 - protein, 180 aa, Zea Mays
MMAHAPLLQSGDISFEPHETVVSMEYLLGLVLALLGGSVKMQDYSDERKSQILDVVKSLAGGFDMDVIFTRTDGFTMTQEWLLLDCLDLNLRHGWIAARDLLTGPEVSFESLTLASNEPGFPHAEEIKNFLRGPQLTPIGLVSLQEDFVENVPCILFWNKHYHTIVMINGVLNSLVTDSN

SEQ ID NO: 158591 - protein, 288 aa, Zea Mays
MVRNMPDDPSQSQHLVQEDLVDVFDILDDLKNDPVQRDLLKEVEKHDVKNVSTFGSTERSIPLSQGFTMPRYVVPDDTDIQYTPPQPRATRSQAQPLKSSLRTNETRQIRKGQKKLKKSPKKVSQDVELDDNGFPIIDFAALDRFDPPPHLAVDVESYGGPAASVAAKQAALRMVAEILEKRIAHPQLTYFTYVEKFLPEDDPEDVIALEYNLIGSKQIYEACADGEMRSNDQVYYYTICIANEDKLFRTEAADYRIFLPTNLSQFSISQTERSTIEPTTKTSLYPEQ

SEQ ID NO: 158592 - protein, 336 aa, Zea Mays
MVRNMPDDPSQSQHLVQEDLVDVFDILDDLKNDPVQRDLLKEVEKHDVKNVSTFGSTERSIPLSQGFTMPRYVVPDDTDIQYTPPQPRATRSQAQPLKSSLRTNETRQIRKGQKKLKKSPKKVSQDVELDDNGFPIIDFAALDRFDPPPHLAVDVESYGGPAASVAAKQAALRMVAEILEKRIAHPQLTYFTYVEKFLPEDDPEDVIALEYNLIGSKQIYEACADGEMRSNDQVYYYTICIANEDKLFRTEAADYRIFLPTNLSGAEEQLSPRGDRHQMEAFVVCPFSTQRFYFDSRCQPHTLAVFYIPSRFVAVFSYTVHPQVILLKRLTDCQQL

SEQ ID NO: 158593 - protein, 335 aa, Zea Mays
MLLVRACVATLAPIPFLPCGGGGKTGASPSFPSFVLFFLLFRLSVWRRKKQEMRSSLLPESPYVPSAPRLRQGCCWLQTLICIHRPPPFVFLHVNGGGFCVCWLLLPMRSTRDETLSASSLVFQNIARVQIAYLVSFFSSYLLTTCSQGSSAEAACSAAALFLLYCTSLYCCSSSTTTFSSCSCYLSTSFSPAPSAAAPDTKDEPLQDKTVEESTDVVTGNISGFPASQFDHSAWAYKGAMVRNMPDDPSQSQHLVQEDLVDVFDILDDLKNDPVQRDLLKEVEKHDVKNVSTFGSTERSIPLSQGFTMPRLYLMTLTFSTHLLSHERHVLKLNL

SEQ ID NO: 158594 - protein, 368 aa, Zea Mays
MVRNMPDDPSQSQHLVQEDLVDVFDILDDLKNDPVQRDLLKEVEKHDVKNVSTFGSTERSIPLSQGFTMPRYVVPDDTDIQYTPPQPRATRSQAQPLKSSLRTNETRQIRKGQKKLKKSPKKVSQDVELDDNGFPIIDFAALDRFDPPPHLAVDVESYGGPAASVAAKQAALRMVAEILEKRIAHPQLTYFTYVEKFLPEDDPEDVIALEYNLIGSKQIYEACADGEMRSNDQVYYYTICIANEDKLFRTEAADYRIFLPTNLSFAWVITQAVVGASRRSNAVRLEHERGVTDKLGEVEHDERDGTSTPPVGRSAAPMGMPPGSASPSIMGPIMYLNPISSVTSAAMTTTKEPSDNSDPVGGRLYAMY

SEQ ID NO: 158595 - protein, 165 aa, Zea Mays
MVRNMPDDPSQSQHLVQEDLVDVFDILDDLKNDPVQRDLLKEVEKHDVKNVSTFGSTERSIPLSQGFTMPRYVVPDDTDIQYTPPQPRATRSQAQPLKSSLRTNETRQIRKGQKKLKKSPKKVSQDVELDDNGFPIIDFAALDRFDPPPHLAVDVESYGGPAASG

SEQ ID NO: 158596 - protein, 163 aa, Zea Mays
MVAEILEKRIAHPQLTYFTYVEKFLPEDDPEDVIALEYNLIGSKQIYEACADGEMRSNDQVYYYTICIANEDKLFRTEAADYRIFLPTNLSGAEEQLSPRGDRHQMEAFVVCPFSTQRFYFDSRCQPHTLAVFYIPSRFVAVFSYTVHPQVILLKRLTDCQQL

SEQ ID NO: 158597 - protein, 101 aa, Zea Mays
MEEEDHVLAPTDSEVNVISQKVVCGKNKSIDGDNPVVKRLLATKSTSTSTSKFMASIFKSARSNKSTDLVSQPQVPKVAQDASASASENASIYSCKCPNKH

SEQ ID NO: 158598 - protein, 107 aa, Zea Mays
MVWRETVEASPAEVHTGPSPRRSTTRLLSALHHLPAILLKTPEPEDVFACQENMESENEVMESPPLNDSNSQSKPKGRSKNFNEAEDILLMSAYLNIRKDAITGRDQ

SEQ ID NO: 158599 - protein, 1096 aa, Zea Mays
MATAVASQPCHLPLSAGGDPSTSNVHTLEKVYGFRFICRSIVDVKTHKFHSRISKRKCYLRNSLSECDRTIHSGRWLEFRRHKGVFQRTRRMVHIIPLASDGDGNHISVNGALQVGSTSNIDEIKLKLNKALQSEDISNGLVQSIHDAARSIELALIEHSKLPKSSWFPKTWLGVENNAWIKSLSYQAAVDSLLKAVIDVSSRGNDRDRDINVFVQRSLSRLLTPLESVIKNELSKREPALYEWYSSDQNPLVVRQFVNIFENDPMFYSATAICLEGEPMNTSESDLSLLMLGLICLAAITKFGSAKVSCQQFSSMVPDIIGRFMDMLLEFAPLSKAYNLAKDIGLRREFLYNFGPRAAVPKLGNDHGLEISFWIELVQKQLLWALDREKIWSRLTTSESIEVLEKDLAIFGFFVALGRSTQGYLSFKGLTDLDDSLNGIVRYLIGGSVLYYPQLSSISSYQLYVEVVCEELEWLPFYNDDVLSAKTDTEGREEVPKGEVISRVLNVCSYWMTSFTKYSSWLENPSNVKAAKFLSKGHVMLSDCMKELDISRNMSNDSGFLEPEEELDTGTELASFDKSLENVEEALVKLENLLQELHVSSSHSGKEDLKAACSDLEMIRRLKKEAELLEASFLAKAEYLEADASSGSLSPAEEGPVKTSSRTNDTSAPQKTGSRVDNKRRPFWDFFGRSLKVDPALADQDLITVANVEKEGMESNDILRFEQLRRELIELEKRVQKSADEAQKEEEMVVAEKTTAPSPGSSVSSRQTTKKENVITKSVEKVKETTTTVLQGTQLLAIDTGAAMGLLKRALIGDELTQKEKQALQRTLTDLASVVPIGILMLLPLTAVGHAAILAFIQRYVPSMIPSTYAPGRLDLLRQIEKVKEMEVAEGSRTKPTTCIIVCTQMPSSVISYGIEWCGHFLIISQAREQDVGVNSVRQSPPPSPLLIQSNGAPPPRSRGNGLALGLDDGAGTGRVHDARAHGAASGDLGASSSRAIPDPEDRSSSGAQCHGTRPRLAAGAELYRADADRGAVLPSAAQRRVQRCLRLVRGRRYGGCRVFLLRSVLGADGSAAYGMVRCGVDLTRWLPLPLVEFAY

SEQ ID NO: 158600 - protein, 896 aa, Zea Mays
MATAVASQPCHLPLSAGGDPSTSNVHTLEKVYGFRFICRSIVDVKTHKFHSRISKRKCYLRNSLSECDRTIHSGRWLEFRRHKGVFQRTRRMVHIIPLASDGDGNHISVNGALQVGSTSNIDEIKLKLNKALQSEDISNGLVQSIHDAARSIELALIEHSKLPKSSWFPKTWLGVENNAWIKSLSYQAAVDSLLKAVIDVSSRGNDRDRDINVFVQRSLSRLLTPLESVIKNELSKREPALYEWYSSDQNPLVVRQFVNIFENDPMFYSATAICLEGEPMNTSESDLSLLMLGLICLAAITKFGSAKVSCQQFSSMVPDIIGRFMDMLLEFAPLSKAYNLAKDIGLRREFLYNFGPRAAVPKLGNDHGLEISFWIELVQKQLLWALDREKIWSRLTTSESIEVLEKDLAIFGFFVALGRSTQGYLSFKGLTDLDDSLNGIVRYLIGGSVLYYPQLSSISSYQLYVEVVCEELEWLPFYNDDVLSAKTDTEGREEVPKGEVISRVLNVCSYWMTSFTKYSSWLENPSNVKAAKFLSKGHVMLSDCMKELDISSGFLEPEEELDTGTELASFDKSLENVEEALVKLENLLQELHVSSSHSGKEDLKAACSDLEMIRRLKKEAELLEASFLAKAEYLEADASSGSLSPAEEGPVKTSSRTNDTSAPQKTGSRVDNKRRPFWDFFGRSLKVDPALADQDLITVANVEKEGMESNDILRFEQLRRELIELEKRVQKSADEAQKEEEMVVAEKTTAPSPGSSVSSRQTTKKENVITKSVEKVKETTTTVLQGTQLLAIDTGAAMGLLKRALIGDELTQKEKQALQRTLTDLASVVPIGILMLLPLTAVGHAAILAFIQRYVPSMIPSTYAPGRLDLLRQIEKVKEMEVAEGSSEDILEELNK

SEQ ID NO: 158601 - protein, 906 aa, Zea Mays
MATAVASQPCHLPLSAGGDPRCAASTSNVHTLEKVYGFRFICRSIVDVKTHKFHSRISKRKCYLRNSLSECDRTIHSGRWLEFRRHKGVFQRTRRMVHIIPLASDGDGNHISVNGALQVGSTSNIDEIKLKLNKALQSEDISNGLVQSIHDAARSIELALIEHSKLPKSSWFPKTWLGVENNAWIKSLSYQAAVDSLLKAVIDVSSRGNDRDRDINVFVQRSLSRLLTPLESVIKNELSKREPALYEWYSSDQNPLVVRQFVNIFENDPMFYSATAICLEGEPMNTSESDLSLLMLGLICLAAITKFGSAKVSCQQFSSMVPDIIGRFMDMLLEFAPLSKAYNLAKDIGLRREFLYNFGPRAAVPKLGNDHGLEISFWIELVQKQLLWALDREKIWSRLTTSESIEVLEKDLAIFGFFVALGRSTQGYLSFKGLTDLDDSLNGIVRYLIGGSVLYYPQLSSISSYQLYVEVVCEELEWLPFYNDDVLSAKTDTEGREEVPKGEVISRVLNVCSYWMTSFTKYSSWLENPSNVKAAKFLSKGHVMLSDCMKELDISRNMSNDSGFLEPEEELDTGTELASFDKSLENVEEALVKLENLLQELHVSSSHSGKEDLKAACSDLEMIRRLKKEAELLEASFLAKAEYLEADASSGSLSPAEEGPVKTSSRTNDTSAPQKTGSRVDNKRRPFWDFFGRSLKVDPALADQDLITVANVEKEGMESNDILRFEQLRRELIELEKRVQKSADEAQKEEEMVVAEKTTAPSPGSSVSSRQTTKKENVITKSVEKVKETTTTVLQGTQLLAIDTGAAMGLLKRALIGDELTQKEKQALQRTLTDLASVVPIGILMLLPLTAVGHAAILAFIQRYVPSMIPSTYAPGRLDLLRQIEKVKEMEVAEGSSEDILEELNK

SEQ ID NO: 158602 - protein, 620 aa, Zea Mays
MIQCFTLLQQCLICLAAITKFGSAKVSCQQFSSMVPDIIGRFMDMLLEFAPLSKAYNLAKDIGLRREFLYNFGPRAAVPKLGNDHGLEISFWIELVQKQLLWALDREKIWSRLTTSESIEVLEKDLAIFGFFVALGRSTQGYLSFKGLTDLDDSLNGIVRYLIGGSVLYYPQLSSISSYQLYVEVVCEELEWLPFYNDDVLSAKTDTEGREEVPKGEVISRVLNVCSYWMTSFTKYSSWLENPSNVKAAKFLSKGHVMLSDCMKELDISRNMSNDSGFLEPEEELDTGTELASFDKSLENVEEALVKLENLLQELHVSSSHSGKEDLKAACSDLEMIRRLKKEAELLEASFLAKAEYLEADASSGSLSPAEEGPVKTSSRTNDTSAPQKTGSRVDNKRRPFWDFFGRSLKVDPALADQDLITVANVEKEGMESNDILRFEQLRRELIELEKRVQKSADEAQKEEEMVVAEKTTAPSPGSSVSSRQTTKKENVITKSVEKVKETTTTVLQGTQLLAIDTGAAMGLLKRALIGDELTQKEKQALQRTLTDLASVVPIGILMLLPLTAVGHAAILAFIQRYVPSMIPSTYAPGRLDLLRQIEKVKEMEVAEGSSEDILEELNK

SEQ ID NO: 158603 - protein, 556 aa, Zea Mays
MATAVASQPCHLPLSAGGDPRFICRSIVDVKTHKFHSRISKRKCYLRNSLSECDRTIHSGRWLEFRRHKGVFQRTRRMVHIIPLASDGDGNHISVNGALQVGSTSNIDEIKLKLNKALQSEDISNGLVQSIHDAARSIELALIEHSKLPKSSWFPKTWLGVENNAWIKSLSYQAAVDSLLKAVIDVSSRGNDRDRDINVFVQRSLSRLLTPLESVIKNELSKREPALYEWYSSDQNPLVVRQFVNIFENDPMFYSATAICLEGEPMNTSESDLSLLMLGLICLAAITKFGSAKVSCQQFSSMVPDIIGRFMDMLLEFAPLSKAYNLAKDIGLRREFLYNFGPRAAVPKLGNDHGLEISFWIELVQKQLLWALDREKIWSRLTTSESIEVLEKDLAIFGFFVALGRSTQGYLSFKGLTDLDDSLNGIVRYLIGGSVLYYPQLSSISSYQLYVEVVCEELEWLPFYNDDVLSAKTDTEGREEVPKGEVISRVLNVCSYWMTSFTKYSSWLENPSNVKAAKFLSKGFVIIWSRQCVSISCLQIGICFCFSKKQIRICEY

SEQ ID NO: 158604 - protein, 892 aa, Zea Mays
MATAVASQPCHLPLSAGGDPRCAARFICRSIVDVKTHKFHSRISKRKCYLRNSLSECDRTIHSGRWLEFRRHKGVFQRTRRMVHIIPLASDGDGNHISVNGALQVGSTSNIDEIKLKLNKALQSEDISNGLVQSIHDAARSIELALIEHSKLPKSSWFPKTWLGVENNAWIKSLSYQAAVDSLLKAVIDVSSRGNDRDRDINVFVQRSLSRLLTPLESVIKNELSKREPALYEWYSSDQNPLVVRQFVNIFENDPMFYSATAICLEGEPMNTSESDLSLLMLGLICLAAITKFGSAKVSCQQFSSMVPDIIGRFMDMLLEFAPLSKAYNLAKDIGLRREFLYNFGPRAAVPKLGNDHGLEISFWIELVQKQLLWALDREKIWSRLTTSESIEVLEKDLAIFGFFVALGRSTQGYLSFKGLTDLDDSLNGIVRYLIGGSVLYYPQLSSISSYQLYVEVVCEELEWLPFYNDDVLSAKTDTEGREEVPKGEVISRVLNVCSYWMTSFTKYSSWLENPSNVKAAKFLSKGHVMLSDCMKELDISRNMSNDSGFLEPEEELDTGTELASFDKSLENVEEALVKLENLLQELHVSSSHSGKEDLKAACSDLEMIRRLKKEAELLEASFLAKAEYLEADASSGSLSPAEEGPVKTSSRTNDTSAPQKTGSRVDNKRRPFWDFFGRSLKVDPALADQDLITVANVEKEGMESNDILRFEQLRRELIELEKRVQKSADEAQKEEEMVVAEKTTAPSPGSSVSSRQTTKKENVITKSVEKVKETTTTVLQGTQLLAIDTGAAMGLLKRALIGDELTQKEKQALQRTLTDLASVVPIGILMLLPLTAVGHAAILAFIQRYVPSMIPSTYAPGRLDLLRQIEKVKEMEVAEGSSEDILEELNK

SEQ ID NO: 158605 - protein, 620 aa, Zea Mays
MVFIRSKSFGGLICLAAITKFGSAKVSCQQFSSMVPDIIGRFMDMLLEFAPLSKAYNLAKDIGLRREFLYNFGPRAAVPKLGNDHGLEISFWIELVQKQLLWALDREKIWSRLTTSESIEVLEKDLAIFGFFVALGRSTQGYLSFKGLTDLDDSLNGIVRYLIGGSVLYYPQLSSISSYQLYVEVVCEELEWLPFYNDDVLSAKTDTEGREEVPKGEVISRVLNVCSYWMTSFTKYSSWLENPSNVKAAKFLSKGHVMLSDCMKELDISRNMSNDSGFLEPEEELDTGTELASFDKSLENVEEALVKLENLLQELHVSSSHSGKEDLKAACSDLEMIRRLKKEAELLEASFLAKAEYLEADASSGSLSPAEEGPVKTSSRTNDTSAPQKTGSRVDNKRRPFWDFFGRSLKVDPALADQDLITVANVEKEGMESNDILRFEQLRRELIELEKRVQKSADEAQKEEEMVVAEKTTAPSPGSSVSSRQTTKKENVITKSVEKVKETTTTVLQGTQLLAIDTGAAMGLLKRALIGDELTQKEKQALQRTLTDLASVVPIGILMLLPLTAVGHAAILAFIQRYVPSMIPSTYAPGRLDLLRQIEKVKEMEVAEGSSEDILEELNK

SEQ ID NO: 158606 - protein, 679 aa, Zea Mays
MATAVASQPCHLPLSAGGDPRCAASTSNVHTLEKVYGFRFICRSIVDVKTHKFHSRISKRKCYLRNSLSECDRTIHSGRWLEFRRHKGVFQRTRRMVHIIPLASDGDGNHISVNGALQVGSTSNIDEIKLKLNKALQSEDISNGLVQSIHDAARSIELALIEHSKLPKSSWFPKTWLGVENNAWIKSLSYQAAVDSLLKAVIDVSSRGNDRDRDINVFVQRSLSRLLTPLESVIKNELSKREPALYEWYSSDQNPLVVRQFVNIFENDPMFYSATAICLEGEPMNTSESDLSLLMLGLICLAAITKFGSAKVSCQQFSSMVPDIIGRFMDMLLEFAPLSKAYNLAKDIGLRREFLYNFGPRAAVPKLGNDHGLEISFWIELVQKQLLWALDREKIWSRLTTSESIEVLEKDLAIFGFFVALGRSTQGYLSFKGLTDLDDSLNGIVRYLIGGSVLYYPQLSSISSYQLYVEVVCEELEWLPFYNDDVLSAKTDTEGREEVPKGEVISRVLNVCSYWMTSFTKYSSWLENPSNVKAAKFLSKGHVMLSDCMKELDISRNMSNDSGFLEPEEELDTGTELASFDKSLENVEEALVKLENLLQELHVSSSHSGKEDLKAACSDLEMIRRLKKEAELLEASFLAKAEYLEADASSGSLSPAEEGPVKTSSRTNDTSAPQKTGSS

SEQ ID NO: 158607 - protein, 363 aa, Zea Mays
MLSDCMKELDISRNMSNDSGFLEPEEELDTGTELASFDKSLENVEEALVKLENLLQELHVSSSHSGKEDLKAACSDLEMIRRLKKEAELLEASFLAKAEYLEADASSGSLSPAEEGPVKTSSRTNDTSAPQKTGSRVDNKRRPFWDFFGRSLKVDPALADQDLITVANVEKEGMESNDILRFEQLRRELIELEKRVQKSADEAQKEEEMVVAEKTTAPSPGSSVSSRQTTKKENVITKSVEKVKETTTTVLQGTQLLAIDTGAAMGLLKRALIGDELTQKEKQALQRTLTDLASVVPIGILMLLPLTAVGHAAILAFIQRYVPSMIPSTYAPGRLDLLRQIEKVKEMEVAEGSSEDILEELNK

SEQ ID NO: 158608 - protein, 122 aa, Zea Mays
MATEAKQGEARWDKMMVMMERLTGKVDAMEKVHHQLLGQSELTADLVKQAADERTILSRRVEENGKALARMRLEAMAREMEDVGTGPESSDTGGRRGAIPNQDQGGRELQQHVPKMLFPKFG

SEQ ID NO: 158609 - protein, 526 aa, Zea Mays
MTIKNRFPMPLVDEILDELVGTQYFSSLDMTAGYHQIRMGLEDEYKTAFKTHHGHYQFRVMPFGLTNAPASFQCAMNSILEPYLRKFVMVFIDDILIYSADLTQHLEHLRLVFSTLRAQQFYLKRKKCVFAKSELQYLGHIISKDGVSTDPAKTQAMVDWPVPSSLTELRGFLGLTGYYRKFVRHYGAIAKPLTTLLQGKKRWEWTKEAQQAFDKLKQAMIQTPVLALPDFELPFVVETDACENGIGAVLMQQNRPVAFLSKALGVKNSQLSIYEKEFLALMMAVDRWRPYLQRSQFVIKTDHQSLTFLGEQQLQSEWQKKAMAKLMGLQFQIVYKKGKENVVADALSRVGMAMAISTVTELQPVWIQEVTNSYVTDSQAQQLLQKLAVHSPDEAGFSLHQGVIRKQQQIWIGQNSALRTKVISAFHDSVVGGHSGITATYQRVKRMFWWQGLKTDVESFVKQCSVCQQAKSEKQLPTGLLQPLPVPTGAWKDITMDFIEKLPKSEGYDTILVVVDRFSKYAHFYL

SEQ ID NO: 158610 - protein, 285 aa, Zea Mays
MLAARTPVSLSLHHRIVAGGHRGRCVGGSQRRRGGAPCRQFTQALQSLWRHSPPIPPPAPPAAGAATSGEAEPSRQPPVLENAAFEEYYKVSLVFLFGVIVSRTKWHGFRVLFFWMCVSVQQIVREEEWDAFMSVLRKPLPATFRINACLAWHLNFSRKELRKNQALESFHEFLKHESEVPPLFLNVQPDHHILDMCAAPGSKTFQLLEMIHQSKELGLLPGALDQLGPVNGSVWPVGRGAGMDCSGSYKDPCKLQKLEFDRILCDVPCSGDGTIRKGHDMWRKW

SEQ ID NO: 158611 - protein, 655 aa, Zea Mays
MLAARTPVSLSLHHRIVAGGHRGRCVGGSQRRRGGAPCRQFTQALQSLWRHSPPIPPPAPPAAGAATSGEAEPSRQPPVLENAAFEEYYKVSLVFLFGVIVSRTKWHGFRVLFFWMCVSVQQIVREEEWDAFMSVLRKPLPATFRINACLAWHLNFSRKELRKNQALESFHEFLKHESEVPPLFLNVQPDHHILDMCAAPGSKTFQLLEMIHQSKELGLLPGALDQLGPVNGSVWPVGRGAGMDCSGSYKDPCKLQKLEFDRILCDVPCSGDGTIRKGHDMWRKWNSGMGNQLHLLQVNIAMRGIALLKVGGRMVYSTCSLNPVENEAVIAELLRRSGNSVELLDVSSELPELVRRPGLSTWKVQDRESWFQSHDEVPHNRKNVVFPSMFPASNSTEESHTVCGDVEVNINNMNSFSRNINIEETSKLNQDMDGVSVSPTKILECTSNIVSSKFPLHRCMRIVPHDQNSGAFFIAVLHKLSPLNGSQIKDTKIQHRLGTDRTIQFQKEPKPETRPYETTLTRRQHNVSEVDDTEVLGRGQKLGTDSQTSKDKNSSEVEIVSILAESGDRMELQKQSRWEGVDPVLVLNDEAVIKSIQSFFGIKESFPLEGHLVTRSPDNARRIYYVSKSVKEILELNSKVGGQLKIASLGVKMFA

SEQ ID NO: 158612 - protein, 351 aa, Zea Mays
MFPASNSTEESHTVCGDVEVNINNMNSFSRNINIEETSKLNQDMDGVSVSPTKILECTSNIVSSKFPLHRCMRIVPHDQNSGAFFIAVLHKLSPLNGSQIKDTKIQHRLGTDRTIQFQKEPKPETRPYETTLTRRQHNVSEVDDTEVLGRGQKLGTDSQTSKDKNSSEVEIVSILAESGDRMELQKQSRWEGVDPVLVLNDEAVIKSIQSFFGIKESFPLEGHLVTRSPDNARRIYYVSKSVKEILELNSKVGGQLKIASLGVKMFERHRSKDPCPCAYRLSYDGLSLVLPSISKRILYASALEFHRLVQYRSISFAHFTDTRFGEQAASLTPGCCVVVLLEGNVYDLPEE

SEQ ID NO: 158613 - protein, 208 aa, Zea Mays
MELQKQSRWEGVDPVLVLNDEAVIKSIQSFFGIKESFPLEGHLVTRSPDNARRIYYVSKSVKEILELNSKVGGQLKIASLGVKMFERHRSKDPCPCAYRLSYDGLSLVLPSISKRILYASALEFHRLVQYRSISFAHFTDTRFGEQAASLTPGCCVVVLLEGNRRVDSICKDPSTIAVVCWRGKGTINVMVSPSDRKDLLERMAYRFG

SEQ ID NO: 158614 - protein, 489 aa, Zea Mays
MGNQLHLLQVNIAMRGIALLKVGGRMVYSTCSLNPVENEAVIAELLRRSGNSVELLDVSSELPELVRRPGLSTWKVQDRESWFQSHDEVPHNRKNVVFPSMFPASNSTEESHTVCGDVEVNINNMNSFSRNINIEETSKLNQDMDGVSVSPTKILECTSNIVSSKFPLHRCMRIVPHDQNSGAFFIAVLHKLSPLNGSQIKDTKIQHRLGTDRTIQFQKEPKPETRPYETTLTRRQHNVSEVDDTEVLGRGQKLGTDSQTSKDKNSSEVEIVSILAESGDRMELQKQSRWEGVDPVLVLNDEAVIKSIQSFFGIKESFPLEGHLVTRSPDNARRIYYVSKSVKEILELNSKVGGQLKIASLGVKMFERHRSKDPCPCAYRLSYDGLSLVLPSISKRILYASALEFHRLVQYRSISFAHFTDTRFGEQAASLTPGCCVVVLLEGNRRVDSICKDPSTIAVVCWRGKGTINVMVSPSDRKDLLERMAYRFG

SEQ ID NO: 158615 - protein, 258 aa, Zea Mays
MLAARTPVSLSLHHRIVAGGHRGRCVGGSQRRRGGAPCRQFTQALQSLWRHSPPIPPPAPPAAGAATSGEAEPSRQPPVLENAAFEEYYKVQQIVREEEWDAFMSVLRKPLPATFRINACCQFYKDICSKLENEFRRSLESEVSDMHGEDAITPLPWYPCSLAWHLNFSRKELRKNQALESFHEFLKHESEVGNITRQEAVSMVPPLFLNVQPDHHILDMCAAPGSKTFQLLEMIHQSKELGLLPGALVRFSLSCIWH

SEQ ID NO: 158616 - protein, 674 aa, Zea Mays
MNLGDLWRVSLAWHLNFSRKELRKNQALESFHEFLKHESEVGNITRQEAVSMVPPLFLNVQPDHHILDMCAAPGSKTFQLLEMIHQSKELGLLPGALVIANDLNMRRCDLLIHNTKRMCTANLIVTNHGAENFPYCSLAKDCSGSYKDPCKLQKLEFDRILCDVPCSGDGTIRKGHDMWRKWNSGMGNQLHLLQVNIAMRGIALLKVGGRMVYSTCSLNPVENEAVIAELLRRSGNSVELLDVSSELPELVRRPGLSTWKVQDRESWFQSHDEVPHNRKNVVFPSMFPASNSTEESHTVCGDVEVNINNMNSFSRNINIEETSKLNQDMDGVSVSPTKILECTSNIVSSKFPLHRCMRIVPHDQNSGAFFIAVLHKLSPLNGSQIKDTKIQHRLGTDRTIQFQKEPKPETRPYETTLTRRQHNVSEVDDTEVLGRGQKLGTDSQTSKDKNSSEVEIVSILAESGDRMELQKQSRWEGVDPVLVLNDEAVIKSIQSFFGIKESFPLEGHLVTRSPDNARRIYYVSKSVKEILELNSKVGGQLKIASLGVKMFERHRSKDPCPCAYRLSYDGLSLVLPSISKRILYASALEFHRLVQYRSISFAHFTDTRFGEQAASLTPGCCVVVLLEGNRRVDSICKDPSTIAVVCWRGKGTINVMVSPSDRKDLLERMAYRFG

SEQ ID NO: 158617 - protein, 267 aa, Zea Mays
MAMPSGWRGILGFHYGIVQAPLGPDISGPELVAAVANAGAIGLLRLPDWVGSLEEAAKAKEAGVDGIIVQGREAGGHVIGQEGLFPLLPRVVDLVSDSSIPVIAAGGIVDGRGYVAALALGAQGVCLGTRFVATEESFAHPIYKQKLIEMSHTDYTNIFGRARWPDAPQRVLETPFYDEWKNNFPDQETEEDQPIIGHSIIHGVHKDIRRFAGTVPNATATGDIDIMAMYSGQGVGLITEIIPAAQVVKSLVAEAKEVIREKLSGYQ

SEQ ID NO: 158618 - protein, 908 aa, Zea Mays
MILHLAKMCAPCFPAPREVIFLLARMFLHTSWHFLGIQSSNQPLISMKAQDNLTRVLTMVMIVYSSDPNDVNERNLNKANVYQCQKCNLTFGDRTSYAQHHLAYHEMSVKRRRTGKFGEPVVGKDGKFECPICHKTFEEEPQYFGHVGSHARYEGLAPEAFLDKATSRRAANDSLAEIPFSLQELTESHGQNNKVSYGEKGFQHHNHSNKHGDNNLTAIDLFGTNYSDNFIRPNKTWGSPEEGPSCNDAPSVSRYTNFTGHADVIVSERASISNNQSVSNINGFIFSDQPGGNHVVRPTASVTANHYEDQIIDRGRAAPNADNNTVKARDVNLNSCASASTISFPIAYANNETSAALNEANRSSSTAKCFSGSFNNNDGACSASSSCGPTNKISSSFGTSSKTQAAGSRSIGASYEPYGEDCSALKANPFASKNNTSVYQYNLATQPVYAVAARADCFASGSEQTKNSDKELASSAKQRIDNVENRTSKEAGFVAEAYNSGAFNGGITEKGFAQISNSFTHIKSNASGSCSLPESKTPTNGSDSNCIKGSLVNRGDDSFTKVSIVNRPINNNESNVARLEAMGKLNDEMQNRYNYHAPGIDPHVAASASRNANGFMPMQANFGCMSSTVQSVVDVSVSSTSQDQKQQIFSNHGELRTATPGSPLPGSIARKDSVPTEPSHFGSMNGPKSFPTGTSQFGGFAKPTFVPAAPSQFGSMAQANYVHSAQSSQFTSWVQPNSIPPAESSQFGSKAQSSSVPPANTSQFRGMAGQNSVPPAQSFGSTVRPNYVTPESSQFGSMARPNSVPPQYVNMPSQNFVSSSEPTLVLGYAPQIGSGPPPQVQLGWDLSLPRMVTGGSMVTCLCIWCNSQFHHFGPVDGQQPSSFGFICPTCKDRMSGHHSVPNNGSWQP

SEQ ID NO: 158619 - protein, 659 aa, Zea Mays
MILHLAKMCAPCFPAPREVIFLLARMFLHTSWHFLGIQSSNQPLISMKAQDNLTRVLTMVMIVYSSDPNDVNERNLNKANVYQCQKCNLTFGDRTSYAQHHLAYHEMSVKRRRTGKFGEPVVGKDGKFECPICHKTFEEEPQYFGHVGSHARYEGLAPEAFLDKATSRRAANDSLAEIPFSLQELTESHGQNNKVSYGEKGFQHHNHSNKHGDNNLTAIDLFGTNYSDNFIRPNKTWGSPEEGPSCNDAPSVSRYTNFTGHADVIVSERASISNNQSVSNINGFIFSDQPGGNHVVRPTASVTANHYEDQIIDRGRAAPNADNNTVKARDVNLNSCASASTISFPIAYANNETSAALNEANRSSSTAKCFSGSFNNNDGACSASSSCGPTNKISSSFGTSSKTQAAGSRSIGASYEPYGEDCSALKANPFASKNNTSVYQYNLATQPVYAVAARADCFASGSEQTKNSDKELASSAKQRIDNVENRTSKEAGFVAEAYNSGAFNGGITEKGFAQISNSFTHIKSNASGSCSLPESKTPTNGSDSNCIKGSLVNRGDDSFTKVSIVNRPINNNESNVARLEAMGKLNDEMQNRYNYHAPGIDPHVAASASRNANGFMPMQANFGCMSSTVQSVVDVSVSSTSQDQVNIPEFVGFLNCCTF

SEQ ID NO: 158620 - protein, 61 aa, Zea Mays
MPSSPWPPAAGAPPPQQRAAQGTVSTVAPERLPVEVPLPSLCVSRSRASCLHSARTKAQLT

SEQ ID NO: 158621 - protein, 125 aa, Zea Mays
MEPIIAMLQAVIGIMMSSRWVNTPELHQLLLIFMQLWCCRSMASTVRHGMVDDGALVLLPPAPGVFCSLLLGPCDVSISRSTCACACTEFRFTGILCDKHLNEWDRMLVVRFKTRLFDTHILKLV

SEQ ID NO: 158622 - protein, 246 aa, Zea Mays
MTRSVTMTSKEARRTWTAVSRGACVGAAGSPRTVPAVRASVAVRDADRPQLDGDTEAAGHVQGGVRRLRPQRGGADGGGGRGGDQRRQGAEDRRVQGPVHRGERQVHPEGGQGVRLLQRLHVGPREPPAGGGQVPPPQVHPVPDAQVGGGEQGPRPPGLPPRRPRHRLLFHAGRRHGHRPPRRLLPLPRLRPPRRALLGHHQRRRVGVASRPLNICACMPLQVFHTFFLVLLLFFCLEIGIVCEIT

SEQ ID NO: 158623 - protein, 235 aa, Zea Mays
MVSREMRREDDDKVSDHDVEGGEEDLDCSEPGSLRRCSWITKNSDEAYVQFHDECWGVPVYSDNRLFELLSLSGMLIDHNWTEILKRRDMYREAFADFDPSAVARMEEEDVAEISGDRELRIAECRVRCIVENARCIQRVAREFGSFSGYMWGHVNHRPVVGKYRHHKYIPFRTPKSEAVSKDLVRRGFRLVGPVIVYSFMQAAGMAIDHLVDCFRFHDCVRLAERSWGITNVAA

SEQ ID NO: 158624 - protein, 167 aa, Zea Mays
MEFVFTGKHATGEFSVIEAPFDRSGRQEDDAVGNVNLDQEPADLNGDSSQHDFDTLAESDSPNPVGSKRRHEEKEKEKEKEWKWARQGVPIFMQALSEAVSFTHGGTDPYEGIYKAIEDMDEYPLPARLDLLTYLAQNRHIASMLKGRQEETFKQWVARWVAGHYPL

SEQ ID NO: 158625 - protein, 490 aa, Zea Mays
MKAKGDGWLLTVALIDGIKLAPVDATGLSDPYVVFTCNGKTRTSSIKFQTLEPQWNEIFEFDAMDDPPSVMSVHVYDFDGPFDEVTSLGHAEINFVKSNLSELADVWIPLKGNLAQSWQSKLHLRIFLNNSKGTGMVTEYLSKMEKEVGKKMTLRSPRTNTAFQELFSLPAEEFLISSFTCYLKRKLPTQGQVFLSPRTIGFYSSMFGRKTKFYFLWEDIEDIQGIPQSISSWSPSIIITLHKGRGMDTKHGAKSMDNGKLKFCLQSFASFSVANRTIMALWKARSLSTELKVQLAEEQSQINTLQSEDSGVFVGIEDAKSLQMTEVFSSTISTNMASLMEVFAGGSLEMKVMDKVGCQKYSATQWESDKPNEYQRQIHYKFSKKLSPVGGEVTGTQQKSLMPNKKGWVIEEVMELQGVLLGDFFTLHIKYQVEDLAPKQRASNVQVSLGIEWSKSTRHQKRIEKNVLSSSSARLKEMFNLASRELSHAR

SEQ ID NO: 158626 - protein, 611 aa, Zea Mays
MRLSVRVIEARNLRAMDSNGFSDPYVKLQLGKQRFKTKVIKMNLNPTWDQEFSFLVGDIKDVLKLDVYDEDILQMDDFLGHLRVPLEDVLSADDLSLGTRWYQLLPKGKTNKTVDCGGDHGMKAKGDGWLLTVALIDGIKLAPVDATGLSDPYVVFTCNGKTRTSSIKFQTLEPQWNEIFEFDAMDDPPSVMSVHVYDFDGPFDEVTSLGHAEINFVKSNLSELADVWIPLKGNLAQSWQSKLHLRIFLNNSKGTGMVTEYLSKMEKEVGKKMTLRSPRTNTAFQELFSLPAEEFLISSFTCYLKRKLPTQGQVFLSPRTIGFYSSMFGRKTKFYFLWEDIEDIQGIPQSISSWSPSIIITLHKGRGMDTKHGAKSMDNGKLKFCLQSFASFSVANRTIMALWKARSLSTELKVQLAEEQSQINTLQSEDSGVFVGIEDAKSLQMTEVFSSTISTNMASLMEVFAGGSLEMKVMDKVGCQKYSATQWESDKPNEYQRQIHYKFSKKLSPVGGEVTGTQQKSLMPNKKGWVIEEVMELQGVLLGDFFTLHIKYQVEDLAPKQRASNVQVSLGIEWSKSTRHQKRIEKNVLSSSSARLKEMFNLASRELSHAR

SEQ ID NO: 158627 - protein, 629 aa, Zea Mays
MIKSMIENGARQGLEQNYAQFSDLLSQKIKPIDVEGSGSDKEQVLASLQGGEESDWKIAFLYFCNFGVLSSFFVSLYIILHVLRVNPSAVQGLEFPGLDLPDSLSEIIMGGLLFLQVQRILKNITCFLQAREQKGGDHGMKAKGDGWLLTVALIDGIKLAPVDATGLSDPYVVFTCNGKTRTSSIKFQTLEPQWNEIFEFDAMDDPPSVMSVHVYDFDGPFDEVTSLGHAEINFVKSNLSELADVWIPLKGNLAQSWQSKLHLRIFLNNSKGTGMVTEYLSKMEKEVGKKMTLRSPRTNTAFQELFSLPAEEFLISSFTCYLKRKLPTQGQVFLSPRTIGFYSSMFGRKTKFYFLWEDIEDIQGIPQSISSWSPSIIITLHKGRGMDTKHGAKSMDNGKLKFCLQSFASFSVANRTIMALWKARSLSTELKVQLAEEQSQINTLQSEDSGVFVGIEDAKSLQMTEVFSSTISTNMASLMEVFAGGSLEMKVMDKVGCQKYSATQWESDKPNEYQRQIHYKFSKKLSPVGGEVTGTQQKSLMPNKKGWVIEEVMELQGVLLGDFFTLHIKYQVEDLAPKQRASNVQVSLGIEWSKSTRHQKRIEKNVLSSSSARLKEMFNLASRELSHAR

SEQ ID NO: 158628 - protein, 675 aa, Zea Mays
MHKKGITCLAGRMVSDTIAIFASTSSDGQGGYLILAMGGLDHKIHIYCGDKAGKFIKACELKGHSDWIRSLDFSLPVMMDGERHNLFLVSSSQDRTIRIWKMTSEAAASGSSLQLRKETIEMTSYIEGPLFVAGSTSYQVSLESLLVGHEDWVYSVEWQPPTLLTGDEAHQPMSILSASMDKMMMIWRPEKTTGLWIDSVTVGELSHSALGFYGGLWQPDGRSILAHGYGGSFHMWRDVGLDSENWQPQIVPSGHFAPVSDLTWARSGQYLLSVSHDQTTRIFAPWRNQVNPGDMIYWREIARPQIHGHDLNCVTFIQGSGNHRFVSGADEKVSRVFEAPLSFLKTLQQATLLKPDISEDFDNVQVLGANMSALGLSQKPIYTHGVKESSISNSNDGPDSMETIPDAVPTVFTEPPVEDQLAWNTLWPESHKLYGHGNELFSICCDYEGKLVASSCKAQSAAVAEIWLWEVGTWKAVARLQSHSLTVTQMEFSRNNAFLLSVSRDRHLSIFSIRKTEGGAEHRLVAKLEAHKRIIWACSWNPFGYEFATGSRDKSVKIWCVEDASSVKLLATLPQFRDSVTALAWMGRDRASNAGIVAAGMDNGLIELWSVSGGRASSGTQLSVACVLRFDPLLCHVSTVHRLRWRCSTDEKSTLELASCGADHTVRVFEVCGSI

SEQ ID NO: 158629 - protein, 598 aa, Zea Mays
MMDGERHNLFLVSSSQDRTIRIWKMTSEAAASGSSLQLRKETIEMTSYIEGPLFVAGSTSYQVSLESLLVGHEDWVYSVEWQPPTLLTGDEAHQPMSILSASMDKMMMIWRPEKTTGLWIDSVTVGELSHSALGFYGGLWQPDGRSILAHGYGGSFHMWRDVGLDSENWQPQIVPSGHFAPVSDLTWARSGQYLLSVSHDQTTRIFAPWRNQVNPGDMIYWREIARPQIHGHDLNCVTFIQGSGNHRFVSGADEKVSRVFEAPLSFLKTLQQATLLKPDISEDFDNVQVLGANMSALGLSQKPIYTHGVKESSISNSNDGPDSMETIPDAVPTVFTEPPVEDQLAWNTLWPESHKLYGHGNELFSICCDYEGKLVASSCKAQSAAVAEIWLWEVGTWKAVARLQSHSLTVTQMEFSRNNAFLLSVSRDRHLSIFSIRKTEGGAEHRLVAKLEAHKRIIWACSWNPFGYEFATGSRDKSVKIWCVEDASSVKLLATLPQFRDSVTALAWMGRDRASNAGIVAAGMDNGLIELWSVSGGRASSGTQLSVACVLRFDPLLCHVSTVHRLRWRCSTDEKSTLELASCGADHTVRVFEVCGSI

SEQ ID NO: 158630 - protein, 523 aa, Zea Mays
MHKKGITCLAGRMVSDTIAIFASTSSDGIVVIWEMAIEPTTGGDCKVTCLHSLSVGLKPMVSLSLAVLPGQGGYLILAMGGLDHKIHIYCGDKAGKFIKACELKGHSDWIRSLDFSLPVMMDGERHNLFLVSSSQDRTIRIWKMTSEAAASGSSLQLRKETIEMTSYIEGPLFVAGSTSYQVSLESLLVGHEDWVYSVEWQPPTLLTGDEAHQPMSILSASMDKMMMIWRPEKTTGLWIDSVTVGELSHSALGFYGGLWQPDGRSILAHGYGGSFHMWRDVGLDSENWQPQIVPSGHFAPVSDLTWARSGQYLLSVSHDQTTRIFAPWRNQVNPGDMIYWREIARPQIHGHDLNCVTFIQGSGNHRFVSGADEKVSRVFEAPLSFLKTLQQATLLKPDISEDFDNVQVLGANMSALGLSQKPIYTHGVKESSISNSNDGPDSMETIPDAVPTVFTEPPVEDQLAWNTLWPESHKLYGHGNELFSICCDYEGKLVASSCKQQLQRSGSGRLEHGKLLPACNLTV

SEQ ID NO: 158631 - protein, 690 aa, Zea Mays
MHKKGITCLAGRMVSDTIAIFASTSSDGIVVIWEMAIEPTTGGQGGYLILAMGGLDHKIHIYCGDKAGKFIKACELKGHSDWIRSLDFSLPVMMDGERHNLFLVSSSQDRTIRIWKMTSEAAASGSSLQLRKETIEMTSYIEGPLFVAGSTSYQVSLESLLVGHEDWVYSVEWQPPTLLTGDEAHQPMSILSASMDKMMMIWRPEKTTGLWIDSVTVGELSHSALGFYGGLWQPDGRSILAHGYGGSFHMWRDVGLDSENWQPQIVPSGHFAPVSDLTWARSGQYLLSVSHDQTTRIFAPWRNQVNPGDMIYWREIARPQIHGHDLNCVTFIQGSGNHRFVSGADEKVSRVFEAPLSFLKTLQQATLLKPDISEDFDNVQVLGANMSALGLSQKPIYTHGVKESSISNSNDGPDSMETIPDAVPTVFTEPPVEDQLAWNTLWPESHKLYGHGNELFSICCDYEGKLVASSCKAQSAAVAEIWLWEVGTWKAVARLQSHSLTVTQMEFSRNNAFLLSVSRDRHLSIFSIRKTEGGAEHRLVAKLEAHKRIIWACSWNPFGYEFATGSRDKSVKIWCVEDASSVKLLATLPQFRDSVTALAWMGRDRASNAGIVAAGMDNGLIELWSVSGGRASSGTQLSVACVLRFDPLLCHVSTVHRLRWRCSTDEKSTLELASCGADHTVRVFEVCGSI

SEQ ID NO: 158632 - protein, 794 aa, Zea Mays
MPDILNWFGWCTWDAFYTNVTAQGVKQGLQSLEKGGVSPRFVIIDDGWQSVAMDPVGIACLSDNSANFANRLTHIRENHKFQKNGREGHREDDPAKGLAHVVNEIKGKHQLKYVYVWHAITGYWGGVRPGAAGMEHYGSKMQRPVPSPGVQKNERCEALDSMTANGLGLVNLDRAFSFYDELHSYLASAGIDGVKVDVQNVLETLGAGHGGRVMLARKYQQALEASVARNFPDNGIISCMSHSTDNLYSSKRSAVIRASDDFWPRDPASHTIHVASVAYNTVFLGEFMQPDWDMFHSVHPMAEYHAAARAVGGCAIYVSDKPGSHDFNLLKKLVLPDGSILRAKLPGRPTRDCLFSDPARDGKSVLKIWNLNEHSGVVGAFNCQGAGWCRVAKKNLIHDQQPGTVSGVIRAQDVEHLARVADHGWNGDVVVYSHVGGEVVYLSKNALLSVTLRSHEYEVFTVVPLKHLPNDVSFATIGLLGMFNSGGAVRELKFGGEDADVELRVRGSGTVFFFLDWVKYLLNNARLFKSFLRITLTCVITVGTLALGIGTASGYISPWTVRFYSLLDPTYAKDHIPIIASVSEHQPTAWSSFMFDFHILLFLFPAGLYFCFKHLSDATIFIVMYGLTSMYFAGVMVWLILVAAPAVCLISAIAASATIKNLTTLIRTKGRSPQTTSGKTTGSKSAAKCSKTKTLLQDQDQDLAVPEDLLPGSVLGASTLFSTHFFHARAASASSSRSTDWSRELHDARALGTDDLADREDSSELSLADASSAFIVATSAVATAVASTGRGFRV

SEQ ID NO: 158633 - protein, 748 aa, Zea Mays
MTVGAGIAVQDGSLLALGAKVLREVRGNVLVTPAAGGGLTNGAFLGVRSAPAASRSIFPVGKLRDQRFVCTFRFKMWWMTQRMGSAGRDIPSETQFLLVEVSGGGEQPAVVYTVFLPVLEGSFRAVLQGNADDELEICLESGDPDVESFQGSHLVFVGAGSDPFEVITSSVKAVERHLQTFSHREKKKMPDILNWFGWCTWDAFYTNVTAQGVKQGLQSLEKGGVSPRFVIIDDGWQSVAMDPVGIACLSDNSANFANRLTHIRENHKFQKNGREGHREDDPAKGLAHVVNEIKGKHQLKYVYVWHAITGYWGGVRPGAAGMEHYGSKMQRPVPSPGVQKNERCEALDSMTANGLGLVNLDRAFSFYDELHSYLASAGIDGVKVDVQNVLETLGAGHGGRVMLARKYQQALEASVARNFPDNGIISCMSHSTDNLYSSKRSAVIRASDDFWPRDPASHTIHVASVAYNTVFLGEFMQPDWDMFHSVHPMAEYHAAARAVGGCAIYVSDKPGSHDFNLLKKLVLPDGSILRAKLPGRPTRDCLFSDPARDGKSVLKIWNLNEHSGVVGAFNCQGAGWCRVAKKNLIHDQQPGTVSGVIRAQDVEHLARVADHGWNGDVVVYSHVGGEVVYLPKNTLLPVTLRSREYEVFTVVPLKHLPNGVSFAEIGLLGMFNSSGAVRELRFSGEDADVELRVRGSGTVGAYSSTKPRCVAVNSKAVGFSYDGTCGLISFELDIPDQEMYLWTVTVGY

SEQ ID NO: 158634 - protein, 79 aa, Zea Mays
MARLEMTDGRFHRPRAVLKLVVELAFLCRHAFLHQHRHMRCLLGLNRCSTRPGSITNLKRVAMACLLRKPSGIRHVLKV

SEQ ID NO: 158635 - protein, 594 aa, Zea Mays
MMHGLLEIFEQIKQSLSSQREGIDFMAAIFPTIKAIQAAITLGTGCSLGPEGPSVDIGKSCANGCAEMMENNRERRIALVAAGSAAGIASGFNAAVAGCFFAIETVLRPLRAENSPPFTTAMIILASVISSTVSNVLLGEKAAFIVPTYELKSAAELPLYLILGMLCGVVSVAFRQLVVWFTKTFDLIKKKFGLPAVVCPALGGLGAGLIALRYPGILYWGFTNVDEILHTGKSASAPGIWLLAQLAAAKVVATALCKGSGLVGGLYAPSLMIGAAVGAVFGGSAAELINSAIPGNTAVAHPQAYALVGMAATLASVCSVPLTSVLLLFELTKDYRILLPLMGAVGLAIWVPSVVNQSGSKDTFEATSPRHGYSSLLPPTDRNETDWRRQDGDDVELTILDVDPYHYGSNNEEMLLDDLKVSQAMTKHYVKVTPTFTIEETTRLMQEKQQSCVVVVDNEDFLEGIVTLGDLRRKGFVPSENSDSTQANSSTVDANSSLVSSCLTRGFQFHGNERGLVTCFPDTDLSTAKVLMEVKGIKQLPVVKRGAGRRNDGRRKVLGLLHYDSIGWCLREELERWKAIYQRENFQQTAVNGH

SEQ ID NO: 158636 - protein, 677 aa, Zea Mays
MALRHLVTGQNNCVPDGASSSNPLNALANAFLGQSSKAQSIKELPGSVNVPSTSDFSVSAPLSNIPGSENEFKQDQRPLARGADFIRGGPANDWIESFRPPRVPQLGVEAQFPDFEQIYNNAGTTFQFQPPLDGPPQRVLSGVLHSFLTSGPAGVPFQPLPVPAALGLSESDKQCIRDRSCIMARHIFSDQPEEYIQSQVNTLLHSLDIDNRMRGPMHGQYPELQEYWKQSQSSTRPAPMHNAADKWITEFGKQNNNPENWANSFEQQYGPNGWASEFEQSQMAMRQMGGANMANLAAMEQSRVLAQTLASNNDPKFQLSQGADKWVSEFSSQPNHGALNENWVDEFSKLNVTDEWAEEFSGGGFGESSADPWVDEFQEHLSSFKQSPGASRGVYVFSENNPYVGHPNPMQEGQELFRKGLLSEAVLALEAEVLKNPDNTEGWRLLGVTHAENDDDQQAIAAMMRALEANPTNLEVLLALGVSHTNELEQGEALRYLYRWLQNQPKYGGLVPLQSTDSPYGPDVVRLFNEAAQMSPEDADVHIVLGVLYNLSREYDKAIASFKTALQLKPQDYSLWNKLGATQANSIQSADAILAYQQALDLKPNYVRAWANMGISYANQGLYEDSIRYYVRAVAMNPKADNAWQYLRISLSNASRADMIAACDARNLDALQKEFPL

SEQ ID NO: 158637 - protein, 596 aa, Zea Mays
MALRHLVTGQNNCVPDGASSSNPLNALANAFLGQSSKAQSIKELPGSVNVPSTSDFSVSAPLSNIPGSENEFKQDQRPLARGADFIRGGPANDWIESFRPPRVPQLGVEAQFPDFEQIYNNAGTTFQFQPPLDGPPQRVLSGVLHSFLTSGPAGVPFQPLPVPAALGLSESDKQCIRDRSCIMARHIFSDQPEEYIQSQVNTLLHSLDIDNRMRGPMHGQYPELQEYWKQSQSSTRPAPMHNAADKWITEFGKQNNNPENWANSFEQQYGPNGWASEFEQHQSQMAMRQMGGANMANLAAMEQSRVLAQTLASNNDPKFQNSKFFQFVSKMSRGELIIEDNQVKEGSASQSSGWADEFQTPYIANANSWADQFAHEELSQGADKWVSEFSSQPNHGALNENWVDEFSKLNVTDEWAEEFSGGGFGESSADPWVDEFQEHLSSFKQSPGASRGVYVFSENNPYVGHPNPMQEGQELFRKGLLSEAVLALEAEVLKNPDNTEGWRLLGVTHAENDDDQQAIAAMMRALEANPTNLEVLLALGVSHTNELEQGEALRYLYRWLQNQPKYGGLVPLQSTDSPYGPDVSIRLHAISVYVSV

SEQ ID NO: 158638 - protein, 734 aa, Zea Mays
MALRHLVTGQNNCVPDGASSSNPLNALANAFLGQSSKAQSIKELPGSVNVPSTSDFSVSAPLSNIPGSENEFKQDQRPLARGADFIRGGPANDWIESFRPPRVPQLGVEAQFPDFEQIYNNAGTTFQFQPPLDGPPQRVLSGVLHSFLTSGPAGVPFQPLPVPAALGLSESDKQCIRDRSCIMARHIFSDQPEEYIQSQVNTLLHSLDIDNRMRGPMHGQYPELQEYWKQSQSSTRPAPMHNAADKWITEFGKQNNNPENWANSFEQQYGPNGWASEFEQSQMAMRQMGGANMANLAAMEQSRVLAQTLASNNDPKFQNSKFFQFVSKMSRGELIIEDNQVKEGSASQSSGWADEFQTPYIANANSWADQFAHEELSQGADKWVSEFSSQPNHGALNENWVDEFSKLNVTDEWAEEFSGGGFGESSADPWVDEFQEHLSSFKQSPGASRGVYVFSENNPYVGHPNPMQEGQELFRKGLLSEAVLALEAEVLKNPDNTEGWRLLGVTHAENDDDQQAIAAMMRALEANPTNLEVLLALGVSHTNELEQGEALRYLYRWLQNQPKYGGLVPLQSTDSPYGPDVVRLFNEAAQMSPEDADVHIVLGVLYNLSREYDKAIASFKTALQLKPQDYSLWNKLGATQANSIQSADAILAYQQALDLKPNYVRAWANMGISYANQGLYEDSIRYYVRAVAMNPKADNAWQYLRISLSNASRADMIAACDARNLDALQKEFPL

SEQ ID NO: 158639 - protein, 399 aa, Zea Mays
MALRHLVTGQNNCVPDGASSSNPLNALANAFLGQSSKAQSIKELPGSVNVPSTSDFSVSAPLSNIPGSENEFKQDQRPLARGADFIRGGPANDWIESFRPPRVPQLGVEAQFPDFEQIYNNAGTTFQFQPPLDGPPQRVLSGVLHSFLTSGPAGVPFQPLPVPAALGLSESDKQCIRDRSCIMARHIFSDQPEEYIQSQVNTLLHSLDIDNRMRGPMHGQYPELQEYWKQSQSSTRPAPMHNAADKWITEFGKQNNNPENWANSFEQQYGPNGWASEFEQHQSQMAMRQMGGANMANLAAMEQSRVLAQTLASNNDPKFQNSKFFQFVSKMSRGELIIEDNQVKEGSASQSSGWADEFQTPYIANANSWADQFAHEEVPRTLVIFQTKSGRLSRGLCFF

SEQ ID NO: 158640 - protein, 726 aa, Zea Mays
MALRHLVTGQNNCVPDGASSSNPLNALANAFLGQSSKAQSIKELPGSVNVPSTSDFSVSAPLSNIPGSENEFKQDQRPLARGADFIRGGPANDWIESFRPPRVPQLGVEAQFPDFEQIYNNAGTTFQFQPPLDGPPQRVLSGVLHSFLTSGPAGVPFQPLPVPAALGLSESDKQCIRDRSCIMARHIFSDQPEEYIQSQVNTLLHSLDIDNRMRGPMHGQYPELQEYWKQSQSSTRPAPMHNAADKWITEFGKQNNNPENWANSFEQQYGPNGWASEFEQHQSQMAMRQMGGANMANLAAMEQSRVLAQTLASNNDPKFQMSRGELIIEDNQVKEGSASQSSGWADEFQTPYIANANSWADQFAHEELSQGADKWVSEFSSQPNHGALNENWVDEFSKLNVTDEWAEEFSGGGFGESSADPWVDEFQEHLSSFKQSPGASRGVYVFSENNPYVGHPNPMQEGQELFRKGLLSEAVLALEAEVLKNPDNTEGWRLLGVTHAENDDDQQAIAAMMRALEANPTNLEVLLALGVSHTNELEQGEALRYLYRWLQNQPKYGGLVPLQSTDSPYGPDVVRLFNEAAQMSPEDADVHIVLGVLYNLSREYDKAIASFKTALQLKPQDYSLWNKLGATQANSIQSADAILAYQQALDLKPNYVRAWANMGISYANQGLYEDSIRYYVRAVAMNPKADNAWQYLRISLSNASRADMIAACDARNLDALQKEFPL

SEQ ID NO: 158641 - protein, 497 aa, Zea Mays
MARHIFSDQPEEYIQSQVNTLLHSLDIDNRMRGPMHGQYPELQEYWKQSQSSTRPAPMHNAADKWITEFGKQNNNPENWANSFEQQYGPNGWASEFEQHQSQMAMRQMGGANMANLAAMEQSRVLAQTLASNNDPKFQLSQGADKWVSEFSSQPNHGALNENWVDEFSKLNVTDEWAEEFSGGGFGESSADPWVDEFQEHLSSFKQSPGASRGVYVFSENNPYVGHPNPMQEGQELFRKGLLSEAVLALEAEVLKNPDNTEGWRLLGVTHAENDDDQQAIAAMMRALEANPTNLEVLLALGVSHTNELEQGEALRYLYRWLQNQPKYGGLVPLQSTDSPYGPDVVRLFNEAAQMSPEDADVHIVLGVLYNLSREYDKAIASFKTALQLKPQDYSLWNKLGATQANSIQSADAILAYQQALDLKPNYVRAWANMGISYANQGLYEDSIRYYVRAVAMNPKADNAWQYLRISLSNASRADMIAACDARNLDALQKEFPL

SEQ ID NO: 158642 - protein, 52 aa, Zea Mays
MPFTFDNNSIVIYRGLNSLFIFKSVSFCCYHTEAFLLTPSALYQPSYYSGLL

SEQ ID NO: 158643 - protein, 185 aa, Zea Mays
MMVLVPGEANFVISSKMDGNRIARFSVTWRGSQLDVDADPSCTVKEFGQLLQDLTSVRPETLKLIVPRSTNKGSKLIMPFSDAHSRLTLNGVGISEGKPIRMMGVYDDEIEEVSDNGKRPDQRIIGFDEEEQRLRQRSLGRPQISLKLPQGQYIFCDFRTLHLPGIEPDPARSQGPKRTTSCRRI

SEQ ID NO: 158644 - protein, 175 aa, Zea Mays
MRLRSKMDGNRIARFSVTWRGSQLDVDADPSCTVKEFGQLLQDLTSVRPETLKLIVPRSTNKGSKLIMPFSDAHSRLTLNGVGISEGKPIRMMGVYDDEIEEVSDNGKRPDQRIIGFDEEEQRLRQRSLGRPQISLKLPQGQYIFCDFRTLHLPGIEPDPARSQGPKRTTSCRRI

SEQ ID NO: 158645 - protein, 92 aa, Zea Mays
MPSNSHNYLAYDIMLRPDFSKNEDGHQFEHIIKHLRSVELNLLLHLFLQGFYSISHTSTHIKHHISRILTRTSKTTKKFRDHHGSSRGGWAS

SEQ ID NO: 158646 - protein, 635 aa, Zea Mays
MQRRACADVPCSESRTKRVLIDASCMNGCRSFWALRCGLEWAAQTGLSRDFGWATVGSATTSRGDCATTSEGASESGPWCAEHSVSMAAALCLQRQSLAANPFLFSAHGLRYRKLEVILTTSQENKDTYACTSESICYDVLPPAVSQGGYICKCSHGLQGNPYLQNNCTDIDECTIPNKCNGICHNFNGGFNCTSCPHGKEYDPKKQKCVMSAKQCILIFGIVIGLVCGLGSISFALGAIVLTGKWKKGIQRRIRREYFKKNQGLLLEQLISNENATTKTKIFTLDELEEATNKFDATRVLGHGGHGTVYKGILSDQRVVAIKKSKIVEQIEIDQFINEVAILSQIIHRNVVKLFGCCLEDEVPLLVYEFISNGTLYDILHENIATKCLLSLDDRIRIATEASGALAYLHSAAAIPIFHRDVKSSNILLDDNFTVKVSDFGASRSLSLDETHVVTIVQGTFGYLDPEYYYTGSLTEKSDVYSFGVILVELLTRKKPIFINESGAKQNLSHYFIEGLQEGTLMEIIDSQVVEEADQEEINDISSLIEVCLRSKGGHRPSMKEVDMRLQCLRTKRLRNKTHLLIEKGGEMEPLLCAEAQHPHERINPIYNEEHLIIPVMSGCYSLEQELAAASSMVR

SEQ ID NO: 158647 - protein, 606 aa, Zea Mays
MESANTGYGVCEGLGCCSIPIRGRQGFTLKLGRLNSTIPQFGEALSSVKIIVSQNYKFVTDDVYASWVNTSNVNEMIFYITIMDQPNCASAQSQENKDTYACTSESICYDVLPPAVSQGGYICKCSHGLQGNPYLQNNCTDIDECTIPNKCNGICHNFNGGFNCTSCPHGKEYDPKKQKCVMSAKQCILIFGIVIGLVCGLGSISFALGAIVLTGKWKKGIQRRIRREYFKKNQGLLLEQLISNENATTKTKIFTLDELEEATNKFDATRVLGHGGHGTVYKGILSDQRVVAIKKSKIVEQIEIDQFINEVAILSQIIHRNVVKLFGCCLEDEVPLLVYEFISNGTLYDILHENIATKCLLSLDDRIRIATEASGALAYLHSAAAIPIFHRDVKSSNILLDDNFTVKVSDFGASRSLSLDETHVVTIVQGTFGYLDPEYYYTGSLTEKSDVYSFGVILVELLTRKKPIFINESGAKQNLSHYFIEGLQEGTLMEIIDSQVVEEADQEEINDISSLIEVCLRSKGGHRPSMKEVDMRLQCLRTKRLRNKTHLLIEKGGEMEPLLCAEAQHPHERINPIYNEEHLIIPVMSGCYSLEQELAAASSMVR

SEQ ID NO: 158648 - protein, 205 aa, Zea Mays
MGCSTKCLVGQRVVESIIDLDVLGIFSCNPAAHVAPARRCHLPARPYRVHRCPMPRCATLAAAAHCPYVLPLSCLRVVRTNAQQQHPGVLCCRFWCPAPLMPLDAILPVVLPHKTAAATTPQWRVLHLVASWCPSCSFGFALLSGTRWHVHLHAMCAVISTELFMVSCFVVSGSVRLMDIIYFGNHNDSLCVAQMCRGYIKSWLN

SEQ ID NO: 158649 - protein, 101 aa, Zea Mays
MPTVCSAHQRSLPPSDVAAQSPRLVVADPTVAQPKSRDRPVWAAHSSPQRSAQKLRHPFMHDASMSTRFVRESLHGICTSLHPNIEPSRAVFTRGQIFNNF

SEQ ID NO: 158650 - protein, 57 aa, Zea Mays
MRVTSINNRLLSKFRRIDPCFVQHFFKYKSFKIEHSSMKGLFFPEHSLIDLISLNDP

SEQ ID NO: 158651 - protein, 538 aa, Zea Mays
MSSYIHSIRKLVRMDYISSPEIGFLRNISARVRRRTKLVFSFLDKKLLDHSVNQTYGSLARNLTFVRSVASGILVPKDYIWPVTADNYLLPSTSIVTEAHEAGLEIYASGFVNDKAVPFNYSYDPLAEYLNFVGDGGFSVDGVLSDYPITASEAIGCFANLNSSKTDHVTGKPLVISHNGASGDYPDCTDLAYHSAVDDGADVIDCPVQVTSDGVLMCMSSINLLDTTNVQRTPFATPSLVPSILINVILSSLINLSSLPQNAAFIAKSLGIDMVDSVTAALSAAGFSNQTTKEVLIRSTDSAVLVKLKQQKTRCKLVYTLPLGIGDASKPSLKDIKAFAEAVVVDRTSVFALSYDFIMGQNRIVRDLQAAGLAVYAQVFRNEYVAHPFDFLGDPTVEINYYVQTFNLSGMITDFPKTVRRYKENTCTALGKDMPKYMRPVEAGSLADFLRSFQTQPPSVAPMPALNSSSVEEPPLPTAAPRNVPPGGGAPADAAGTAGGAAPSDASSGGAPPSDARHTATGSSGMLLVVLVSAALLI

SEQ ID NO: 158652 - protein, 220 aa, Zea Mays
MMAGRAHGHRNRLRRLIPRLLLLLVAVYAASFAIYLLLQSHSHHQSPPDPTPRTEARDGVLAPSSSQKPWPRLPSFLPWVSSAVPPPPLHTCEAYFGNGFSRRVDVLPAGRGSGGGGWFRCHHSETLGSSICEGARVRLDPALIAMSRGGEPLEQVMGRAEEEELPKYEPGALQVEGPAAGMPVPLVDAGFLNDYVPTGGIGMHTMRALLESTRVVPPVG

SEQ ID NO: 158653 - protein, 194 aa, Zea Mays
MASRKLLVGLTARRQLQSRTQQLFWATSLPEATTSRSLMVAAAMARLSDRSSAPFILSSRAISSTQPVMQSTGDVSGSSPSAVDHKLAMQEDEFHKLADETIHDLLEKLEEYGDSIQMDGFDIEYGNQVLTLRLGDLGTYVINKQTPNKQIWLSSPVSGPSRFDWDATANGWIYKRTGVNLVRLLEKEIGQGSI

SEQ ID NO: 158654 - protein, 292 aa, Zea Mays
MDRHIGPDNKRKGRSLVMIPVFQTQKSLTCTTRCQILMIECACTGVRFFAILSMQRSGSGWVETLLNSHPNISSNGEIFSVKERRSNITAITKTLDRLYNLDWYSSAAKNECTAAVGLKWMLNQGLMKHHQEIVEYFNRRGVSAIFLLRRNLLRRYVSILANAHDSAMKQLNGTHKAHVHSKHEAEILAQYKPTIDKKTLITELKRSDKLAADALVNFKNTRHVVLYYEDVVSNRTMLMDVLDFLRLPKRKLFSRHVKIHTKRLCDHIDNWADVTDFLKGTPFESFLNGSRR

SEQ ID NO: 158655 - protein, 256 aa, Zea Mays
MELGLRGRWRGAGLDGLEGLVQAAEHGLVAAPLGVGRGDEVRVQLVPCARHRYEAVRAGARHLVLVVHLAGAVGALGGAHVVGGRDLVQQPDVGERQVVEHGAERRQRADPGQERQVLLLRPLSRVEELRVRAVGALLHLGHQPLLPPLRHVVHVLRRVLLARVPAVSAVVRRARRRAIVHCELRLGAGRRRRRGQQQEPRRGRSHQRRSDGPVVVPWLRREPQRLQGRGCGSRLLRRGGRGACGGEERGRHAREE

SEQ ID NO: 158656 - protein, 261 aa, Zea Mays
MPNTYDRKECACTGVRFFAILSMQRSGSGWVETLLNSHPNISSNGEIFSVKERRSNITAITKTLDRLYNLDWYSSAAKNECTAAVGLKWMLNQGLMKHHQEIVEYFNRRGVSAIFLLRRNLLRRYVSILANAHDSAMKQLNGTHKAHVHSKHEAEILAQYKPTIDKKTLITELKRSDKLAADALVNFKNTRHVVLYYEDVVSNRTMLMDVLDFLRLPKRKLFSRHVKIHTKRLCDHIDNWADVTDFLKGTPFESFLNGSRR

SEQ ID NO: 158657 - protein, 573 aa, Zea Mays
MDEADDDARTFKVGFTAAGEKQFRELVREKLRGFRRGLDDTLLDYVTIMLQNGKRKDQASMELHVFLGDDSAVFVSWLWEHLSLNMHLYVQAQEQTQVVKDDEAPKEVSGKDKSSDMFPRSKCQTHSEHPIESSAATTRKRDKREWKGIGRAGNEKFPLRNVLTDILHGEEKKSQKSNEIRYPSSKQQNGRKRDRDDEPQQAKRDTSSRPMLGGGASRRLLQFAVRDAVKAVQPASTSAEPASKRLRSVVATTSAENMRDRRSEKSQDYLNDRRSERSQDNSSDRRSERTRPMLQVQGAALALRAAAEAAADSTKARSTGSVFKRLGQGNVVKQPSRSREEKRDYADFEPVTTANEHGSDRYVNNEESEEEYRELTMADRVAGMNVDSGSEDDVDRDEGVTRYQTSISHEDTFSSFAEKKTVSAQCSVELETDAIRPSSVNHEEQPVPSLTNTTSKAVSISVDVNMVEPPSYETPKDVHVVEKPYVAPMNSNATSVATNTKELGHAEVQKDSQRSAPSVPVSYSTSHPTVDADSRTLYVSNVHFAATKDSLSRHFNKFGAVLKVVIVTNAATG

SEQ ID NO: 158658 - protein, 497 aa, Zea Mays
MLQNGKRKDQASMELHVFLGDDSAVFVSWLWEHLSLNMHLYVQAQEQTQVVKDDEAPKEVSGKDKSSDMFPRSKCQTHSEHPIESSAATTRKRDKREWKGIGRAGNEKFPLRNVLTDILHGEEKKSQKSNEIRYPSSKQQNGRKRDRDDEPQQAKRDTSSRPMLGGGASRRLLQFAVRDAVKAVQPASTSAEPASKRLRSVVATTSAENMRDRRSEKSQDYLNDRRSERSQDNSSDRRSERTRPMLQVQGAALALRAAAEAAADSTKARSTGSVFKRLGQGNVVKQPSRSREEKRDYADFEPVTTANEHGSDRYVNNEESEEEYRELTMADRVAGMNVDSGSEDDVDRDEGVTRYQTSISHEDTFSSFAEKKTVSAQCSVELETDAIRPSSVNHEEQPVPSLTNTTSKAVSISVDVNMVEPPSYETPKDVHVVEKPYVAPMNSNATSVATNTKELGHAEVQKDSQRSAPSGSLCCHQGLIISPFQQVWCSTESSHCH

SEQ ID NO: 158659 - protein, 650 aa, Zea Mays
MLQNGKRKDQASMELHVFLGDDSAVFVSWLWEHLSLNMHLYVQAQEQTQVVKDDEAPKEVSGKDKSSDMFPRSKCQTHSEHPIESSAATTRKRDKREWKGIGRAGNEKFPLRNVLTDILHGEEKKSQKSNEIRYPSSKQQNGRKRDRDDEPQQAKRDTSSRPMLGGGASRRLLQFAVRDAVKAVQPASTSAEPASKRLRSVVATTSAENMRDRRSEKSQDYLNDRRSERSQDNSSDRRSERTRPMLQVQGAALALRAAAEAAADSTKARSTGSVFKRLGQGNVVKQPSRSREEKRDYADFEPVTTANEHGSDRYVNNEESEEEYRELTMADRVAGMNVDSGSEDDVDRDEGVTRYQTSISHEDTFSSFAEKKTVSAQCSVELETDAIRPSSVNHEEQPVPSLTNTTSKAVSISVDVNMVEPPSYETPKDVHVVEKPYVAPMNSNATSVATNTKVSSHELGHAEVQKDSQRSAPSVPVSYSTSHPTVDADSRTLYVSNVHFAATKDSLSRHFNKFGAVLKVVIVTNAATGQPTGSAYVEFLHKESAERALSLNGTSFMTRILKVVRRSSHEAAHFYGWPGIGRSSLYGRHGRMAYPRAVHPGGSFRGRAPMKAGARSLQWKREPSGTDSSAGAKNDMSVPFSCEQVLPPAT

SEQ ID NO: 158660 - protein, 545 aa, Zea Mays
MDEADDDARTFKVGFTAAGEKQFRELVREKLRGFRRGLDDTLLDYVTIMLQNGKRKDQASMELHVFLGDDSAVFVSWLWEHLSLNMHLYVQAQEQTQVVKDDEAPKEVSGKDKSSDMFPRSKCQTHSEHPIESSAATTRKRDKREWKGIGRAGNEKFPLRNVLTDILHGEEKKSQKSNEIRYPSSKQQNGRKRDRDDEPQQAKRDTSSRPMLGGGASRRLLQFAVRDAVKAVQPASTSAEPASKRLRSVVATTSAENMRDRRSEKSQDYLNDRRSERSQDNSSDRRSERTRPMLQVQGAALALRAAAEAAADSTKARSTGSVFKRLGQGNVVKQPSRSREEKRDYADFEPVTTANEHGSDRYVNNEESEEEYRELTMADRVAGMNVDSGSEDDVDRDEGVTRYQTSISHEDTFSSFAEKKTVSAQCSVELETDAIRPSSVNHEEQPVPSLTNTTSKAVSISVDVNMVEPPSYETPKDVHVVEKPYVAPMNSNATSVATNTKELGHAEVQKDSQRSAPSGSLCCHQGLIISPFQQVWCSTESSHCH

SEQ ID NO: 158661 - protein, 698 aa, Zea Mays
MDEADDDARTFKVGFTAAGEKQFRELVREKLRGFRRGLDDTLLDYVTIMLQNGKRKDQASMELHVFLGDDSAVFVSWLWEHLSLNMHLYVQAQEQTQVVKDDEAPKEVSGKDKSSDMFPRSKCQTHSEHPIESSAATTRKRDKREWKGIGRAGNEKFPLRNVLTDILHGEEKKSQKSNEIRYPSSKQQNGRKRDRDDEPQQAKRDTSSRPMLGGGASRRLLQFAVRDAVKAVQPASTSAEPASKRLRSVVATTSAENMRDRRSEKSQDYLNDRRSERSQDNSSDRRSERTRPMLQVQGAALALRAAAEAAADSTKARSTGSVFKRLGQGNVVKQPSRSREEKRDYADFEPVTTANEHGSDRYVNNEESEEEYRELTMADRVAGMNVDSGSEDDVDRDEGVTRYQTSISHEDTFSSFAEKKTVSAQCSVELETDAIRPSSVNHEEQPVPSLTNTTSKAVSISVDVNMVEPPSYETPKDVHVVEKPYVAPMNSNATSVATNTKVSSHELGHAEVQKDSQRSAPSVPVSYSTSHPTVDADSRTLYVSNVHFAATKDSLSRHFNKFGAVLKVVIVTNAATGQPTGSAYVEFLHKESAERALSLNGTSFMTRILKVVRRSSHEAAHFYGWPGIGRSSLYGRHGRMAYPRAVHPGGSFRGRAPMKAGARSLQWKREPSGTDSSAGAKNDMSVPFSCEQVLPPAT

SEQ ID NO: 158662 - protein, 646 aa, Zea Mays
MLQNGKRKDQASMELHVFLGDDSAVFVSWLWEHLSLNMHLYVQAQEQTQVVKDDEAPKEVSGKDKSSDMFPRSKCQTHSEHPIESSAATTRKRDKREWKGIGRAGNEKFPLRNVLTDILHGEEKKSQKSNEIRYPSSKQQNGRKRDRDDEPQQAKRDTSSRPMLGGGASRRLLQFAVRDAVKAVQPASTSAEPASKRLRSVVATTSAENMRDRRSEKSQDYLNDRRSERSQDNSSDRRSERTRPMLQVQGAALALRAAAEAAADSTKARSTGSVFKRLGQGNVVKQPSRSREEKRDYADFEPVTTANEHGSDRYVNNEESEEEYRELTMADRVAGMNVDSGSEDDVDRDEGVTRYQTSISHEDTFSSFAEKKTVSAQCSVELETDAIRPSSVNHEEQPVPSLTNTTSKAVSISVDVNMVEPPSYETPKDVHVVEKPYVAPMNSNATSVATNTKELGHAEVQKDSQRSAPSVPVSYSTSHPTVDADSRTLYVSNVHFAATKDSLSRHFNKFGAVLKVVIVTNAATGQPTGSAYVEFLHKESAERALSLNGTSFMTRILKVVRRSSHEAAHFYGWPGIGRSSLYGRHGRMAYPRAVHPGGSFRGRAPMKAGARSLQWKREPSGTDSSAGAKNDMSVPFSCEQVLPPAT

SEQ ID NO: 158663 - protein, 484 aa, Zea Mays
MLGGGASRRLLQFAVRDAVKAVQPASTSAEPASKRLRSVVATTSAENMRDRRSEKSQDYLNDRRSERSQDNSSDRRSERTRPMLQVQGAALALRAAAEAAADSTKARSTGSVFKRLGQGNVVKQPSRSREEKRDYADFEPVTTANEHGSDRYVNNEESEEEYRELTMADRVAGMNVDSGSEDDVDRDEGVTRYQTSISHEDTFSSFAEKKTVSAQCSVELETDAIRPSSVNHEEQPVPSLTNTTSKAVSISVDVNMVEPPSYETPKDVHVVEKPYVAPMNSNATSVATNTKELGHAEVQKDSQRSAPSVPVSYSTSHPTVDADSRTLYVSNVHFAATKDSLSRHFNKFGAVLKVVIVTNAATGQPTGSAYVEFLHKESAERALSLNGTSFMTRILKVVRRSSHEAAHFYGWPGIGRSSLYGRHGRMAYPRAVHPGGSFRGRAPMKAGARSLQWKREPSGTDSSAGAKNDMSVPFSCEQVLPPAT

SEQ ID NO: 158664 - protein, 500 aa, Zea Mays
MEMRTSELLLLLKLTYALRNVYSYLFLASSPWLWEHLSLNMHLYVQAQEQTQVVKDDEAPKEVSGKDKSSDMFPRSKCQTHSEHPIESSAATTRKRDKREWKGIGRAGNEKFPLRNVLTDILHGEEKKSQKSNEIRYPSSKQQNGRKRDRDDEPQQAKRDTSSRPMLGGGASRRLLQFAVRDAVKAVQPASTSAEPASKRLRSVVATTSAENMRDRRSEKSQDYLNDRRSERSQDNSSDRRSERTRPMLQVQGAALALRAAAEAAADSTKARSTGSVFKRLGQGNVVKQPSRSREEKRDYADFEPVTTANEHGSDRYVNNEESEEEYRELTMADRVAGMNVDSGSEDDVDRDEGVTRYQTSISHEDTFSSFAEKKTVSAQCSVELETDAIRPSSVNHEEQPVPSLTNTTSKAVSISVDVNMVEPPSYETPKDVHVVEKPYVAPMNSNATSVATNTKELGHAEVQKDSQRSAPSGSLCCHQGLIISPFQQVWCSTESSHCH

SEQ ID NO: 158665 - protein, 649 aa, Zea Mays
MEMRTSELLLLLKLTYALRNVYSYLFLASSPWLWEHLSLNMHLYVQAQEQTQVVKDDEAPKEVSGKDKSSDMFPRSKCQTHSEHPIESSAATTRKRDKREWKGIGRAGNEKFPLRNVLTDILHGEEKKSQKSNEIRYPSSKQQNGRKRDRDDEPQQAKRDTSSRPMLGGGASRRLLQFAVRDAVKAVQPASTSAEPASKRLRSVVATTSAENMRDRRSEKSQDYLNDRRSERSQDNSSDRRSERTRPMLQVQGAALALRAAAEAAADSTKARSTGSVFKRLGQGNVVKQPSRSREEKRDYADFEPVTTANEHGSDRYVNNEESEEEYRELTMADRVAGMNVDSGSEDDVDRDEGVTRYQTSISHEDTFSSFAEKKTVSAQCSVELETDAIRPSSVNHEEQPVPSLTNTTSKAVSISVDVNMVEPPSYETPKDVHVVEKPYVAPMNSNATSVATNTKELGHAEVQKDSQRSAPSVPVSYSTSHPTVDADSRTLYVSNVHFAATKDSLSRHFNKFGAVLKVVIVTNAATGQPTGSAYVEFLHKESAERALSLNGTSFMTRILKVVRRSSHEAAHFYGWPGIGRSSLYGRHGRMAYPRAVHPGGSFRGRAPMKAGARSLQWKREPSGTDSSAGAKNDMSVPFSCEQVLPPAT

SEQ ID NO: 158666 - protein, 436 aa, Zea Mays
MMLRVVLREIIVQTFGISHQFTPSMTNMSMNGGAKKLGGKSMTMLWRNNYNGTQANFAARLMPDDWQETSTLLAALEKIESWIFSRIVETVWWQALTPHMQKRAEGSSTPKAGRVLGPALGDQQQGTFSVNLWKAAFQDAFSRMCPLSAGRHECGCLPVLAKLVMEQCVARLDVAMFNAILRESASEIPTDPISDPIVDPKVLPIPAGDLSFGSGAQLKNSIGNWSRWLTDKLGIDHDDSEDIGDVEDERRAAAETKSFQLLNELSDLLMLPKDMLLEKSIRKEVCPSIGLQLVTRILCNFTPDEFCPDPVPSTVLEELNSESLLERHANKDVTSVFPCTAAPIVYRTPSTLDAAERAADIGGGAKLDRKASMVQRRGYTSDDDLDDLDSPLASLIDRSAPPSPSNGLAHFSAGRGVSMENTRYTLLREVWGLEQR

SEQ ID NO: 158667 - protein, 332 aa, Zea Mays
MMLRVVLREIIVQTFGISHQFTPSMTNMSMNGGAKKLGGKSMTMLWRNNYNGTQANFAARLMPDDWQETSTLLAALEKIESWIFSRIVETVWWQALTPHMQKRAEGSSTPKAGRVLGPALGDQQQGTFSVNLWKAAFQDAFSRMCPLSAGRHECGCLPVLAKLVMEQCVARLDVAMFNAILRESASEIPTDPISDPIVDPKVLPIPAGDLSFGSGAQLKNSIGNWSRWLTDKLGIDHDDSEDIGDVEDERRAAAETKSFQLLNELSDLLMLPKDMLLEKSIRKEVCPSIGLQLVTRILCNFTPDEFCPDPVPSTVLEELNSEACWSVTPTKT

SEQ ID NO: 158668 - protein, 795 aa, Zea Mays
MKGVIWNCQGLAKPGKFEFIHELINKEKIDFISLQETNKKEFGQNWLLSLSSNKLFKWISSPPNGRSGGLLVGFNSDTLDVSDIQIKDFMIVCRVHHKIKNLSWTFANVYGAAQAVNKDNFLSELAATCSHCSGPILLGGDFNILRSSDDKNKPYVANRWTLLFNAIIDQHGLVELDLTDRKFTWSNNRNPPTFEKLDRFLVSPDWDLLYSNARVRGLNRFLSDHVPLMLSTEDSKKPVATFRYELLWHKKPDFRELVCRSWELPIRSKGSLNIWKEKVKRLKKYLKGWNFNEEGSNKRRREDLLKKINGLDIKNEEGGLSDNEKMAKKDCELLLNKLLFEEEMKMKQRARERLITEGDENTNYFHQKANLNRRRIRIHALMDKENLVEEEDEKNRIATNFYKNLFGPSPISAIYMEDRNMDKISDEDRCILTAPFTETEVKHVVDNFKHNSAPGPDGLPAEFFKDFWDIIKKDIMKLFEDFFKGKLDIKRLNYGVVTLIPKVDKAIDMKNFRPICLLNVCYKMITKVLNNRLSNCITKVISDNQFGFIKGRYILDGVVALHEIIHEVKKKKQDGIILKIDFEKAYDKVNWHFLYKMLEIKGFGEKWGDWVMKTVSGGKVAVRTNNLTGPFFSTHKGVRQGDPLSPLLFNIVVDDLSCMIKRAQEVGLLVGLVPHIIENGCACLQYADDTIFLLQDNPMYARNLKFVLVLFEQMSGLKINFHKSEILCFGKAVDMKNLYAEIFTCPIRNLPMNYLGIPVDYKTLRISHWAKMEEKMEKNWGSGKEGISALGGGWC

SEQ ID NO: 158669 - protein, 343 aa, Zea Mays
MQFPSQDRLDELTNFTELKMKISGVKIVVTVWNSQVLAKSRLHSVWIKADNVPEELLNYQAICELGSVLGAVEEVDLAALKSNDMVRFKVHVKSIARIPPVIEIGVKHLLYDIYFKVEKVETEGWNEEEASMRKRSSVDLQPNEFGLGDNGGKKPKSDIHESGKVPLIPVNQKTSSSEFKEAMFATDPQTNECDKCNEEGENLGDENNEKVDFEDSDEDLLSSQELNNFVKGMGVEIADEQELEMDEGELLKVQDEQQTGKDKKGKAKLVDQVEGTRKSSRLEANEDTRITDKAINRAEAKGCLLEHRKNRQEGCWRKEAIISEKWLVSSSVELGDGLQLTGG

SEQ ID NO: 158670 - protein, 457 aa, Zea Mays
MAKKDCELLLNKLLFEEEMKMKQRARERLITEGDENTNYFHQKANLNRRRIRIHALMDKENLVEEEDEKNRIATNFYKNLFGPSPISAIYMEDRNMDKISDEDRCILTAPFTETEVKHVVDNFKHNSAPGPDGLPAEFFKDFWDIIKKDIMKLFEDFFKGKLDIKRLNYGVVTLIPKVDKAIDMKNFRPICLLNVCYKMITKVLNNRLSNCITKVISDNQFGFIKGRYILDGVVALHEIIHEVKKKKQDGIILKIDFEKAYDKVNWHFLYKMLEIKGFGEKWGDWVMKTVSGGKVAVRTNNLTGPFFSTHKGVRQGDPLSPLLFNIVVDDLSCMIKRAQEVGLLVGLVPHIIENGCACLQYADDTIFLLQDNPMYARNLKFVLVLFEQMSGLKINFHKSEILCFGKAVDMKNLYAEIFTCPIRNLPMNYLGIPVDYKTLRISHWAKMEEKMEKNWGS

SEQ ID NO: 158671 - protein, 115 aa, Zea Mays
MVLHPICIPMNPSEMFSHWLHLFNKRDRNLLTVGCSAVLWTLWKIRNEACFDDKRIVNTLDIFILCCFWMNSWILLQKKSARRMLEERSNHIRKMASEFFSRAWGWSPVDRRLTQ

SEQ ID NO: 158672 - protein, 256 aa, Zea Mays
MYGSPVSKDLNLPAQPPPMASSGLLRYRSAPSAVLGGLCEDQLQLPAAAPSAADNVFSRFLPDHHIRDDKPSPAHFPSAADMASHHQQEQMMFHSQSQSQHQQETGRSGGGLYRTVSSGMEAGGTGVGAASSLIRQSSSPAGFLDHFGMDNGEEDEDQRADQEAAGARARHGQANQHLRHAGLGRRLHQGSPEAGQGVEREPRQLHLPGEQAPAAVLRLKHRPGRQSPSVPGGCVARSSTQLVQQRWTHHKAWRQT

SEQ ID NO: 158673 - protein, 244 aa, Zea Mays
MDGSSNYCSSCLGRESLLPRNISISGTDTEGGPPARMLCCCFARFLRPGYGAMLRASMGMGFQDGGASDSLAGGGGGSGRLGGQLSFSSRQGSLMSQISEMDSQEDVVGASSPDAGGGGDAAYMPGYPMSSGGWDDSSSALLPDSLPATNKRPRDSLEHGGGLAHQFSLPKTSSSEVAAIEKFLQFQDAVPCKVRAKRGCATHPRSIAERVRRTKISERIRKLQELVPDMDKVTAPAPTGFSAR

SEQ ID NO: 158674 - protein, 302 aa, Zea Mays
MYGSPVSKDLNLPAQPPPMASSGLLRYRSAPSAVLGGLCEDQLQLPAAAPSAADNVFSRFLPDHHIRDDKPSPAHFPSAADMASHHQQEQMMFHSQSQSQHQQETGRSGGGLYRTVSSGMEAGGTGVGAASSLIRQSSSPAGFLDHFGMDNGEEDEDQRADQEAAGARARHGQANQHLRHAGLGRRLHQGSPEAGQGNELRRPPVCFPPPEPKLQGQRASDVQITEAGLILPRRLIDGERGLPTVTNNDMSLTLPHLVLVVGGGGVSLSSFIIPCVHALQALNESRASCTCPASKHQQRFSG

SEQ ID NO: 158675 - protein, 216 aa, Zea Mays
MDARALAPAFLADARQSPARGTSPLLLRPTARLLLCAHARAKLPAPRLDPFLPRALCLSLSPSRPAGSLLGHGSRGSQLHLLATHAQPLPKLEFLCFFPNRAGRISLIPRSLSGRGTHPARTTKLSGALPWLALGSSSAARPGICHDHRAVESCALGSARSLCSRPAEVPCARALVSVRCCARVLAGCAARPWCPSLCSPLRAAMCSFVSCSLELA

SEQ ID NO: 158676 - protein, 1392 aa, Zea Mays
MELHREPPEAILNAIKFDLMTSTDMEKLSSMSIIEVSDVTSPKLGLPNGSLQCETCGSQRGRDCDGHFGVTKLAATVHNPYFIDDVVHFLNRICPGCLSPREGIDTKRLEREKVQATCKYCSKDGSKLYPSIVFKTLSSPRVLLFKSKLHRNASVMERISIVAEAADRMPNRSKGKGSLEGLPLDFWDFVPSENKQVQSNMTKIILSPYQVFYMLKKSDPELIKQFVSRRELLFLSCLPVTPNCHRVVEIGYGLPDGRLTFDDRTKAYKRMVDVSRRIDDYRQHPHFSVLASSLVSSRVSECLKSSKLYSKKADGETSTDTYGMKWLKDVVLSKRSDNVFRSIMVGDPKIKLWEIGIPEDLSSSLVVSEHVSSYNFQSTNLKCNLHLLAKQELFIRRNGKLMFLRKADQLEIGDFDGDCLHGYIPQSIRSRVELEELVSLHNQLLNMQDGRNLVSLTHDSLAAAHLLTSTDVFLKKSELQQLQMLCLSVSTPAPAVIKSMNFQGSLWTGKQLFSMLLPSGMNFSCDTELHIMDSEVLTCSLGSSWLQNNTSGLFSVMFKQYGCKALDFLSSAQEVLCEFLTMRGLSVSLSDLYMFSDHYSRRKLAEGVKLALYEAEEAFRVKKILLDPINIPVLKCHDETEDVTYRQSDCIQSNPSVIRSSIMAFKDVFRDLLKMVQQHVSNDNSMMVMINAGSKGSMLKYAQQTACIGLQLPASKFPFRIPSQLSCISWNGQKSLNYEAESTSERVGGQNLYAVIKNSFIEGLNPLECLLHAISGRANFFSENADVPGTLTRKLMYHLRDIHVAYDGTVRSSYGQQIVQFSYDSVDDLVDKLGAPVGCRAACSISEAAYGALEHPVNGLEDSPLMNLQEVFKCHKATNSGDHIGLLFLSRHLKKYRYGLEYASLEVKNHLERVNFSDLVETIMIIYDGHDKIRNEGMWTTHFHINKAMMKKKRLGLRFVVDELAKEYDTTRDQLNNAIPSIRISRRKCLVGDEGVKSSSCCIAVVAHAERNSISQLDTIKTRVIPSILDTLLKGFLEFKDVEIQCPHDGELLVKVCMSEHCKGGRFWPTLQNACIPVMELIDWELSQPSNVSDIFCSYGIDSAWKYFVESLKSATTDTGRNIRREHLLVIADSLSVTGQFHALSSQGLKQQRTRLSISSPFSEACFSRPAQSFINAAKQCSVDNLCGSLDAVAWGKEPFNGTSGPFEIMHSGKPHEPEQNESIYDFLCSSKVRNFEKNHLDTRRQSTENASICRLACKSSKGSTTVNGVAITIDQDFLHAKVSIWDNIIDMRTSLQNMLREYPLNGYVAEPDKSQLIEALKFHSRGAEKIGVGVREIKIGLNPSHPGTRCFILLRNDDTTEDFSYHKCVQGAADSISPQLGSYLKKLYYRA

SEQ ID NO: 158677 - protein, 1099 aa, Zea Mays
MELHREPPEAILNAIKFDLMTSTDMEKLSSMSIIEVSDVTSPKLGLPNGSLQCETCGSQRGRDCDGHFGVTKLAATVHNPYFIDDVVHFLNRICPGCLSPREGIDTKRLEREKVQATCKYCSKDGSKLYPSIVFKTLSSPRVLLFKSKLHRNASVMERISIVAEAADRMPNRSKGKGSLEGLPLDFWDFVPSENKQVQSNMTKIILSPYQVFYMLKKSDPELIKQFVSRRELLFLSCLPVTPNCHRVVEIGYGLPDGRLTFDDRTKAYKRMVDVSRRIDDYRQHPHFSVLASSLVSSRVSECLKSSKLYSKKADGETSTDTYGMKWLKDVVLSKRSDNVFRSIMVGDPKIKLWEIGIPEDLSSSLVVSEHVSSYNFQSTNLKCNLHLLAKQELFIRRNGKLMFLRKADQLEIGDIAYRPLQDGDIILINRPPSVHQHSLIALSAKILPIHSVVSINPLCCTPFAGDFDGDCLHGYIPQSIRSRVELEELVSLHNQLLNMQDGRNLVSLTHDSLAAAHLLTSTDVFLKKSELQQLQMLCLSVSTPAPAVIKSMNFQGSLWTGKQLFSMLLPSGMNFSCDTELHIMDSEVLTCSLGSSWLQNNTSGLFSVMFKQYGCKALDFLSSAQEVLCEFLTMRGLSVSLSDLYMFSDHYSRRKLAEGVKLALYEAEEAFRVKKILLDPINIPVLKCHDETEDVTYRQSDCIQSNPSVIRSSIMAFKDVFRDLLKMVQQHVSNDNSMMVMINAGSKGSMLKYAQQTACIGLQLPASKFPFRIPSQLSCISWNGQKSLNYEAESTSERVGGQNLYAVIKNSFIEGLNPLECLLHAISGRANFFSENADVPGTLTRKLMYHLRDIHVAYDGTVRSSYGQQIVQFSYDSVDDLVDKLGAPVGCRAACSISEAAYGALEHPVNGLEDSPLMNLQEVFKCHKATNSGDHIGLLFLSRHLKKYRYGLEYASLEVKNHLERVNFSDLVETIMIIYDGHDKIRNEGMWTTHFHINKAMMKKKRLGLRFVVDELAKEYDTTRDQLNNAIPSIRISRRKCLVGDEGVKSSSCCIAVVAHAERNSISQLDTIKTRVIPSILDTLLKGKKIVRFKYFWTA

SEQ ID NO: 158678 - protein, 1095 aa, Zea Mays
MELHREPPEAILNAIKFDLMTSTDMEKLSSMSIIEVSDVTSPKLGLPNGSLQCETCGSQRGRDCDGHFGVTKLAATVHNPYFIDDVVHFLNRICPGCLSPREGIDTKRLEREKVQATCKYCSKDGSKLYPSIVFKTLSSPRVLLFKSKLHRNASVMERISIVAEAADRMPNRSKGKGSLEGLPLDFWDFVPSENKQVQSNMTKIILSPYQVFYMLKKSDPELIKQFVSRRELLFLSCLPVTPNCHRVVEIGYGLPDGRLTFDDRTKAYKRMVDVSRRIDDYRQHPHFSVLASSLVSSRVSECLKSSKLYSKKADGETSTDTYGMKWLKDVVLSKRSDNVFRSIMVGDPKIKLWEIGIPEDLSSSLVVSEHVSSYNFQSTNLKCNLHLLAKQELFIRRNGKLMFLRKADQLEIGDIAYRPLQDGDIILINRPPSVHQHSLIALSAKILPIHSVVSINPLCCTPFAGDFDGDCLHGYIPQSIRSRVELEELVSLHNQLLNMQDGRNLVSLTHDSLAAAHLLTSTDVFLKKSELQQLQMLCLSVSTPAPAVIKSMNFQGSLWTGKQLFSMLLPSGMNFSCDTELHIMDSEVLTCSLGSSWLQNNTSGLFSVMFKQYGCKALDFLSSAQEVLCEFLTMRGLSVSLSDLYMFSDHYSRRKLAEGVKLALYEAEEAFRVKKILLDPINIPVLKCHDETEDVTYRQSDCIQSNPSVIRSSIMAFKDVFRDLLKMVQQHVSNDNSMMVMINAGSKGSMLKYAQQTACIGLQLPASKFPFRIPSQLSCISWNGQKSLNYEAESTSERVGGQNLYAVIKNSFIEGLNPLECLLHAISGRANFFSENADVPGTLTRKLMYHLRDIHVAYDGTVRSSYGQQIVQFSYDSVDDLVDKLGAPVGCRAACSISEAAYGALEHPVNGLEDSPLMNLQEVFKCHKATNSGDHIGLLFLSRHLKKYRYGLEYASLEVKNHLERVNFSDLVETIMIIYDGHDKIRNEGMWTTHFHINKAMMKKKRLGLRFVVDELAKEYDTTRDQLNNAIPSIRISRRKCLVGDEGVKSSSCCIAVVAHAERNSISQLDTIKTRVIPSILDTLLKGCSGISSLS

SEQ ID NO: 158679 - protein, 1456 aa, Zea Mays
MELHREPPEAILNAIKFDLMTSTDMEKLSSMSIIEVSDVTSPKLGLPNGSLQCETCGSQRGRDCDGHFGVTKLAATVHNPYFIDDVVHFLNRICPGCLSPREGIDTKRLEREKVQATCKYCSKDGSKLYPSIVFKTLSSPRVLLFKSKLHRNASVMERISIVAEAADRMPNRSKGKGSLEGLPLDFWDFVPSENKQVQSNMTKIILSPYQVFYMLKKSDPELIKQFVSRRELLFLSCLPVTPNCHRVVEIGYGLPDGRLTFDDRTKAYKRMVDVSRRIDDYRQHPHFSVLASSLVSSRVSECLKSSKLYSKKADGETSTDTYGMKWLKDVVLSKRSDNVFRSIMVGDPKIKLWEIGIPEDLSSSLVVSEHVSSYNFQSTNLKCNLHLLAKQELFIRRNGKLMFLRKADQLEIGDIAYRPLQDGDIILINRPPSVHQHSLIALSAKILPIHSVVSINPLCCTPFAGDFDGDCLHGYIPQSIRSRVELEELVSLHNQLLNMQDGRNLVSLTHDSLAAAHLLTSTDVFLKKSELQQLQMLCLSVSTPAPAVIKSMNFQGSLWTGKQLFSMLLPSGMNFSCDTELHIMDSEVLTCSLGSSWLQNNTSGLFSVMFKQYGCKALDFLSSAQEVLCEFLTMRGLSVSLSDLYMFSDHYSRRKLAEGVKLALYEAEEAFRVKKILLDPINIPVLKCHDETEDVTYRQSDCIQSNPSVIRSSIMAFKDVFRDLLKMVQQHVSNDNSMMVMINAGSKGSMLKYAQQTACIGLQLPASKFPFRIPSQLSCISWNGQKSLNYEAESTSERVGGQNLYAVIKNSFIEGLNPLECLLHAISGRANFFSENADVPGTLTRKLMYHLRDIHVAYDGTVRSSYGQQIVQFSYDSVDDLVDKLGAPVGCRAACSISEAAYGALEHPVNGLEDSPLMNLQEVFKCHKATNSGDHIGLLFLSRHLKKYRYGLEYASLEVKNHLERVNFSDLVETIMIIYDGHDKIRNEGMWTTHFHINKAMMKKKRLGLRFVVDELAKEYDTTRDQLNNAIPSIRISRRKCLVGDEGVKSSSCCIAVVAHAERNSISQLDTIKTRVIPSILDTLLKGFLEFKDVEIQCPHDGELLVKVCMSEHCKGGRFWPTLQNACIPVMELIDWELSQPSNVSDIFCSYGIDSAWKYFVESLKSATTDTGRNIRREHLLVIADSLSVTGQFHALSSQGLKQQRTRLSISSPFSEACFSRPAQSFINAAKQCSVDNLCGSLDAVAWGKEPFNGTSGPFEIMHSGKPHEPEQNESIYDFLCSSKVRNFEKNHLDTRRQSTENNHLDTRRQSTENASICRLACKSSKGSTTVNGVAITIDQDFLHAKVSIWDNIIDMRTSLQNMLREYPLNGYVAEPDKSQLIEALKFHSRGAEKIGVGVREIKIGLNPSHPGTRCFILLRNDDTTEDFSYHKCVQGAADSISPQLGSYLKKLYYRA

SEQ ID NO: 158680 - protein, 1112 aa, Zea Mays
MELHREPPEAILNAIKFDLMTSTDMEKLSSMSIIEVSDVTSPKLGLPNGSLQCETCGSQRGRDCDGHFGVTKLAATVHNPYFIDDVVHFLNRICPGCLSPREGIDTKRLEREKVQATCKYCSKDGSKLYPSIVFKTLSSPRVLLFKSKLHRNASVMERISIVAEAADRMPNRSKGKGSLEGLPLDFWDFVPSENKQVQSNMTKIILSPYQVFYMLKKSDPELIKQFVSRRELLFLSCLPVTPNCHRVVEIGYGLPDGRLTFDDRTKAYKRMVDVSRRIDDYRQHPHFSVLASSLVSSRVSECLKSSKLYSKKADGETSTDTYGMKWLKDVVLSKRSDNVFRSIMVGDPKIKLWEIGIPEDLSSSLVVSEHVSSYNFQSTNLKCNLHLLAKQELFIRRNGKLMFLRKADQLEIGDIAYRPLQDGDIILINRPPSVHQHSLIALSAKILPIHSVVSINPLCCTPFAGDFDGDCLHGYIPQSIRSRVELEELVSLHNQLLNMQDGRNLVSLTHDSLAAAHLLTSTDVFLKKSELQQLQMLCLSVSTPAPAVIKSMNFQGSLWTGKQLFSMLLPSGMNFSCDTELHIMDSEVLTCSLGSSWLQNNTSGLFSVMFKQYGCKALDFLSSAQEVLCEFLTMRGLSVSLSDLYMFSDHYSRRKLAEGVKLALYEAEEAFRVKKILLDPINIPVLKCHDETEDVTYRQSDCIQSNPSVIRSSIMAFKDVFRDLLKMVQQHVSNDNSMMVMINAGSKGSMLKYAQQTACIGLQLPASKFPFRIPSQLSCISWNGQKSLNYEAESTSERVGGQNLYAVIKNSFIEGLNPLECLLHAISGRANFFSENADVPGTLTRKLMYHLRDIHVAYDGTVRSSYGQQIVQFSYDSVDDLVDKLGAPVGCRAACSISEAAYGALEHPVNGLEDSPLMNLQEVFKCHKATNSGDHIGLLFLSRHLKKYRYGLEYASLEVKNHLERVNFSDLVETIMIIYDGHDKIRNEGMWTTHFHINKAMMKKKRLGLRFVVDELAKEYDTTRDQLNNAIPSIRISRRKCLVGDEGVKSSSCCIAVVAHAERNSISQLDTIKTRVIPSILDTLLKEVRNHGLSYIGFLSKLQCGGAKSFQV

SEQ ID NO: 158681 - protein, 950 aa, Zea Mays
MSWLSQPKGRHRYKEAADRMPNRSKGKGSLEGLPLDFWDFVPSENKQVQSNMTKIILSPYQVFYMLKKSDPELIKQFVSRRELLFLSCLPVTPNCHRVVEIGYGLPDGRLTFDDRTKAYKRMVDVSRRIDDYRQHPHFSVLASSLVSSRVSECLKSSKLYSKKADGETSTDTYGMKWLKDVVLSKRSDNVFRSIMVGDPKIKLWEIGIPEDLSSSLVVSEHVSSYNFQSTNLKCNLHLLAKQELFIRRNGKLMFLRKADQLEIGDIAYRPLQDGDIILINRPPSVHQHSLIALSAKILPIHSVVSINPLCCTPFAGDFDGDCLHGYIPQSIRSRVELEELVSLHNQLLNMQDGRNLVSLTHDSLAAAHLLTSTDVFLKKSELQQLQMLCLSVSTPAPAVIKSMNFQGSLWTGKQLFSMLLPSGMNFSCDTELHIMDSEVLTCSLGSSWLQNNTSGLFSVMFKQYGCKALDFLSSAQEVLCEFLTMRGLSVSLSDLYMFSDHYSRRKLAEGVKLALYEAEEAFRVKKILLDPINIPVLKCHDETEDVTYRQSDCIQSNPSVIRSSIMAFKDVFRDLLKMVQQHVSNDNSMMVMINAGSKGSMLKYAQQTACIGLQLPASKFPFRIPSQLSCISWNGQKSLNYEAESTSERVGGQNLYAVIKNSFIEGLNPLECLLHAISGRANFFSENADVPGTLTRKLMYHLRDIHVAYDGTVRSSYGQQIVQFSYDSVDDLVDKLGAPVGCRAACSISEAAYGALEHPVNGLEDSPLMNLQEVFKCHKATNSGDHIGLLFLSRHLKKYRYGLEYASLEVKNHLERVNFSDLVETIMIIYDGHDKIRNEGMWTTHFHINKAMMKKKRLGLRFVVDELAKEYDTTRDQLNNAIPSIRISRRKCLVGDEGVKSSSCCIAVVAHAERNSISQLDTIKTRVIPSILDTLLKGKKIVRFKYFWTA

SEQ ID NO: 158682 - protein, 1351 aa, Zea Mays
MSWLSQPKGRHRYKGLEREKVQATCKYCSKDGSKLYPSIVFKTLSSPRVLLFKSKLHRNASVMERISIVAEAADRMPNRSKGKGSLEGLPLDFWDFVPSENKQVQSNMTKIILSPYQVFYMLKKSDPELIKQFVSRRELLFLSCLPVTPNCHRVVEIGYGLPDGRLTFDDRTKAYKRMVDVSRRIDDYRQHPHFSVLASSLVSSRVSECLKSSKLYSKKADGETSTDTYGMKWLKDVVLSKRSDNVFRSIMVGDPKIKLWEIGIPEDLSSSLVVSEHVSSYNFQSTNLKCNLHLLAKQELFIRRNGKLMFLRKADQLEIGDIAYRPLQDGDIILINRPPSVHQHSLIALSAKILPIHSVVSINPLCCTPFAGDFDGDCLHGYIPQSIRSRVELEELVSLHNQLLNMQDGRNLVSLTHDSLAAAHLLTSTDVFLKKSELQQLQMLCLSVSTPAPAVIKSMNFQGSLWTGKQLFSMLLPSGMNFSCDTELHIMDSEVLTCSLGSSWLQNNTSGLFSVMFKQYGCKALDFLSSAQEVLCEFLTMRGLSVSLSDLYMFSDHYSRRKLAEGVKLALYEAEEAFRVKKILLDPINIPVLKCHDETEDVTYRQSDCIQSNPSVIRSSIMAFKDVFRDLLKMVQQHVSNDNSMMVMINAGSKGSMLKYAQQTACIGLQLPASKFPFRIPSQLSCISWNGQKSLNYEAESTSERVGGQNLYAVIKNSFIEGLNPLECLLHAISGRANFFSENADVPGTLTRKLMYHLRDIHVAYDGTVRSSYGQQIVQFSYDSVDDLVDKLGAPVGCRAACSISEAAYGALEHPVNGLEDSPLMNLQEVFKCHKATNSGDHIGLLFLSRHLKKYRYGLEYASLEVKNHLERVNFSDLVETIMIIYDGHDKIRNEGMWTTHFHINKAMMKKKRLGLRFVVDELAKEYDTTRDQLNNAIPSIRISRRKCLVGDEGVKSSSCCIAVVAHAERNSISQLDTIKTRVIPSILDTLLKGFLEFKDVEIQCPHDGELLVKVCMSEHCKGGRFWPTLQNACIPVMELIDWELSQPSNVSDIFCSYGIDSAWKYFVESLKSATTDTGRNIRREHLLVIADSLSVTGQFHALSSQGLKQQRTRLSISSPFSEACFSRPAQSFINAAKQCSVDNLCGSLDAVAWGKEPFNGTSGPFEIMHSGKPHEPEQNESIYDFLCSSKVRNFEKNHLDTRRQSTENASICRLACKSSKGSTTVNGVAITIDQDFLHAKVSIWDNIIDMRTSLQNMLREYPLNGYVAEPDKSQLIEALKFHSRGAEKIGVGVREIKIGLNPSHPGTRCFILLRNDDTTEDFSYHKCVQGAADSISPQLGSYLKKLYYRA

SEQ ID NO: 158683 - protein, 829 aa, Zea Mays
MVDVSRRIDDYRQHPHFSVLASSLVSSRVSECLKSSKLYSKKADGETSTDTYGMKWLKDVVLSKRSDNVFRSIMVGDPKIKLWEIGIPEDLSSSLVVSEHVSSYNFQSTNLKCNLHLLAKQELFIRRNGKLMFLRKADQLEIGDIAYRPLQDGDIILINRPPSVHQHSLIALSAKILPIHSVVSINPLCCTPFAGDFDGDCLHGYIPQSIRSRVELEELVSLHNQLLNMQDGRNLVSLTHDSLAAAHLLTSTDVFLKKSELQQLQMLCLSVSTPAPAVIKSMNFQGSLWTGKQLFSMLLPSGMNFSCDTELHIMDSEVLTCSLGSSWLQNNTSGLFSVMFKQYGCKALDFLSSAQEVLCEFLTMRGLSVSLSDLYMFSDHYSRRKLAEGVKLALYEAEEAFRVKKILLDPINIPVLKCHDETEDVTYRQSDCIQSNPSVIRSSIMAFKDVFRDLLKMVQQHVSNDNSMMVMINAGSKGSMLKYAQQTACIGLQLPASKFPFRIPSQLSCISWNGQKSLNYEAESTSERVGGQNLYAVIKNSFIEGLNPLECLLHAISGRANFFSENADVPGTLTRKLMYHLRDIHVAYDGTVRSSYGQQIVQFSYDSVDDLVDKLGAPVGCRAACSISEAAYGALEHPVNGLEDSPLMNLQEVFKCHKATNSGDHIGLLFLSRHLKKYRYGLEYASLEVKNHLERVNFSDLVETIMIIYDGHDKIRNEGMWTTHFHINKAMMKKKRLGLRFVVDELAKEYDTTRDQLNNAIPSIRISRRKCLVGDEGVKSSSCCIAVVAHAERNSISQLDTIKTRVIPSILDTLLKGKKIVRFKYFWTA

SEQ ID NO: 158684 - protein, 70 aa, Zea Mays
MVTGGRNTGRVGVIKNREKHKGSFETIHVEDSMGHQFATCMGNVFTIGKGNKPWVSLPKGRGIKLSIIEE

SEQ ID NO: 158685 - protein, 53 aa, Zea Mays
MNGILISLPSFSWGCNLMQARYAQMYCIAVRAPCSPVQCMQQYPHKWGGCRQV

SEQ ID NO: 158686 - protein, 219 aa, Zea Mays
MAQSLELMLIQFFMGSWLIQAVLCSIGYMIMHYGQIMSSFSRFTVGCRLQSIGGSRAGFKPSPFAQLTTILSRAGSFPPLAAVSSPRRGDPGATGHGPRPTAHGSAPTKANWNQQQPSPRFVSPQGLKGAKAAQPALPTVTTTIDEPSLSFPPRQHKPPLARLAQGTELQNPANPAWPMPCRSPTPTPSSSPSPRRWIPPQPQPQPRLRLRSRPLRAAH

SEQ ID NO: 158687 - protein, 269 aa, Zea Mays
MAMAYERGDGVVEHLLDALEFRQPQRAGLGRVEAVRLLAVGAGQAPRDGVRWEPPREQGGEVAAVQHRRAADVPPSGARGLVRQHVAPRHVVDVDVPHPPAEDIRSGGAELRRQSRSDNEGRKNGDEVDPVLSGELPGCLLGEDLCDGVPYLREHGNSTLSRRYGPNHSSDDRTLTWRLSQNSMELHDDSSSSTLGGRSASSLILTVDDEDVRTTLLSDGFFLHERSTFIVPFIAESSISSCQVAPTCFRSLYVQAFPEAANMRNRIGV

SEQ ID NO: 158688 - protein, 209 aa, Zea Mays
MELNSIPYIASWSSSSSCFYYSYSRCACRGTRDGKLVTKASAAGRKRAADSVCSQLSEQGTEDSISGPRSSWRIRRRDLASAILLPFLIPRVNISIAAEIYDASIIRSGVRSVLTKGKAAGVLRLVFHDAGTFEIGDGSGGMNGSIIYEVDRPENIGLNRSIKILRKAKEGIDNVQKVALCGGPEIPVRLGRVDSSSADPSGKVPEETL

SEQ ID NO: 158689 - protein, 110 aa, Zea Mays
MSEIHVWRLTTGRRELVVLSGAHTIGGKRVSGVPVVFDNTYFKVLLDNRPPQTSSTGNGMAAMVGLRTDWALTEDDECLRIYAEDQARFFDDFRDTYIKLVDSGASWRTA

SEQ ID NO: 158690 - protein, 73 aa, Zea Mays
METTISYYSWGALSHKINVTHQFPTSYVLLMILPLLSIISPLFKSLLTLSYIRLKVSFNAQFLPLCHKSPKKI

SEQ ID NO: 158691 - protein, 68 aa, Zea Mays
MPPHLQHTLLSFPPSQDESSPLPQPQTVVLNHLYIEKENTRSMVALGITHRFKAKFVTVVLYKPVLRR

SEQ ID NO: 158692 - protein, 942 aa, Zea Mays
MEVSLCHGVLQSEFSPILTSQCSLLLRNCRPGICTMQFGHSVIYIEPKRHLLTTGWSLFVSGKRLLAGDSVLFIRDGRQQLLLGIRRANRQPVNLSSSVLSSDSMHIGILAAAAHAAANNSQFTVFYNPRASPSEFVIPFAKYQKAVYSNQLSLGMRFRMMFETEESATRRYMGTITGISDMDPLRWKNSQWRNIQVAWDEAAPSERRTRVSLWEVEPVIAPFFIYPSPLFTAKRPRQPGVTDDDSSEMDNLFKRTMPWFGEEVGKRDLSTQNGLVPGLSLVQWMNMQHNPSLANTVMQPELLNSLAGKPVQTLAAADLSRQISFQPQFLQQNNIQFNTSLLPPQNQQTEQLANVIATPNQLGSVIVPQKAVQNSSSEQKQNLVTQPLQVSQPMVSVAQPQLVHTQLQQPQVVLQAQPQQPQVIVQAQLQQQQPLVQNHTTIQSGLQQIQLLQQQQVQQSVQEQQQIKIQPFQVPNDANMVTQLSDQMKIQLLKALQPQQPLVMEQQKMIFDLQQQAVNSQSTAQQCSQVATQVVGLHSSSTNQYPTQQKTQPLKTFQDFPGNAVSIVKPEIVTSVGARSLHVPGGVQSMKMDEVPSSSTSPSTNNNPVILRSTPSSSKNQCLPTAAKAPQSSVVLGSTLEQGMKPCDSTQHPMVIPKLAEERPATGQDYMNSTQLDYLDTSSSATSVCLSQADGSLQQSFPPSSFNQHQPLREAVPDSEFEVTDAGNNFLFGANIDGHMEPLNEDDLLGTAFEADKYMEQMPGNGISNYISSKDSQQELSSSMISHPFGVADIAFNSIDSSINDIQFLNRNSRAPGPVQQRMRTYTKVHKRGAVGRSIDINRYSGYDELKHDVARMFGIEGQLSDQNRVGWKLVYEDHEKDVLLVGDDPWEDFVNCVRCIRILSPQEERQMRLASDYGDSFLGNQACSSSDGGRPWRVTGD

SEQ ID NO: 158693 - protein, 989 aa, Zea Mays
MTLQPVSNVTHCDKETLLATELALKQTRPQTEFFCKTLTASDTSTHGGFSVPRRAAERIFPHLDFSVQPPAQELQARDLHDAIWTFRHIYRGQPKRHLLTTGWSLFVSGKRLLAGDSVLFIRDGRQQLLLGIRRANRQPVNLSSSVLSSDSMHIGILAAAAHAAANNSQFTVFYNPRASPSEFVIPFAKYQKAVYSNQLSLGMRFRMMFETEESATRRYMGTITGISDMDPLRWKNSQWRNIQVAWDEAAPSERRTRVSLWEVEPVIAPFFIYPSPLFTAKRPRQPGVTDDDSSEMDNLFKRTMPWFGEEVGKRDLSTQNGLVPGLSLVQWMNMQHNPSLANTVMQPELLNSLAGKPVQTLAAADLSRQISFQPQFLQQNNIQFNTSLLPPQNQQTEQLANVIATPNQLGSVIVPQKAVQNSSSEQKQNLVTQPLQVSQPMVSVAQPQLVHTQLQQPQVVLQAQPQQPQVIVQAQLQQQQPLVQNHTTIQSGLQQIQLLQQQQVQQSVQEQQQIKIQPFQVPNDANMVTQLSDQMKIQLLKALQPQQPLVMEQQKMIFDLQQQAVNSQSTAQQCSQVATQVVGLHSSSTNQYPTQQKTQPLKTFQDFPGNAVSIVKPEIVTSVGARSLHVPGGVQSMKMDEVPSSSTSPSTNNNPVILRSTPSSSKNQCLPTAAKAPQSSVVLGSTLEQGMKPCDSTQHPMVIPKLAEERPATGQDYMNSTQLDYLDTSSSATSVCLSQADGSLQQSFPPSSFNQHQPLREAVPDSEFEVTDAGNNFLFGANIDGHMEPLNEDDLLGTAFEADKYMEQMPGNGISNYISSKDSQQELSSSMISHPFGVADIAFNSIDSSINDIQFLNRNSRAPGPVQQRMRTYTKVHKRGAVGRSIDINRYSGYDELKHDVARMFGIEGQLSDQNRVGWKLVYEDHEKDVLLVGDDPWEDFVNCVRCIRILSPQEERQMRLASDYGDSFLGNQACSSSDGGRPWRVTGD

SEQ ID NO: 158694 - protein, 430 aa, Zea Mays
MATFHLGLILPLVAVCECFRCSSLFSLSYLIDSLFFPFLFSSVQQWFSFLKTWSFKRYVGNVNPNVTESLLIEVFQSAGLVERCKLIRKEKSSFGFVDYYDRRSAALAIMTLHGRHVYGQAIKVNWAYASTQREDTSGHFHIFVGDLSSEVNDATLYACFSAYPSCSDARVMWDNKTGRSRGYGFVSFRNQQEAETAITEMTGKWLGSRQIRCNWATKNNSEEKPETDNHNAVVLTNGSSNNSATDASQDAGSKEPPQNNPDCTTVYVGNLGHEVNRDELHRHFYNLGVGAIEEVRVQQDKGFGFVRYSTHGEAALAIQMSNGSVVRGKPIKCSWGVKPTPPGTGSKPLPPPAATYQPAVAMPGVPQGFTTAELLAYQRQLALSQAAAGQQHAGLAGQVSAAGLLAAAGSQALYDGYPNQSSAQQLMYYN

SEQ ID NO: 158695 - protein, 321 aa, Zea Mays
MTLHGRHVYGQAIKVNWAYASTQREDTSGHFHIFVGDLSSEVNDATLYACFSAYPSCSDARVMWDNKTGRSRGYGFVSFRNQQEAETAITEMTGKWLGSRQIRCNWATKNNSEEKPETDNHNAVVLTNGSSNNSATDASQDAGSKEPPQNNPDCTTVYVGNLGHEVNRDELHRHFYNLGVGAIEEVRVQQDKGFGFVRYSTHGEAALAIQMSNGSVVRGKPIKCSWGVKPTPPGTGSKPLPPPAATYQPAVAMPGVPQGFTTAELLAYQRQLALSQAAAGQQHAGLAGQVSAAGLLAAAGSQALYDGYPNQSSAQQLMYYN

SEQ ID NO: 158696 - protein, 394 aa, Zea Mays
MEPVSNGNLPPGFDPSTCRSVYVGNVNPNVTESLLIEVFQSAGLVERCKLIRKEKSSFGFVDYYDRRSAALAIMTLHGRHVYGQAIKVNWAYASTQREDTSGHFHIFVGDLSSEVNDATLYACFSAYPSCSDARVMWDNKTGRSRGYGFVSFRNQQEAETAITEMTGKWLGSRQIRCNWATKNNSEEKPETDNHNAVVLTNGSSNNSATDASQDAGSKEPPQNNPDCTTVYVGNLGHEVNRDELHRHFYNLGVGAIEEVRVQQDKGFGFVRYSTHGEAALAIQMSNGSVVRGKPIKCSWGVKPTPPGTGSKPLPPPAATYQPAVAMPGVPQGFTTAELLAYQRQLALSQAAAGQQHAGLAGQVSAAGLLAAAGSQALYDGYPNQSSAQQLMYYN

SEQ ID NO: 158697 - protein, 76 aa, Zea Mays
MATRWRRRWRRTVEWVRAAVPIGWWFLKPSASDRPAACCWAVGDRRGVLWGSCRVAMCGGDGGEAASLCRSACGDL

SEQ ID NO: 158698 - protein, 256 aa, Zea Mays
MRLQLEVTAKSKQLSEVHGAWLPPWLMAQYACYAEVVSGHWDQHGKPAVQNFLHKASEKSAQAKKWAEPHIETAKMKWIPVKQKLVALKKNAEPYVQKVSTRSVEFYESSRDAVTPHAVKVKVFVHSYYQKAKKFSKPYIDQIAEITKPHVEKIRTTLKPYTKRAVHAYGSFLKSATTYHRQAQASIMDYLHQHDITKSLATKELVWFLASALLALPVFIIYRLLVGTFCSKKNKRPRSSNGNHGHKRYKRRHADK

SEQ ID NO: 158699 - protein, 575 aa, Zea Mays
MIGDAVLVFNRMPRQDTISWNSVISGCSSNGLNSEAIELFIRMWTQGQELDSVTLLSVLPACAQSRYWFAGRVVHGYSVKTGLIGETSLANALLDMYSNCSDWQSTNQIFRSMGQKNVVSWTAMITSYMRAGLFDKVAGLLQEMVLDGIRPDVFAVTSALHAFAGDESLKQGKSVHGYTSRNNFPNESFSLFSDMLLQFRPNAVTMTCILPAAASISSLERGREIHAYALRRGFLEDSYASNALVDMYVKCGALLVARVLFDRLTKKNLISWTIMIAGYGMHGFGKHAIALFEQMRGSGIEPDAASFSAILYACCHSGLAAEGRRFFKAMQKEYKIEPKLKHYTCIVDLLSRTGDLKEALEFIESMPIEPDSSIWVSLLHGCRIHKNVKLAEKVADKVFKLEPENTGYYVLLANIYAEAERWEAVKKLKNKIGGRGLRENTGYSWIEVRSKVHVFIADNRNHPDWNRIAEFLDDVARRMRQEGHDPKKKYALMGADDAVHDEALCGHSSKLAVAFGVLNLPEGRPIRVTKNSKVCSHCHEAAKFISKMCNREIILRDSSRFHRFEGGRCSCRGYL

SEQ ID NO: 158700 - protein, 142 aa, Zea Mays
MDVKNMSDFESGSFDAVIDKGTLDSLMCGQNSQENATKMLEEVNRILKENGVYMLITYGDPSYRLRLLKDMEKWTVKLHVIERWEKSSNQNKWELTKPLPLEDHSTSLAALLGPKPDVHYIYVCVKGNGGASVDSKAGEAAN

SEQ ID NO: 158701 - protein, 184 aa, Zea Mays
MTGGGPAAASQAYGEAWYWDERYRKEAGPFDWYQKYPALAPLLRLYLAPHQRLLLVGCGNSVFGENMIDDGYQDVVNIDISSVVIEQMKKKYHDKPQLKYMKMDVKNMSDFESGSFDAVIDKGTLDSLMCGQNSQENATKMLEEVNRILKENGVYMLITYGDPSYRLRLLKDMEKWTVKLHVIG

SEQ ID NO: 158702 - protein, 121 aa, Zea Mays
MEALAGAASSSVLPARHPPSRVAAQSLALRPSRCGPLRAVSAGGVSGKDDAHAANGSPVLKTQFFRCHPWQSIRGTYSLTQDARLLSRCLDGVDCRTRESPYLVMFTLCQLNNRNGHISNM

SEQ ID NO: 158703 - protein, 526 aa, Zea Mays
MSYKQFIQELEDDVSPVEAQSRYEGYKSEYITTQKKAYFDLHKNEDWLRNKYHPTNLENVIERRNELARTTANDFFLKLQSGDLDIGPGLTGSAVSKSGNNSSKNLDAVEGDGKKGKHGKGSDDSYYAASKAHPVSSEVRRIRIDIEQAQVLIRKLDSEKGIENNVLSSSDHEKSDRDKSHGSVGPIVIIQGSSTVKGLEGAELLDTLVTYLWRIHGVDYYGMSETNEPKGLRHVKADARTYNGASSNGAEWENKLDSFWQDRIQGQDPLEMLKGKEKIDGAATEVLDPYVRKIRDEKYGWKYGCGAKGCTKLFHAAEFVQKHLKLKHADLVVDLTSKVREDIYFENYMNDPKAPGGTPIMQQPAPRGKGRQRPPIESRLRDERGNHRFDRNVDSPKRDGSGENPDDPIYDSFGDPAMHGAFPPDIPAPPVLMPVPGAGPLGPFIPAPPEVAMHMLRDQGAPPPIEPTGGPHPRKAGTGGGPSMRGPSPIFGAPSPHHMHDPRRIRSYQDLDAPEDEVTVMDYRSL

SEQ ID NO: 158704 - protein, 183 aa, Zea Mays
MIAAAISLTLGMTTEGVDEGWYDGGSIFLAVFLVILVTATSDYRQSLQFRHLNEEKQNIQVEVVRGGKRFGASIFDLVVGDVVPLKIGDQVPADGVLISGHSLAIDESSMTGESKVVHKDQKAPFLMSGCKVADGYGSMLVTGVGTNTEWGQLMANLSEDNGEETPLQVILCKDSANSRMDNY

SEQ ID NO: 158705 - protein, 790 aa, Zea Mays
MVPADGVLISGHSLAIDESSMTGESKVVHKDQKAPFLMSGCKVADGYGSMLVTGVGTNTEWGQLMANLSEDNGEETPLQVRLNGVATFIGLVGLSVAGAVLVVLWIRYFTGHTENPDGTPQFVAGTTGVKQGFMGAIRILTIAVTIVVVAVPEGLPLAVTLTLAYSMKKMMRDKALVRRLSSCETMGSATTICSDKTGTLTLNKMTVVEAYFAGTKLDPCDDVSQMSDSAASLIIEGIAQNTTGTVFLPEDGGAAELTGSPTEKAILSWGLKIGMDFDDVRTKSSVIHVFPFNSEKKRGAVAVQLDDGVHIHWKGAAEIVLSSCKSWLSVDGSVQSMSAEKHDEFKRSIEDMGANSLRCVAFAYCSFDIEKIPMEDITSWELPEDDLTLLGIIGIKDPCRPGVRDAVRLCTTAGVKVRMVTGDNIETAKAIALECGILDANSVISEPVVIEGKVFREMSESARGEAADKIIVMGRSSPNDKLLLVQALKRKGHVVAVTGDGTNDAPALHEADIGLSMGISGTEVAKESSDIIILDDDFTSVVKVVRWGRSVYANIQKFIQFQLTVNVAALVINVVAAVSSGDVPLNAVELLWVNLIMDTLGALALATEPPTDNLMKRNPVGRREPLVTNIMWRNLFVQALYQVAILLIFDFDGVRILRLQNESRSDAEKITNTFIFNTFVFCQIFNEFNARKPEEKNVFKGVTKNHLFMGIIGITTVFQILIIQFLGKFFKIVRLGWRLWLVSVAIGLVSWPLAYVGKFIPVPVRPLPDYFKPRCCWKPPRRDEEEGGQS

SEQ ID NO: 158706 - protein, 605 aa, Zea Mays
MWQRDAPQEASTKLHGRYRLENKSPFPTAKAGRAEEEENKTKPEAFSPILRWIYRRIFRVREGSSPPPPEIRSPDERAAAEDPAEAEAGEVVFDDAFDIPHKNAPHDRLRRWRQAALVLNASRRFRYTLDLKKEEEKEIIRRKIRSHAQVIRAAFLFKEAGQKDIREAYTGINLATASRSFPIELEKLNTLNRDHDSVLLQEIGGVKGLSDLLKSNLEKGVSPNEDELLQRKNVYGSNTYPRKKRKNILRFVFEACQDLTLVILMIAAAISLTLGMTTEGVDEGWYDGGSIFLAVFLVILVTATSDYRQSLQFRHLNEEKQNIQVEVVRGGKRFGASIFDLVVGDVVPLKIGDQVPADGVLISGHSLAIDESSMTGESKVVHKDQKAPFLMSGCKVADGYGSMLVTGVGTNTEWGQLMANLSEDNGEETPLQVRLNGVATFIGLVGLSVAGAVLVVLWIRYFTGHTENPDGTPQFVAGTTGVKQGFMGAIRILTIAVTIVVVAVPEGLPLAVTLTLAYSMKKMMRDKALVRRLSSCETMGSATTICSDKTGTLTLNKMTVVEAYFAGTKLDPCDDVSQMSDSAASLIIEGIAQNTTGTVFLPEET

SEQ ID NO: 158707 - protein, 670 aa, Zea Mays
MWQRDAPQEASTKLHGRYRLENKSPFPTAKAGRAEEEENKTKPEAFSPILRWIYRRIFRVREGSSPPPPEIRSPDERAAAEDPAEAEAGEVVFDDAFDIPHKNAPHDRLRRWRQAALVLNASRRFRYTLDLKKEEEKEIIRRKIRSHAQVIRAAFLFKEAGQKDIREAYTGINLATASRSFPIELEKLNTLNRDHDSVLLQEIGGVKGLSDLLKSNLEKGVSPNEDELLQRKNVYGSNTYPRKKRKNILRFVFEACQDLTLVILMIAAAISLTLGMTTEGVDEGWYDGGSIFLAVFLVILVTATSDYRQSLQFRHLNEEKQNIQVEVVRGGKRFGASIFDLVVGDVVPLKIGDQVPADGVLISGHSLAIDESSMTGESKVVHKDQKAPFLMSGCKVADGYGSMLVTGVGTNTEWGQLMANLSEDNGEETPLQVRLNGVATFIGLVGLSVAGAVLVVLWIRYFTGHTENPDGTPQFVAGTTGVKQGFMGAIRILTIAVTIVVVAVPEGLPLAVTLTLAYSMKKMMRDKALVRRLSSCETMGSATTICSDKTGTLTLNKMTVVEAYFAGTKLDPCDDVSQMSDSAASLIIEGIAQNTTGTVFLPEDGGAAELTGSPTEKAILSWGLKIGMDFDDVRTKSSVIHVFPFNSEKKRGAVAVQMMVFTSTGKVQLK

SEQ ID NO: 158708 - protein, 631 aa, Zea Mays
MWQRDAPQEASTKLHGRYRLENKSPFPTAKAGRAEEEENKTKPEAFSPILRWIYRRIFRVREGSSPPPPEIRSPDERAAAEDPAEAEAGEVVFDDAFDIPHKNAPHDRLRRWRQAALVLNASRRFRYTLDLKKEEEKEIIRRKIRSHAQVIRAAFLFKEAGQKDIREAYTGINLATASRSFPIELEKLNTLNRDHDSVLLQEIGGVKGLSDLLKSNLEKGVSPNEDELLQRKNVYGSNTYPRKKRKNILRFVFEACQDLTLVILMIAAAISLTLGMTTEGVDEGWYDGGSIFLAVFLVILVTATSDYRQSLQFRHLNEEKQNIQVEVVRGGKRFGASIFDLVVGDVVPLKIGDQVPADGVLISGHSLAIDESSMTGESKVVHKDQKAPFLMSGCKVADGYGSMLVTGVGTNTEWGQLMANLSEDNGEETPLQVRLNGVATFIGLVGLSVAGAVLVVLWIRYFTGHTENPDGTPQFVAGTTGVKQGFMGAIRILTIAVTIVVVAVPEGLPLAVTLTLAYSMKKMMRDKALVRRLSSCETMGSATTICSDKTGTLTLNKMTVVEAYFAGTKLDPCDDVSQMSDSAASLIIEGIAQNTTGTVFLPEDGGAAELTGSPTEKAILSWGLKGWISTM

SEQ ID NO: 158709 - protein, 770 aa, Zea Mays
MTGESKVVHKDQKAPFLMSGCKVADGYGSMLVTGVGTNTEWGQLMANLSEDNGEETPLQVRLNGVATFIGLVGLSVAGAVLVVLWIRYFTGHTENPDGTPQFVAGTTGVKQGFMGAIRILTIAVTIVVVAVPEGLPLAVTLTLAYSMKKMMRDKALVRRLSSCETMGSATTICSDKTGTLTLNKMTVVEAYFAGTKLDPCDDVSQMSDSAASLIIEGIAQNTTGTVFLPEDGGAAELTGSPTEKAILSWGLKIGMDFDDVRTKSSVIHVFPFNSEKKRGAVAVQLDDGVHIHWKGAAEIVLSSCKSWLSVDGSVQSMSAEKHDEFKRSIEDMGANSLRCVAFAYCSFDIEKIPMEDITSWELPEDDLTLLGIIGIKDPCRPGVRDAVRLCTTAGVKVRMVTGDNIETAKAIALECGILDANSVISEPVVIEGKVFREMSESARGEAADKIIVMGRSSPNDKLLLVQALKRKGHVVAVTGDGTNDAPALHEADIGLSMGISGTEVAKESSDIIILDDDFTSVVKVVRWGRSVYANIQKFIQFQLTVNVAALVINVVAAVSSGDVPLNAVELLWVNLIMDTLGALALATEPPTDNLMKRNPVGRREPLVTNIMWRNLFVQALYQVAILLIFDFDGVRILRLQNESRSDAEKITNTFIFNTFVFCQIFNEFNARKPEEKNVFKGVTKNHLFMGIIGITTVFQILIIQFLGKFFKIVRLGWRLWLVSVAIGLVSWPLAYVGKFIPVPVRPLPDYFKPRCCWKPPRRDEEEGGQS

SEQ ID NO: 158710 - protein, 51 aa, Zea Mays
MIFLCINMDKCHLDNHKCELEFKEFISIERHEHDKDTDVLASRALRMTRSV

SEQ ID NO: 158711 - protein, 464 aa, Zea Mays
MQGEIWSGSEGGAIKAWPWEALAKCLSSTPEEIHEAASLVEKSYIDLRNHATVGNMCSLPTADVKHMLADHCRLKVWSVTSMTFALWDAKTRELLKVFGIDGQVDLARPEAPVMPEQFIEEEIKAKPTKKEKLQGSLSFFRKSRNALMGAADAVRRVATKGTFVEDNRRTEAVAQAMNGTIWSGCTDGSIIVWDGNGNRLQEFHYHSSSVQCIEALGERIWVGYASGTIQVMDVEGNLQAGWIGHSCPVISMAVGDSYIFSLAHHGGIRGWSLSSPSPLDDILRYELASRELSYTRLENLKILVGTWNVAQEKACPEALKSWLGGAFFDVGLVVVGLQEVEMGAGVLAMAAAKESVGLEGSTNGQWWIDSIGKTLDEGISFHRVGSRQLAGLLIAAWARNDLKPHVGDVDAAAVPCGFGRAIGNKVSDCQGIFTFFWVSEGTRYHLFGLFITTRHPLGPPFCTI

SEQ ID NO: 158712 - protein, 870 aa, Zea Mays
MQGEIWSGSEGGAIKAWPWEALAKCLSSTPEEIHEAASLVEKSYIDLRNHATVGNMCSLPTADVKHMLADHCRLKVWSVTSMTFALWDAKTRELLKVFGIDGQVDLARPEAPVMPEQFIEEEIKAKPTKKEKLQGSLSFFRKSRNALMGAADAVRRVATKGTFVEDNRRTEAVAQAMNGTIWSGCTDGSIIVWDGNGNRLQEFHYHSSSVQCIEALGERIWVGYASGTIQVMDVEGNLQAGWIGHSCPVISMAVGDSYIFSLAHHGGIRGWSLSSPSPLDDILRYELASRELSYTRLENLKILVGTWNVAQEKACPEALKSWLGGAFFDVGLVVVGLQEVEMGAGVLAMAAAKESVGLEGSTNGQWWIDSIGKTLDEGISFHRVGSRQLAGLLIAAWARNDLKPHVGDVDAAAVPCGFGRAIGNKGGVGLRIRVFDRRICFVNNHFAAHQENVSRRNADFDHIYRTMTFNKPHGSTASATSVQLHKAVSANENQADEDRPELAEADMVVFLGDFNYRLDGITYDEARDMVSQRSFDWLRERDQLRAEMEAGNVFQGMREGRIKFPPTYKFQRHQMGLSGYDSGEKKRIPAWCDRILYRDSRSVSMPECSLECPVVAAITAYEACMDVTDSDHKPVRCTFSVDIARVDELIRRQEYGKIVESNKRVHSLLRELHFVPDTIVSTNNIILENQEDVILRITNNCETSKAAFEILCEGQSIRKQDGTKSEPVIRASFGFPLWLEVQPSSGLIGPGDTTEVAVHHEDFFTQEEFVDGVQQSWWCETTRDIEVVLSVNVTGVASTEAATHRITVRHCCPAPPAPPSANPRGPITDSPSDAVPGPKSSQSNHLLRSDFANFGSSEVRDLCGVRKRNL

SEQ ID NO: 158713 - protein, 864 aa, Zea Mays
MDPDDESAAQRKAADLHLPRVTEPASAPARTFCAAQRVLSYGDGPVASASAQRCASFPQRHGHGHGHGEAALAPAASFAAWVDGGPTPPSAVAAALERAMSQYDGAGDALPEFVGAGGGEGIFRVPLRAAVHPARPPPLEVRPHPLRETQVGAFLRTLVCDPRRRKLWAGAESGVRVWCLDEVFRGWWPGAGPRRRGDEEAAPFRDSVPVPPALCAAVDSANGLVWTGHREGRIRAWRVDHAAPAGGDPTGSAAMFKEAFAWQAFSRTPVLAIVVTPYGSEGGAIKAWPWEALAKCLSSTPEEIHEAASLVEKSYIDLRNHATVGNMCSLPTADVKHMLADHCRLKVWSVTSMTFALWDAKTRELLKVFGIDGQVDLARPEAPVMPEQFIEEEIKAKPTKKEKLQGSLSFFRKSRNALMGAADAVRRVATKGTFVEDNRRTEAVAQAMNGTIWSGCTDGSIIVWDGNGNRLQEFHYHSSSVQCIEALGERIWVGYASGTIQVMDVEGNLQAGWIGHSCPVISMAVGDSYIFSLAHHGGIRGWSLSSPSPLDDILRYELASRELSYTRLENLKILVGTWNVAQEKACPEALKSWLGGAFFDVGLVVVGLQEVEMGAGVLAMAAAKESVGLEGSTNGQWWIDSIGKTLDEGISFHRVGSRQLAGLLIAAWARNDLKPHVGDVDAAAVPCGFGRAIGNKGGVGLRIRVFDRRICFVNNHFAAHQENVSRRNADFDHIYRTMTFNKPHGSTASATSVQLHKAVSANENQADEDRPELAEADMVVFLGDFNYRLDGITYDEARDMVSQRSFDWLRERDQLRAEMEAGNVFQGMREGRIKFPPTYKFQRHQMGLSGTKLAWMSQIVIINQ

SEQ ID NO: 158714 - protein, 716 aa, Zea Mays
MDPDDESAAQRKAADLHLPRVTEPASAPARTFCAAQRVLSYGDGPVASASAQRCASFPQRHGHGHGHGEAALAPAASFAAWVDGGPTPPSAVAAALERAMSQYDGAGDALPEFVGAGGGEGIFRVPLRAAVHPARPPPLEVRPHPLRETQVGAFLRTLVCDPRRRKLWAGAESGVRVWCLDEVFRGWWPGAGPRRRGDEEAAPFRDSVPVPPALCAAVDSANGLVWTGHREGRIRAWRVDHAAPAGGDPTGSAAMFKEAFAWQAFSRTPVLAIVVTPYGEIWSGSEGGAIKAWPWEALAKCLSSTPEEIHEAASLVEKSYIDLRNHATVGNMCSLPTADVKHMLADHCRLKVWSVTSMTFALWDAKTRELLKVFGIDGQVDLARPEAPVMPEQFIEEEIKAKPTKKEKLQGSLSFFRKSRNALMGAADAVRRVATKGTFVEDNRRTEAVAQAMNGTIWSGCTDGSIIVWDGNGNRLQEFHYHSSSVQCIEALGERIWVGYASGTIQVMDVEGNLQAGWIGHSCPVISMAVGDSYIFSLAHHGGIRGWSLSSPSPLDDILRYELASRELSYTRLENLKILVGTWNVAQEKACPEALKSWLGGAFFDVGLVVVGLQEVEMGAGVLAMAAAKESVGLEGSTNGQWWIDSIGKTLDEGISFHRVGSRQLAGLLIAAWARNDLKPHVGDVDAAAVPCGFGRAIGNKDMFCKQSFCCTPRKC

SEQ ID NO: 158715 - protein, 862 aa, Zea Mays
MDPDDESAAQRKAADLHLPRVTEPASAPARTFCAAQRVLSYGDGPVASASAQRCASFPQRHGHGHGHGEAALAPAASFAAWVDGGPTPPSAVAAALERAMSQYDGAGDALPEFVGAGGGEGIFRVPLRAAVHPARPPPLEVRPHPLRETQVGAFLRTLVCDPRRRKLWAGAESGVRVWCLDEVFRGWWPGAGPRRRGDEEAAPFRDSVPVPPALCAAVDSANGLVWTGHREGRIRAWRVDHAAPAGGDPTGSAAMFKEAFAWQAFSRTPVLAIVVTPYGSEGGAIKAWPWEALAKCLSSTPEEIHEAASLVEKSYIDLRNHATVGNMCSLPTADVKHMLADHCRLKVWSVTSMTFALWDAKTRELLKVFGIDGQVDLARPEAPVMPEQFIEEEIKAKPTKKEKLQGSLSFFRKSRNALMGAADAVRRVATKGTFVEDNRRTEAVAQAMNGTIWSGCTDGSIIVWDGNGNRLQEFHYHSSSVQCIEALGERIWVGYASGTIQVMDVEGNLQAGWIGHSCPVISMAVGDSYIFSLAHHGGIRGWSLSSPSPLDDILRYELASRELSYTRLENLKILVGTWNVAQEKACPEALKSWLGGAFFDVGLVVVGLQEVEMGAGVLAMAAAKESVGLEGSTNGQWWIDSIGKTLDEGISFHRVGSRQLAGLLIAAWARNDLKPHVGDVDAAAVPCGFGRAIGNKGGVGLRIRVFDRRICFVNNHFAAHQENVSRRNADFDHIYRTMTFNKPHGSTASATSVQLHKAANENQADEDRPELAEADMVVFLGDFNYRLDGITYDEARDMVSQRSFDWLRERDQLRAEMEAGNVFQGMREGRIKFPPTYKFQRHQMGLSGTKLAWMSQIVIINQ

SEQ ID NO: 158716 - protein, 637 aa, Zea Mays
MDPDDESAAQRKAADLHLPRVTEPASAPARTFCAAQRVLSYGDGPVASASAQRCASFPQRHGHGHGHGEAALAPAASFAAWVDGGPTPPSAVAAALERAMSQYDGAGDALPEFVGAGGGEGIFRVPLRAAVHPARPPPLEVRPHPLRETQVGAFLRTLVCDPRRRKLWAGAESGVRVWCLDEVFRGWWPGAGPRRRGDEEAAPFRDSVPVPPALCAAVDSANGLVWTGHREGRIRAWRVDHAAPAGGDPTGSAAMFKEAFAWQAFSRTPVLAIVVTPYGSEGGAIKAWPWEALAKCLSSTPEEIHEAASLVEKSYIDLRNHATVGNMCSLPTADVKHMLADHCRLKVWSVTSMTFALWDAKTRELLKVFGIDGQVDLARPEAPVMPEQFIEEEIKAKPTKKEKLQGSLSFFRKSRNALMGAADAVRRVATKGTFVEDNRRTEAVAQAMNGTIWSGCTDGSIIVWDGNGNRLQEFHYHSSSVQCIEALGERIWVGYASGTIQVMDVEGNLQAGWIGHSCPVISMAVGDSYIFSLAHHGGIRGWSLSSPSPLDDILRYELASRELSYTRLENLKILVGTWNVAQEKACPEALKSWLGGAFFDVGLVVVGLQEVEMGAGVLAMAAAKESDLRAVPMGNGG

SEQ ID NO: 158717 - protein, 711 aa, Zea Mays
MDPDDESAAQRKAADLHLPRVTEPASAPARTFCAAQRVLSYGDGPVASASAQRCASFPQRHGHGHGHGEAALAPAASFAAWVDGGPTPPSAVAAALERAMSQYDGAGDALPEFVGAGGGEGIFRVPLRAAVHPARPPPLEVRPHPLRETQVGAFLRTLVCDPRRRKLWAGAESGVRVWCLDEVFRGWWPGAGPRRRGDEEAAPFRDSVPVPPALCAAVDSANGLVWTGHREGRIRAWRVDHAAPAGGDPTGSAAMFKEAFAWQAFSRTPVLAIVVTPYGSEGGAIKAWPWEALAKCLSSTPEEIHEAASLVEKSYIDLRNHATVGNMCSLPTADVKHMLADHCRLKVWSVTSMTFALWDAKTRELLKVFGIDGQVDLARPEAPVMPEQFIEEEIKAKPTKKEKLQGSLSFFRKSRNALMGAADAVRRVATKGTFVEDNRRTEAVAQAMNGTIWSGCTDGSIIVWDGNGNRLQEFHYHSSSVQCIEALGERIWVGYASGTIQVMDVEGNLQAGWIGHSCPVISMAVGDSYIFSLAHHGGIRGWSLSSPSPLDDILRYELASRELSYTRLENLKILVGTWNVAQEKACPEALKSWLGGAFFDVGLVVVGLQEVEMGAGVLAMAAAKESVGLEGSTNGQWWIDSIGKTLDEGISFHRVGSRQLAGLLIAAWARNDLKPHVGDVDAAAVPCGFGRAIGNKDMFCKQSFCCTPRKC

SEQ ID NO: 158718 - protein, 509 aa, Zea Mays
MAQPEKGSLLPQPKSLSLSQTKRRLPLPAAAEHRQFRVHHHAFDLQPIAQSRKHPSTPTAPAIKSPPLLPIRHLKEAPFPKSTTTEKQPQEIRSALGSGHSVAATMKEGRPGAGDYIASLLSSSPRLDFGGEEEEDCLDRFCGDPGFAARAARLSSFSGQRFAVTAGLFGLPPPLPAASGGGEFAGSREASSVSDPASAMKDANAKKRKAPAAAAAKGKGREPSAQAQAGEPKGPDAKRCCKAEGGEGEEGSPVKLPKPEQAGSDSSVEDGGAQNQKPPPPVKGKNAKPVEPPRDYVHVRARRGQATDSHSLAERVRRERISQRMKVLQDLVPGCNKVIGKALMLDEIINYVQSLQRQVEFLSMKLATVNPLDLSNLPTLLQKDMFQACGASASSVFSLESCSPGFPFGGQGDVFQSFVPNGLENPCGGLNPLDLALSQATGGQFGFQDGTAGTNLQQRNYWEEEEEDLQSVFHIDDNGQSQEHGASASAQSFHGQLQPQEGHMKMEFF

SEQ ID NO: 158719 - protein, 331 aa, Zea Mays
MKEGRPGAGDYIASLLSSSPRLDFGGEEEEDCLDRFCGDPGFAARAARLSSFSGQRFAVTAGLFGLPPPLPAASGGGEFAGSREASSVSDPASAMKDANAKKRKAPAAAAAKGKGREPSAQAQAGEPKGPDAKRCCKAEGGEGEEGSPVKLPKPEQAGSDSSVEDGGAQNQKPPPPVKGKNAKPVEPPRDYVHVRARRGQATDSHSLAERVRRERISQRMKVLQDLVPGCNKVIGKALMLDEIINYVQSLQRQVEFLSMKLATVNPLDLSNLPTLLQKDQRNYWEEEEEDLQSVFHIDDNGQSQEHGASASAQSFHGQLQPQEGHMKMEFF

SEQ ID NO: 158720 - protein, 91 aa, Zea Mays
MRIWELNHGRTVWVEISRMPPRYFRALLRLSSERFECFGQDNLICFTSWNQGKGLLYDVDKKSWSWITGCASQLCNSQVCFYEPRFDTPIC

SEQ ID NO: 158721 - protein, 66 aa, Zea Mays
MVCESIKTPQALKLSFHTFTKEKFSSSHLIKRVNIDRTSAIWLSLQGTSSYISYTDHLLIFPNDTC

SEQ ID NO: 158722 - protein, 174 aa, Zea Mays
MMGHGDVSFIRILEELRLHVVASTVYVLAEPTSRNLESNKKSQVQQKVVKKLPVSDLRGKLSGVASQRPQLSSTVQVPKPVKEVIKSNKPVQKRDPAPTTAPPDIKKPSAPAPVPAPSALPKQSQNKVDMKALVYMNEEDMKSLGIPMGPRKKILSALAHRKNKSSKSLPTSTS

SEQ ID NO: 158723 - protein, 1196 aa, Zea Mays
MSLSRCSHVRAYERGCFVLDRFAAARLGRRRATRTDPPHISLACGPPFDTCRPSTAPPSFHRSVRPVLPRSCAAQAPTLPCAQPRAPRMAMAAATGAGAVGEGMRRLTQLSLVSKVCSELESHLGVADRVLAEFVVELGRASASAAAFAAALRDHGAELPDYLVRSLHAVITAIPDSAPAPPASRGAGARGRVDKAAGEDEDQEPGLHQVRRGRVTRVANAGCFVRLDGGREGLVHVSQMPARGRGRAGATVTLGQEVFVKVVSVDGAKLGLSMLDIDQDTERGLHPMRRPHPAEEDAPRANPPADRPRPAGRKKGVSGIFVSDEDDDDKAGPPTRRPTRRMTSPERWEVKQLIAAGVLDAKNYPVLDEDEEGMLYQEEEVEELEIELNQDEPPFLWGKGRSSSDMSPVRISMNPEGSMSRAAALQSALTKERRDIRTQEQRGMVDAIPKDLNRSWEDPISSGRYLMQELMGTGLSAQSVPEWKMTYGKAGTYGQKSRLSIQEQRQSLPIFRLKKELISAVNDNQVLVVIGETGSGKTTQVTQYLAEAGYTTRGKIACTQPRRVAAESIAKRVAEEVGCRVGEEVGYSIRFDDCTGPETVIKYMTDGMLLREILVDGDLSSYSVVMLDEAHERTIYTDILFSLLKQLIKRRNDLKLIVTSATLDAEKFSGYFFDCNIFTIPGRTFPVEILHTKQAESDYMDAALITVLQIHLTEPEGDILLFLTGQEEIDHACERLHERMKAFGGDIPELIICPVYSALPTEVQSKIFEPAPPCKRKVVVATNIAEASITIDGIYYVVDPGFAKLNVYNPKLGLDSLVITPISQASAKQRAGRAGRTGPGKCYRLYTESAFRNEMPPTTIPEIQRANLGWTVLNMKAMGINDLLSFDFMDPPASQALISAMEQLYSLGALDEEGLLTRLGRKMAEFPQEPPLSKMLLASVDLGCSDEILTIIAMIQTGNIFYRPREKQAQADRKRSNFFQPEGDHLTLLTVYEAWKAKGFSGPWCVENFIQVNSLRRAQDVRKQLLEIMDKFKLNVISAGNNSTKIGKALTAGFFFHAARKDPSDGYRTLADHQQVYIHPSSALFHQQPQWVIYHEIVMTTKEYMRDVTAVDPRWLLELAPRSYKSVDPTKISKRKRQERIEPLYDRYNEPNSWRLINSCCRLSSEPMLYFLSCACIVQWACYLTVSAFWMPQTET

SEQ ID NO: 158724 - protein, 267 aa, Zea Mays
MEEKKDLLRKLTIVSIPFVFVAIPSVVIIVGMLSPHAAEPRAGSSSSGAAEAAPGQNHSVSMLSTMTGGQMILSCRAAFSGNWEYFHYFILDPYKPQRAFFQPQADPYILFCKWGYMGNFLQDVVVFNSSAAWAPRCRVDNGGCRYLFQDAHMFLITGKHGGDTEAHRVKVEETTEEQQTPAPAGPGPAPGPGPGPSPVPVPAPALVPSLAPSPASHQQRQEKTLIGDVLLRECRHLLGMFPTMCRRKPHSHPYVGKIIGRWRWWFN

SEQ ID NO: 158725 - protein, 215 aa, Zea Mays
MVKWMQDLRSSRERISSITCKRTPSCWDATARNQQWMWISRASVGIGDKKFYFLLPTRSIFASAAAARHAPIIPQQLPPPPYAHARAGRPRLSEFHDRSFEGDYGREVDEIGNGISETAMRGKLVKRNKKSSGDLDIYGGHRINVEAIGTLGEDSRSEIRSRGDRDIDNQQALQAEEKDVVSSVATVLSDLCGPGEWMPMAKLHNEVLIIIIMGS

SEQ ID NO: 158726 - protein, 218 aa, Zea Mays
MPGGSSGPDGEVDAGFAKLQGEDFEYYMQTYSIMLGRNSKKSTVDVDLSSLGGGMNISRHHARIFYDFQRRRFALDVIGKNGCLVEGVLHLPGNPPVKLDSQDLLQIGDKKFYFLLPTRSIFASAAAARHAPIIPQQLPPPPYAHARAGRPRLSEFHDRSFEGDYGREVDEIGNGISETAMRGKLVKRNKKSSGDLDIYGGHRINVEAIGTLGEVDQK

SEQ ID NO: 158727 - protein, 332 aa, Zea Mays
MPGGSSGPDGEVDAGFAKLQGEDFEYYMQTYSIMLGRNSKKSTVDVDLSSLGGGMNISRHHARIFYDFQRRRFALDVIGKNGCLVEGVLHLPGNPPVKLDSQDLLQIGDKKFYFLLPTRSIFASAAAARHAPIIPQQLPPPPYAHARAGRPRLSEFHDRSFEGDYGREVDEIGNGISETAMRGKLVKRNKKSSGDLDIYGGHRINVEAIGTLGEDSRSEIRSRGDRDIDNQQALQAEEKDVVSSVATVLSDLCGPGEWMPMAKLHNEFGNVWHPSRVRKYLTQDDWSPTETKGRPWFGLLALLRKYPEHFVINTRSKGRMTSEFVSLVSLLS

SEQ ID NO: 158728 - protein, 154 aa, Zea Mays
MEDALGSAVGPHFSGLRLDSRRLSLSPSSSPSRSASGNGTLVAAPGLAFPKAEDGTRKPFVIGVCGGTASGKTTVCDAIIQQLHDHRVALVNQDSFYHGLTEEQSEHVQDYNFDHPDRLLECMGKLTSGQSVNIPIYDFKNHRRCSEKFRKVVK

SEQ ID NO: 158729 - protein, 58 aa, Zea Mays
MHTLIRDKNITTPDFVFYSDRLIRLVVEHGLGHLPFTEKQVVTPTGTKQDLRNLAKRR

SEQ ID NO: 158730 - protein, 80 aa, Zea Mays
MHTLIRDKNITTPDFVFYSDRLIRLVVEHGLGHLPFTEKQVVTPTGSLYMGVDFCKKLCGVSIIRRCQNNLLFVTDVVCL

SEQ ID NO: 158731 - protein, 123 aa, Zea Mays
MHTLIRDKNITTPDFVFYSDRLIRLVVEHGLGHLPFTEKQVVTPTGSLYMGVDFCKKLCGVSIIRSGESMENALRACCKGIKIGKILFHRIGDNGQQLIYHKLPVDIAERHVLLLDPVLGTGP

SEQ ID NO: 158732 - protein, 380 aa, Zea Mays
MPGLTAPSDYAEEPPRHPALKINSKEPFNAEPHRSELVASYITPVDFFYKRNHGPIPKVEDLSRYTVSISGLVNKSIQLSMADIWSLPKYNVTATLQCAGNRRTAMSNVRKVRGVGWDISALGTATWGGAKLSDVLELVGIPKLSSVTSLGGKHVEFVSVDKCKEEKGGPYTASIPLNQVLNRDHGYPLRVVVPGVIGARSVKWLDSINVKEEECQGFFMQKDYKMFPPTVDWDNINWSTRRPQMDFPVQSAICTLEDVDVIKEGQARIAGYALSGGGRGIERVDVSADGGKTWVEARRYQKDNVAYVSDGPQSDKWAWVLFEATLDVPANPEIVVKAVDSAANVQPEKVEDIWNLRGILNTSWHRIKIQRSSCVERSKL

SEQ ID NO: 158733 - protein, 598 aa, Zea Mays
MGSLSMAEKAPGAALPESSCAYLLQELKMIWDEVGQEQSERERILEELEQECQEVYRRKVNSANMSRIQLHQALAESEAEFTNLLLSLGERSFPARVNTLISRPEKMAGTLKEQLNSITPALQEMQMRKDARVKQFVEVQTETHRIASEIAGRLAGGAVAVNEEDLSLKKLEEFQSELRRLKREKSDRLCKVEEYKVLIHNFAKVMGMDPSEILASVHPRLLDGPNEQQTKNISDDILNKLNMTVQQLKQEKSNRREKLQNLVKALTNLWNTLDTHMEERQPYGQIKVLAMTSVNGMLGPGSLTLETIQQVETEVQRLSQLKASKMEELFVKKRAEVDEICKKSHMGMPYQTEMDKIMNLIMSGDVVHDDLLKTMDEYIYRAKEEATSRKDIMDKVDKWMASWDEERWLEEYSRDDRRYSVSRGAHKHLKRAERARIIVNKIPGLVEQLMVKTQFWEQERNKIFYYDELPLLAMLKDYMFTLKEKEEEKYRQRENKKIQTLLVKRHENSIMLRPNTSFSRPSSRGFNTSPGSTSIWSSQVSAKVQLPDSENSPAEKDMRAKIIRNRGTQGILGNNRSCSISHEDKAEVSTVKQGISPI

SEQ ID NO: 158734 - protein, 568 aa, Zea Mays
MGSLSMAEKAPGAALPESSCAYLLQELKMIWDEVGQEQSERERILEELEQECQEVYRRKVNSANMSRIQLHQALAESEAEFTNLLLSLGERSFPARPEKMAGTLKEQLNSITPALQEMQMRKDARVKQFVEVQTETHRIASEIAGRLAGGAVAVNEEDLSLKKLEEFQSELRRLKREKSDRLCKVEEYKVLIHNFAKVMGMDPSEILASVHPRLLDGPNEQQTKNISDDILNKLNMTVQQLKQEKSNRREKLQNLVKALTNLWNTLDTHMEERQPYGQIKVETEVQRLSQLKASKMEELFVKKRAEVDEICKKSHMGMPYQTEMDKIMNLIMSGDVVHDDLLKTMDEYIYRAKEEATSRKDIMDKVDKWMASWDEERWLEEYSRDDRRYSVSRGAHKHLKRAERARIIVNKIPGLVEQLMVKTQFWEQERNKIFYYDELPLLAMLKDYMFTLKEKEEEKYRQRENKKIQTLLVKRHENSIMLRPNTSFSRPSSRGFNTSPGSTSIWSSQVSAKVQLPDSENSPAEKDMRAKIIRNRGTQGILGNNRSCSISHEDKAEVSTVKQGISPI

SEQ ID NO: 158735 - protein, 566 aa, Zea Mays
MGSLSMAEKAPGAALPESSCAYLLQELKMIWDEVGQEQSERERILEELEQECQEVYRRKVNSANMSRIQLHQALAESEAEFTNLLLSLGERSFPARPEKMAGTLKEQLNSITPALQEMQMRKDARVKQFVEVQTETHRIASEIAGRLAGGAVAVNEEDLSLKKLEEFQSELRRLKREKSDRLCKVEEYKVLIHNFAKVMGMDPSEILASVHPRLLDGPNEQQTKNISDDILNKLNMTVQQLKQEKSNRREKLQNLVKALTNLWNTLDTHMEERQPYGQIKVLAMTSVNGMLGPGSLTLETIQQVETEVQRLSQLKASKMEELFVKKRAEVDEICKKSHMGMPYQTEMDKIMNLIMSGDVVHDDLLKTMDEYIYRAKEEATSRKDIMDKVDKWMASWDEERWLEEYSRDDRRYSVSRGAHKHLKRAERARIIVNKIPGLVEQLMVKTQFWEQERNKIFYYDEENKKIQTLLVKRHENSIMLRPNTSFSRPSSRGFNTSPGSTSIWSSQVSAKVQLPDSENSPAEKDMRAKIIRNRGTQGILGNNRSCSISHEDKAEVSTVKQGISPI

SEQ ID NO: 158736 - protein, 565 aa, Zea Mays
MGSLSMAEKAPGAALPESSCAYLLQELKMIWDEVGQEQSERERILEELEQECQEVYRRKVNSANMSRIQLHQALAESEAEFTNLLLSLGERSFPARPEKMAGTLKEQLNSITPALQEMQMRKDARVKQFVEVQTETHRIASEIAGRLAGGAVAVNEEDLSLKKLEEFQSELRRLKREKSDRLCKVEEYKVLIHNFAKVMGMDPSEILASVHPRLLDGPNEQQTKNISDDILNKLNMTVQQLKQEKSNRREKLQNLVKALTNLWNTLDTHMEERQPYGQIKVLAMTSVNGMLGPGSLTLETIQQVETEVQRLSQLKASKMEELFVKKRAEVDEICKKSHMGMPYQTEMDKIMNLIMSGDVVHDDLLKTMDEYIYRAKEEATSRKDIMDKVDKWMASWDEERWLEEYSRDDRRYSVSRGAHKHLKRAERARIIVNKIPGLVEQLMVKTQFWEQERNKIFYYDELPLLAMLKDYMFTLKEKEEEKYRQRENKKIQTLLVKRHENSIMLRPNTSFSRPSSRGFNTSPGSTSIWSSQVSAKVQLPDSENSPAEKDMRAKIIRNREIVCLT

SEQ ID NO: 158737 - protein, 58 aa, Zea Mays
MMDQWSMEENLNGLSMAEIAGLEEALTVALAVIRNKLAMKVTGCAGPKPEAHTLFQRR

SEQ ID NO: 158738 - protein, 50 aa, Zea Mays
MKHGTGKEGGNNVSAGSIFFYEIVQSRHGLAERSTRTNPQEGKKKPPLLL

SEQ ID NO: 158739 - protein, 399 aa, Zea Mays
MACGSRSRTNEMVDEYEKLVLRMNPPRVTVDNDSDMTATLLKVDSANKYGTLLEVVQVLTDLKLTIKRAYISSDGEWFMDVFHVVDQDGNKLYDCQVIDRIEQSLGAGSLSFRGPPERAVAVEAEAEEAQTTIELVGRDRPGLLSEVFAVLADLRCNVVASEVWTHDGRVAALVHVTDADTLGAIEDPARLDTARRLLRHVLRGSSRDKKAARAAVSARVVEHAPRRLHQMMRADRSARRDGEGEGEGDGERERGGAGMPVVAVEDCAERGYTLVNVRCRDRAKLLFDTVCTLTDMQYVVFHGTVIAEGSEAYQVRTHVLGCHHRNTPIHGTTMRDGTVRVASACASHRAGSTLCVCVRPLGFDQCQRCLAARQILACEREIHGLRGEKKEKQKNLSMY

SEQ ID NO: 158740 - protein, 270 aa, Zea Mays
MAAETKPAAASGVAGEMEVEAYRRLFPVAFLERHLGESVRIDARRLREARPTTVALGAVSSAHGSALARLGDTAMLASVKLEVMSPPAEHPDEGSVAVEFHMPPICSPLVRPGRPTDVAPVISKALEDVLTSSGMLNLKDLCLITGKASWLAYLDIYCLNADGSLFDAALISAVAAFTHLEIPLVSVGDDGRLFTVGGNDGKNKFELVNREKRKLTLDSSDRLVSLQKLGGAVTCMATIKECISLAKERRRSLREILLDSIKAMEVDQTE

SEQ ID NO: 158741 - protein, 155 aa, Zea Mays
MIWDIYCLNADGSLFDAALISAVAAFTHLEIPLVSVGDDGRLFTVGGNDGKNKFELVNREKRKLTLGAIPLSLTCALHKDEILADPTSEEESIIETYVTVVVDSSDRLVSLQKLGGAVTCMATIKECISLAKERRRSLREILLDSIKAMEVDQTE

SEQ ID NO: 158742 - protein, 127 aa, Zea Mays
MEIPLVSVGDDGRLFTVGGNDGKNKFELVNREKRKLTLGAIPLSLTCALHKDEILADPTSEEESIIETYVTVVVDSSDRLVSLQKLGGAVTCMATIKECISLAKERRRSLREILLDSIKAMEVDQTE

SEQ ID NO: 158743 - protein, 402 aa, Zea Mays
MALPGPAATRAAVRLCRIAASASSYLPSAAADGRRELELPFALVAERGMVVGGHRGMGMNAVGAPPGARFGAARERENTLLSFGRAAAHAAVAFVEFDVQVTKDGCPIIFHDDFILTQGTGAVHERRVTDLLLEDFLSYGPQRESCKVSKPLLRRAGDGRVLNWTTEDDDSLCTLQEAFQRVSPRLGFNIELKFDDSIMYHRKDLQCALKAVLQVQSFPLLRIELSKVVFEHARNRPVFFSSFHPDAAQMMRELQSLYPVLFLTEGGTSKHHDPRRNSFDDAVRVCLEYDLHGIVSEARGVLKNPSAVARAQESNLALLTYGQLNNVWEAVYIQYLMGVHGVIVDRVEEISDAVAGFGLGKPGLGRGGAGVDGAKTHQAQAFSQQQLGFLLRLIPELIEQRH

SEQ ID NO: 158744 - protein, 321 aa, Zea Mays
MLIRVTKDGCPIIFHDDFILTQGTGAVHERRVTDLLLEDFLSYGPQRESCKVSYLLAIYFFSCEVHECMLKALIYSLSFALAFQVSKPLLRRAGDGRVLNWTTEDDDSLCTLQEAFQRVSPRLGFNIELKFDDSIMYHRKDLQCALKAVLQVVFEHARNRPVFFSSFHPDAAQMMRELQSLYPVLFLTEGGTSKHHDPRRNSFDDAVRVCLEYDLHGIVSEARGVLKNPSAVARAQESNLALLTNVWEAVYIQYLMGVHGVIVDRVEEISDAVAGFGLGKPGLGRGGAGVDGAKTHQAQAFSQQQLGFLLRLIPELIEQRH

SEQ ID NO: 158745 - protein, 218 aa, Zea Mays
MSAERAPVLVRHGGGGVEALRQLPPGFRFRPTDEELVVQYLRRKAIGVPLPAAVIPVFRDLYSRDPWDVVAVSAPADTRSEGEKYFFAVRPASGGKSSGAGTGSRAAAGGRWKPSGKEKPVVLPRPCGGGSLLVGVKRAMTFVPRRRKKTAALPSAALKTGWVMHEYRLAAPLHKNVSDSSLLHIRRVHASTSLPLSLSLSLSLPPSPSEVIRNKSCM

SEQ ID NO: 158746 - protein, 217 aa, Zea Mays
MSAERAPVLVRHGGGGVEALRQLPPGFRFRPTDEELVVQYLRRKAIGVPLPAAVIPVFRDLYSRDPWDVVAVSAPDTRSEGEKYFFAVRPASGGKSSGAGTGSRAAAGGRWKPSGKEKPVVLPRPCGGGSLLVGVKRAMTFVPRRRKKTAALPSAALKTGWVMHEYRLAAPLHKNVSDSSLLHIRRVHASTSLPLSLSLSLSLPPSPSEVIRNKSCM

SEQ ID NO: 158747 - protein, 172 aa, Zea Mays
MLGVARRRLGSGCVLAQLAQALRPAAAPARTYSAAAKEITVREALNTALDEEMSADPSVFLMGEEVGEYQGAYKISKGLLDKYGPDRVLDTPITEAGFTGIGVGAAYHGLRPIVEFMTFNFSMQAIDHIINSAAKSNYMSAGQISVPIVFRGPNGAAAGVGAQHSQKMLEVC

SEQ ID NO: 158748 - protein, 345 aa, Zea Mays
MDGSSCTGKRITVREALNTALDEEMSADPSVFLMGEEVGEYQGAYKISKGLLDKYGPDRVLDTPITEAGFTGIGVGAAYHGLRPIVEFMTFNFSMQAIDHIINSAAKSNYMSAGQISVPIVFRGPNGAAAGVGAQHSQCYAAWYAHVPGLKVLAPYSAEDARGLLKAAIRDPDPVVFLENELLYGESFPVSAEVLDSSFCLPIGKAKIERQGKDVTITAFSKMVGYALQAADILAKEGISAEVINLRSIRPLDRATINASVRKTNRLVTVEEGFPQHGIGAEICMSVVEDSFEYLDAPVERIAGADVPMPYAANLERMAVPQVDDIVRAAKRACYRAAVPMAATA

SEQ ID NO: 158749 - protein, 514 aa, Zea Mays
MGLPQPSTVEDDAPTALRTSISCPPHSGGVSACDLDGLPAGSSSRRVLSYPLICDFDRKATLDAPNESNGYSKDGCEFGEPADLHGLNIDSRNTNSWSSPKLVPSVHMPARRVVGFDSGCIGGSDGAETDMVDSSLVDRNSHLPFDQHELQARKRLFSPLKNVLVKQFNGDMLNLPSGDSRFRHSDSADKLYSTGFQDNKKANTGCINFFETRDTPASRCSSRSPEWDVTRSNSNSFTDGPLLGSKDYISYYDHLAASAKLAHSPLSLSPLSPKYMNKIKVTGSQRYIMKDLEDDFLDLKETGGSGGARMPEVSKGSNLLHDELDVMTPKWGSLRRYQNWGPESSPTSPRIGYGRSLSLHVRRSLVGSFEESLLSGRYSYGKDSQTIDGFLAVLNVTGGSFFPTTQKLPFSVTSIDEDSSLLYYSSIDLAGRLPSNNTKSPKLQRSYSNNDSRSAKSRLRIPVKGRIQLVVSNPEKTPLHTFFCNYDLSDMPPGTKAATVDRTATQMMNQKKEI

SEQ ID NO: 158750 - protein, 436 aa, Zea Mays
MGLPQPSTVEDDAPTALRTSISCPPHSGGVSACDLDGLPAGSSSRRVLSYPLICDFDRKATLDAPNESNGYSKDGCEFGEPADLHGLNIDSRNTNSWSSPKLVPSVHMPARRVVGFDSGCIGGSDGAETDMVDSSLVDRNSHLPFDQHELQARKRLFSPLKNVLVKQFNGDMLNLPSGDSRFRHSDSADKLYSTGFQDNKKANTGCINFFETRDTPASRCSSRSPEWDVTRSNSNSFTDGPLLGSKDYISYYDHLAASAKLAHSPLSLSPLSPKYMNKIKVTGSQRYIMKDLEDDFLDLKETGGSGGARMPEVSKGSNLLHDELDVMTPKWGSLRRYQNWGPESSPTSPRIGYGRSLSLHVRRSLVGSFEESLLSGRYSYGKDSQTIDGFLAVLNVTGCLRITPKAQSSKEATVIMIRGQQRVVYASLLRVAYSWW

SEQ ID NO: 158751 - protein, 252 aa, Zea Mays
MNQRRDRNPAYAKASYCQGCYSALRLNKNVESKAVELLQAIPKPFLSLHLRFEPDMVAYSRCSYTGLSSKSMDSIEAARREGRKVLTGDAARLWRNRGKCPLTPSETAFILQALGIPTNTNIYLAAGDGLMELEGFTSVYKNTYTKSSLLTHEAFENMHGNTKAALDYYVSVNSDAYVATFFGNMDKMVTAMRTMQGLQRTLVLSRRAFANYTAAGLAGQQLAKAMWDAHREEYVRGRGSALPEYCFCEFKL

SEQ ID NO: 158752 - protein, 134 aa, Zea Mays
MEPDRVSPVLIASLCSHATNSQPPTREQAQGRRLASRALAPRTDTQAWIAPPLIGASSVATGVRRRRRRPVVAACHRRREAAVSLGAAPGCAPRTSTPSSSRRWLTSSAPGRGARHRPGSASKADTLPSPAWIQ

SEQ ID NO: 158753 - protein, 366 aa, Zea Mays
MFYRRKKANKAALLPSSEDSTQLATTSMDKSALSTSQADSSSGVPGITVDKSVEFSYEELFNATEGFSMSNKIGQGGFGAVYYAELRGEKAAIKKMDMQASHEFLAELKVLTHVHHLNLVRLIGFCTESSLFLVYEFIENGNLSQHLRGTGYEPLSWAARVQIALDSARGLEYIHEHTVPVYIHRDIKSANILIDKNYRAKVADFGLTKLTEVGNTSLPTRGIVGTFGYMPPEYARYGDVSPKVDVYAFGVVLYELISAKDAIVRSTESSSDSKGLVYLFEEALNTPDPKEGLQRLIDPALGEDYPIDSILKMTVLARACTQEDPKARPTMRSIVVALMTLSSTSEFWDMNAIQENQGVVNLMSGR

SEQ ID NO: 158754 - protein, 547 aa, Zea Mays
MARILMRLLLLAAAAAVAAGDGCLNSGCVALGSYLVARNQNLTYIASLFGIGDYHALARYNPGTTNLDYIQAGQSVNISFTCGCHTFPNSDATYLGGSFPHKVVTGDTYGGIAQNYNNLTSAAWLAVTNPYPTNNIPDTNTVVNVTVNCTCGDPKISSDYGFFLTYPLMGQTLAAVAANYSFNSSSQLDLLRKYNPGMDTATSGLVFIPVKDGNGSYHPLKPPGNGGSIGAIVGGVVGGVAILVLGVLLYIMFYRRKKANKAALLPSSEDSTQLATTSMDKSALSTSQADSSSGVPGITVDKSVEFSYEELFNATEGFSMSNKIGQGGFGAVYYAELRGEKAAIKKMDMQASHEFLAELKVLTHVHHLNLVRLIGFCTESSLFLVYEFIENGNLSQHLRGTGYEPLSWAARVQIALDSARGLEYIHEHTVPVYIHRDIKSANILIDKNYRAKVADFGLTKLTEVGNTSLPTRGIVGTFGYMPPEYARYGDVSPKVDVYAFGVVLYELISAKDAIVRSTESSSDSKGLVYLVINSFTFCSWGKDQWSS

SEQ ID NO: 158755 - protein, 297 aa, Zea Mays
MFYRRKKANKAALLPSSEDSTQLATTSMDKSALSTSQADSSSGVPGITVDKSVEFSYEELFNATEGFSMSNKIGQGGFGAVYYAELRGEKAAIKKMDMQASHEFLAELKVLTHVHHLNLVRLIGFCTESSLFLVYEFIENGNLSQHLRGTGYEPLSWAARVQIALDSARGLEYIHEHTVPVYIHRDIKSANILIDKNYRAKVADFGLTKLTEVGNTSLPTRGIVGTFGYMPPEYARYGDVSPKVDVYAFGVVLYELISAKDAIVRSTESSSDSKGLVYLCSLRRLSTHRIPRKAFKD

SEQ ID NO: 158756 - protein, 548 aa, Zea Mays
MARILMRLLLLAAAAAVAAGDGCLNSGCVALGSYLVARNQNLTYIASLFGIGDYHALARYNPGTTNLDYIQAGQSVNISFTCGCHTFPNSDATYLGGSFPHKVVTGDTYGGIAQNYNNLTSAAWLAVTNPYPTNNIPDTNTVVNVTVNCTCGDPKISSDYGFFLTYPLMGQTLAAVAANYSFNSSSQLDLLRKYNPGMDTATSGLVFIPVKDGNGSYHPLKPPGNGGSIGAIVGGVVGGVAILVLGVLLYIMFYRRKKANKAALLPSSEDSTQLATTSMDKSALSTSQADSSSGVPGITVDKSVEFSYEELFNATEGFSMSNKIGQGGFGAVYYAELRGEKAAIKKMDMQASHEFLAELKVLTHVHHLNLVRLIGFCTESSLFLVYEFIENGNLSQHLRGTGYEPLSWAARVQIALDSARGLEYIHEHTVPVYIHRDIKSANILIDKNYRAKVADFGLTKLTEVGNTSLPTRGIVGTFGYMPPEYARYGDVSPKVDVYAFGVVLYELISAKDAIVRSTESSSDSKGLVYLCSLRRLSTHRIPRKAFKD

SEQ ID NO: 158757 - protein, 423 aa, Zea Mays
MTKISRSLLVVIALVLLGPHLPPSEALTPKQGVRSKTFLSPPILLRPGDVADKFYYDIPFPRGHLALKSFNGEVVDERGAPVPLHETYLHHWVVQPYYALVVSAEGGSSRPRTIPARNAGVCSGHTLGQYYGLGSETRRTATWVPDPYGIEIGDPAAAPAEGYEQRWLLNVHAIDTRGAADRTMACTECRCDVYNVTADWRGHAIEPGYAGGLRCCYDGTRCGAAAEGAEGKARTVFLRYTVMWRDWSPAAVLPVRIYIFDVAGCGVEYDVEEQCSGGAGGECVHVKTATQALPRGGDVVFGVAHQHAGGAGASLHGADGRLLCESAATYGGGREAGDEAGYIVGMSTCYPRPGAVTVRDGEPLTVVSRYSSDRRHTGVMGLFYILVADHARQLPPQEGLCFSFPVPCAYRHGCRATCEIFWC

SEQ ID NO: 158758 - protein, 269 aa, Zea Mays
MDLERPPPASAAEAAGAAACSICLDPVLACVAGRSVAKLQCGHEFHLDCIGSAFNAKGAMQCPNCRKIEKGRWLYASGRHPPADIDMGGWVTSDNYDITSELPFGFQWCPFSGFTQLASMLGVREAEPTYHTTGDHSSAASSSLVCPYLALRGFLHPVNVPSTSNSGAESTSFHRHSTGLEGHVTPDLNNAPVFHATESRNHDSEHRHLSNLPVSGTPEYSMTPFGIGVPRYDSGSQQGFRSYAHHHPLIHRLLLKKLHIMLLYGSIGC

SEQ ID NO: 158759 - protein, 355 aa, Zea Mays
MQCPNCRKIEKGRWLYASGRHPPADIDMGGWVTSDNYDITSELPFGFQWCPFSGFTQLASMLGVREAEPTYHTTGDHSSAASSSLVCPYLALRGFLHPVNVPSTSNSGAESTSFHRHSTGLEGHVTPDLNNAPVFHATESRNHDSEHRHLSNLPVSGTPEYSMTPFGIGVPRYDSGSQQGFRSYAHHHPLIHRLTPRSGSNLVAPLGSVPAVVAETRGHGHGAPGHMYQHSSVQGSPFPPTTRRVRPRALTITSFIAATSSAEIAGPLGHGFPAPGAVNRSVSDAEGIDRAYTWGREGYDLFPWTPAEWGTFNPMQNHAHGSFTRRPAGERMPQSRPENGYQPPVPTSQRMPPFL

SEQ ID NO: 158760 - protein, 253 aa, Zea Mays
MDLERPPPASAAEAAGAAACSICLDPVLACVAGRSVAKLQCGHEFHLDCIGSAFNAKGAMQCPNCRKIEKGRWLYASGRHPPADIDMGGWVTSDNYDITSELPFGFQWCPFSGFTQLASMLGVREAEPTYHTTGDHSSAASSSLVCPYLALRGFLHPVNVPSTSNSGAESTSFHRHSTGLEGHVTPDLNNAPVFHATESRNHDSEHRHLSNLPVSGTPEYSMTPFGIGVPRYDSGSQQGFRSYAHHHPLIHSC

SEQ ID NO: 158761 - protein, 245 aa, Zea Mays
MADGEDIGHARPQHPMKQSRFDFTKLRALSSACDTHPPEHLISGCECHESDTQQTTNSGTPLLFSAVNCWLKCMLLEPYNQTDHPECKSRPDSGLSAITELDPGYITAKRTIVTASTQIIEGAYPTEGCTNKAVRGDQCDNCRHMLNPTELIDPKCKVRNEKARRYLSSMRKKDPVPFSQKFPSADPLALKLLEKLLAFDPKDRLTAEEALRDPYFKGLAGVEREPSYQPIRKVEFDFEHKRMSK

SEQ ID NO: 158762 - protein, 251 aa, Zea Mays
MLNPTELIDPKCKVRNEKARRYLSSMRKKDPVPFSQKFPSADPLALKLLEKLLAFDPKDRLTAEEALRDPYFKGLAGVEREPSYQPIRKVEFDFEHKRMSNAVDQFKKQFSHLEESGGNDPSVPTDRKHASLLRTTVVQSNPIPAKEQPLAVSSRVRPVSDDSCKNPWEKASGPRNVTRTSLTPQGLQAQAGSVRVNGPVTDSRYPAHQQIPQAYGYRQMPARLDSTNPSQAMGGYTLQSQKETLFEELPF

SEQ ID NO: 158763 - protein, 240 aa, Zea Mays
MLGYCIQGDQRLLAYEFATMGSLHDILHGRKGVAGAQPGPALDWMQRVKIAVDAAKGLEYLHEKVQPSIVHRDIRSSNVLLFEDYKAKIADFNLSSQSPDMAARLHSTRVLGTFGYHAPEYAMTGQLTQKSDVYSFGVVLLELLTGRKPVDHTMPRGQQSLVTWATPRLGEDKVKQCVDPRLNGEYPPKGVAKLAAVAALCVQYESEFRPSMSIVVKALSPLLVNAPYQPAAAPDVSSDA

SEQ ID NO: 158764 - protein, 303 aa, Zea Mays
MDSDVEMNAASDEEVMDDEDYYDYCYSDVGDDGDGGSEEELVPVDYDEGLEAEGTDETFVVLNEEVISERQEEDVSKVSAVLLITREEACALLHHYKWNISKLSDEWFADEEKVRHTVGLLLNGNHEPGSRKLTCGICFEGYSSDTMSSAGCAHFYCHECWEGYISAAIGGGPGCLSLRCPDPSCSAMVLQGMVNELAKDEDKAKYARFLLRAYVEGSKKTKWCPAPDCTCAVEFLGDENYDVSCNCKFSFCWNCTEEAHRPVNCETVSKWILKNSAESENMNWFVAGSGLAFDMWSSSFCFC

SEQ ID NO: 158765 - protein, 301 aa, Zea Mays
MDSDVEMNAASDEEVMDDEDYYDYCYSDVGDDGDGGSEEELVPVDYDEGLEAEGTDEVVSRREQTFVVLNEEVISERQEEDVSKVSAVLLITREEACALLHHYKWNISKLSDEWFADEEKVRHTVGLLLNGNHEPGSRKLTCGICFEGYSSDTMSSAGCAHFYCHECWEGYISAAIGGGPGCLSLRCPDPSCSAMVLQGMVNELAKDEDKAKYARFLLRAYVEGSKKTKWCPAPDCTCAVEFLGDENYDVSCNCKFSFCWNCTEEAHRPVNCETVSKWILKNSAESENMNCRHKQLRHCST

SEQ ID NO: 158766 - protein, 145 aa, Zea Mays
MDSDVEMNAASDEEVMDDEDYYDYCYSDVGDDGDGGSEEELVPVDYDEGLEAEGTDEVVSRREQTFVVLNEEVISERQEEDVSKVSAVLLITREEACALLHHYKWNISKLSDEWFADEEKVRHTVGLLLNGNHEPGSRKGILLIR

SEQ ID NO: 158767 - protein, 292 aa, Zea Mays
MDSDVEMNAASDEEVMDDEDYYDYCYSDVGDDGDGGSEEELVPVDYDEGLEAEGTDEVVSRREQTFVVLNEEVISERQEEDVSKVSAVLLITREEACALLHHYKWNISKLSDEWFADEEKVRHTVGLLLNGNHEPGSRKLTCGICFEGYSSDTMSSAGCAHFYCHECWEGYISAAIGGGPGCLSLRCPDPSCSAMVLQGMVNELAKDEDKAKYARFLLRAYVEGSKKTKWCPAPDCTCAVEFLGDENYDVSCNCKFSFCWNCTEEAHRPVNCETVSKWILKNSAESENMNWQ

SEQ ID NO: 158768 - protein, 230 aa, Zea Mays
MLLLKALGPDSKLNKVLLMELPREDFLPAVVAFNTDAAFSSKDSLDGGDFSAPLVLTLCFMSLENLSNDAGREWALVGEDGVDLALVDFAFELTTSFLSERRPLSACFERLEFDLVSWGFLLSVPLLLGGALIFSNLPCSFSSDRAPASLELPLVEEAWAALPLPRRKVEELVTTRSSGLPTQAWRPGTGLTPLRIGTGVAASRRSTWTNCPSWMTSLRMRSCCSSGSDT

SEQ ID NO: 158769 - protein, 386 aa, Zea Mays
MVAREIAPCRARNCSTACCGFCSSADELTSAYELKHRTMLSAAEASCMASTAAICAASLYFRSSFPSLTSDGGSVVHEALASVSFLLLAATFTRLVTFGLFKTPDVLLIGEESLLFTTLSESSAGALAELFLGGVRILLSSLFDGFSSANDFRLGVEELRFSDFFSALAGFESELPLSFASAFPSQLLLKALGPDSKLNKVLLMELPREDFLPAVVAFNTDAAFSSKDSLDGGDFSAPLVLTLCFMSLENLSNDAGREWALVGEDGVDLALVDFAFELTTSFLSERRPLSACFERLEFDLGTGILGTTIGGGGLGGLAAAKKKSGGAGHHKILRAADAGMAARDRPDPPEDRHRGGCLETVDMDELPQLDDVAEDEVVLLVRQRHV

SEQ ID NO: 158770 - protein, 407 aa, Zea Mays
MVAREIAPCRARNCSTACCGFCSSADELTSAYELKHRTMLSAAEASCMASTAAICAASLYFRSSFPSLTSDGGSVVHEALASVSFLLLAATFTRLVTFGLFKTPDVLLIGEESLLFTTLSESSAGALAELFLGGVRILLSSLFDGFSSANDFRLGVEELRFSDFFSALAGFESELPLSFASAFPSQLLLKALGPDSKLNKVLLMELPREDFLPAVVAFNTDAAFSSKDSLDGGDFSAPLVLTLCFMSLENLSNDAGREWALVGEDGVDLALVDFAFELTTSFLSERRPLSACFERLEFDLRQGTGILGTTIGGGGLGGLAAAKKKSGGAGHHKILRAADAGMAARDRPDPPEDRHRGGCLETVDMDELPQLDDVAEDEVVLLVRQRHVGGVRRVGHLEELEEDPGYQ

SEQ ID NO: 158771 - protein, 376 aa, Zea Mays
MLSAAEASCMASTAAICAASLYFRSSFPSLTSDGGSVVHEALASVSFLLLAATFTRLVTFGLFKTPDVLLIGEESLLFTTLSESSAGALAELFLGGVRILLSSLFDGFSSANDFRLGVEELRFSDFFSALAGFESELPLSFASAFPSQLLLKALGPDSKLNKVLLMELPREDFLPAVVAFNTDAAFSSKDSLDGGDFSAPLVLTLCFMSLENLSNDAGREWALVGEDGVDLALVDFAFELTTSFLSERRPLSACFERLEFDLRQGTGILGTTIGGGGLGGLAAAKKKSGGAGHHKILRAADAGMAARDRPDPPEDRHRGGCLETVDMDELPQLDDVAEDEVVLLVRQRHVGGVRRVGHLEELEEDPGYQRRHRCSS

SEQ ID NO: 158772 - protein, 203 aa, Zea Mays
MASTASPPVFERVAGIRAIAESGRFKAWLLDQFGVLHDGKKPYPGAILALEKLAENGAKMVIISNSSRRSSVTMKKLKSLGFDTSCFLATITSGELTHQHLQKRDDPWFAALGRKCIHITWDDRGAISLEGLGLQVVNNVDDAEFILAHGTEALGSPSGVPLPKSLEELEQVLMLGIEKRLPMVVANPDYVTVEARDLRVMPG

SEQ ID NO: 158773 - protein, 64 aa, Zea Mays
MIACLLLRRLGSVPERSLGGASSVLLSKGARVSQMYLRNSVIIIYSVPSASVLWRGSQVLMHAR

SEQ ID NO: 158774 - protein, 1386 aa, Zea Mays
MELAGVGGLEDEDWYDVGTTTAPAATKPPPLTHDDNRGFLRMLREKKERYELQSPALMNWLAWSERRLGVEAHKVEVRFERLAVEADVRVGSRAVPTLLNSAVNAAQELATSVHMCVTRKRPMRIINEVSGVIRPSRMTLLLGAPGSGKTTLLKALAGKLDSSLKFKGKVMYNGEEMNHSTPQYLRAYVSQYDLHHAEMTVRETINFSSKMFGTNNEFEMLGEAIRRKKGVINKVDQDLDSFIKATTFGEGSNLTTNYIIKILGLSECADTLVGDEMRRGISGGQKKRATIGEMLVGLARCFFMDDISTGLDSSTTFEIMKFLQQMAHLMDLTMVISLLQPPPETLELFDDIILLCEGQIVYHGPRENATDFFESMGFKCPDRKNVADFLQEVTSKMDQKQYWAGDQNKYQYHTIENFAQSFRTSYLPLLVEDKQCSSNNTGKKKVVKVNASRRISRWNIFKACFSREVLLLKRNSPVHIFKTIQITVMALVISTLFLRTKMSHDSVLDANKYMGALFMAVVIVNFNGMTEIAMTIKRLPTFYKQRELLALPGWALLCSVYLISIPISLLETGLWTCLTYYVIGYAPSIIRFFQHFLVLFSMHQMSMGLYRFLAAIGRTQVMANMLGTAALIAIYILGGFVISKDDLQPWLRWGYWTSPFTYAQNAIALNEFHDKRWATEFYYNNANTVGEAILMIRGLLTEWHWYWICVAILFGYSLVFNIFSIFALEFMNSPHKHQLNIKTTKANFVNHRQMAENGNSSNDQAILPFRPLSLVFDHIHYFVDMPKIANNGATEKKLQLLQDVSGAFRPGVLTALMGITGAGKTTLLDVLAGRKTGGYIEGTIKIAGYPKKQETFSRISGYCEQSDIHSPNLTVHESLKFSAWLRLPSNVKPHQRDMFIEEVMSLVELTDLKNAMVGIPGATGLSAEQRKRLTIAVELVASPSIIFMDEPTTGLDARAAAIVMRTVRKTVDTGRTVVCTIHQPSIEIFESFDELLLMKRGGQLIYSGSLGPLSSNMIKYFEAIPGVPKINKGQNPAAWVLDISSHITEYEIGVDYAEIYRNSSLYRENRLLIDELEQPEPNTDDLHFPQGYWQNFTTQCAACLWKQNCAYWKNSEHNVVRFINTFAVSIMFGVVFWKIGSNIKVEQDVFNILGIVYGSALFLGFMNCSILQPVVAMERVVLYREKAAGMYSTMAYAIAQVAVELPYMLVQVLIFSSIVYPMIGFQLSAAKFFWFFLYLVMSFMYYTLYGMMTVALTPNIEIAMGLSFLIFIFWNVFSGFIIARELMPVWWRWVYWADPAAWTVYGLMFSQLADRTEQILVPGLGVQTVREFLEGYLGLQDRYFELVTCLHLAIIGLFAFLFFLAIKHLNFQRRNTSRFKGILQNV

SEQ ID NO: 158775 - protein, 1388 aa, Zea Mays
MELAGVGGLEDEDWYDVGTTTAPAATKPPPLTHDDNRGFLRMLREKKERLGVEAHKVEVRFERLAVEADVRVGSRAVPTLLNSAVNAAQELATSVHMCVTRKRPMRIINEVSGVIRPSRMTLLLGAPGSGKTTLLKALAGKLDSSLKFKGKVMYNGEEMNHSTPQYLRAYVSQYDLHHAEMTVRETINFSSKMFGTNNEFEMLGEAIRRKKGVINKVDQDLDSFIKATTFGEGSNLTTNYIIKILGLSECADTLVGDEMRRGISGGQKKRATIGEMLVGLARCFFMDDISTGLDSSTTFEIMKFLQQMAHLMDLTMVISLLQPPPETLELFDDIILLCEGQIVYHGPRENATDFFESMGFKCPDRKNVADFLQEVTSKMDQKQYWAGDQNKYQYHTIENFAQSFRTSYLPLLVEDKQCSSNNTGKKKVVKVNASRRISRWNIFKACFSREVLLLKRNSPVHIFKTIQITVMALVISTLFLRTKMSHDSVLDANKYMGALFMAVVIVNFNGMTEIAMTIKRLPTFYKQRELLALPGWALLCSVYLISIPISLLETGLWTCLTYYVIGYAPSIIRYSSLGTYMLNDLWCFNRRKFFQHFLVLFSMHQMSMGLYRFLAAIGRTQVMANMLGTAALIAIYILGGFVISKDDLQPWLRWGYWTSPFTYAQNAIALNEFHDKRWATEFYYNNANTVGEAILMIRGLLTEWHWYWICVAILFGYSLVFNIFSIFALEFMNSPHKHQLNIKTTKANFVNHRQMAENGNSSNDQAILPFRPLSLVFDHIHYFVDMPKEIANNGATEKKLQLLQDVSGAFRPGVLTALMGITGAGKTTLLDVLAGRKTGGYIEGTIKIAGYPKKQETFSRISGYCEQSDIHSPNLTVHESLKFSAWLRLPSNVKPHQRDMFIEEVMSLVELTDLKNAMVGIPGATGLSAEQRKRLTIAVELVASPSIIFMDEPTTGLDARAAAIVMRTVRKTVDTGRTVVCTIHQPSIEIFESFDELLLMKRGGQLIYSGSLGPLSSNMIKYFEAIPGVPKINKGQNPAAWVLDISSHITEYEIGVDYAEIYRNSSLYRENRLLIDELEQPEPNTDDLHFPQGYWQNFTTQCAACLWKQNCAYWKNSEHNVVRFINTFAVSIMFGVVFWKIGSNIKVEQDVFNILGIVYGSALFLGFMNCSILQPVVAMERVVLYREKAAGMYSTMAYAIAQVAVELPYMLVQVLIFSSIVYPMIGFQLSAAKFFWFFLYLVMSFMYYTLYGMMTVALTPNIEIAMGLSFLIFIFWNVFSGFIIARELMPVWWRWVYWADPAAWTVYGLMFSQLADRTEQILVPGLGVQTVREFLEGYLGLQDRYFELVTCLHLAIIGLFAFLFFLAIKHLNFQRRNTSRFKGILQNV

SEQ ID NO: 158776 - protein, 1369 aa, Zea Mays
MELAGVGGLEDEDWYDVGTTTAPAATKPPPLTHDDNRGFLRMLREKKERLGVEAHKVEVRFERLAVEADVRVGSRAVPTLLNSAVNAAQELATSVHMCVTRKRPMRIINEVSGVIRPSRMTLLLGAPGSGKTTLLKALAGKLDSSLKFKGKVMYNGEEMNHSTPQYLRAYVSQYDLHHAEMTVRETINFSSKMFGTNNEFEMLGEAIRRKKGVINKVDQDLDSFIKATTFGEGSNLTTNYIIKILGLSECADTLVGDEMRRGISGGQKKRATIGEMLVGLARCFFMDDISTGLDSSTTFEIMKFLQQMAHLMDLTMVISLLQPPPETLELFDDIILLCEGQIVYHGPRENATDFFESMGFKCPDRKNVADFLQEVTSKMDQKQYWAGDQNKYQYHTIENFAQSFRTSYLPLLVEDKQCSSNNTGKKKVVKVNASRRISRWNIFKACFSREVLLLKRNSPVHIFKTIQITVMALVISTLFLRTKMSHDSVLDANKYMGALFMAVVIVNFNGMTEIAMTIKRLPTFYKQRELLALPGWALLCSVYLISIPISLLETGLWTCLTYYVIGYAPSIIRFFQHFLVLFSMHQMSMGLYRFLAAIGRTQVMANMLGTAALIAIYILGGFVISKDDLQPWLRWGYWTSPFTYAQNAIALNEFHDKRWATEFYYNNANTVGEAILMIRGLLTEWHWYWICVAILFGYSLVFNIFSIFALEFMNSPHKHQLNIKTTKANFVNHRQMAENGNSSNDQAILPFRPLSLVFDHIHYFVDMPKEIANNGATEKKLQLLQDVSGAFRPGVLTALMGITGAGKTTLLDVLAGRKTGGYIEGTIKIAGYPKKQETFSRISGYCEQSDIHSPNLTVHESLKFSAWLRLPSNVKPHQRDMFIEEVMSLVELTDLKNAMVGIPGATGLSAEQRKRLTIAVELVASPSIIFMDEPTTGLDARAAAIVMRTVRKTVDTGRTVVCTIHQPSIEIFESFDELLLMKRGGQLIYSGSLGPLSSNMIKYFEAIPGVPKINKGQNPAAWVLDISSHITEYEIGVDYAEIYRNSSLYRENRLLIDELEQPEPNTDDLHFPQGYWQNFTTQCAACLWKQNCAYWKNSEHNVVRFINTFAVSIMFGVVFWKIGSNIKVEQDVFNILGIVYGSALFLGFMNCSILQPVVAMERVVLYREKAAGMYSTMAYAIAQVAVELPYMLVQVLIFSSIVYPMIGFQLSAAKFFWFFLYLVMSFMYYTLYGMMTVALTPNIEIAMGLSFLIFIFWNVFSGFIIARELMPVWWRWVYWADPAAWTVYGLMFSQLADRTEQILVPGLGVQTVREFLEGYLGLQDRYFELVTCLHLAIIGLFAFLFFLAIKHLNFQRRNTSRFKGILQNV

SEQ ID NO: 158777 - protein, 1387 aa, Zea Mays
MELAGVGGLEDEDWYDVGTTTAPAATKPPPLTHDDNRGFLRMLREKKERYELQSPALMNWLAWSERRLGVEAHKVEVRFERLAVEADVRVGSRAVPTLLNSAVNAAQELATSVHMCVTRKRPMRIINEVSGVIRPSRMTLLLGAPGSGKTTLLKALAGKLDSSLKFKGKVMYNGEEMNHSTPQYLRAYVSQYDLHHAEMTVRETINFSSKMFGTNNEFEMLGEAIRRKKGVINKVDQDLDSFIKATTFGEGSNLTTNYIIKILGLSECADTLVGDEMRRGISGGQKKRATIGEMLVGLARCFFMDDISTGLDSSTTFEIMKFLQQMAHLMDLTMVISLLQPPPETLELFDDIILLCEGQIVYHGPRENATDFFESMGFKCPDRKNVADFLQEVTSKMDQKQYWAGDQNKYQYHTIENFAQSFRTSYLPLLVEDKQCSSNNTGKKKVVKVNASRRISRWNIFKACFSREVLLLKRNSPVHIFKTIQITVMALVISTLFLRTKMSHDSVLDANKYMGALFMAVVIVNFNGMTEIAMTIKRLPTFYKQRELLALPGWALLCSVYLISIPISLLETGLWTCLTYYVIGYAPSIIRFFQHFLVLFSMHQMSMGLYRFLAAIGRTQVMANMLGTAALIAIYILGGFVISKDDLQPWLRWGYWTSPFTYAQNAIALNEFHDKRWATEFYYNNANTVGEAILMIRGLLTEWHWYWICVAILFGYSLVFNIFSIFALEFMNSPHKHQLNIKTTKANFVNHRQMAENGNSSNDQAILPFRPLSLVFDHIHYFVDMPKEIANNGATEKKLQLLQDVSGAFRPGVLTALMGITGAGKTTLLDVLAGRKTGGYIEGTIKIAGYPKKQETFSRISGYCEQSDIHSPNLTVHESLKFSAWLRLPSNVKPHQRDMFIEEVMSLVELTDLKNAMVGIPGATGLSAEQRKRLTIAVELVASPSIIFMDEPTTGLDARAAAIVMRTVRKTVDTGRTVVCTIHQPSIEIFESFDELLLMKRGGQLIYSGSLGPLSSNMIKYFEAIPGVPKINKGQNPAAWVLDISSHITEYEIGVDYAEIYRNSSLYRENRLLIDELEQPEPNTDDLHFPQGYWQNFTTQCAACLWKQNCAYWKNSEHNVVRFINTFAVSIMFGVVFWKIGSNIKVEQDVFNILGIVYGSALFLGFMNCSILQPVVAMERVVLYREKAAGMYSTMAYAIAQVAVELPYMLVQVLIFSSIVYPMIGFQLSAAKFFWFFLYLVMSFMYYTLYGMMTVALTPNIEIAMGLSFLIFIFWNVFSGFIIARELMPVWWRWVYWADPAAWTVYGLMFSQLADRTEQILVPGLGVQTVREFLEGYLGLQDRYFELVTCLHLAIIGLFAFLFFLAIKHLNFQRRNTSRFKGILQNV

SEQ ID NO: 158778 - protein, 1395 aa, Zea Mays
MELAGVGGLEDEDWYDVGTTTAPAATKPPPLTHDDNRGFLRMLREKKERYELQSPALMNWLAWSERRLGVEAHKVEVRFERLAVEADVRVGSRAVPTLLNSAVNAAQELATSVHMCVTRKRPMRIINEVSGVIRPSRMTLLLGAPGSGKTTLLKALAGKLDSSLKFKGKVMYNGEEMNHSTPQYLRAYVSQYDLHHAEMTVRETINFSSKMFGTNNEFEMLGEAIRRKKGVINKVDQDLDSFIKATTFGEGSNLTTNYIIKILGLSECADTLVGDEMRRGISGGQKKRATIGEMLVGLARCFFMDDISTGLDSSTTFEIMKFLQQMAHLMDLTMVISLLQPPPETLELFDDIILLCEGQIVYHGPRENATDFFESMGFKCPDRKNVADFLQEVTSKMDQKQYWAGDQNKYQYHTIENFAQSFRTSYLPLLVEDKQCSSNNTGKKKVVKVNASRRISRWNIFKACFSREVLLLKRNSPVHIFKTIQITVMALVISTLFLRTKMSHDSVLDANKYMGALFMAVVIVNFNGMTEIAMTIKRLPTFYKQRELLALPGWALLCSVYLISIPISLLETGLWTCLTYYVIGYAPSIIRFFQHFLVLFSMHQMSMGLYRFLAAIGRTQVMANMLGTAALIAIYILGGFVISKDDLQPWLRWGYWTSPFTYAQNAIALNEFHDKRWATEFYYNNANTVGEAILMIRGLLTEWHWYWICVAILFGYSLVFNIFSIFALEFMNSPHKHQLNIKTTKANFVNHRQMAENGNSSNDQAILPFRPLSLVFDHIHYFVDMPKKRKRMSHQEIANNGATEKKLQLLQDVSGAFRPGVLTALMGITGAGKTTLLDVLAGRKTGGYIEGTIKIAGYPKKQETFSRISGYCEQSDIHSPNLTVHESLKFSAWLRLPSNVKPHQRDMFIEEVMSLVELTDLKNAMVGIPGATGLSAEQRKRLTIAVELVASPSIIFMDEPTTGLDARAAAIVMRTVRKTVDTGRTVVCTIHQPSIEIFESFDELLLMKRGGQLIYSGSLGPLSSNMIKYFEAIPGVPKINKGQNPAAWVLDISSHITEYEIGVDYAEIYRNSSLYRENRLLIDELEQPEPNTDDLHFPQGYWQNFTTQCAACLWKQNCAYWKNSEHNVVRFINTFAVSIMFGVVFWKIGSNIKVEQDVFNILGIVYGSALFLGFMNCSILQPVVAMERVVLYREKAAGMYSTMAYAIAQVAVELPYMLVQVLIFSSIVYPMIGFQLSAAKFFWFFLYLVMSFMYYTLYGMMTVALTPNIEIAMGLSFLIFIFWNVFSGFIIARELMPVWWRWVYWADPAAWTVYGLMFSQLADRTEQILVPGLGVQTVREFLEGYLGLQDRYFELVTCLHLAIIGLFAFLFFLAIKHLNFQRRNTSRFKGILQNV

SEQ ID NO: 158779 - protein, 359 aa, Zea Mays
MLFNAGEMLVGLARCFFMDDISTGLDSSTTFEIMKFLQQMAHLMDLTMVISLLQPPPETLELFDDIILLCEGQIVYHGPRENATDFFESMGFKCPDRKNVADFLQEVTSKMDQKQYWAGDQNKYQYHTIENFAQSFRTSYLPLLVEDKQCSSNNTGKKKVVKVNASRRISRWNIFKACFSREVLLLKRNSPVHIFKTIQITVMALVISTLFLRTKMSHDSVLDANKYMGALFMAVVIVNFNGMTEIAMTIKRLPTFYKQRELLALPGWALLCSVYLISIPISLLETGLWTCLTYYVIGYAPSIIRFFQHFLVLFSMHQMSMGLYRFLAAIGRTQVMANMLGTAALIAIYILGGFVISKG

SEQ ID NO: 158780 - protein, 1111 aa, Zea Mays
MRRGISGGQKKRATIGEMLVGLARCFFMDDISTGLDSSTTFEIMKFLQQMAHLMDLTMVISLLQPPPETLELFDDIILLCEGQIVYHGPRENATDFFESMGFKCPDRKNVADFLQEVTSKMDQKQYWAGDQNKYQYHTIENFAQSFRTSYLPLLVEDKQCSSNNTGKKKVVKVNASRRISRWNIFKACFSREVLLLKRNSPVHIFKTIQITVMALVISTLFLRTKMSHDSVLDANKYMGALFMAVVIVNFNGMTEIAMTIKRLPTFYKQRELLALPGWALLCSVYLISIPISLLETGLWTCLTYYVIGYAPSIIRFFQHFLVLFSMHQMSMGLYRFLAAIGRTQVMANMLGTAALIAIYILGGFVISKDDLQPWLRWGYWTSPFTYAQNAIALNEFHDKRWATEFYYNNANTVGEAILMIRGLLTEWHWYWICVAILFGYSLVFNIFSIFALEFMNSPHKHQLNIKTTKANFVNHRQMAENGNSSNDQAILPFRPLSLVFDHIHYFVDMPKEIANNGATEKKLQLLQDVSGAFRPGVLTALMGITGAGKTTLLDVLAGRKTGGYIEGTIKIAGYPKKQETFSRISGYCEQSDIHSPNLTVHESLKFSAWLRLPSNVKPHQRDMFIEEVMSLVELTDLKNAMVGIPGATGLSAEQRKRLTIAVELVASPSIIFMDEPTTGLDARAAAIVMRTVRKTVDTGRTVVCTIHQPSIEIFESFDELLLMKRGGQLIYSGSLGPLSSNMIKYFEAIPGVPKINKGQNPAAWVLDISSHITEYEIGVDYAEIYRNSSLYRENRLLIDELEQPEPNTDDLHFPQGYWQNFTTQCAACLWKQNCAYWKNSEHNVVRFINTFAVSIMFGVVFWKIGSNIKVEQDVFNILGIVYGSALFLGFMNCSILQPVVAMERVVLYREKAAGMYSTMAYAIAQVAVELPYMLVQVLIFSSIVYPMIGFQLSAAKFFWFFLYLVMSFMYYTLYGMMTVALTPNIEIAMGLSFLIFIFWNVFSGFIIARELMPVWWRWVYWADPAAWTVYGLMFSQLADRTEQILVPGLGVQTVREFLEGYLGLQDRYFELVTCLHLAIIGLFAFLFFLAIKHLNFQRRNTSRFKGILQNV

SEQ ID NO: 158781 - protein, 1027 aa, Zea Mays
MELAGVGGLEDEDWYDVGTTTAPAATKPPPLTHDDNRGFLRMLREKKERYELQSPALMNWLAWSERRLGVEAHKVEVRFERLAVEADVRVGSRAVPTLLNSAVNAAQELATSVHMCVTRKRPMRIINEVSGVIRPSRMTLLLGAPGSGKTTLLKALAGKLDSSLKFKGKVMYNGEEMNHSTPQYLRAYVSQYDLHHAEMTVRETINFSSKMFGTNNEFEMLGEAIRRKKGVINKVDQDLDSFIKLVSQATTFGEGSNLTTNYIIKILGLSECADTLVGDEMRRGISGGQKKRATIGEMLVGLARCFFMDDISTGLDSSTTFEIMKFLQQMAHLMDLTMVISLLQPPPETLELFDDIILLCEGQIVYHGPRENATDFFESMGFKCPDRKNVADFLQEVTSKMDQKQYWAGDQNKYQYHTIENFAQSFRTSYLPLLVEDKQCSSNNTGKKKVVKVNASRRISRWNIFKACFSREVLLLKRNSPVHIFKTIQITVMALVISTLFLRTKMSHDSVLDANKYMGALFMAVVIVNFNGMTEIAMTIKRLPTFYKQRELLALPGWALLCSVYLISIPISLLETGLWTCLTYYVIGYAPSIIRYSSLGTYMLNDLWCFNRRKFFQHFLVLFSMHQMSMGLYRFLAAIGRTQVMANMLGTAALIAIYILGGFVISKDDLQPWLRWGYWTSPFTYAQNAIALNEFHDKRWATEFYYNNANTVGEAILMIRGLLTEWHWYWICVAILFGYSLVFNIFSIFALEFMNSPHKHQLNIKTTKANFVNHRQMAENGNSSNDQAILPFRPLSLVFDHIHYFVDMPKKRKRMSHQEIANNGATEKKLQLLQDVSGAFRPGVLTALMGITGAGKTTLLDVLAGRKTGGYIEGTIKIAGYPKKQETFSRISGYCEQSDIHSPNLTVHESLKFSAWLRLPSNVKPHQRDMFIEEVMSLVELTDLKNAMVGIPGATGLSAEQRKRLTIAVELVASPSIIFMDEPTTGLDARAAAIVMRTVRKTVDTGRTVVCTIHQPSIEIFESFDEV

SEQ ID NO: 158782 - protein, 785 aa, Zea Mays
MLFNAGEMLVGLARCFFMDDISTGLDSSTTFEIMKFLQQMAHLMDLTMVISLLQPPPETLELFDDIILLCEGQIVYHGPRENATDFFESMGFKCPDRKNVADFLQEVTSKMDQKQYWAGDQNKYQYHTIENFAQSFRTSYLPLLVEDKQCSSNNTGKKKVVKVNASRRISRWNIFKACFSREVLLLKRNSPVHIFKTIQITVMALVISTLFLRTKMSHDSVLDANKYMGALFMAVVIVNFNGMTEIAMTIKRLPTFYKQRELLALPGWALLCSVYLISIPISLLETGLWTCLTYYVIGYAPSIIRFFQHFLVLFSMHQMSMGLYRFLAAIGRTQVMANMLGTAALIAIYILGGFVISKDDLQPWLRWGYWTSPFTYAQNAIALNEFHDKRWATEFYYNNANTVGEAILMIRGLLTEWHWYWICVAILFGYSLVFNIFSIFALEFMNSPHKHQLNIKTTKANFVNHRQMAENGNSSNDQAILPFRPLSLVFDHIHYFVDMPKEIANNGATEKKLQLLQDVSGAFRPGVLTALMGITGAGKTTLLDVLAGRKTGGYIEGTIKIAGYPKKQETFSRISGYCEQSDIHSPNLTVHESLKFSAWLRLPSNVKPHQRDMFIEEVMSLVELTDLKNAMVGIPGATGLSAEQRKRLTIAVELVASPSIIFMDEPTTGLDARAAAIVMRTVRKTVDTGRTVVCTIHQPSIEIFESFDELLLMKRGGQLIYSGSLGPLSSNMIKYFEAIPGVPKINKGQNPAAWVLDISSHITEYEIGVDYAEIYRNSSLYRYTQ

SEQ ID NO: 158783 - protein, 334 aa, Zea Mays
MRRGISGGQKKRATIGEMLVGLARCFFMDDISTGLDSSTTFEIMKFLQQMAHLMDLTMVISLLQPPPETLELFDDIILLCEGQIVYHGPRENATDFFESMGFKCPDRKNVADFLQEVTSKMDQKQYWAGDQNKYQYHTIENFAQSFRTSYLPLLVEDKQCSSNNTGKKKVVKVNASRRISRWNIFKACFSREVLLLKRNSPVHIFKTIQITVMALVISTLFLRTKMSHDSVLDANKYMGALFMAVVIVNFNGMTEIAMTIKRLPTFYKQRELLALPGWALLCSVYLISIPISLLETGLWTCLTYYVIGYAPSIIRYSSLGTYMLNDLWCFNRRK

SEQ ID NO: 158784 - protein, 216 aa, Zea Mays
MRSRPASMAAGPTPSAAAASLRPPPPCFDYRAAVLADTRAAAAGNPALAGLIESGALVRVPRRRFGPVPAWRPPDFVEPEDVWILGTSHLSRDSVADVERVLRAVQPDNVVVELCRSRAGIMYASSDSSDEPLLKSNMFSLGGSKFFGAVSRSINLGGQSALALRLLLAVFSSKIASSANRPFGEEFRAARRVSEDIGAQLVLGDRPIEITIVHSA

SEQ ID NO: 158785 - protein, 85 aa, Zea Mays
MFLAWSLKRSKAVNKSRTVVGVVGKGHINGIVYALISDQGDLRFRDLVGRASSDTWVSSLVKGLVRDTVIGLVLWALYEQLQAVL

SEQ ID NO: 158786 - protein, 301 aa, Zea Mays
MEGPWPNPICPLAREMPPPTVPAIPPQSPLVLKYGEEGKVVERVNLATRQLRLLPKPVVRICGLLALDVSRDQLKAIVERAGAGSRPTTQQMGEVASRRVAHRRRRPASSPMRRLRGNYDPVEMARMAASAAAAVRHSAKKRPKMSQIVRALEGDISLEDLNDNEGVRPGQSMAFGTAAAAATSYKAKAPGPYTHGVERIRQAPTVYSGAVGRPSTIGNYGDESRETAPVAGRKQQQLSCYRIRHIPMSPTDVYITTNMCSYNKKIGVALRSDIKGSCNSGMDDQFLGEAVSSNNDIEDSG

SEQ ID NO: 158787 - protein, 204 aa, Zea Mays
MDDQFLGEAVSSNNDIEGDMHSRYIPQQDPFSEGLYTFDIGQNDLAGEFYSRTEDQVIVSIPTILLEFENGLKKLYDQGARKFWIHNTGPLGCLPQNIALFGKDPSQLDELHWFEHATHACCGYGGPPLNYDGNVPCGHTVSLDGKMVTAKGAATLLNSSTGMGYITRKLRISISRRRSSQILTGKYSDPPFVDKMLFVIKPRF

SEQ ID NO: 158788 - protein, 149 aa, Zea Mays
MASSGSCHSLLSSASPISPALFSRHRAAAVGGGASRASKVQSQVRCLARDEDSKGCANVSKAETNEEKETTPSSRRRCLVCLGAVTLISATGPPNGLAADAMNKAGVQKAVCRNCNGSGAVICKGLVALVHFVSSKLLDLLLPIGMYLQ

SEQ ID NO: 158789 - protein, 386 aa, Zea Mays
MAAPSAATRRKLQRKFRLRGFTLKVDALEEAAAFLDRFPDAEDDALDLLLDELDKEPLQSSILDRDAVRRVVALLVEAEEALDVASPAATSARSALRVVDAFLVPRFHYDPIKKVFYEHTGRLAVHGEAGDKASLYRDRYQVLLQRLSRDKYFSKPAFDTVATEHCSCEITSVQSLIGCTGRRWIMGVISQLEERQFYLEDLTGAVPIDLSNAKITSGFFVENTVIVAEGELLSNGIFQVNTCGFPPLEDREASVSLLMGFDFFGGGVIPTEETLRLSSLEKKAVNDMFVILSDVWLDNPETMEKLAVVLDGYDSVEVVPSLFVLMGNFCSRPCNLAFNSFEELRFQFGKLGEMIAARSRLKEHSRFLFIPGPDDAGTPKLSDTLS

SEQ ID NO: 158790 - protein, 508 aa, Zea Mays
MAAPSAATRRKLQRKFRLRGFTLKVDALEEAAAFLDRFPDAEDDALDLLLDELDKEPLQSSILDRDAVRRVVALLVEAEEALDVASPAATSARHTGRLAVHGEAGDKASLYRDRYQVLLQRLSRDKYFSKPAFDTVATEHCSCEITSVQSLIGCTGRRWIMGVISQLEERQFYLEDLTGAVPIDLSNAKITSGFFVENTVIVAEGELLSNGIFQVNTCGFPPLEDREASVSLLMGFDFFGGGVIPTEETLRLSSLEKKAVNDMFVILSDVWLDNPETMEKLAVVLDGYDSVEVVPSLFVLMGNFCSRPCNLAFNSFEELRFQFGKLGEMIAARSRLKEHSRFLFIPGPDDAGPSKALPRCALPKYLIEELQKHIPNSIFVSNPCRVKFYTQEIVFFRQDLLYRMRRSCLIPPTTEETSDPFEHLVATITHQSHLCPLPLTVQPIIWNYDHCLRLYPTPHTIVLGDKSEQKAFKYTGITCFNPGSFANDSTFAAYRPCTKEVELSALEG

SEQ ID NO: 158791 - protein, 189 aa, Zea Mays
MLSSCAPTTAFPPPEAGAAAPPEPFRSLQIATTTSAAGAKKKRRPAGTPDPDAEVVSLSPRTLLESDRYVCEICGQGFQRDQNLQMHRRRHKVPWKLLKREAGEAARKRVFVCPEPSCLHHDPSHALGDLVGIKKHFRRKHSGHRQWACARCSKAYAVHSDYKAHLKTCGTRGHTCDCGRVFSRDLAEE

SEQ ID NO: 158792 - protein, 129 aa, Zea Mays
MAPRQLRAQYKQLSHIWSCYLQTEQTSWTLLNFSSCETPICELVQTAEVKLKSIVQCPCVTTVYKIFDKTAYQFIFQSCDLLQPNTHNKIMEYSILKPHIRIGCPLCTSKFEFTPTTILKLLCVVMNKS

SEQ ID NO: 158793 - protein, 99 aa, Zea Mays
MTVSTASIPVLHSVEVAHLYPQVMLLICHGVVRAPYTSTKEARQGNTTRPLQSSTSFRKPATVYRKLQCRDPLPDRHRSKINQRPPHNDHSPTALAPFG

SEQ ID NO: 158794 - protein, 215 aa, Zea Mays
MDTLPEGVVQHILSQLSNARDVAGCAAVARCWRDCVAFLPSLYFPRGAFEALAGGPASAVAFADDAIGRMVDAAARLEELVVYCPFSASLLPHWLAARAATLRVLELRMDSAAADKSGHLNLDSIGVAAGLEELRLWGLTMTRAPAWGRMERLRVLEIVSAILVDAAVNDVLAACPNLTDLSLLGCQCDGEAVISLASLERCRLDFLGSGNSSLR

SEQ ID NO: 158795 - protein, 409 aa, Zea Mays
MDTLPEGVVQHILSQLSNARDVAGCAAVARCWRDCVAFLPSLYFPRGAFEALAGGPASAVAFADDAIGRMVDAAARLEELVVYCPFSASLLPHWLAARAATLRVLELRMDSAAADKSGHLNLDSIGVAAGLEELRLWGLTMTRAPAWGRMERLRVLEIVSAILVDAAVNDVLAACPNLTDLSLLGCQCDGEAVISLASLERCRLDFLGSGNSSLRFAAPRVESLEVQGFSFIYLQGGNRLKHLTISKNTGSVHHVEMGKLPELDQLSLRGVQWSWGAISSVLQCASEVKHLVMKVEFSGDYDTLQPFPEIDLVEFFNSHPKLRKFEVHGAMFAALSQENSLKNVVVTVRSSLNAKQKLNTLKSVVRYSVRLRRMIIRISQMKNCHAAGDDFFEEICKFTYMNSGTVCIE

SEQ ID NO: 158796 - protein, 190 aa, Zea Mays
MHGSKTLHMFSFELLNFLKLIRTFLAQLAEIRAVVAAAFLASPSATVVIDDKGSDDGSILQLSSIANFIVSHCSSGLDSDIQRRWCSGSGTTRRLRAATARCGAPTGSAINTMDTLQEAPSAPLEATAALYTIQFAVYFFFSEEDERISSTLFSTSRRMNILRNQKDPLSSTTQRLHLGNQRKVKVPCQS

SEQ ID NO: 158797 - protein, 137 aa, Zea Mays
MHGSKTLHMFSFELLNFLKLIRTFLAQLAEIRAVVAAAFLASPSATVVIDDKGSDDGSILQLSSIANFIVSHCSSGLDSDIQRRWCSGSGTTRRLRAATARCGAPTGSAINTMDTLQEAPSDPHGIILFALFCKEGN

SEQ ID NO: 158798 - protein, 132 aa, Zea Mays
MHGSKTLHMFSFELLNFLKLIRTFLAQLAEIRAVVAAAFLASPSATVVIDDKGSDDGSILQLSSIANFIVSHCSSGLDSDIQRRWCSGSGTTRRLRAATARCGAPTGSAINTMDTLQEAPSVCSIFLLLGGG

SEQ ID NO: 158799 - protein, 186 aa, Zea Mays
MHGSKTLHMFSFELLNFLKLIRTFLAQLAEIRAVVAAAFLASPSATVVIDDKGSDDGSILQLSSIANFIVSHCSSDIQRRWCSGSGTTRRLRAATARCGAPTGSAINTMDTLQEAPSAPLEATAALYTIQFAVYFFFSEEDERISSTLFSTSRRMNILRNQKDPLSSTTQRLHLGNQRKVKVPCQS

SEQ ID NO: 158800 - protein, 64 aa, Zea Mays
MLTGRCCGSSATARTLFRSVGFCTKMHSKSVFGSTNVFIIHGGRINWKTSIPTNEKYKSMEFTT

SEQ ID NO: 158801 - protein, 243 aa, Zea Mays
MLSPWHPLLSPVAPPAMELRSPLNSHNCSLTSSIRPPPPRSLARAPPTLSATAAAVSSLSATSAAISSPSCPKKKVLVPIAMGTEEMEAVIIAGVLRRASADVTLASVEDGLEVEASCGSRIIADTHIASCADQVFDLVALPGGMPGSVRLRDSDILQRITVRQAEEKRLYGAICAAPAVVLVPWGLHRRKKEISLHSGQLNQMFRFQESLLQVVGQGQHFSSLYHLLSNCLGFVQLKIWTRF

SEQ ID NO: 158802 - protein, 209 aa, Zea Mays
MAQTHDGLERSAEVNELEWSCGRNPDVLIPIANGCEELEIIILVDILRRAKINVVLASVEKYPAVLGSQRMKIVADKSIMSASDSIYDLIILPGGPAGAEQLHRSRILKKLLKQQMQAGRMYGGVCSALKVLQQEGLLEDKTVTAHHAVASELTCQVIDQPNVVIDGNLITGKGLGTVVDFALAIIRKFFGHGRAKAVANGIVFEYPKS

SEQ ID NO: 158803 - protein, 143 aa, Zea Mays
MLSPWHPLLSPVAPPAMELRSPLNSHNCSLTSSIRPPPPRSLARAPPTLSATAAAVSSLSATSAAISSPSCPKKKVLVPIAMGTEEMEAVIIAGVLRRASADVTLASVEDGLEVEASCGSRIIADTHIASCADQVEECLVQCD

SEQ ID NO: 158804 - protein, 258 aa, Zea Mays
MLSPWHPLLSPVAPPAMELRSPLNSHNCSLTSSIRPPPPRSLARAPPTLSATAAAVSSLSATSAAISSPSCPKKKVLVPIAMGTEEMEAVIIAGVLRRASADVTLASVEDGLEVEASCGSRIIADTHIASCADQVFDLVALPGGMPGSVRLRDSDILQRITVRQAEEKRLYGAICAAPAVVLVPWGLHRRKKITCHPSFIGDLPAFRAVESNVQVSGELTTSRGPGTTFQFALSFVEQLFGLRAAEDMDKILVCQKKL

SEQ ID NO: 158805 - protein, 216 aa, Zea Mays
MLQGQTLGRMTHDGLERSAEVNELEWSCGRNPDVLIPIANGCEELEIIILVDILRRAKINVVLASVEKYPAVLGSQRMKIVADKSIMSASDSIYDLIILPGGPAGAEQLHRSRILKKLLKQQMQAGRMYGGVCSALKVLQQEGLLEDKTVTAHHAVASELTCQVIDQPNVVIDGNLITGKGLGTVVDFALAIIRKFFGHGRAKAVANGIVFEYPKS

SEQ ID NO: 158806 - protein, 357 aa, Zea Mays
MDLKDSERRGAAGPGPLSRQGSIYSLTFDEFQNTLGGTGGGLGKDFGSMNMDELLRSIWTAEESQAMASASEPAAGAAGDGGAALQRQGSLTLPRTLSVKTVDEVWRDFAREGTAGGPEPQPNRQPTLGEMTLEDFLVRAGVVRDNPAAAAAAAAAVPAQPVATRPLQAVNNGASIFFGNFGGANDAGAGAMGFAPVGIGDQAMGNGLMPGVAGMAAGAVTVSPVDMSVAQLDSMGKGNGDLSSPMAPVPYPFEGVIRGRRSGAGVEKVVERRQRRMIKNRESAARSRARLYNGVGSRSSETEGTKRRIAEEAGRNNGDAEKPGRGSDQQSIRTKETVPAENIDRSLVTELLTTDRA

SEQ ID NO: 158807 - protein, 412 aa, Zea Mays
MDLKDSERRGAAGPGPLSRQGSIYSLTFDEFQNTLGGTGGGLGKDFGSMNMDELLRSIWTAEESQAMASASEPAAGAAGDGGAALQRQGSLTLPRTLSVKTVDEVWRDFAREGTAGGPEPQPNRQPTLGEMTLEDFLVRAGVVRDNPAAAAAAAAAVPAQPVATRPLQAVNNGASIFFGNFGGANDAGAGAMGFAPVGIGDQAMGNGLMPGVAGMAAGAVTVSPVDMSVAQLDSMGKGNGDLSSPMAPVPYPFEGVIRGRRSGAGVEKVVERRQRRMIKNRESAARSRARKQAYTMELEAEVQKLKEQNEELQKKQEEIMEMQKNQVVEVISNPYAQKKRCLRRTLTGPWCDSNGKGGEEPATAPENDPPLFIQVPPRLCTSGVTASASTSAPNRVPMPVSLSCTIHVHVVL

SEQ ID NO: 158808 - protein, 334 aa, Zea Mays
MWLEGRRGYKIVMTTSLSSDVPVGYFSWAEYDIMAPVPPKTEEALAVAFISNCGARNFRLQALEMLENLDVKIDSYGSCHRNRDGKVDKVDTLKRYRFSLAFENSNEEDYVTEKFFQSLVAGSIPVVVGAPNIQELSPGEGAILHIKELDDVVSVAKTMKNIASNPDAFNQSLRWKYDGPSDSFKALIDMAAVHSSCRLCIHIATKIHLKEERTPKFTNRPCSCSSKKGTVYHLFIRERGRFKSESIYMRSGQLTLGALESAVLGKFRSLNHVPVWKDERPPSIRGGDDLKLYRIYPVGLTQRQALYGFRFRDDSKLEQYIKDHPCAKLEVIFV

SEQ ID NO: 158809 - protein, 322 aa, Zea Mays
MTTSLSSDVPVGYFSWAEYDIMAPVPPKTEEALAVAFISNCGARNFRLQALEMLENLDVKIDSYGSCHRNRDGKVDKVDTLKRYRFSLAFENSNEEDYVTEKFFQSLVAGSIPVVVGAPNIQELSPGEGAILHIKELDDVVSVAKTMKNIASNPDAFNQSLRWKYDGPSDSFKALIDMAAVHSSCRLCIHIATKIHLKEERTPKFTNRPCSCSSKKGTVYHLFIRERGRFKSESIYMRSGQLTLGALESAVLGKFRSLNHVPVWKDERPPSIRGGDDLKLYRIYPVGLTQRQALYGFRFRDDSKLEQYIKDHPCAKLEVIFV

SEQ ID NO: 158810 - protein, 133 aa, Zea Mays
MPEQTHRSSPNPIPVAIRISGAAMAEKESNGVRVCVTGGAGFIGSWLVRKLLEKGYTVHATLRNTGDEAKAGLLRRLVPGAAERLRLFQADLFDAATFAPAIAGCQFVFLVATPFGLDSAGSQQNLVVPIDRV

SEQ ID NO: 158811 - protein, 89 aa, Zea Mays
MVSRREREPTMVHTWLSCSARAGIAVTSRDPLRDYTDVLPFVNILSERSLHFVSTCRDILPKSIFSILSDHISKISIYLQLGSYMLLHP

SEQ ID NO: 158812 - protein, 427 aa, Zea Mays
MEKEQRRPPSSKTAPVSMKASPANATPQCMKNRKIALQQDVDKLRMKLRHEENVHRALERAFTRPLGALPRLPPFLPSQTLELLAEVAVLEEEVVRLEEQVVNFRQGLYRETVITTSMAAKSVYFPDGYRSTPARHKPPAQPQSPELSTSTRQGSDQDAADWLPSLRRATNAMWTPRRPGRSLSQGDSPGKENQSFGSGTNSCREFGLAPLSKVPGCRVVQVAETRAGFQTTSAVEDHKAVEGSNGTGPSKASTAANEVSEELLACLLAIFSQKSASSGQDEERVSLPPVSGSCGSSSADPYCVPEFGWRDIGRYKQFRSVDMNTCAGDDSALGQRLKALLRKLSLVDLAGLSHQHNRLAFWINTYYSCMMNAFLEQGAPSDPRMLVAMMPKATINVGGRVLSAVAIEHFILRLPHYDDDDAKARAH

SEQ ID NO: 158813 - protein, 460 aa, Zea Mays
MGSAMEKEQRRPPSSKTAPVSMKASPANATPQCMKNRKIALQQDVDKLRMKLRHEENVHRALERAFTRPLGALPRLPPFLPSQTLELLAEVAVLEEEVVRLEEQVVNFRQGLYRETVITTSMAAKSVYFPDGYRSTPARHKPPAQPQSPELSTSTRQGSDQDAADWLPSLRRATNAMWTPRRPGRSLSQGDSPGKENQSFGSGTNSCREFGLAPLSKVPGCRVVQVAETRAGFQTTSAVEDHKAVEGSNGTGPSKASTAANEVSEELLACLLAIFSQKSASSGQDEERVSLPPVSGSCGSSSADPYCVPEFGWRDIGRYKQFRSVDMNTCAGDDSALGQRLKALLRKLSLVDLAGLSHQHNRLAFWINTYYSCMMNAFLEQGAPSDPRMLVAMMPKATINVGGRVLSAVAIEHFILRLPHYDDDDAKARKVAGLAGWPHHSSPPCRRLSSTEDARAPSYI

SEQ ID NO: 158814 - protein, 147 aa, Zea Mays
MLSLRSVSGSNSSRGIAAVVGVGPRLGSAVARKFASEGYTIAILSRDLEKLSQLAEEIAQAAKAQVFALRVDCADARSVREAFEGVLSLGPVEVLVYNACEPPAANEDARPAPFLAVTPDAFHRALAVSAGGAFHCAQQSLRVPPCA

SEQ ID NO: 158815 - protein, 70 aa, Zea Mays
MDRIPVFPLRSRPRTTPGPCGVENISRKGAEASQMKGTRRRRWRRRLSGVDLPCVRVLIGVAPLELYVEL

SEQ ID NO: 158816 - protein, 102 aa, Zea Mays
MYNPDSHFFLFLMYWTDCSLAGALGLLKILIYKVVSAPHNSCDVVLPCYMLRKLCYAGLCRWEYHRDLGANLDNDLLVLKISSNNMWHYSSDMTLLIITANI

SEQ ID NO: 158817 - protein, 124 aa, Zea Mays
MPQRGGGREGDGRLLHMRKSFKDSLKVLEADIQHANTLAADFSRDYDGMPLDVQPRLPLLPLPHVLDRLQPSWRAWATQDPNLQGLCRWEYHRDLGANLDNDLLVLKTVNYLFLHQVVKLFPLR

SEQ ID NO: 158818 - protein, 50 aa, Zea Mays
MKDIRTHTLPICASVSNLSSNCVESKAYPLIPTVTSRNPQTPRNATELHF

SEQ ID NO: 158819 - protein, 94 aa, Zea Mays
MSCTSHHPYCILKLCRDLMVRPYRYTFSIVRCPRRGTMRLHILRGMKAEVIFAFADICTHEVYMKCDITMLLLWFLPAGVVTRCVVRCIRAAPS

SEQ ID NO: 158820 - protein, 839 aa, Zea Mays
MAAADGRSGDFRVRGGSVGGRIDRLVVENFKSYKGEQTIGPFVDFTAIIGPNGAGKSNLMDAISFVLGVRSTHLRGAQLKDLIYALDDRDKEAKGRKASVRLFYCQPNQEELCFTRSITGAGGSEYRIDRNQVTWDVYNAKLRSLGILVKARNFLVFQGDVESIASKNPKELTALLEQISGSDELRREYDELEEQKARAEEKSALVYQEKRTIVMERKQKKVQKEEAEKHLRLQQDLKLLKTEHYLWQLYTIEKDIEKIEAELVEDRESLQQVQEENRSSDYELTAKKKEQSAFLKKITLSEKSITKKKLELDKKQPELLKLKEQISRLKSKIKSCKKEIDKKKDDHKKHLGELRRLQSDLVEVTEAIEELNEQGQDTSGKLLLADDQLQEYHRIKEDAGMKTAKLRDEKEVIEKKLNADAEAKKNLVENMQQLESRKDEISSQERELQTKLSKILHSIPKLENELTHLHEEHNKIAKERQSSGSEYQMLKQRLDEIETQLRELKADKHESERDARLKETVGRLKRLFPGVHGRMLELCRPSQKKYNLAVTVAMGKFMDAVVVEDENTGKECIKYLKEQRHPPQTFIPLQSVRVKPIIEKLRTLGGSAQLVFDVIHFDRVLEKAVLYAVGNTLVCDKLDEAKALSWSGERYKVVTVDGILLTKSGTMTGGTSGGMEARSNKWDDSTIESLKKKKNLLENKMSELGSPRELQRKELAISEKITGLEKKLHYSNVEQNNLRGKLAKLASERSNIETEINRLKPGEEELETRIGKREAEARKLEKKINDIVDKVYRDFSISVGVKNIREYEEKQLKDAQALQERKLSLSLNMNKSEICMHQL

SEQ ID NO: 158821 - protein, 1060 aa, Zea Mays
MAAADGRSGDFRVRGGSVGGRIDRLVVENFKSYKGEQTIGPFVDFTAIIGPNGAGKSNLMDAISFVLGVRSTHLRGAQLKDLIYALDDRDKEAKGRKASVRLFYCQPNQEELCFTRSITGAGGSEYRIDRNQVTWDVYNAKLRSLGILVKARNFLVFQGDVESIASKNPKELTALLEQISGSDELRREYDELEEQKARAEEKSALVYQEKRTIVMERKQKKVQKEEAEKHLRLQQDLKLLKTEHYLWQLYTIEKDIEKIEAELVEDRESLQQVQEENRSSDYELTAKKKEQSAFLKKITLSEKSITKKKLELDKKQPELLKLKEQISRLKSKIKSCKKEIDKKKDDHKKHLGELRRLQSDLVEVTEAIEELNEQGQDTSGKLLLADDQLQEYHRIKEDAGMKTAKLRDEKEVIEKKLNADAEAKKNLVENMQQLESRKDEISSQERELQTKLSKILHSIPKLENELTHLHEEHNKIAKERQSSGSEYQMLKQRLDEIETQLRELKADKHESERDARLKETVGRLKRLFPGVHGRMLELCRPSQKKYNLAVTVAMGKFMDAVVVEDENTGKECIKYLKEQRHPPQTFIPLQSVRVKPIIEKLRTLGGSAQLVFDVIHFDRVLEKAVLYAVGNTLVCDKLDEAKALSWSGERYKVVTVDGILLTKSGTMTGGTSGGMEARSNKWDDSTIESLKKKKNLLENKMSELGSPRELQRKELAISEKITGLEKKLHYSNVEQNNLRGKLAKLASERSNIETEINRLKPGEEELETRIGKREAEARKLEKKINDIVDKVYRDFSISVGVKNIREYEEKQLKDAQALQERKLSLSNQMSKLKYQLEYEQKRDMHAPIVKLTETHESLEKELKGLQERESGAKAEAEQILAQMEELKTEADDWKSKSDECEKVIDELKEQNGNVASTLAKMDRQVKSKEGQLAQLISRQREVHEKCELEQLKLPTVNDPMDTGTSSQEPILDYSQLSKSHLQDIRPSERDKHEAEFKKRTGVLLADIERTAPNLKALDQYDALQQKEKEVTERFEAARKEEREISDKYNSVKQRRMLYLM

SEQ ID NO: 158822 - protein, 297 aa, Zea Mays
MDEATTTVFLFFVFLSVSRLTTTHTYIHAWLMDGGGSSAIVCFRARTATPSTAWRRTSSTAWTTRSSGRTPSRRSRPRRRGAAARSPSRLALRRTGAGAAAAAAQARTAGGARGRRGTTAGTVPGARWPSGGRAPRTCCAPDPSPASAARGGTGRPPPPPPPPPPPRARPTRRTSSPATGTSTRSRTRRRRSSRCTAPRPPSTCGIRPSRSPTASASPSSGSSPAPSTAPTSTASRQDGRSAPHQSPVPISPLLLLCFFRLIYSKLNLAAITSPTDTDVDQHRQVHTMKATSTMFFY

SEQ ID NO: 158823 - protein, 418 aa, Zea Mays
MADGRWGVVGYRLFQSQDGDTIDCVAAHEQHGLDHPLLRAHAVQTEPPEAPRGGGALSFPSGSATNGSGSGSGSGAGKDSRRGAWQTWHHGGHCPRGTVAIRRTSAEDVLRAGSVSRFGRKRRHRKAAAAAAAAAAAARAAYAPDVITGNGHEHAIAYTAPSQQPVYGAKATINVWDPAIQESNGFSLSQLWVLSGSFNGSDLNSIEAGWQVSPELYGDSRPRLFTYWTSDAYEATGCYNALCPGFVQTSSRIAIGASISPVSSAGGAQYDMTLLVWKDPKLGNWWLSYGDQLVGYWPAQLFTHLSDHATMVEWGGEVVDTRPGGAHTATQMGSGRFAAEGFGRASYFRNLETVDADNSLAEVALDAIQTLAEDPACYDIRKAYDDDDDDDDDGQHSARGGWGTHFYYGGPGHNPACP

SEQ ID NO: 158824 - protein, 147 aa, Zea Mays
MTLLVWKDPKLGNWWLSYGDQLVGYWPAQLFTHLSDHATMVEWGGEVVDTRPGGAHTATQMGSGRFAAEGFGRASYFRNLETVDADNSLAEVALDAIQTLAEDPACYDIRKAYDDDDDDDDDGQHSARGGWGTHFYYGGPGHNPACP

SEQ ID NO: 158825 - protein, 372 aa, Zea Mays
MAQKNNALQIEELLDKLSVSLTGEELEIIGKLYQQAMKLEVEFFSAKLVDQPVVAPLSRYCDPKYKLLIFSDFDLTCTVVDSSAILAEIAILSFQKASQSGIDNNLDRAKSGELRNLWNMLSKQYMEEYEECMERLLPPEESKSLDYDKLYKGLEVLAEFEKAANSRVVDSGVLRGMNLEDIRKAGERLILQGGCKNFFQKIVKTREILNLDIHILSYCWCAELIRSAFSSAGCLDGLNIHANEFAFEESVSTGEIDRKIQSPLDKVEKFKSIRSDADSTVPFLSVYIGDSAGDLLCLLEADIGIVVGSSTSLRRVGRQFGVSFVPLFLGLVEKQRQLMDEDASVFKPRSGVLYTVSSWSEIHAFVLGSDFS

SEQ ID NO: 158826 - protein, 419 aa, Zea Mays
MKKQAWEARVMEKKRRSGELTLPKRYLQVQLQPSTLISYLQLRLEKLMAQKNNALQIEELLDKLSVSLTGEELEIIGKLYQQAMKLEVEFFSAKLVDQPVVAPLSRYCDPKYKLLIFSDFDLTCTVVDSSAILAEIAILSFQKASQSGIDNNLDRAKSGELRNLWNMLSKQYMEEYEECMERLLPPEESKSLDYDKLYKGLEVLAEFEKAANSRVVDSGVLRGMNLEDIRKAGERLILQGGCKNFFQKIVKTREILNLDIHILSYCWCAELIRSAFSSAGCLDGLNIHANEFAFEESVSTGEIDRKIQSPLDKVEKFKSIRSDADSTVPFLSVYIGDSAGDLLCLLEADIGIVVGSSTSLRRVGRQFGVSFVPLFLGLVEKQRQLMDEDASVFKPRSGVLYTVSSWSEIHAFVLGSDFS

SEQ ID NO: 158827 - protein, 323 aa, Zea Mays
MASSTSLSLCLHASSPSSSSPGLRRPSLASSSSSRSERTRKIRAKAVREDWRQKSKPIPPGAVYPAKDHCSRCGLCDTYYVAHVKTACAFLGDGMSRVEDLERQVHGRGRKEGMDEMYFGVYDQLLYARKTEPVEGAQWTGIVTTIAVEMLKANMVDAVVCVQSDPDDRLAPRPVLARTPDEVIAAKGVKPTLSPNLNTLALVEAAGVKRLLFCGVGCQVQALRSVEKYLGLEKLYVLGTNCVDNGTREGLDKFLKAASSEPETVMHYEFMQDYKVHLKHLDGHIEEVPYFCLPANDLVDVIAPSCYSCFDYTNGLAVRFPSF

SEQ ID NO: 158828 - protein, 162 aa, Zea Mays
MDEMYFGVYDQLLYARKTEPVEGAQWTGIVTTIAVEMLKANMVDAVVCVQSDPDDRLAPRPVLARTPDEVIAAKGVKPTLSPNLNTLALVEAAGVKRLLFCGVGCQVQALRSVEKYLGLEKLYVLGTNFDNGTREGLDKFLKAASSEPETVMHYEFMQDYKV

SEQ ID NO: 158829 - protein, 247 aa, Zea Mays
MASSTSLSLCLHASSPSSSSPGLRRPSLASSSSSRSERTRKIRAKAVREDWRQKSKPIPPGAVYPAKDHCSRCGLCDTYYVAHVKTACAFLGDGMSRVEDLERQVHGRGRKEGMDEMYFGVYDQLLYARKTEPVEGAQWTGIVTTIAVEMLKANMVDAVVCVQSDPDDRLAPRPVLARTPDEVIAAKGVKPTLSPNLNTLALVEAAGVKRLLFCGVGCQVQALVWKSFMCLEQTVLTMVRVKGLINS

SEQ ID NO: 158830 - protein, 195 aa, Zea Mays
MCCMTWTVSFLLLRTNIAELILLTSSCLGASSTFMFRIAFVDLVVGYMGVPKYAGVSMTQHPQYITVRNDRGQEMLNLVAGLLESTPTISSGSRQPFVMETVKADDAAKLGKGPSKPAPRFVGDILAFLLNLVGPKGLEFARYSLDYHTIRNYLHVRRAWGKQRAEQHIPGYAKKIVEAYDKDGRIEAMVTQSGD

SEQ ID NO: 158831 - protein, 177 aa, Zea Mays
MHKHYHMDSNNVFYPLCSDPDDRLAPRPVLARTPDEVIAAKGVKPTLSPNLNTLALVEAAGVKRLLFCGVGCQVQALRSVEKYLGLEKLYVLGTNCVDNGTREGLDKFLKAASSEPETVMHYEFMQDYKVHLKHLDGHIEEVPYFCLPANDLVDVIAPSCYSCFDYTNGLAVRFPSF

SEQ ID NO: 158832 - protein, 358 aa, Zea Mays
MDEMYFGVYDQLLYARKTEPVEGAQWTGIVTTIAVEMLKANMVDAVVCVQSDPDDRLAPRPVLARTPDEVIAAKGVKPTLSPNLNTLALVEAAGVKRLLFCGVGCQVQALRSVEKYLGLEKLYVLGTNCVDNGTREGLDKFLKAASSEPETVMHYEFMQDYKVHLKHLDGHIEEVPYFCLPANDLVDVIAPSCYSCFDYTNGLADLVVGYMGVPKYAGVSMTQHPQYITVRNDRGQEMLNLVAGLLESTPTISSGSRQPFVMETVKADDAAKLGKGPSKPAPRFVGDILAFLLNLVGPKGLEFARYSLDYHTIRNYLHVRRAWGKQRAEQHIPGYAKKIVEAYDKDGRIEAMVTQSGD

SEQ ID NO: 158833 - protein, 353 aa, Zea Mays
MDEMYFGVYDQLLYARKTEPVEGAQWTGIVTTIAVEMLKANMVDAVVCVQSDPDDRLAPRPVLARTPDEVIAAKGVKPTLSPNLNTLALVEAAGVKRLLFCGVGCQVQALRSVEKYLGLEKLYVLGTNFDNGTREGLDKFLKAASSEPETVMHYEFMQDYKVHLKHLDGHIEEVPYFCLPANDLVDVIAPSCYSCFDYTNGLADLVVGYMGVPKYAGVSMTQHPQYITVRNDRGQEMLNLVAGLLESTPTISSGSRQPFVMETVKADDAAKLGTSPNHHLYGILVLSIGIELVVTMTIRLAYIHVNKQTNGSTGKGPSKPAPRFVGDILAFLLNLVSSWSSAEEGWHEICNVN

SEQ ID NO: 158834 - protein, 162 aa, Zea Mays
MLCDPDDRLAPRPVLARTPDEVIAAKGVKPTLSPNLNTLALVEAAGVKRLLFCGVGCQVQALRSVEKYLGLEKLYVLGTNCVDNGTREGLDKFLKAASSEPETVMHYEFMQDYKVHLKHLDGHIEEVPYFCLPANDLVDVIAPSCYSCFDYTNGLAVRFPSF

SEQ ID NO: 158835 - protein, 159 aa, Zea Mays
MASSTSLSLCLHASSPSSSSPGLRRPSLASSSSSRSERTRKIRAKAVREDWRQKSKPIPPGAVYPAKDHCSRCGLCDTYYVAHVKTACAFLGDGMSRVEDLERQVHGRGRKEGMDEMYFGVYDQLLYARKTEPVEGAQWTGIVTTIAVEMLKANMVDAV

SEQ ID NO: 158836 - protein, 164 aa, Zea Mays
MLWFVYKVILTTGLLQDLFWPDEVIAAKGVKPTLSPNLNTLALVEAAGVKRLLFCGVGCQVQALRSVEKYLGLEKLYVLGTNCVDNGTREGLDKFLKAASSEPETVMHYEFMQDYKVHLKHLDGHIEEVPYFCLPANDLVDVIAPSCYSCFDYTNGLAVRFPSF

SEQ ID NO: 158837 - protein, 187 aa, Zea Mays
MASSTSLSLCLHASSPSSSSPGLRRPSLASSSSSRSERTRKIRAKAVREDWRQKSKPIPPGAVYPAKDHCSRCGLCDTYYVAHVKTACAFLGDGMSRVEDLERQVHGRGRKEGMDEMYFGVYDQLLYARKTEPVEGAQWTGIVTTIAVEMLKANMVDAVVCVQSDPDDRLAPRPVLASHALVGHQTK

SEQ ID NO: 158838 - protein, 406 aa, Zea Mays
MPAAYIYQAREREPHTQSQHTQPPRTALLASIAISRHIDLRTKLVVQMDRVPPPVSMQVAAMQRHQQQQQFVHHLQQVHQQGTQHEQPPPPHQNGSSSSGRTGGGRKCCPLRRSRKGCMKGKGGPDNQQCPFRGVRQRTWGKWVAEIREPNRGARLWLGTFGSALEAARAYDAAARTLYGDCARLNLQLVPPSAAAAAAGGGGPAVVASPSPDTVAGPAAAAGGGGHNCHHQYLQQQHAMAAPMMMMHSSCCSADGSSSNSDSISNSCSSPVTTAASPAYSHHQTMFQTPALQPSCGAMTMAAAAPHVQGFHVGDDDTTTAMAMHRHQQMMRELAEAPLHQEADDFEDFVTRLPKAEDFGLQGFQEVAPEVFDDAAGIWDHAAAWEPPTMMIDSGAQPQQQLVVPL

SEQ ID NO: 158839 - protein, 415 aa, Zea Mays
MSQQQTRQPNASTSVQGSLPSVGQNLSSVSQTLTLQNLSGMPQNTMNNGLAQGTPQDMYAAQRQMAGRQQQQQQQQAHNQFMYQQQKLLMNQKLQQNSRMQPHIQQQQTLLQSTQMQSSQQPMVQMSSGLQPGQIAIPQTQSMAMQSATQSGIQQNALNSVQQPVQSLLQQPTPSVVRQQQHPQSMHQQSSLQQTQPTQQPNIPLQQQPQQLMGHQSNLQQNQLVNQQSGAVEMQQQQRLPVQSTNLLNMHQTQQMMNQQSMPLHQPQQLANQGNVSSLNQQQQQLLGTVPNVRMHMLQQQKPIQQPQQQQHAQQTSMGLMQPQSQQNQLQQPQQHMMSQFQSQPNQTQQQLGMQQRLQTSAGMLLQQNNIDQQKQYVQAQKVLQEAPSNYLITLIKPAIYADHACHMCLGVYGS

SEQ ID NO: 158840 - protein, 1293 aa, Zea Mays
MDGAANWRPTQGADPATVAAVGGVDPNAAAPTGSDWRTQLQPEARQRIVNKIMETLKKHLPVSVPEGLTELHKIAVRFEEKIYTAATSQSDYLRKISLKMLSMESQKKTQQNPGNAQVIPNQNPPGPGSNPAQSSAIPLMSQQQTRQPNASTSVQGSLPSVGQNLSSVSQTLTLQNLSGMPQNTMNNGLAQGRQQQQQQQQAHNQFMYQQQKLLMNQKLQQNSRMQPHIQQQQTLLQSTQMQSSQQPMVQMSSGLQPGQIAIPQTQSMAMQSATQSGIQQNALNSVQQPVQSLLQQPTPSVVRQQQHPQSMHQQSSLQQTQPTQQPNIPLQQQPQQLMGHQSNLQQNQLVNQQSGAVEMQQQQRLPVQSTNLLNMHQTQQMMNQQSMPLHQPQQLANQGNVSSLNQQQQQLLGTVPNVRMHMLQQQKPIQQPQQQQHAQQTSMGLMQPQSQQNQLQQPQQHMMSQFQSQPNQTQQQLGMQQRLQTSAGMLLQQNNIDQQKQYVQAQKVLQEAPSTSVDSTAQTGHPGTGDSQEELYQMIKSLKDQYFAELNDVYNKISMKIQNIDNHMPAQKSAEQYERLKGFKGMLERILHFLQANKSSIQPGFREKISIFERQILSIMSSQRRKPVQAPGQQTFQQSGGQAPSSNMSQQHQTSQGLQQHDSHTNQMPQASLPSMNTGVPTSGAPGIQHVPAPQASNFGVPTTQQNVTNAPQAASNPENAQGNNFNPVQHGSMGTALQQGSTGPMQGALNAQHQSNSNMISNNAMSTMQTNTNAMQANVNSLQQLKQHQEHQMMQNQQMKQRQQMLQQMQQKKILQQQLPIQQLQKQQQQGPIQVQQLHSGNDVNELKVRQGAAIKSGMYQPLNQRNYYQQIKRGDVFPISSPQNLQASSPQISHYSHVDQHSLLQSQVKTGTPLHSANSPFVPSPSPPVAPSPVPLDSDKPLSNLSSLTSAGQAGHQQTSLAPLTQSIAVNTPGISASPLLAEFTSADGGQVSVPTQVPTKSSAAERPLDRLLKALRTTQPESLSAAVSDIGSVVSMIDRIAGSAPGNGSRAAVGEDLVAMTKCRLQARNFITHDGSGASKRMKRDTGAMPLNVSSAGSLNDSLKQSYTVGTPELQSTATSRVKCQRAEVNHVLLEEIQEINKQLIDTELHVSEDDAESFTTSDMAEGTVIKCTFTAVAVSPSLKSMFASAQMSPILPLRLLVPGSYPKCSPVLLDKFPDEQCRNSDDLSTKAKSKFSVLLRGLAEPMSLREIARTWDACARKVIAEYAQQTGGGSFSSSYGCWESCVGAS

SEQ ID NO: 158841 - protein, 1024 aa, Zea Mays
MDGAANWRPTQGADPATVAAVGGVDPNAAAPTGSDWRTQLQPEARQRIVNKIMETLKKHLPVSVPEGLTELHKIAVRFEEKIYTAATSQSDYLRKISLKMLSMESQKKTQQNPGNAQVIPNQNPPGPGSNPAQSSAIPLMSQQQTRQPNASTSVQGSLPSVGQNLSSVSQTLTLQNLSGMPQNTMNNGLAQGRQQQQQQQQAHNQFMYQQQKLLMNQKLQQNSRMQPHIQQQQTLLQSTQMQSSQQPMVQMSSGLQPGQIAIPQTQSMAMQSATQSGIQQNALNSVQQPVQSLLQQPTPSVVRQQQHPQSMHQQSSLQQTQPTQQPNIPLQQQPQQLMGHQSNLQQNQLVNQQSGAVEMQQQQRLPVQSTNLLNMHQTQQMMNQQSMPLHQPQQLANQGNVSSLNQQQQQLLGTVPNVRMHMLQQQKPIQQPQQQQHAQQTSMGLMQPQSQQNQLQQPQQHMMSQFQSQPNQTQQQLGMQQRLQTSAGMLLQQNNIDQQKQYVQAQKVLQEAPSTSVDSTAQTGHPGTGDSQEELYQMIKSLKDQYFAELNDVYNKISMKIQNIDNHMPAQKSAEQYERLKGFKGMLERILHFLQANKSSIQPGFREKISIFERQILSIMSSQRRKPVQAPGQQTFQQSGGQAPSSNMSQQHQTSQGLQQHDSHTNQMPQASLPSMNTGVPTSGAPGIQHVPAPQASNFGVPTTQQNVTNAPQAASNPENAQGNNFNPVQHGSMGTALQQGSTGPMQGALNAQHQSNSNMISNNAMSTMQTNTNAMQANVNSLQQLKQHQEHQMMQNQQMKQRQQMLQQMQQKKILQQQLPIQQLQKQQQQGPIQVQQLHSGNDVNELKVRQGAAIKSGMYQPLNQRNYYQQIKRGDVFPISSPQNLQASSPQISHYSHVDQHSLLQSQVKTGTPLHSANSPFVPSPSPPVAPSPVPLDSDKPLSNLSSLTSAGQAGHQQTSLAPLTQSIAVNTPGISASPLLAEFTSADGGQVSVPTQVPTKSSAAERPLDRLLKADCWISAW

SEQ ID NO: 158842 - protein, 1167 aa, Zea Mays
MSQQQTRQPNASTSVQGSLPSVGQNLSSVSQTLTLQNLSGMPQNTMNNGLAQGTPQDMYAAQRQMAGRQQQQQQQQAHNQFMYQQQKLLMNQKLQQNSRMQPHIQQQQTLLQSTQMQSSQQPMVQMSSGLQPGQIAIPQTQSMAMQSATQSGIQQNALNSVQQPVQSLLQQPTPSVVRQQQHPQSMHQQSSLQQTQPTQQPNIPLQQQPQQLMGHQSNLQQNQLVNQQSGAVEMQQQQRLPVQSTNLLNMHQTQQMMNQQSMPLHQPQQLANQGNVSSLNQQQQQLLGTVPNVRMHMLQQQKPIQQPQQQQHAQQTSMGLMQPQSQQNQLQQPQQHMMSQFQSQPNQTQQQLGMQQRLQTSAGMLLQQNNIDQQKQYVQAQKVLQEAPSTSVDSTAQTGHPGTGDSQEELYQMIKSLKDQYFAELNDVYNKISMKIQNIDNHMPAQKSAEQYERLKGFKGMLERILHFLQANKSSIQPGFREKISIFERQILSIMSSQRRKPVQAPGQQTFQQSGGQAPSSNMSQQHQTSQGLQQHDSHTNQMPQASLPSMNTGVPTSGAPGIQHVPAPQASNFGVPTTQQNVTNAPQAASNPENAQGNNFNPVQHGSMGTALQQGSTGPMQGALNAQHQSNSNMISNNAMSTMQTNTNAMQANVNSLQQLKQHQEHQMMQNQQMKQRQQMLQQMQQKKILQQQLPIQQLQKQQQQGPIQVQQLHSGNDVNELKVRQGAAIKSGMYQPLNQRNYYQQIKRGDVFPISSPQNLQASSPQISHYSHVDQHSLLQSQVKTGTPLHSANSPFVPSPSPPVAPSPVPLDSDKPLSNLSSLTSAGQAGHQQTSLAPLTQSIAVNTPGISASPLLAEFTSADGGQVSVPTQVPTKSSAAERPLDRLLKALRTTQPESLSAAVSDIGSVVSMIDRIAGSAPGNGSRAAVGEDLVAMTKCRLQARNFITHDGSGASKRMKRDTGAMPLNVSSAGSLNDSLKQSYTVGTPELQSTATSRVKCQRAEVNHVLLEEIQEINKQLIDTELHVSEDDAESFTTSDMAEGTVIKCTFTAVAVSPSLKSMFASAQMSPILPLRLLVPGSYPKCSPVLLDKFPDEQWNSDDLSTKAKSKFSVLLRGLAEPMSLREIARTWDACARKVIAEYAQQTGGGSFSSSYGCWESCVGAS

SEQ ID NO: 158843 - protein, 775 aa, Zea Mays
METLKKHLPVSVPEGLTELHKIAVRFEEKIYTAATSQSDYLRKISLKMLSMESQKKTQQNPGNAQVIPNQNPPGPGSNPAQSSAIPLMSQQQTRQPNASTSVQGSLPSVGQNLSSVSQTLTLQNLSGMPQNTMNNGLAQGTPQDMYAAQRQMAGRQQQQQQQQAHNQFMYQQQKLLMNQKLQQNSRMQPHIQQQQTLLQSTQMQSSQQPMVQMSSGLQPGQIAIPQTQSMAMQSATQSGIQQNALNSVQQPVQSLLQQPTPSVVRQQQHPQSMHQQSSLQQTQPTQQPNIPLQQQPQQLMGHQSNLQQNQLVNQQSGAVEMQQQQRLPVQSTNLLNMHQTQQMMNQQSMPLHQPQQLANQGNVSSLNQQQQQLLGTVPNVRMHMLQQQKPIQQPQQQQHAQQTSMGLMQPQSQQNQLQQPQQHMMSQFQSQPNQTQQQLGMQQRLQTSAGMLLQQNNIDQQKQYVQAQKVLQEAPSTSVDSTAQTGHPGTGDSQEELYQMLRTTQPESLSAAVSDIGSVVSMIDRIAGSAPGNGSRAAVGEDLVAMTKCRLQARNFITHDGSGASKRMKRDTGAMPLNVSSAGSLNDSLKQSYTVGTPELQSTATSRVKCQRAEVNHVLLEEIQEINKQLIDTELHVSEDDAESFTTSDMAEGTVIKCTFTAVAVSPSLKSMFASAQMSPILPLRLLVPGSYPKCSPVLLDKFPDEQWNSDDLSTKAKSKFSVLLRGLAEPMSLREIARTWDACARKVIAEYAQQTGGGSFSSSYGCWESCVGAS

SEQ ID NO: 158844 - protein, 507 aa, Zea Mays
MKSLGMETLKKHLPVSVPEGLTELHKIAVRFEEKIYTAATSQSDYLRKISLKMLSMESQKKTQQNPGNAQVIPNQNPPGPGSNPAQSSAIPLMSQQQTRQPNASTSVQGSLPSVGQNLSSVSQTLTLQNLSGMPQNTMNNGLAQGTPQDMYAAQRQMAGRQQQQQQQQAHNQFMYQQQKLLMNQKLQQNSRMQPHIQQQQTLLQSTQMQSSQQPMVQMSSGLQPGQIAIPQTQSMAMQSATQSGIQQNALNSVQQPVQSLLQQPTPSVVRQQQHPQSMHQQSSLQQTQPTQQPNIPLQQQPQQLMGHQSNLQQNQLVNQQSGAVEMQQQQRLPVQSTNLLNMHQTQQMMNQQSMPLHQPQQLANQGNVSSLNQQQQQLLGTVPNVRMHMLQQQKPIQQPQQQQHAQQTSMGLMQPQSQQNQLQQPQQHMMSQFQSQPNQTQQQLGMQQRLQTSAGMLLQQNNIDQQKQYVQAQKVLQEAPSNYLITLIKPAIYADHACHMCLGVYGS

SEQ ID NO: 158845 - protein, 144 aa, Zea Mays
MCTIALPLSSHIESVQWPSASTSPYPAREPKLASPPSLPVSLVTANGGGSDQWPRANVPVQAQVHSLSAEEALDHLDRERRLHDFYIEIFKGPGYHKPATHLKSVLLKFLELVDWLDKVSILCSKVVYKNGRQHPDDNIIVEEF

SEQ ID NO: 158846 - protein, 50 aa, Zea Mays
MGINRCPTLWRDGEKKDNFYYQGILIRILGSFIHSLQCLRTHEHLSLALL

SEQ ID NO: 158847 - protein, 251 aa, Zea Mays
MMRSGLLSLCFHLALAITLAASVPGLARSRVIDIEPQLKPTLQLEPKHGVSQPDRNQEPKPTPQPEPKPEPKPEPKPAPQSDTKSDPKPAPQSDPKPAPQPDLKPEPKPTPQPDPKPEPKPTPQPDPKPEPKPTPQPGPEPKPKPAPQPEPKPTPQPDPKPEPKPTPQPDPKPEPKPTPQPPFPQPEPQPDPKPQPEPSKPDPKPQPEPSKPDPQPEPKPTPEPKPQPEPSKPEPPSSLPPPFGTGVVEGN

SEQ ID NO: 158848 - protein, 882 aa, Zea Mays
MDVPKEIFLKDYKAPDYYFDTVDLQFQLGEEKTIVTSKIVVSPGVEGISAPLVLHGHDLKLISIKVNGTELKGEEYKVNSRHLMLSTPPAVVFNLEIVTEIYPQLNTSLEGLYKSTGNFCTQCEAEGFRKITYFQDRPDVMAKYTCRIEADKTLYPVLLSNGNLIEQGDLEGGKHYALWEDPFKKPSYLFALVAGQLGCREDSFVTCSGRNVTLRIWTPAQDLPKTAHAMYSLKAAMKWDEEVFGLEYDLDLFNIVVVPDFNMGAMENKSLNIFQSRLVLASPETATDGDYAAILGVVGHEYFHNWTGNRVTCRDWFQLTLKEGLTVFRDQEFSSDLGCRTVKRIADVSKLRIYQFPQDAGPMAHPIRPHSYIKMDNFYTDQVYEKGAEVVRMYKTMFGASGFRKGMDLYFKRHDGQAVTCEDFYAAMCDANNAQLPNFLQWYSQAGTPIVKVASSYDPSSQTFSLKLSQEVPPTPGQPVKEPMFIPVAVGLVDSTGKDMPLTSVYSDGSLQTVSTDGQPVFTTVLQFKKKEEEFMFKNIPERPVPSLLRGYSAPVRLDSDLSEGDLFFLLASDSDEFNRWEAGQVLARKLMLSLVADFQQQKTLVLNPKFVDGIRSILRNTSLDKEFIAKAITLPGQGEIMDMMEVADPDAVHAVRNFIKKELAVQLKDVKSNRSSEAYTFNHDSMARRALKNTCLAYLASLNEPDFVELALHEYKSATNMTEQFAALAALSQNPGQVRDDALLDFYNKWQHEYLVVSKWFALQATSEIPGNVANVQKLLSHPAFDLRNPNKVYSLIGGFCGSPVNFHAKDGSGYKFLGEIVLQLDKINPQVASRMVSAFSRWRRYDKTRQALAKAQLEMIVSANGLSENVFEIASKSLAD

SEQ ID NO: 158849 - protein, 343 aa, Zea Mays
MSWAAIENDPGVFTELLQQMQLKGLQVSNQLSSLYESMFLLKVDELYSLDLDALNDLQPIYGLILLYKWRPPEKDEGPVIKDAIPNLFFANQIINKACATQAIVSVLLNSPGITLSDELKKLKEFAKDLPPELKGLAIVNCASIRMLNNSFARSEASEEQKPPSGDDDVYHFINYVPVDGVLYELDGLKEGPISLGKCPGGVGDAGWWLRLAQPVIKEHIDLFSQNEIRFSVMAILKNRKEMFTVEIKELQRKREGLLQQMGDPNASRHVEQSLAEVAAQIESVTEKIIMEEEKVKKWKAENLRRKHNYVPFLFNFLKILEEKQQLKPLIEKAKAKQKSHGPS

SEQ ID NO: 158850 - protein, 134 aa, Zea Mays
MSDVENPGVGGKPPPYKDPDNGSQRFLLELEFVQCLANPTYIHYLAQNRYFEDEAFIGYLKYLKYWQRPEYIKYIMYPHCLFFLELLQNANFRNAMAHPTNKDGLIEVLAQLFNGHCRIRAQLLPQEPYYFLLF

SEQ ID NO: 158851 - protein, 137 aa, Zea Mays
MAHPTNKELAHRQQYFFWKNYRNNRLKHIIPRPPPEPAPSQAPATLPLQASVPTPVAPPVPAPTSSMPPVVAGGASAMSPMQFVGTPGTNMPKNDMRNAMDNRKRKYAPPPLQSSNSHFMKLFVHALFSFLAILSVL

SEQ ID NO: 158852 - protein, 337 aa, Zea Mays
MAPPAGTGAGTEGRPARRRGTGTSPGRTKVWVEPPGKSHGHHHHQAPPPPSPPKRVAVVYYLCRNRHLEHPHFIEVPLAVPEEGLYLRDVMNRLNVLRGKGMASMYSWSCKRAASTSSRAPSSSTARRRRRQIGSMMAALATRMWRRTSSTARKKSPRSLGARRKGARRRRLLPPPPLARRSRLRPPLRGHSSRRSRQPCRRRRRRRRLPPAARTTRAGPRTQARPATSPPNPLRETLHRQRLAPQDRRSTESADPSGLRTRPHRQTTARGTLLKTIVLAWPERPPWTRRRMPRSRNATGGARRCHPRYPRPFVSHRRPCAPPMLLRLVAESRRWSP

SEQ ID NO: 158853 - protein, 267 aa, Zea Mays
MESLWKLTYLLDPASVALIATAISVAYASASRALDYGKEMERNLDFSEASITLDRSQALMIPLASSCSLLLMFYLFSSVSHLVTAFTAVASALALFFCLSPHITYLKARFNLMDPFMSRCCSKSFTRLQGLLMLFCIATVLAWLVSGHWMLNNLLGISICIAFVSHVRLPNIKICALLLACLFVYDIFWVFFSERFFGANVMVSVATQKASNPVHTVANKLSLPGLQLITKKLELPVKLVFPRNLLGGIVPGSNPGDYMMLGLGDMW

SEQ ID NO: 158854 - protein, 297 aa, Zea Mays
MESLWKLTYLLDPASVALIATAISVAYASASRALDYGKEMERNLDFSEASITLDRSQALMIPLASSCSLLLMFYLFSSVSHLVTAFTAVASALALFFCLSPHITYLKARFNLMDPFMSRCCSKSFTRLQGLLMLFCIATVLAWLVSGHWMLNNLLGISICIAFVSHVRLPNIKICALLLACLFVYDIFWVFFSERFFGANVMVSVATQKASNPVHTVANKLSLPGLQLITKKLELPVKLVFPRNLLGGIVPGSNPGDYMMLGLGDMVSTINCILAIFHAFILVLVLFSWRSGEKPSH

SEQ ID NO: 158855 - protein, 697 aa, Zea Mays
MFLTGGRTKTCIIATVSPSVHCLEETLSTLDYAHRAKSIKNRPEVNQKMMKSTLIKDLYGEIDRLKAEVYAAREKVGVYIPKDRYQQEENERKAMADQIEQMNASLEANQKLISDLQEKYDSELRHSADLSKKLEVTEKCMDHTSNLLSATKEDLKQAQYNLKEKDYIISEQKKAENALTHQACVLRSDLEKYTRDNTSLYSKIARGDKLSATNRSVVNTFQTDLASKLDTLSNTLNASIDQQNMHLKAVEDLCQSCVDSHDRATSELKKKILASKSLYMSHMEAFQNVVLLHKASANATLEDISSLSATSCCSLDQLLVCVEGEAQNIFNDIHKLLTTHRSEMTHFTQQLRESFQISLDRTKEMSTYIIGLFDKYVEETSKLQSHSNNTHEAQMKSIEDFQMVYEEQSKSEEQKLLADISSLVSKHITRQRELVGVRLSSLGDAARGNKAFLDEHTSAMEFVTKDAKRKWETFAEQAENDCKAGSSSSAVKHCRMETMLQECACTVDSAVQQWKKSHAAVNDLSRKQVAEVEALVRTAIENNEQHEVEVASSRAVAEEDTTNSSKDIAQGVENLLEKAQKSSSRVVSMVEAHFAELQKLQESHSTQATGINMHADKSFQTSYKDYEPTGETPVRSEPNVPSKGSIESLRAMPMETLMNEFRENHPYESESSKESKLSQIPRLPLSIRNLPKNCTGV

SEQ ID NO: 158856 - protein, 110 aa, Zea Mays
MGVHFCRLDGAPDGWRGARPTGETSADWDKAWSAFKKKGKRTLFSDFSPDKYVTWNPRRSEYPLSEEVDPIKRTERSNLMLWTSPQFTLVGAIIIVLTLLIYTLVVPPPK

SEQ ID NO: 158857 - protein, 144 aa, Zea Mays
MEHLMDGEELAQQNLGGQPYMDVLLGSGRFLARRPPLALVPRCSRGSPDKSGSDKGETSADWDKAWSAFKKKGKRTLFSDFSPDKYVTWNPRRSEYPLSEEVDPIKRTERSNLMLWTSPQFTLVGAIIIVLTLLIYTLVVPPPK

SEQ ID NO: 158858 - protein, 160 aa, Zea Mays
MGGTVFQLLHFCRLDGAPDGWRGEELAQQNLGGQPYMDVLLGSGRFLARRPPLALVPRCSRGSPDKSGSDKGETSADWDKAWSAFKKKGKRTLFSDFSPDKYVTWNPQRSEYPLSEEVDPIKRTERSNLMLWTSPQFTLVGAIIIVLTLLIYTLVVPPPK

SEQ ID NO: 158859 - protein, 296 aa, Zea Mays
MGQDGQQIRRDKLIIDTDPGIDDSMTILMAFRAPSVEIIGLTTIFGNVDTKGATRNALLLCERAGCPEVPVAEGSHEPLKGGKPRVADFVHGSDGIGNLFLPAPSAKKVEESAADFLINKVSEFPGEVSVLALGPLTNVALAIKRDPSFASKVKKIVVLGGAFFAAGNVNPAAEANIHGDPEAADIVFTSGADIVVVGINITTQVCLTDEDLLELRNSKGKHAAFLYEMCKFYRDWHAKSDGFHGIFLHDPVSFTAVLHPEYFTFKKGVVRVETQGICTGHTLMDQGLKKYVFFSL

SEQ ID NO: 158860 - protein, 307 aa, Zea Mays
MLQDDSMTILMAFRAPSVEIIGLTTIFGNVDTKGATRNALLLCERAGCPEVPVAEGSHEPLKGGKPRVADFVHGSDGIGNLFLPAPSAKKVEESAADFLINKVSEFPGEVSVLALGPLTNVALAIKRDPSFASKVKKIVVLGGAFFAAGNVNPAAEANIHGDPEAADIVFTSGADIVVVGINITTQVCLTDEDLLELRNSKGKHAAFLYEMCKFYRDWHAKSDGFHGIFLHDPVSFTAVLHPEYFTFKKGVVRVETQGICTGHTLMDQGLKKWNSENPWSGYKPISVAWTVDVPKVISFIKKLLMAP

SEQ ID NO: 158861 - protein, 56 aa, Zea Mays
MAEAPADSVARAQRPRDVLPGESGRPPPRLWLKAGALEFFSPSPCSLGDRVDTRRR

SEQ ID NO: 158862 - protein, 153 aa, Zea Mays
MERIVLHSGEGSSAIIPVRSNPYTWGGPQHTWQDCAAPGDKPVFTLDDQEKTQLWQDFQVIGQLTAKSATKCVFLHRERGVWEWDSLRHQKGLLAQANEQLAQKSTEAADLWALYSKLKEEAASVRGEVAPLAERVSEMEEDLSRIFGKREKF

SEQ ID NO: 158863 - protein, 195 aa, Zea Mays
MATVFLRSLAMAMADTALPPSHKLLPTVSLPLLPSSTRAAPLLLCASRRLPPAPLVASSDAVETNIEWVDDDEEEAGEAFDEEGGDVEEEVLASGDEGEGEYAAVEPPEEAKVYVGNLPYDIESEGLAQLFDQAGVVEVAEVIYNKETGQSRGFGFVTMSTIEEADKAIEMFNRYELDGRPLRVNVAAERPQRGF

SEQ ID NO: 158864 - protein, 791 aa, Zea Mays
MDGSGSWDAIDWNQIEDPRPRRSGQAVKESMDDFLLEDEEVLAQGHGVVLLNNRDAGTLSVTNFRLLFVSQAKKCVIELGTIPLTTIEKLNDDVKLQPLPHLSDKNHPRELLQVIGKDMRIIVFAFIPRTQQKNEVFDALRRYTKPANLRSLPLQGVEEVSLCNEWWRLTRVNSSYSLCSTYPSELIVPRSISDEDLFQASPFRSGKRLPVISWCDPGSGAVLARSSQPMVGLMMNFRNNADEKLVCALSSRTIDEKGSPRKLYIIDARPRANAIANGAKGGGSESSSNYHKSEVLFLGIQNIHTMRESLSRLRDYVDAHGSISSNGSPSAVSVVGDRRNRGSTWGGGNLNSMTSFSSTLGEWLNHIQNILVGASWIAAQISEEAASVLVHCSDGWDRTTQLVSLACLLLDPYYRTFSGFQALVEKDWLAFGHPFAERMGVPTVAENGGSQYELLRQPSLGNLSSSPSRNTLGPPGPSSNSPVQSQTSNNTSPILLQWLDCISQLLRLYPSAFQFSSKFLVDFMDCVLSCRFGNFLCNSEREREQSGVTISCRCMWSHLANLRASGGSFHEHYNPFYDPVNHNGALLPPAAALAPTLWPQFFLRWTCPIESQGGDLESQWHAMNKKYADTMKAKDIAEWRAKDIKLKLESMKQDLQREKRINSTALAAARSAQRENAAIKKAIESIGCTIKFSTSENEDRTEVLSCSLGRGTDGRAQQDENGDFSVAIEDSLVSDAPADHFCESLCPFRTREGCRWPDAPCAQLGSQFVGLKANFDAFDRLSIHDCYFGPE

SEQ ID NO: 158865 - protein, 460 aa, Zea Mays
MDGSGSWDAIDWNQIEDPRPRRSGQAVKESMDDFLLEDEEVLAQGHGVVLLNNRDAGTLSVTNFRLLFVSQAKKCVIELGTIPLTTIEKLNDDVKLQPLPHLSDKNHPRELLQVIGKDMRIIVFAFIPRTQQKNEVFDALRRYTKPANLWDLYAFSCDPSTIKHDSEPKWRLLREYFRLFRRSLPLQGVEEVSLCNEWWRLTRVNSSYSLCSTYPSELIVPRSISDEDLFQASPFRSGKRLPVISWCDPGSGAVLARSSQPMVGLMMNFRNNADEKLVCALSSRTIDEKGSPRKLYIIDARPRANAIANGAKGGGSESSSNYHKSEVLFLGIQNIHTMRESLSRLRDYVDAHGSISSNGSPSAVSVVGDRRNRGSTWGGGNLNSMTSFSSTLGEWLNHIQNILVGASWIAAQISEEAASVLVHCSDGWDRTTQLVSLACLLLDPYYRTFSGFQREWEFQQ

SEQ ID NO: 158866 - protein, 223 aa, Zea Mays
MDGSGSWDAIDWNQIEDPRPRRSGQAVKESMDDFLLEDEEVLAQGHGVVLLNNRDAGTLSVTNFRLLFVSQAKKCVIELGTIPLTTIEKLNDDVKLQPLPHLSDKNHPRELLQVIGKDMRIIVFAFIPRTQQKNEVFDALRRYTKPANLWDLYAFSCDPSTIKHDSEPKWRLLREYFRLFRRSLPLQGVEEVSLCNEWWRLTRVNSSYSLCSTYPSELIVPRS

SEQ ID NO: 158867 - protein, 782 aa, Zea Mays
MLGGHGVVLLNNRDAGTLSVTNFRLLFVSQAKKCVIELGTIPLTTIEKLNDDVKLQPLPHLSDKNHPRELLQVIGKDMRIIVFAFIPRTQQKNEVFDALRRYTKPANLWDLYAFSCDPSTIKHDSEPKWRLLREYFRLFRRSLPLQGVEEVSLCNEWWRLTRVNSSYSLCSTYPSELIVPRSISDEDLFQASPFRSGKRLPVISWCDPGSGAVLARSSQPMVGLMMNFRNNADEKLVCALSSRTIDEKGSPRKLYIIDARPRANAIANGAKGGGSESSSNYHKSEVLFLGIQNIHTMRESLSRLRDYVDAHGSISSNGSPSAVSVVGDRRNRGSTWGGGNLNSMTSFSSTLGEWLNHIQNILVGASWIAAQISEEAASVLVHCSDGWDRTTQLVSLACLLLDPYYRTFSGFQALVEKDWLAFGHPFAERMGVPTVAENGGSQYELLRQPSLGNLSSSPSRNTLGPPGPSSNSPVQSQTSNNTSPILLQWLDCISQLLRLYPSAFQFSSKFLVDFMDCVLSCRFGNFLCNSEREREQSGVTISCRCMWSHLANLRASGGSFHEHYNPFYDPVNHNGALLPPAAALAPTLWPQFFLRWTCPIESQGGDLESQWHAMNKKYADTMKAKDIAEWRAKDIKLKLESMKQDLQREKRINSTALAAARSAQRENAAIKKAIESIGCTIKFSTSENEDRTEVLSCSLGRGTDGRAQQDENGDFSVAIEDSLVSDAPADHFCESLCPFRTREGCRWPDAPCAQLGSQFVGLKANFDAFDRLSIHDCYFGPE

SEQ ID NO: 158868 - protein, 705 aa, Zea Mays
MRIIVFAFIPRTQQKNEVFDALRRYTKPANLWDLYAFSCDPSTIKHDSEPKWRLLREYFRLFRRSLPLQGVEEVSLCNEWWRLTRVNSSYSLCSTYPSELIVPRSISDEDLFQASPFRSGKRLPVISWCDPGSGAVLARSSQPMVGLMMNFRNNADEKLVCALSSRTIDEKGSPRKLYIIDARPRANAIANGAKGGGSESSSNYHKSEVLFLGIQNIHTMRESLSRLRDYVDAHGSISSNGSPSAVSVVGDRRNRGSTWGGGNLNSMTSFSSTLGEWLNHIQNILVGASWIAAQISEEAASVLVHCSDGWDRTTQLVSLACLLLDPYYRTFSGFQALVEKDWLAFGHPFAERMGVPTVAENGGSQYELLRQPSLGNLSSSPSRNTLGPPGPSSNSPVQSQTSNNTSPILLQWLDCISQLLRLYPSAFQFSSKFLVDFMDCVLSCRFGNFLCNSEREREQSGVTISCRCMWSHLANLRASGGSFHEHYNPFYDPVNHNGALLPPAAALAPTLWPQFFLRWTCPIESQGGDLESQWHAMNKKYADTMKAKDIAEWRAKDIKLKLESMKQDLQREKRINSTALAAARSAQRENAAIKKAIESIGCTIKFSTSENEDRTEVLSCSLGRGTDGRAQQDENGDFSVAIEDSLVSDAPADHFCESLCPFRTREGCRWPDAPCAQLGSQFVGLKANFDAFDRLSIHDCYFGPE

SEQ ID NO: 158869 - protein, 268 aa, Zea Mays
MDCVLSCRFGNFLCNSEREREQSGVTISCRCMWSHLANLRASGGSFHEHYNPFYDPVNHNGALLPPAAALAPTLWPQFFLRWTCPIESQGGDLESQWHAMNKKYADTMKAKDIAEWRAKDIKLKLESMKQDLQREKRINSTALAAARSAQRENAAIKKAIESIGCTIKFSTSENEDRTEVLSCSLGRGTDGRAQQDENGDFSVAIEDSLVSDAPADHFCESLCPFRTREGCRWPDAPCAQLGSQFVGLKANFDAFDRLSIHDCYFGPE

SEQ ID NO: 158870 - protein, 360 aa, Zea Mays
MDKQEPVANGEQTIGLAEKPKELPVASKDEKATVPPILVDSNAFNLPSEGQTQAGTSNMDGGHNGAHNFYASQAQPFYYQGSGSENPTQAWDTYPPYMSVEGLEVGPPVVYNEDPSLMFHGGYGYDPYYSPIATPVPNAVSGGGQLYSPQQFFSAPYYQQSVPPDMQYLSSPTPISQGDTIMPIDPTQGAFIADTLSPNSFLFGPRPEWFRSSEGTGSFPSPAASPQPSRGVPGSYDQNNFPMASRMVKLEQGMEMLKIFKNHDDDASILDDFEFYEEREKALQENKARLHQQHLPSSIVIEPKKPLTAPSDLVGHITKSFAEAVRLGEAKTVSHLTEKVSGGDPSIPVKHVEVKQSGLS

SEQ ID NO: 158871 - protein, 396 aa, Zea Mays
MLSIYQVKAKPKLAHLTWMGAIMVHTTFMLLRHNHSITKSSPHQKPFYGLRSTTDSYGRGFSHGGMFPQASNYGGSVTSFGLNGRSLISTEKGRRRGRGNALICSCNGPLDFLNEQSRGPRATKPKKQPEVDSKDEVPTTGVGRELYNKPDFVMEYTNARFFIIKSYSEDNVHKSVKYGVWASTTNGNKKLDSAYREAKEKGEHCPIFLLFSVNASAQFCGVAEMIGPVDFEKSVDYWQQDKWTGQFPVKWHIVKDVPNNLFRHIILENNDNKPVTNSRDTQEVKLEQGMEMLKIFKNHDDDASILDDFEFYEEREKALQENKARLHQQHLPSSIVIEPKKPLTAPSDLVGHITKSFAEAVRLGEAKTVSHLTEKVSGGDPSIPVKHVEVKQSGLS

SEQ ID NO: 158872 - protein, 335 aa, Zea Mays
MASTSLATLPSQLASPVRLRRRAALSSASRPHFLLHRATKGGSQCRLAVTCNAQAVAPTSFAQGTPVRPTSILVVGATGTLGRQVVRRALDEGYDVRCLVRPRPAPADFLRDWGATVVNADLSKPETIPATLVGIHAVIDCATGRPEEPIRTVDWEGKVALIQCAKAMGIQNGLDYIIIRLCGFMQGLIGQYAVPILEEKSVWGTDAPTRIAYMDTQDVARLTFIAMRNEKANKKLMTFAGPRAWTTQEVITLCERLAGQDANVTTVPVAVLRFTRQLTRCFQWTNDVADRLAFSEVLSSDTVFSAPMNETYQLLGVDGNDILSLEKKDFCDLGT

SEQ ID NO: 158873 - protein, 218 aa, Zea Mays
MGIQKYVFYSIHNCDKHPEVPLMEIKYCTEKFIQDSGLDYIIIRLCGFMQGLIGQYAVPILEEKSVWGTDAPTRIAYMDTQDVARLTFIAMRNEKANKKLMTFAGPRAWTTQEVITLCERLAGQDANVTTVPVAVLRFTRQLTRCFQWTNDVADRLAFSEVLSSDTVFSAPMNETYQLLGVDGNDILSLEKYLQDYFTNILKKLKDLKAQSKQTDIFF

SEQ ID NO: 158874 - protein, 371 aa, Zea Mays
MASTSLATLPSQLASPVRLRRRAALSSASRPHFLLHRATKGGSQCRLAVTCNAQAVAPTSFAQGTPVRPTSILVVGATGTLGRQVVRRALDEGYDVRCLVRPRPAPADFLRDWGATVVNADLSKPETIPATLVGIHAVIDCATGRPEEPIRTVDWEGKVALIQCAKAMGIQKYVFYSIHNCDKHPEVPLMEIKYCTEKFIQDSGLDYIIIRLCGFMQGLIGQYAVPILEEKSVWGTDAPTRIAYMDTQANKKLMTFAGPRAWTTQEVITLCERLAGQDANVTTVPVAVLRFTRQLTRCFQWTNDVADRLAFSEVLSSDTVFSAPMNETYQLLGVDGNDILSLEKYLQDYFTNILKKLKDLKAQSKQTDIFF

SEQ ID NO: 158875 - protein, 80 aa, Zea Mays
MKLQHAKVSLLTRVAWLRVGLENKLEAPEPARARSGSARSGSRASNEPSRAPSLSSFLQRAEPSRLVPAREPCKNDQFMK

SEQ ID NO: 158876 - protein, 522 aa, Zea Mays
MLDSNVDTSGSPCYPCLPEGATLFRRNPDEKIHDGLIGGISQHIWSITDEVEHTTSGLVQTLIAIDRHFDLIIKARIKHLDPLPPLVPNTDAEEEVLTTTSTRCSRMGLNRGAYFVPNLLVVCIMGAPKSNEYSTNRVLHRTRLQRRPLQHLTVDPVSAVHGGDDYELSHSESGSVLAIAAFPNSHEKIRCQLVNRTRLARDVRLILSLTSLNKVLSLHMSTHDFDCASVDRKSCLRAYTPTSMEDEVGHFSLDAKEYILDEHSKFLNGELMNQLLDPLPLDPYIEAALSPLMRAASASDRVSSLKNYHHTLGLCDHWAEKRFNGHKCVQFHAIEEASFVKEITTIVCRAGSGIGVANRSAWEGEGRGDSTFTVARLAGWGAKTFSDPLRALPRRGVLLLVISPTPPVNNTVFSPLSLDVALSLLAAGSGGATRDQLLAALGGSDGPDAADNLHALAEQVARVVMADGSEAGGPRIVFADAVFADASLKLKPAFEEVAVGKYRGPRSTPSTSRKRPQKLLLK

SEQ ID NO: 158877 - protein, 70 aa, Zea Mays
MCVVLLLICYTRILEYNRKLLTCTSWDAGMQNKSITTLSFWFSLPYISTGVIKGMEHMALLLTSFILCRK

SEQ ID NO: 158878 - protein, 67 aa, Zea Mays
MEVALPLLEQLLVEWLLAQPCYLLFLLSVLPIGGTGNHKSIFSMYMASKLVFDYYLSCNIRANNVYM

SEQ ID NO: 158879 - protein, 68 aa, Zea Mays
MKEVALPLLEQLLVEWLLAQPCYLLFLLSVLPIGGTGNHKSIFSMYMASKLVFDYYLSCNIRANNVYM

SEQ ID NO: 158880 - protein, 143 aa, Zea Mays
MGINPATHQPLANSKAAPSHSTGTDESAKSSDTREELSLKDDNHHREVPLSTDSSEQSSWPEPGSNVGDQDPELLVNWPSETDLSVDESWLGFMSNGNELGDVEGTSPWDGTTDWLLDYQDFGMCSSNLVDDSMFRASNGLNF

SEQ ID NO: 158881 - protein, 170 aa, Zea Mays
MGRQPCCDKEGVKRGPWTAEEDKKLISFILTHGRCCWRAVPKLAGLLRCGKSCRLRWTNYLRPDLKRGLLSTAEEQLVIDLHAKLGNRWSQIAAKLPGRTDNEIKNHWNTHIKKKLIKMGINPATHQPLANSKAAPSHSTGRFRCPPIHRSSPAGQSQAATSATKTLNCW

SEQ ID NO: 158882 - protein, 290 aa, Zea Mays
MPPGKKGPRVPRHHAEDTEPTPTDYEKQRAITIMKNNQMMQRLGIRQLQSMMASIPSGRMNDNAPQESGSLYDGDDIEDSEDEMESLVDKSVASHIPNNGAEISSKNTRASKRVVAPGVQEQPIRVTRRRSATINQESNQNIMAGILSDSCDATNQDCIQRISTVVQPSSPIETESEDPTGDQELVPRQRSMGRQLESLSRGLGIKIPIQIREGKRRPEAPIQAAKFASEGGIALRQHMPIFSHWKEYKKKENAGKIENYIGKIAGQFTMDADNTAVRAACIDMLKGGHR

SEQ ID NO: 158883 - protein, 242 aa, Zea Mays
MMLAYMDRATAAAEPEDAGREPATTAGGCAAAAATDFGGLASAMPAAVVRPASADDVASAIRAAALTPHLTVAARGNGHSVAGQAMAEGGLVLDMRSLAAPSRRAQMQLVVQCPDGGGGRRCFADVPGGALWEEVLHWAVDNHGLAPASWTDYLRLTVGGTLSNGGVSGQSFRYGPQVSNVAELEVVTGDGERRVCSPSSHPDLFFAVLGGLGQFGVITRARIPLHRAPQAVSARTSGRGES

SEQ ID NO: 158884 - protein, 428 aa, Zea Mays
MMLAYMDRATAAAEPEDAGREPATTAGGCAAAAATDFGGLASAMPAAVVRPASADDVASAIRAAALTPHLTVAARGNGHSVAGQAMAEGGLVLDMRSLAAPSRRAQMQLVVQCPDGGGGRRCFADVPGGALWEEVLHWAVDNHGLAPASWTDYLRLTVGGTLSNGGVSGQSFRYGPQVSNVAELEVVTGDGERRVCSPSSHPDLFFAVLGGLGQFGVITRARIPLHRAPQAVRWTRVVYASIADYTADAEWLVTRPPDAAFDYVEGFAFVNSDDPVNGWPSVPIPGGARFDPSLLPAGAGPVLYCLEVALYQYAHRPDDVDDDDEEDQAAVTVSRMMAPLKHVRGLEFAADVGYVDFLSRVNRVEEEARRNGSWDAPHPWLNLFVSARDIADFDRAVIKGMLADGIDGPMLVYPMLKSNVQLPFAARQ

SEQ ID NO: 158885 - protein, 644 aa, Zea Mays
MPRPRSRDKAASPPSPAGARQRTPAPSPSTSLHLGIGPASPDNDLGVGSLDLKQPAAAPPRHSLLLAGAALRLGLGPASPDDDRGARSPNLSPPAAAPPRRSLRLAGSRNTLSVSGRGEKGARRAHARVSASSLATTVSPRAGNSSSDDSGSGADTALASGERYGSAVPFTTRSRIVKRRAEASPQAGGEVGIGSAGRGQVPDEMLHRDVGTPSKRCRTVLVGGVETVYMSDTESDSDEDCMMLGPSGTELNPIAVDMTENGSLDDPANASDVESLQTHNLLGTTNVGVVEQSVYPSGSASSFEARISADMYVSSHYSSRKGSKVNGKLVLENNSSRADANVGSAVGTSPRKFNPYSKGKGKMVAEDTLSSLVSSEDEPDLDPVHSKETQVNPGSVSASMVSYRRQKAKERAIRLAPEFAFFKADKDEHSEDDDEELEPGPDSQDWPGSFVTAARMYEEREAKLRARELNSSKLNKSANRVIVWSPSKDEKNPARAQAAPSLTSLCLNTLAKHSECIGTLEGIPEELKNRLFKILCHSRKMNTYLLNELLCDSPTELHLSECSWLSEDDFEKTFGKCSIESLQDLQLDISGRCMPDYILPTTLAKVPNCMPLLRKISLKGNYRLSDNGLVTIISAAPSLCSINL

SEQ ID NO: 158886 - protein, 749 aa, Zea Mays
MPRPRSRDKAASPPSPAGARQRTPAPSPSTSLHLGIGPASPDNDLGVGSLDLKQPAAAPPRHSLLLAGAALRLGLGPASPDDDRGARSPNLSPPAAAPPRRSLRLAGSRNTLSVSGRGEKGARRAHARVSASSLATTVSPRAGNSSSDDSGSGADTALASGERYGSAVPFTTRSRIVKRRAEASPQAGGEVGIGSAGRGQVPDEMLHRDVGTPSKRCRTVLVGGVETVYMSDTESDSDEDCMMLGPSGTELNPIAVDMTENGSLDDPANASDVESLQTHNLLGTTNVGVVEQSVYPSGSASSFEARISADMYVSSHYSSRKGSKVNGKLVLENNSSRADANVGSAVGTSPRKFNPYSKGKGKMVAEDTLSSLVSSEDEPDLDPVHSKETQVNPGSVSASMVSYRRQKAKERAIRLAPEFAFFKADKDEHSEDDDEELEPGPDSQDWPGSFVTAARMYEEREAKLRARELNSSKLNKSANRVIVWSPSKDEKNPARAQAAPSLTSLCLNTLAKHSECIGTLEGIPEELKNRLFKILCHSRKMNTYLLNELLCDSPTELHLSECSWLSEDDFEKTFGKCSIESLQDLQLDISGRCMPDYILPTTLAKVPNCMPLLRKISLKGNYRLSDNGLVTIISAAPSLCSINLCECSLLTSSGINILANKLHSVLRELYIDDCTNVDAMAILPALQKINHLEVLSMSGIQSVCDKFVKGLIPVHGSNLKELAFAGCFFHQDCWGILSRINFIGSPQLE

SEQ ID NO: 158887 - protein, 759 aa, Zea Mays
MPRPRSRDKAASPPSPAGARQRTPAPSPSTSLHLGIGPASPDNDLGVGSLDLKQPAAAPPRHSLLLAGAALRLGLGPASPDDDRGARSPNLSPPAAAPPRRSLRLAGSRNTLSVSGRGEKGARRAHARVSASSLATTVSPRAGNSSSDDSGSGADTALASGERYGSAVPFTTRSRIVKRRAEASPQAGGEVGIGSAGRGQVPDEMLHRDVGTPSKRCRTVLVGGVETVYMSDTESDSDEDCMMLGPSGTELNPIAVDMTENGSLDDPANASDVESLQTHNLLGTTNVGVVEQSVYPSGSASSFEARISADMYVSSHYSSRKGSKVNGKLVLENNSSRADANVGSAVGTSPRKFNPYSKGKGKMVAEDTLSSLVSSEDEPDLDPVHSKETQVNPGSVSASMVSYRRQKAKERAIRLAPEFAFFKADKDEHSEDDDEELEPGPDSQDWPGSFVTAARMYEEREAKLRARELNSSKLNKSANRVIVWSPSKDEKNPARAQAAPSLTSLCLNTLAKHSECIGTLEGIPEELKNRLFKILCHSRKMNTYLLNELLCDSPTELHLSECSWLSEDDFEKTFGKCSIESLQDLQLDISGRCMPDYILPTTLAKVPNCMPLLRKISLKGNYRLSDNGLVTIISAAPSLCSINLYDCTNVDAMAILPALQKINHLEVLSMSGIQSVCDKFVKGLIPVHGSNLKELAFAGCLLRDSALWHLRGCRLLRKLRLQRNAFSDEAVSQYLEESGGGLTELMLNNVKKLPIIEDS

SEQ ID NO: 158888 - protein, 533 aa, Zea Mays
MPRPRSRDKAASPPSPAGARQRTPAPSPSTSLHLGIGPASPDNDLGVGSLDLKQPAAAPPRHSLLLAGAALRLGLGPASPDDDRGARSPNLSPPAAAPPRRSLRLAGSRNTLSVSGRGEKGARRAHARVSASSLATTVSPRAGNSSSDDSGSGADTALASGERYGSAVPFTTRSRIVKRRAEASPQAGGEVGIGSAGRGQVPDEMLHRDVGTPSKRCRTVLVGGVETVYMSDTESDSDEDCMMLGPSGTELNPIAVDMTENGSLDDPANASDVESLQTHNLLGTTNVGVVEQSVYPSGSASSFEARISADMYVSSHYSSRKGSKVNGKLVLENNSSRADANVGSAVGTSPRKFNPYSKGKGKMVAEDTLSSLVSSEDEPDLDPVHSKETQVNPGSVSASMVSYRRQKAKERAIRLAPEFAFFKADKDEHSEDDDEELEPGPDSQDWPGSFVTAARMYEEREAKLRARELNSSKLNKSANRVIVWSPSKDEKNPARAQAAPSLTSLCLNTLAKHSECIGTLEVLQNCISVSVHG

SEQ ID NO: 158889 - protein, 727 aa, Zea Mays
MLNDSRVVFPDGIGALIVESDERFLRSAALMLSLLNYRVATCERPTSVVKLITGRLKDADVVFIDALRAATCGFDFRRIVESHLCIPVVYFLSRDYGVTGDVSEALQRTVWAATYVVRKPLDAGELSRLWKVIKWSKFLLRRAWPEWPRGSRVRPAVVGALLPGSSTVDGRWEDDDDDGREHFRAVRAGRGRRRKLGDRQYHGGRSSGRGGGGGVAVGIGIGRRQPTERLEQMNLTGWQQENDDDDGVFPIHQQPAQQNRPGVQTMDDVQNQQHGRSLFMQPGPQTLNVPHNNPMISPDAGWPSSSNVAAFAGASNTTGPTLLQGVYQAPAARGARAASPAPHAVYAPPAPGLRPPVYQQQQQPMAPLYDFGDMVAPPAAVPLPIPTMAATSGHQPQFTLNHHHQQQQEEEMFAPRRQGGWMGSRRRRETGPIMLSFQQPQAADPFTPMAGSGPFTPMAAGQAGSGTAFGASSPTGATDAGAYGAAAVAQAQLQSPNAGAQPADSSFDDVLRAMMEMDYYANNCSAEALMAPATDELAGMQAAAALGSSGNYNAGPFMVTDANGGNGTPFMALALAPQDPAAPTGNQNQVQVELGAPDIYGGSLLVGSHQGGGTSAMFNGDGDMAPMFPSNEYGATANAMFSLDALLDFDDGVPTYPEGHQVAAADSTTASNATGIMSNGGESGGSGPSWNMGAAAADEGLDMLEEFLMEDNESGFLLPQDMNNGLQ

SEQ ID NO: 158890 - protein, 731 aa, Zea Mays
MLNDSRVVFPDGIGALIVESDERFLRSAALMLSLLNYRVATCERPTSVVKLITGRLKDADVVFIDALRAATCGFDFRRIVESHLCIPVVYFLSRDYGVTGDVSEALQRTVWAATYVVRKPLDAGELSRLWKVIKWSKFLLRRAWPEWPRGSRVRPAVVGALLPGSSTVDGRWEDDDDDGREHFRAVRAGRGRRRKLGDRQYHGGRSSGRGGGGGVAGPFGIGIGIGRRQPTERLEQMNLTGWQQENDDDDGVFPIHQQPAQQNRPGVQTMDDVQNQQHGRSLFMQPGPQTLNVPHNNPMISPDAGWPSSSNVAAFAGASNTTGPTLLQGVYQAPAARGARAASPAPHAVYAPPAPGLRPPVYQQQQQPMAPLYDFGDMVAPPAAVPLPIPTMAATSGHQPQFTLNHHHQQQQEEEMFAPRRQGGWMGSRRRRETGPIMLSFQQPQAADPFTPMAGSGPFTPMAAGQAGSGTAFGASSPTGATDAGAYGAAAVAQAQLQSPNAGAQPADSSFDDVLRAMMEMDYYANNCSAEALMAPATDELAGMQAAAALGSSGNYNAGPFMVTDANGGNGTPFMALALAPQDPAAPTGNQNQVQVELGAPDIYGGSLLVGSHQGGGTSAMFNGDGDMAPMFPSNEYGATANAMFSLDALLDFDDGVPTYPEGHQVAAADSTTASNATGIMSNGGESGGSGPSWNMGAAAADEGLDMLEEFLMEDNESGFLLPQDMNNGLQ

SEQ ID NO: 158891 - protein, 693 aa, Zea Mays
MEKLGRPTSVVKLITGRLKDADVVFIDALRAATCGFDFRRIVESHLCIPVVYFLSRDYGVTGDVSEALQRTVWAATYVVRKPLDAGELSRLWKVIKWSKFLLRRAWPEWPRGSRVRPAVVGALLPGSSTVDGRWEDDDDDGREHFRAVRAGRGRRRKLGDRQYHGGRSSGRGGGGGVAGPFGIGIGIGRRQPTERLEQMNLTGWQQENDDDDGVFPIHQQPAQQNRPGVQTMDDVQNQQHGRSLFMQPGPQTLNVPHNNPMISPDAGWPSSSNVAAFAGASNTTGPTLLQGVYQAPAARGARAASPAPHAVYAPPAPGLRPPVYQQQQQPMAPLYDFGDMVAPPAAVPLPIPTMAATSGHQPQFTLNHHHQQQQEEEMFAPRRQGGWMGSRRRRETGPIMLSFQQPQAADPFTPMAGSGPFTPMAAGQAGSGTAFGASSPTGATDAGAYGAAAVAQAQLQSPNAGAQPADSSFDDVLRAMMEMDYYANNCSAEALMAPATDELAGMQAAAALGSSGNYNAGPFMVTDANGGNGTPFMALALAPQDPAAPTGNQNQVQVELGAPDIYGGSLLVGSHQGGGTSAMFNGDGDMAPMFPSNEYGATANAMFSLDALLDFDDGVPTYPEGHQVAAADSTTASNATGIMSNGGESGGSGPSWNMGAAAADEGLDMLEEFLMEDNESGFLLPQDMNNGLQ

SEQ ID NO: 158892 - protein, 92 aa, Zea Mays
MLHQVALFCMCMGGIMYFLEYEPDTMAPFLRGLIRRFLASKISNPSPLPPNRNASYSYLQTLNALEQSRTQPGVDNGLTTSEKYNLESIPRL

SEQ ID NO: 158893 - protein, 345 aa, Zea Mays
MSATQPWRSLFCCAAAGYDDADEPPPSSRGQRKGRSRRDRDRERLQLLLLPSSSSAASRVSLSSLGGSSGTLTPEDLSLTLSGSSLHAFTCAELRAATAGFSRANYLGSGGFGPVYRGRVAAGLRPGLDAQPVAVKYLDLDCGTQGHREWLAEVFFLAQLRHDNLVTLIGYCYEDDHRMLVYEYMSNQSLEKHLFRSLDGPMPWMTRMKIAVGAAKGLAFLHGADTPVIYRDFKASNILLDQVKTTLCLFFSLLSSASFDGSYCVAVEKDTDDIHLPCVCVCLNKIQKIPSLRTEFIKKSSVQNKLSKRFDPESSIGVGCQSRLPRVPKLLAGFDRRPALPRRPA

SEQ ID NO: 158894 - protein, 475 aa, Zea Mays
MSATQPWRSLFCCAAAGYDDADEPPPSSRGQRKGRSRRDRDRERLQLLLLPSSSSAASRVSLSSLGGSSGTLTPEDLSLTLSGSSLHAFTCAELRAATAGFSRANYLGSGGFGPVYRGRVAAGLRPGLDAQPVAVKYLDLDCGTQGHREWLAEVFFLAQLRHDNLVTLIGYCYEDDHRMLVYEYMSNQSLEKHLFRSLDGPMPWMTRMKIAVGAAKGLAFLHGADTPVIYRDFKASNILLDQHQAVGLWARQGRASGRRDPRHNARHGDQRVRGARVHHDGAPHRQERRLQLRGSAAGAPDGPSVRRSVSAAQGTEPGGLGQTLPQEARQALPGHGSGHGVPVLVPRGRTRRYGGVQVPEPEPQVQAHHEGGGPGPGARPGHERLPSDRLVCVHRRGGRQQRRRQPRQDGRRDNRDDGGGEAPEPPGPAPAEVPQLGCQCRRGAAPGRRPREAHCRAAAAPEDVQLRQGERDVEA

SEQ ID NO: 158895 - protein, 58 aa, Zea Mays
MLLYSKVMLFYMLEQERSIKLLDPLLYWFAVLLQLTDCLLVLSDSSYLHQIIVVSHPV

SEQ ID NO: 158896 - protein, 314 aa, Zea Mays
MDGEEAPLGALNLAEYAPAGARTVDCYRRIRKIGEGTYGEVFEAVDIITGERAALKKIKLDDGKEGFPRQILREIKLLKKLDHENIIRLKEIVVSPGSAHGTGGSDDHIYRGDIYMVFEYMDHDLKKVLHHSAPSQVKVYMGQLLKGLQYCHANNVLHRDIKGANLLITGGKLLKLADFGLARLFTRDGTLTNHVITLWYRPPELLLGATSYAEPVDIWSVGCIFAEFLLKKPLFPGRTEQEQLSKIFELCGSPNEESWPGVSKLPLYKTMTIRPATPTKRSLRDILQNFDCPAVELIERMLILNPSQCLSSFA

SEQ ID NO: 158897 - protein, 290 aa, Zea Mays
MDARFMAYLEPIVGGDFVEVFEAVDIITGERAALKKIKLDDGKEGFPRQILREIKLLKKLDHENIIRLKEIVVSPGSAHGTGGSDDHIYRGDIYMVFEYMDHDLKKVLHHSAPSQVKVYMGQLLKGLQYCHANNVLHRDIKGANLLITGGKLLKLADFGLARLFTRDGTLTNHVITLWYRPPELLLGATSYAEPVDIWSVGCIFAEFLLKKPLFPGRTELSKIFELCGSPNEESWPGVSKLPLYKTMTIRPATPTKRSLRDILQNFDCPAVELIERMLILNPSQCLSSFA

SEQ ID NO: 158898 - protein, 205 aa, Zea Mays
MVFEYMDHDLKKVLHHSAPSQVKVYMGQLLKGLQYCHANNVLHRDIKGANLLITGGKLLKLADFGLARLFTRDGTLTNHVITLWYRPPELLLGATSYAEPVDIWSVGCIFAEFLLKKPLFPGRTELSKIFELCGSPNEESWPGVSKLPLYKTMTIRPATPTKRSLRDILQNFDCPAVELIERMLILNPSQRISAQDALGAAYFIN

SEQ ID NO: 158899 - protein, 269 aa, Zea Mays
MDGEEAPLGALNLAEYAPAGARTVDCYRRIRKIGEGTYGEVFEAVDIITGERAALKKIKLDDGKEGFPRQILREIKLLKKLDHENIIRLKEIVVSPGSAHGTGGSDDHIYRGDIYMVFEYMDHDLKKVLHHSAPSQVKVYMGQLLKGLQYCHANNVLHRDIKGANLLITGGKLLKLADFGLARLFTRDGTLTNHVITLWYRPPELLLGATSYAEPVDIWSVGCIFAEFLLKKPLFPGRTESSYQKYLNCVDLQTRKAGQVFPSYHCIRQ

SEQ ID NO: 158900 - protein, 268 aa, Zea Mays
MDARFMAYLEPIVGGDFVEVFEAVDIITGERAALKKIKLDDGKEGFPRQILREIKLLKKLDHENIIRLKEIVVSPGSAHGTGGSDDHIYRGDIYMVFEYMDHDLKKVLHHSAPSQVKVYMGQLLKGLQYCHANNVLHRDIKGANLLITGGKLLKLADFGLARLFTRDGTLTNHVITLWYRPPELLLGATSYAEPVDIWSVGCIFAEFLLKKPLFPGRTEQEQLSKIFELCGSPNEESWPGVSKLPLYKTMTIRPATPTKRSLRDILQK

SEQ ID NO: 158901 - protein, 338 aa, Zea Mays
MDGEEAPLGALNLAEYAPAGARTVDCYRRIRKIGEGTYGEVFEAVDIITGERAALKKIKLDDGKEGFPRQILREIKLLKKLDHENIIRLKEIVVSPGSAHGTGGSDDHIYRGDIYMVFEYMDHDLKKVLHHSAPSQVKVYMGQLLKGLQYCHANNVLHRDIKGANLLITGGKLLKLADFGLARLFTRDGTLTNHVITLWYRPPELLLGATSYAEPVDIWSVGCIFAEFLLKKPLFPGRTELSKIFELCGSPNEESWPGVSKLPLYKTMTIRPATPTKRSLRDILQNFDCPAVELIERMLILNPSQDFCTRCSWCGILHQLNSYGGVGCVCVLGGGGGV

SEQ ID NO: 158902 - protein, 302 aa, Zea Mays
MDARFMAYLEPIVGGDFVEVFEAVDIITGERAALKKIKLDDGKEGFPRQILREIKLLKKLDHENIIRLKEIVVSPGSAHGTGGSDDHIYRGDIYMVFEYMDHDLKKVLHHSAPSQVKVYMGQLLKGLQYCHANNVLHRDIKGANLLITGGKLLKLADFGLARLFTRDGTLTNHVITLWYRPPELLLGATSYAEPVDIWSVGCIFAEFLLKKPLFPGRTEQEQLSKIFELCGSPNEESWPGVSKLPLYKTMTIRPATPTKRSLRDILQNFDCPAVELIERMLILNPSQRISAQDALGAAYFIN

SEQ ID NO: 158903 - protein, 341 aa, Zea Mays
MDGEEAPLGALNLAEYAPAGARTVDCYRRIRKIGEGTYGEVFEAVDIITGERAALKKIKLDDGKEGFPRQILREIKLLKKLDHENIIRLKEIVVSPGSAHGTGGSDDHIYRGDIYMVFEYMDHDLKKVLHHSAPSQVKVYMGQLLKGLQYCHANNVLHRDIKGANLLITGGKLLKLADFGLARLFTRDGTLTNHVITLWYRPPELLLGATSYAEPVDIWSVGCIFAEFLLKKPLFPGRTEQEQLSKIFELCGSPNEESWPGVSKLPLYKTMTIRPATPTKRSLRDILQNFDCPAVELIERMLILNPSQDFCTRCSWCGILHQLNSYGGVGCVCVLGGGGGV

SEQ ID NO: 158904 - protein, 316 aa, Zea Mays
MDGEEAPLGALNLAEYAPAGARTVDCYRRIRKIGEGTYGEVFEAVDIITGERAALKKIKLDDGKEGFPRQILREIKLLKKLDHENIIRLKEIVVSPGSAHGTGGSDDHIYRGDIYMVFEYMDHDLKKVLHHSAPSQVKVYMGQLLKGLQYCHANNVLHRDIKGANLLITGGKLLKLADFGLARLFTRDGTLTNHVITLWYRPPELLLGATSYAEPVDIWSVGCIFAEFLLKKPLFPGRTELSKIFELCGSPNEESWPGVSKLPLYKTMTIRPATPTKRSLRDILQNFDCPAVELIERMLILNPSQRISAQDALGWV

SEQ ID NO: 158905 - protein, 319 aa, Zea Mays
MDGEEAPLGALNLAEYAPAGARTVDCYRRIRKIGEGTYGEVFEAVDIITGERAALKKIKLDDGKEGFPRQILREIKLLKKLDHENIIRLKEIVVSPGSAHGTGGSDDHIYRGDIYMVFEYMDHDLKKVLHHSAPSQVKVYMGQLLKGLQYCHANNVLHRDIKGANLLITGGKLLKLADFGLARLFTRDGTLTNHVITLWYRPPELLLGATSYAEPVDIWSVGCIFAEFLLKKPLFPGRTEQEQLSKIFELCGSPNEESWPGVSKLPLYKTMTIRPATPTKRSLRDILQNFDCPAVELIERMLILNPSQRISAQDALGWV

SEQ ID NO: 158906 - protein, 226 aa, Zea Mays
MVFEYMDHDLKKVLHHSAPSQVKVYMGQLLKGLQYCHANNVLHRDIKGANLLITGGKLLKLADFGLARLFTRDGTLTNHVITLWYRPPELLLGATSYAEPVDIWSVGCIFAEFLLKKPLFPGRTEQEQLSKIFELCGSPNEESWPGVSKLPLYKTMTIRPATPTKRSLRDILQNFDCPAVELIERMLILNPSQDFCTRCSWCGILHQLNSYGGVGCVCVLGGGGGV

SEQ ID NO: 158907 - protein, 101 aa, Zea Mays
MGMNKRKKNNFPQLGPPSSSLGPLFSNTRSTQPGIRSAASTIPFSAHLYPGQLVRTFFSPCGLRNNPDRAPRATTNHRHTSWGSHSWIANSGFPTDSMLGI

SEQ ID NO: 158908 - protein, 506 aa, Zea Mays
MPQIQNTMRQNCTLLAVLCGEFAEKRQTPASLAPDTKRLRLSYPFPELASSGRLEVHTLINPTLEQFREAQQAVHPVFLYLQGQQQENEEEIGTLVWGDTDLSDPQMFVSLITPPFPTMVYLEVPTGEKLAQSLHSKGIPYVVYWRNLFSSYTASHFRHALMSVIQSSCSHTWDAFQLAHASFRLYCVRNNHVQSVKLGPCLLGDAPKTNVIPAGDEVNEEQGCSEGFPDIRIYDEDVSMKFLLCGVPCTLDACLLGALEDGLNALLNIEIRASKLQNRASAHPPLQAEDLPHGVVTMRCDITTCSSAHVSFLVSCSAQTCFDDQLLGSRIKNEIIEKRQLVRALLNNEDNKPSSYEPLPSMCVACGASTFEVWITMPKWAAQEDFLKDVMQFLLQRGHIRLVPQGGLAEFPDAVLNSKRLDLYNLYKEVVYRGGFYVGNGINWKGQIFSKMHNHTVTNKMTVCLFLFHLLAITLEKWEGFKLSVFMLLYIFIILILTYIDLPCYL

SEQ ID NO: 158909 - protein, 702 aa, Zea Mays
MPQIQNTMRQNCTLLAVLCGEFAEKRQTPASLAPDTKRLRLSYPFPELASSGRLEVHTLINPTLEQFREAQQAVHPVFLYLQGQQQENEEEIGTLVWGDTDLSDPQMFVSLITPPFPTMVYLEVPTGEKLAQSLHSKGIPYVVYWRNLFSSYTASHFRHALMSVIQSSCSHTWDAFQLAHASFRLYCVRNNHVQSVKLGPCLLGDAPKTNVIPAGDEVNEEQGCSEGFPDIRIYDEDVSMKFLLCGVPCTLDACLLGALEDGLNALLNIEIRASKLQNRASAHPPLQAEDLPHGVVTMRCDITTCSSAHVSFLVSCSAQTCFDDQLLGSRIKNEIIEKRQLVRALLNNEDNKPSSYEPLPSMCVACGASTFEVWITMPKWAAQVLKHLAPEISYRSLVALGIAWVNGTPVSSFDRQDADRLLFFCSNQCGDQAIQNGSYAHVSSWSAPLTKDRTTGSLESKQMSFGAKGVVGDNTISLSSLKPRLKPATMRPLPHSRKQQMHPFMGFPQSIIHDASQVKPSLPAPPVKHNAVPVTAVTPRKSSSGSPSSWSRVQLPIPLNPLPIKKHECNRLPIHSCSEEDFLKDVMQFLLQRGHIRLVPQGGLAEFPDAVLNSKRLDLYNLYKEVVYRGGFYVGNGINWKGQIFSKMHNHTVTNKMTVCLFLFHLLAITLEKWEGFKLSVFMLLYIFIILILTYIDLPCYL

SEQ ID NO: 158910 - protein, 662 aa, Zea Mays
MPQIQNTMRQNCTLLAVLCGEFAEKRQTPASLAPDTKRLRLSYPFPELASSGRLEVHTLINPTLEQFREAQQAVHPVFLYLQGQQQENEEEIGTLVWGDTDLSDPQMFVSLITPPFPTMVYLEVPTGEKLAQSLHSKGIPYVVYWRNLFSSYTASHFRHALMSVIQSSCSHTWDAFQLAHASFRLYCVRNNHVQSVKLGPCLLGDAPKTNVIPAGDEVNEEQGCSEGFPDIRIYDEDVSMKFLLCGVPCTLDACLLGALEDGLNALLNIEIRASKLQNRASAHPPLQAEDLPHGVVTMRCDITTCSSAHVSFLVSCSAQTCFDDQLLGSRIKNEIIEKRQLVRALLNNEDNKPSSYEPLPSMCVACGASTFEVWITMPKWAAQVLKHLAPEISYRSLVALGIAWVNGTPVSSFDRQDADRLLFFCSNQCGDQAIQNGSYAHVSSWSAPLTKDRTTGSLESKQMSFGAKGVVGDNTISLSSLKPRLKPATMRPLPHSRKQQMHPFMGFPQSIIHDASQVKPSLPAPPVKHNAVPVTAVTPRKSSSGSPSSWSRVQLPIPLNPLPIKKHECNRLPIHSCSEEDFLKDVMQFLLQRGHIRLVPQGGLAEFPDAVLNSKRLDLYNLYKEVVYRGGFYVGNGINWKGQIFSKMHNHTVTNKMTWCSG

SEQ ID NO: 158911 - protein, 263 aa, Zea Mays
MPQIQNTMRQNCTLLAVLCGEFAEKRQTPASLAPDTKRLRLSYPFPELASSGRLEVHTLINPTLEQFREAQQAVHPVFLYLQGQQQENEEEIGTLVWGDTDLSDPQMFVSLITPPFPTMVYLEVPTGEKLAQSLHSKFSVPGYSSCSHTWDAFQLAHASFRLYCVRNNHVQSVKLGPCLLGDAPKTNVIPAGDEVNEEQGCSEGFPDIRIYDEDVSMKFLLCGVPCTLDACLLGALEDGLNALLNIEIRASKLQNRARPIFGI

SEQ ID NO: 158912 - protein, 461 aa, Zea Mays
MPERTMDTHAEGAAGWDTGHHTIHISRDSRNHVATLPQQQAMMVLMSSIPVLRPRMRFQNTPSKQAVSIGRSAWKIHRARKSQSGVGSWPRAAASAAAMPQIQNTMRQNCTLLAVLCGEFAEKRQTPASLAPDTKRLRLSYPFPELASSGRLEVHTLINPTLEQFREAQQAVHPVFLYLQGQQQENEEEIGTLVWGDTDLSDPQMFVSLITPPFPTMVYLEVPTGEKLAQSLHSKGIPYVVYWRNLFSSYTASHFRHALMSVIQSSCSHTWDAFQLAHASFRLYCVRNNHVQSVKLGPCLLGDAPKTNVIPAGDEVNEEQGCSEGFPDIRIYDEDVSMKFLLCGVPCTLDACLLGALEDGLNALLNIEIRASKLQNRASAHPPLQAEDLPHGVVTMRCDITTCSSAHVSFLVSCSAQTCFDDQLLGSRIKNEIIEKRQLVRALLNNEDNKPSSYEPLPSMF

SEQ ID NO: 158913 - protein, 731 aa, Zea Mays
MPQIQNTMRQNCTLLAVLCGEFAEKRQTPASLAPDTKRLRLSYPFPELASSGRLEVHTLINPTLEQFREAQQAVHPVFLYLQGQQQENEEEIGTLVWGDTDLSDPQMFVSLITPPFPTMVYLEVPTGEKLAQSLHSKGIPYVVYWRNLFSSYTASHFRHALMSVIQSSCSHTWDAFQLAHASFRLYCVRNNHVQSVKLGPCLLGDAPKTNVIPAGDEVNEEQGCSEGFPDIRIYDEDVSMKFLLCGVPCTLDACLLGALEDGLNALLNIEIRASKLQNRASAHPPLQAEDLPHGVVTMRCDITTCSSAHVSFLVSCSAQTCFDDQLLGSRIKNEIIEKRQLVRALLNNEDNKPSSYEPLPSMCVACGASTFEVWITMPKWAAQVLKHLAPEISYRSLVALGIAWVNGTPVSSFDRQDADRLLFFCSNQCGDQAIQNGSYAHVSSWSAPLTKDRTTGSLESKQMSFGAKGVVGDNTISLSSLKPRLKPATMRPLPHSRKQQMHPFMGFPQSIIHDASQVKPSLPAPPVKHNAVPVTAVTPRKSSSGSPSSWSRVQLPIPLNPLPIKKHECNRLPIHSCSEVHFGTILLFPSVLKHLPSKYPLILCYLLQEDFLKDVMQFLLQRGHIRLVPQGGLAEFPDAVLNSKRLDLYNLYKEVVYRGGFYVGNGINWKGQIFSKMHNHTVTNKMTVCLFLFHLLAITLEKWEGFKLSVFMLLYIFIILILTYIDLPCYL

SEQ ID NO: 158914 - protein, 726 aa, Zea Mays
MPQIQNTMRQNCTLLAVLCGEFAEKRQTPASLAPDTKRLRLSYPFPELASSGRLEVHTLINPTLEQFREAQQAVHPVFLYLQGQQQENEEEIGTLVWGDTDLSDPQMFVSLITPPFPTMVYLEVPTGEKLAQSLHSKFSVPGYSSCSHTWDAFQLAHASFRLYCVRNNHVQSVKLGPCLLGDAPKTNVIPAGDEVNEEQGCSEGFPDIRIYDEDVSMKFLLCGVPCTLDACLLGALEDGLNALLNIEIRASKLQNRASAHPPLQAEDLPHGVVTMRCDITTCSSAHVSFLVSCSAQTCFDDQLLGSRIKNEIIEKRQLVRALLNNEDNKPSSYEPLPSMCVACGASTFEVWITMPKWAAQVLKHLAPEISYRSLVALGIAWVNGTPVSSFDRQDADRLLFFCSNQCGDQAIQNGSYAHVSSWSAPLTKDRTTGSLESKQMSFGAKGVVGDNTISLSSLKPRLKPATMRPLPHSRKQQMHPFMGFPQSIIHDASQVKPSLPAPPVKHNAVPVTAVTPRKSSSGSPSSWSRVQLPIPLNPLPIKKHECNRLPIHSCSEEDFLKDVMQFLLQRGHIRLVPQGGLAEFPDAVLNSKRLDLYNLYKEVVYRGGFYVGNGINWKGQIFSKMHNHTVTNKMTGVGNTLKRHYETYLLEYELAHDDIDGECCLICHSGALGDWVNCGLCGEWAHLGCDRRKGLSTFKDYSKADGMEYICPQCSLAKYKPPLPAP

SEQ ID NO: 158915 - protein, 192 aa, Zea Mays
MCVACGASTFEVWITMPKWAAQEDFLKDVMQFLLQRGHIRLVPQGGLAEFPDAVLNSKRLDLYNLYKEVVYRGGFYVGNGINWKGQIFSKMHNHTVTNKMTGVGNTLKRHYETYLLEYELAHDDIDGECCLICHSGALGDWVNCGLCGEWAHLGCDRRKGLSTFKDYSKADGMEYICPQCSLAKYKPPLPAP

SEQ ID NO: 158916 - protein, 51 aa, Zea Mays
MKIFTVKNGPKKTSALTFELHLFSSIAFHFQHLHLRLLGQQQLHNQLEFRH

SEQ ID NO: 158917 - protein, 734 aa, Zea Mays
MIISDLLDLKITCLPENKETSPSSITKEQSSSVDTLNLSAANLDSFFIERKEEMTSASLPQTHFLEQENKRTDSKSHESRLEVHAAPKSLISSQRTNQIEATPAFASWDADFQSASSENAAKNSKQPDLFKSTSVAESFSFPASEIAIKPVVSTESKTNTRSAILEHHSEVLASASSTLFGDDLSDQKVVHHIFESSNAPGFTESSLPMDFAKSDQLHGRDDDGFNDDEAFDEWQEFTTSGNQGSLSNAEHIEEPLKRDLSENDVIDPLRVGSKESPNNVIEKSSNEWQGFASVSGQGRDFVTSVERSTSDHRLNLVGPVGDEETMSSISHQHSSEINPVDVWHVGNVKAQNTAEMVKEKNDSFDDWQDSTTTGQVQDTSLNQTGDMMEVSKASHKETDMDSWFIGHSREPANTGTMNANNMLDDWQGFTGSDQAQQNSSSTGAEMISVPFEQHGGTVSAPSWANGSSNDAAKTSSTSIESDPFDVWQNFTKSGHLQENMSSLGREPSSLSPEPAKGNDSLDLWITSNFKESKSNDVGRTNASSDGWQDFASFDQAQRITKVHVEGHVVKDPSGAETLDLWASSHVNEKNLEQISEHNDLFDDWQDFQNSNPQQTTLQVSSDASLFDITLASRPDAFGEQEIGSVLQVASSENSKDKKEGSNESKAFPSDDHLKSTSGMQQMGDVDSLSSLWPANKPEPANTNVEQLLAQMHDLSFMLKDELSVPDKPIDHSKP

SEQ ID NO: 158918 - protein, 139 aa, Zea Mays
MVDDSDDLQFRSALRSFKRRVAYANANFDHMVGWRTSSIRRQHELPKHRLLVRDEKYPHIVYVEKEVTDNNETKAHADHYDPEEEMIRGLTQVPWERVDVSFQKSTQRLVAHNTIQVKSYWLNSDGADVINHMMDNFIV

SEQ ID NO: 158919 - protein, 165 aa, Zea Mays
MGERLANEVLSVVEQRRGVKKISFVAHSLGGLVARYAIGRLYEPNSRRKSSGGESRDDVVHLNGHIAGLEPMNFITFASPHLGSSGNKQLPFLCGLPFLERRASEAAHLIVGRTGKHLFLTDNDDGRRPLLLRMVDDSDDLQFRSALRSFKRRVAYANANFDRIL

SEQ ID NO: 158920 - protein, 149 aa, Zea Mays
MLMLILTVSFNSFILVCVLIINAELHFLPLTCFQLTKQTDMVGWRTSSIRRQHELPKHRLLVRDEKYPHIVYVEKEVTDNNETKAHADHYDPEEEMIRGLTQVPWERVDVSFQKSTQRLVAHNTIQVKSYWLNSDGADVINHMMDNFIV

SEQ ID NO: 158921 - protein, 603 aa, Zea Mays
MAATASNPFPFPSRRSPEDSLFYAVYPILLPSHLPAPALHASLQSLHLSLLSHLAPFLSSHLFHRDPFTLTLPADPAAPCALCASPPVPHLHGALRFGDSLPDEWIAVSLLFALTRAFPDIAARAWDSDGEFLLIEAAFALPRWLDPESAPNRVFIFRGELHILPPSLFPETPSLEAALAAIYDDSIDTRAADAIQAAIQRRIAGLPEKAAENLHTARVIVPAPVAKVLKEEPCLIARAIEGFYDRDIDTMKHAARMEKFLKGPGGEGIEIVRTTVRMTRAMYAQLVQQNFQAPRGYPMPRREEGPEKWMEAELGMKIACGFEMMYQERKRQGEEGKCSTWDVYRKSLEATGCLDGLYPGSIEYKRVIEDAMQYYKSSNLYSRTREILSEPVRRIDEILSMLYSTDEFKGTDLPPSDNDSWLYGGDDELNAELCERQKELEEHEAAKKQRSQKQSVPSSSKSQTDKFKLGEITESMQEFIRKMSSFEGAEIPADRRDTESVDLDVNQFFKAIKSVLGGGSQEQADSDDGFDRKSSLSDMDFDDSDEDDDFAEELGDKDADDSFMESYSDALNKELSSTTLEKSFAHAPRPETNNEMMQLLVQR

SEQ ID NO: 158922 - protein, 80 aa, Zea Mays
MEGLWLTSLAAHRSATDRTLRTSSISTVPKTSSMRAGSQTASILSVPSSTDDTQPTMSALSGNKGSTAVLLVNSSSSTTP

SEQ ID NO: 158923 - protein, 120 aa, Zea Mays
MNVDWDGYTIGYYGRIFEARNKTKGGSFEGGDKDFFKFKVGSGQVIPAFEEAISGMAPGGVRRIIVPPDLGYPDNDYNKLGPKPTTFSGQRALDFVLRNQGLIDKTLLFDIELLKIIPNQ

SEQ ID NO: 158924 - protein, 74 aa, Zea Mays
MRLVGSFKARRGRFISKQEATMESGFPLYLMESGFGASLFSCDFGIPAPFPFMEGMRCCWSAHWNGTDIDRTFR

SEQ ID NO: 158925 - protein, 817 aa, Zea Mays
MHCRPCPSQLSLVFLLLLSLAPIISALPFPEPALPMACSGLRLSLPAAVLALLLLPSALASEPLNPEVQALIAIRQGLVDPHGVLRSWDQDSVDPCSWAMITCSPQNLVIGLGVPSQGLSGTLSGRIANLTHLEQVLLQNNNITGRLPPELGALPRLQTLDLSNNRFSGRVPNTLGRITTLRYLRLNNNSLSGPFPASLAKIPQLSFLDLSFNNLTGPVPLFPTRTFNVVGNPMICGSNAGAGECAAALPPVTVPFPLESTPGGSSEHSSFLPLCLSFISTASQAGQLARLAASRAQCFSALSRSAWRGVHACVAAAAAFVPLPRRGSGRGDTVLSAWGRRRSRLRPGIPVVGCMPVCSAGGAVWPEPCICCCSRLGISVWLLCVCARAGTGTGAAAAGRSKAAGARLPIGVGTSLGASSLVLFAVSCFLWRRKRRHTGGRPSSVLGIIHERGGCDLEDGGGGGVVAAAARLGNVRQFGLRELQAATDGFSAKNILGKGGFGNVYRGRLADGTTVAVKRLKDPSASGEAQFRTEVEMISLAVHRHLLRLVGFCAASGERLLVYPYMPNGSVASRLRGKPALDWATRKRIAVGAARGLLYLHEQCDPKIIHRDVKAANVLLDEHHEAVVGDLGLAKLLDHGDSHVTTAVRGTVGHIAPEYLSTGQSSEKTDVFGFGILLLELVTGQRALQLGKASGALHSQKGVMLDWDLGPHYDRIEVAEMVQVALLCTQFQPSHRPKMSEVVRMLEGDGLAEKWEATNRPGVAAGAPCHDALGYDHRNDSNGSVFFNDFHDNDSSLSSDEARSIDMVEEMELSGPR

SEQ ID NO: 158926 - protein, 289 aa, Zea Mays
MVTFLKCGGVVLGTGIHHVTMDGMGAFHFIQTWTGVARGLDTAEACGPLPFHDRTLLRARSPPAPAFDHPVYSPALLNGVPRPFVTRVYAVSPKLLAGIKSRCAPGVSTYCAVTAHLWRCMCVARGLAPGSDTRLRVPANVRHRLRPPLPRSYFGNAIVRDLVTTRVEDVLERPLGFVAQAIKDAVDRVNDAYVRSVVDYLEVESEKGSQAARGQLMPESDLWVVSWLGMPMYDADFGWGTPRFVAPAQMFGSGTAYVTQRANRDDGLAVLFGLEPEYLQCFEKVFYGE

SEQ ID NO: 158927 - protein, 114 aa, Zea Mays
MQASITKHVEYLHYYSTIRYFQTKNMHGQEKVLRRGESAEAAVQVLQPEAPGPGAAVPAGQPVALRHGEEPPGEGTPAGARRADDDGGRRQGCPHGRDAAGRDRHPCLRGRCHT

SEQ ID NO: 158928 - protein, 140 aa, Zea Mays
MPWPKQRLLVAKREFAWRSFLPADAFSRRERRSGRRREAGGLGTERGQTPRTTRPPPERYGIHPQRPPPPACTAAPHVLRDGGGQVPSGPSRPLAAGADCLLSPVGSTISAGRSVLIRDRPVSRHISAIIMADLSSAGPP

SEQ ID NO: 158929 - protein, 426 aa, Zea Mays
MSTASGVSAGSVLQLPSFRVPAKRFLPRRTAAGAPAGNFFVKRDIIYNRSYHQFLPLKHIGGLQAAVLPVTPPLLDGEGKKKQMAEEYGFTQIGDELPDDITLKDVMDTLPKEVFEINDVKAWTSVLISVTSYALGLYFIAKSPWYLLPLAWAWTGTAVTGLVEDVVGTLAFMPLIYPYEPWRFKHDRHHAKTNMLIEDTAWQPVWQKEIESSPFLRKAIIFGYGPIRPWMSIAHWLIWHFDLKKFRPNEVPRVKISLACVFAFMAIGWPLIILKSGLAGWFKFWFMPWMVYHFWMSTFTMVHHTAPHIPFKSSEEWNAAQAQLNGTVHCNYPQWIEILCHDINVHVPHHISPRIPSYNLRAAYDSIKQNWGKYVNEANWNWRLMKTILTRCHVYDKERYYVPFDELAPQESQPIKFLRKFMPDYA

SEQ ID NO: 158930 - protein, 254 aa, Zea Mays
MPLIYPYEPWRFKHDRHHAKTNMLIEDTAWQPVWQKEIESSPFLRKAIIFGYGPIRPWMSIAHWLIWHFDLKKFRPNEVPRVKISLACVFAFMAIGWPLIILKSGLAGWFKFWFMPWMVYHFWMSTFTMVHHTAPHIPFKSSEEWNAAQAQLNGTVHCNYPQWIEILCHDINVHVPHHISPRIPSYNLRAAYDSIKQNWGKYVNEANWNWRLMKTILTRCHVYDKERYYVPFDELAPQESQPIKFLRKFMPDYA

SEQ ID NO: 158931 - protein, 327 aa, Zea Mays
MSTASGVSAGSVLQLPSFRVPAKRFLPRRTAAGAPAGGLQAAVLPVTPPLLDGEGKKKQMAEEYGFTQIGDELPDDITLKDVMDTLPKEVFEINDVKAWTSVLISVTSYALGLYFIAKSPWYLLPLAWAWTGTAVTGFFVIGHDCAHKSFSRNKLVEDVVGTLAFMPLIYPYEPWRFKHDRHHAKTNMLIEDTAWQPVWQKEIESSPFLRKAIIFGYGPIRPWMSIAHWLIWHFDLKKFRPNEVPRVKISLACVFAFMAIGWPLIILKSGLAGWFKFWFMPWMVYHFWMSTFTMVHHTAPHIPFKSSEEWNAAQAQLNGTVHCNYPQ

SEQ ID NO: 158932 - protein, 197 aa, Zea Mays
MRYELGRQPANTKLSSNKTVRRVRVRGGNVKWRALRLDTGNYSWGSEALTRKTRILDVVYNASNNELVRTQTLVKSAIVQVDAAPFKQWYLTHYGVDIGRKKKVPVAKKDATEGQEGEAIAEETKKSNHVQRKIEKRQQDRALDTHIEEQFGSGRLLACISARPGQCGRADGYILEGKELEFYMKKLQRKKGKGVAS

SEQ ID NO: 158933 - protein, 291 aa, Zea Mays
MMAAVLKTSGSFCSTQQQHFQQSRRDQFLHGSYSNFKHCKSKKIIKPAPLCARVTSSKVELDVKDPYWKQKFQEDWESRFDLPSITDIYDLKPRPTTFSLKKNRTLTGDENVDMWNGYVNNDDRALLKVIKYSSPTSAGAECVDLDCSWVEQWVHRAGPRKEIYYEPEEVKAAIVTCGGLCPGLNDVIRQIVFTLETYGVKNIVGIPFGYRGFFEKGLKEMPLSRGLVENINLNGGSFLGVSRGGAKTSEIVDSIQEQMLSMKRLRNMFLLLFSFITQYYVFLPIFDVLRS

SEQ ID NO: 158934 - protein, 269 aa, Zea Mays
MMAAVLKTSGSFCSTQQQHFQQSRRDQFLHGSYSNFKHCKSKKIIKPAPLCARVTSSKVELDVKDPYWKQKFQEDWESRFDLPSITDIYDLKPRPTTFSLKKNRTLTGDENVDMWNGYVNNDDRALLKVIKYSSPTSAGAECVDLDCSWVEQWVHRAGPRKEIYYEPEEVKAAIVTCGGLCPGLNDVIRQIVFTLETYGVKNIVGIPFGYRGFFEKGLKEMPLSRGLVENINLNGGSFLGVSRGGAKTSEIVDSIQEQMLSMKSAVRES

SEQ ID NO: 158935 - protein, 223 aa, Zea Mays
MDKTFGFDTAVEEAQRAINSAYIEARSAYHGIGLVKLMGRSSGFIAMHASLSSGQVDVCLIPEVPFTLDGEFGVLRQLEHLLKSKGFCVVCVAEAAGQDLLQESGATDASGNVILSDIGVHMQQKIKMHFKDIGVPADVKYIDPTYMVRACRANASDAILCTVLGQNAVHGAFAGFSGITSCICNTHYVYLPITEVITAPKRVNPNSRMWHRCLTSTGQPDFH

SEQ ID NO: 158936 - protein, 187 aa, Zea Mays
MEPLHSLASSSAQAHPLDAYSSLSAEDRHKRELGFPSDLIGSHSFPHFVVFLSRLWSLPASSRSSYRGGWYSSLLHPPVVDEEWSCLGRCSMSSLMDQKNRNPNWDRWGQKDLAQGSQSWGGKPQSQLAIEALSPGKSESKEDIMTSSSGDGGHSVGFLGYSTEREGKKMVVQGSKLIRRTTSEVLG

SEQ ID NO: 158937 - protein, 92 aa, Zea Mays
MSSLMDQKNRNPNWDRWGQKDLAQGSQSWGGKPQSQLAIEALSPGKSESKEDIMTSSSGDGGHSGWIPGLFDRKRRKKDGGPRKQAYQKDDK

SEQ ID NO: 158938 - protein, 259 aa, Zea Mays
MPPRATAILLPYACVRATVALPWIHIHPSCLPIPRPKLPINSHPQRLATFISHLDPCAASNKVLLCPPVHLAPKNQPVPALSGRPWRRRAGSPCPSSCWSSWPSPGARRRRTTTSSTSCCSGRGPTATPSRAAATPSPASRRRTSGSTASGPTATTARTRRTAAPTTPSTRRRCMHTRFFIFPFPSSSRAAPPRMCLIMPRRRVLGFHPRVPSANTYVFCIVSSRRTLRFRLLALLLFIRRGLSVLCYWQKKKKKSDAD

SEQ ID NO: 158939 - protein, 111 aa, Zea Mays
MRLHDALTQVRGWRLEAGGGDATCTGPICLYWAATGAAAQAAPVVDPPLLLQFCTMHTSLHCIAPQAYGMHHLQLGLPLVQAMIFHRGTYMKQKNHLHKLEYYVYHILWNE

SEQ ID NO: 158940 - protein, 211 aa, Zea Mays
MVVFHVLGTWDLQIPFPRQLFSVAIYKMATQGGIGPAGHSIDDLYVLDLTNDKFKWHMLGLLFKGQGLVLAMVTAWIWQLNGILLLYQEMTDNPVENYSQVNKIFNVDSQPCTCKTFWKSHDVPVRVKNSYNPKAPGTLITRQRDMDKVVLTSIVLKSNVNMLDILSTRMLGQYGFPGKGLMEFLEQRSSARSPPKKDPCCFYKELYKDFG

SEQ ID NO: 158941 - protein, 136 aa, Zea Mays
MVGIRNDRGKPIDSITVQFQLPPLIVSVDLTANYGTVDILADKTCLWTIGQIPKDKAPTLSRNLRLEEGLAQLHALPTFQAKFRIMRVALSGLQIDKLDVKKHPERSVQRSIGVLYLNQIILCGVKATEYCDPRPI

SEQ ID NO: 158942 - protein, 166 aa, Zea Mays
MSYSVQKLKKTPIYVKPQLTSDSGNCRVSVMVGIRNDRGKPIDSITVQFQLPPLIVSVDLTANYGTVDILADKTCLWTIGQIPKDKAPTLSRNLRLEEGLAQLHALPTFQAKFRIMRVALSGLQIDKLDVKKHPERSVQRSIGVLYLNQIILCGVKATEYCDPRPI

SEQ ID NO: 158943 - protein, 129 aa, Zea Mays
MSYSVQKLKKTPIYVKPQLTSDSGNCRVSVMVGIRNDRGKPIDSITVQFQLPPLIVSVDLTANYGTVDILADKAKFRIMRVALSGLQIDKLDVKKHPERSVQRSIGVLYLNQIILCGVKATEYCDPRPI

SEQ ID NO: 158944 - protein, 158 aa, Zea Mays
MGAKAAHRRGVLDLEAQFAFFRSQHRHPVNAAAHVLLTWPILFTNLLILHFLPLPLPVSPALALALAYAAAYLAVDRRAGAVAGLLFLAAWAASRALAARLGFALSWKLVLVTQLFCWTWQFLGHGLFEKKGPSVSDLPEVFLMEPFLIFLQPPLVLR

SEQ ID NO: 158945 - protein, 203 aa, Zea Mays
MAEGVVAGVAAPMAVARAVAGDRRLEQCLGEDKVKILEQAFMEAADNVLPHPMEDAYLEACHTNNMEWKMCIYGADCSEISLVQVKGSGMLKDSACHELDKIRSLKRPYIKRVQDRHKETVNCLKRNAIEMEGYIRPLDVVIIVSQYIPCSDDQHSDGVADDHPNDSLFSPTYHHHKVVSVFYSTGGLHGGVYRSRCQAWFHC

SEQ ID NO: 158946 - protein, 296 aa, Zea Mays
MAEGVVAGVAAPMAVARAVAGDRRLEQCLGEDKVKILEQAFMEAADNVLPHPMEDAYLEACHTNNMEWKMCIYGADCSEISLVQVKGSGMLKDSACHELDKIRSLKRPYIKRVQDRHKETVNCLKRNAIEMEGYIRPLDVVIIVSQYIPCSDDQHSDGVADDHPNDSLFSPTYHHHKEVYMVVSIGLDVKPGSTVKCEPGYGFMLHLSQKLAIGTLSVDKNPHIQFDLVFDKEFELSHTSKTTIVFFTGYKVEQPFKEDGMDLDSEDEDEKLNVPVVKENGKAGGKIQKSQEKAVP

SEQ ID NO: 158947 - protein, 224 aa, Zea Mays
MAEGVVAGVAAPMAVARAVAGDRRLEQCLGEDKVKILEQAFMEAADNVLPHPMEDAYLEACHTNNMEWKMCIYGADCSEISLVQVKGSGMLKDSACHELDKIRSLKRPYIKRVQDRHKETVNCLKRNAIEMEGYIRPLDVVIIVSQYIPCSDDQHSDGVADDHPNDSLFSPTYHHHKEVYMVVSIGLDVKPGSTVKCEPGYGFMLHLSQAALGESKKSDNALLP

SEQ ID NO: 158948 - protein, 180 aa, Zea Mays
MDLPRNQTPLNRSHHQRTTIRVLLRCSSTTEARSEPHRLSPHGANHTGKADGKKQKSQEKAVPAASKSSPASKKSKDDDDSDEGETDDSNEDETDDSDEGEGLSPEEGDDDDSSDEDDTSDDEEEDTSTPKKHEVGKKRAAESSMLKTPLSDKKAKVATPSAQKIGVPLNGLTKLSSKIV

SEQ ID NO: 158949 - protein, 152 aa, Zea Mays
MDSSFDHSIVLSIWHLVIVGRLQGRWVPDAAFKSNKGESKNKFKANDDMKKQQRPFLMQFFSPIFLKAFSITFFGEWGDKSQIATIGLAADENPFGVVLGGIIAQALCTTAAVLGGKSLASQISEKMVELSSGVLFLLFGIMSLLSGPEGEL

SEQ ID NO: 158950 - protein, 220 aa, Zea Mays
MTVLSEIGDKTFFAAAILAMRHPRKLVLAGCLTALIVMTALSASLGWVAPNLISRKWTHHLTTLLFFLFGIWSLWEGFKEDGYRDSEELAEVEAELDAAFKSNKGESKNKFKANDDMKKQQRPFLMQFFSPIFLKAFSITFFGEWGDKSQIATIGLAADENPFGVVLGGIIAQALCTTAAVLGGKSLASQISEKMVELSSGVLFLLFGIMSLLSGPEGEL

SEQ ID NO: 158951 - protein, 235 aa, Zea Mays
MAPSLLGGFTKSLAMTVLSEIGDKTFFAAAILAMRHPRKLVLAGCLTALIVMTALSASLGWVAPNLISRKWTHHLTTLLFFLFGIWSLWEGFKEDGYRDSEELAEVEAELDAAFKSNKGESKNKFKANDDMKKQQRPFLMQFFSPIFLKAFSITFFGEWGDKSQIATIGLAADENPFGVVLGGIIAQALCTTAAVLGGKSLASQISEKMVELSSGVLFLLFGIMSLLSGPEGEFT

SEQ ID NO: 158952 - protein, 222 aa, Zea Mays
MAPSLLGGFTKSLAMTVLSEIGDKTFFAAAILAMRHPRKLVLAGCLTALIVMTALSASLGWVAPNLISRKWTHHLTTLLFFLFGIWSLWEGFKEDGDSEELAEVEAELDAAFKSNKGESKNKFKANDDMKKQQRPFLMQFFSPIFLKAFSITFFGEWGDKSQIATIGLAADENPFGVVLGGIIAQALCTTAAVLGGKSLASQISEKMVELSSGVLFLLFVHE

SEQ ID NO: 158953 - protein, 199 aa, Zea Mays
MRHPRKLVLAGCLTALIVMTALSASLGWVAPNLISRKWTHHLTTLLFFLFGIWSLWEGFKEDGDSEELAEVEAELDAAFKSNKGESKNKFKANDDMKKQQRPFLMQFFSPIFLKAFSITFFGEWGDKSQIATIGLAADENPFGVVLGGIIAQALCTTAAVLGGKSLASQISEKMVELSSGVLFLLFGIMSLLSGPEGEL

SEQ ID NO: 158954 - protein, 330 aa, Zea Mays
MWEGGGSHAHEALLLQAAGSGAADYGHAGPSLLRPWLGPAAASGFSYMAPNHAQPGPLGAEAAVASRFGFGGGGYSDGGVEQEQFVVIGSAETVPPRHSLQAAGVGGRTTALLPHGPRMVSGLLGTLQAELGRMTAKEIMDAKALAASRSHSEAERSRRQRINGHLAKLRSLLPNTTKTDKASLLAEVIEHVKELKRQTSAAARQRHLLLPTEADDLFGGRRGGRRRRQARRAGVAVLRGPRGPHPRHRPRARRAQPAGPPRRDRHARRPRPQRAPHHHCRRRRRGRRGPRRRRVRRRLVQPEARARRVHPGSAARRHGPQDGEQRHVLI

SEQ ID NO: 158955 - protein, 119 aa, Zea Mays
MPPNRTSNGPRSITTAAAELGPNIQILRGAATAVGDMEAAVPSRVALSAASRLPNPHAVTGDRSFIYKGRCQSLAIPMALSAAAPGKGGGVLDRPVEKTTPGRQSEFDVKFSGCLNRCH

SEQ ID NO: 158956 - protein, 451 aa, Zea Mays
MATAPASLSLSASTLPTRLRAAAVLAGMRWRQPQRGRMVVRAKIREIFMPALSSTMTEGKIVSWSAGEGDRVSKGDAVVVVESDKADMDVETFHDGIVAVVLVQAGESAPVGAPIALLAESEEEVPLALAKAQELSNGQPQQAPPAPTEDAAATPPPPSAPATAPTPVAVGTKGIASPHAKKLAKQHRVDLAKVTGTGPYGRITSADVEAAAGIQPKSKPAPAAAAPPPVAAPSVGAVPQSAVLPPVPGATVVPFTTMQAAVSKNMVESLAVPAFRVGYPIITDKLDELYEKVKPKGVTMTVLLAKAAAMALAQHPVVNASCRDGKSFTYNSNINIAVAVAIDGGLITPVLQDADKLDIYLLSQNWKDLVKKARAKQLQPNEYSSGTFTLSNLGMFGVDRFDAILPPGQGAIMAVGASKPTVVADKDGFFSVKSKMLIVLDYTGNISPELW

SEQ ID NO: 158957 - protein, 405 aa, Zea Mays
MATAPASLSLSASTLPTRLRAAAVLAGMRWRQPQRGRMVVRAKIREIFMPALSSTMTEGKIVSWSAGEGDRVSKGDAVVVVESDKADMDVETFHDGIVAVVLVQAGESAPVGAPIALLAESEEEVPLALAKAQELSNGQPQQAPPAPTEDAAATPPPPSAPATAPTPVAVGTKGIASPHAKKLAKQHRVDLAKAAVSKNMVESLAVPAFRVGYPIITDKLDELYEKVKPKGVTMTVLLAKAAAMALAQHPVVNASCRDGKSFTYNSNINIAVAVAIDGGLITPVLQDADKLDIYLLSQNWKDLVKKARAKQLQPNEYSSGTFTLSNLGMFGVDRFDAILPPGQGAIMAVGASKPTVVADKDGFFSVKSKMLVNVTADHRIVYGADLAAFLQTFAKVIEDPESLTL

SEQ ID NO: 158958 - protein, 463 aa, Zea Mays
MATAPASLSLSASTLPTRLRAAAVLAGMRWRQPQRGRMVVRAKIREIFMPALSSTMTEGKIVSWSAGEGDRVSKGDAVVVVESDKADMDVETFHDGIVAVVLVQAGESAPVGAPIALLAESEEEVPLALAKAQELSNGQPQQAPPAPTEDAAATPPPPSAPATAPTPVAVGTKGIASPHAKKLAKQHRVDLAKVTGTGPYGRITSADVEAAAGIQPKSKPAPAAAAPPPVAAPSVGAVPQSAVLPPVPGATVVPFTTMQAAVSKNMVESLAVPAFRVGYPIITDKLDELYEKVKPKGVTMTVLLAKAAAMALAQHPVVNASCRDGKSFTYNSNINIAVAVAIDGGLITPVLQDADKLDIYLLSQNWKDLVKKARAKQLQPNEYSSGTFTLSNLGMFGVDRFDAILPPGQGAIMAVGASKPTVVADKDGFFSVKSKMLVNVTADHRIVYGADLAAFLQTFAKIN

SEQ ID NO: 158959 - protein, 115 aa, Zea Mays
MLGSVDCMHWEWRKCPTTWKGMFTGRGKYPTMILEADALHDLWIWHAYFGMPGSYNNINILQRSNLFESHFSGDSALVAFSVNGHTYNMGYYLAYGIYLDCPTFMKTIESRLEGG

SEQ ID NO: 158960 - protein, 295 aa, Zea Mays
MAAPPRATAVLAWGSGEDGQLGMGGNEEKDWAHCVEALGSYAVTAVVAGSRNSLAICEDGRLFTWGWNQRGTLGHPPKTKTESSPGPVHALAGLKIVQAAIGGWHCLAVDDNGHAYAWGGNEYGQCGEEPERKEDGTRALRRDIPTPQRCAPKLKVRQVDIAAGGWHSTALTIQGEVYAWGRGEHGRLGFGDDKSSRMVPLKVELLAGEDIVQVSCGGTHSVALTRDGRMFSYGRGDHGRLGYGRKLTTGQPMGVDIDLPPPKTRSSRDGQWQAKYVACGGRHTLAIVVWAETTD

SEQ ID NO: 158961 - protein, 421 aa, Zea Mays
MAAPPRATAVLAWGSGEDGQLGMGGNEEKDWAHCVEALGSYAVTAVVAGSRNSLAICEDGRLFTWGWNQRGTLGHPPKTKTESSPGPVHALAGLKIVQAAIGGWHCLAVDDNGHAYAWGGNEYGQCGEEPERKEDGTRALRRDIPTPQRCAPKLKVRQVAAGGTHSVVLTQEGHVWTWGQPWPPGDIKQISTPVRVQGLEKVRVIAVGAFHNLALTEDGILWAWGNNEYGQLGTGDTQPRSHPIRVEGLSDLSLVDIAAGGWHSTALTIQGEINSLPCYLFRACFKDVQIIKYQKYTYYTMKVYAWGRGEHGRLGFGDDKSSRMVPLKVELLAGEDIVQVSCGGTHSVALTRDGRMFSYGRGDHGRLGYGRKLTTGQPMGVDIDLPPPKTRSSRDGQWQAKYVACGGRHTLAIVVWAETTD

SEQ ID NO: 158962 - protein, 438 aa, Zea Mays
MAAPPRATAVLAWCAHSRAFSLVREGRGGQLRFSRRGGPLIALVLVLYRGSGEDGQLGMGGNEEKDWAHCVEALGSYAVTAVVAGSRNSLAICEDGRLFTWGWNQRGTLGHPPKTKTESSPGPVHALAGLKIVQAAIGGWHCLAVDDNGHAYAWGGNEYGQCGEEPERKEDGTRALRRDIPTPQRCAPKLKVRQVAAGGTHSVVLTQEGHVWTWGQPWPPGDIKQISTPVRVQGLEKVRVIAVGAFHNLALTEDGILWAWGNNEYGQLGTGDTQPRSHPIRVEGLSDLSLVDIAAGGWHSTALTIQGEVYAWGRGEHGRLGFGDDKSSRMVPLKVELLAGEDIVQLSSRAHFPRLQVSCGGTHSVALTRDGRMFSYGRGDHGRLGYGRKLTTGQPMGVDIDLPPPKTRSSRDGQWQAKYVACGGRHTLAIVVWAETTD

SEQ ID NO: 158963 - protein, 390 aa, Zea Mays
MAAPPRATAVLAGSGEDGQLGMGGNEEKDWAHCVEALGSYAVTAVVAGSRNSLAICEDGRLFTWGWNQRGTLGHPPKTKTESSPGPVHALAGLKIVQAAIGGWHCLAVDDNGHAYAWGGNEYGQCGEEPERKEDGTRALRRDIPTPQRCAPKLKVRQVAAGGTHSVVLTQEGHVWTWGQPWPPGDIKQISTPVRVQGLEKVRVIAVGAFHNLALTEDGILWAWGNNEYGQLGTGDTQPRSHPIRVEGLSDLSLVDIAAGGWHSTALTIQGEVYAWGRGEHGRLGFGDDKSSRMVPLKVELLAGEDIVQVSCGGTHSVALTRDGRMFSYGRGDHGRLGYGRKLTTGQPMGVDIDLPPPKTRSSRDGQWQAKYVACGGRHTLAIVVWAETTD

SEQ ID NO: 158964 - protein, 149 aa, Zea Mays
MAAPPRATAVLAWGSGEDGQLGMGGNEEKDWAHCVEALGSYAVTAVVAGSRNSLAICEDGRLFTWGWNQRGTLGHPPKTKTESSPGPVHALAGLKIVQAAIGGWHCLAVDDNGHAYAWGGNEYGQCGEEPERKEDGTRALRRDIPTPQR

SEQ ID NO: 158965 - protein, 231 aa, Zea Mays
MAAPPRATAVLAWCAHSRAFSLVREGRGGQLRFSRRGGPLIALVLVLYRGSGEDGQLGMGGNEEKDWAHCVEALGSYAVTAVVAGSRNSLAICEDGRLFTWGWNQRGTLGHPPKTKTESSPGPVHALAGLKIVQAAIGGWHCLAVDDNGHAYAWGRGTRFPAFSVTGFWLLTCFDAMCMDCAGGNEYGQCGEEPERKEDGTRALRRDIPTPQRCAPKLKVRQLLEGHIQWF

SEQ ID NO: 158966 - protein, 1625 aa, Zea Mays
MGVVDFSVLGALQKVRSFVAGATPAEAADGRLPATPRSRSGGPSPENSPPPAATRSGGRRAIALRRQISSPELLRCRAVRRADDEDDDEPGVQFFTHGNDFLHDFSDTESVSVSTPNDINRSLTPSPLESPTWMVKQNDSSPISRKNGRFSPDSPGYGTKASLGSDGSPQQINGSVTDSGDGSKTQYPVEFGANIWCPPPPEDEGDDIESRLFGFQDEDDEAGDSSGLLVSGSFSANKIAAIDEVTNTAQEECLKTAVLGHFRALVAQLLKAEGIDMGKDDGSKGWLDIVSSLTWQAASYVRPDTKKGGSMDPTDYVKVKCIASGDPRDSNFVRGVVCSKNVKHKRMVSEHRNAKLLILGGALEYHRVPNKLASIGRILEQEKEHMKMIVGKIESRRPNVVLVEKTVSSSAQELFSKDISLVLNVKRTLLDRVSRCTGAQIASSADSIASVRLGQCEAFKVQKVTEFPSAKQTNRRSSKTLMFFEGCPWRLGCTVLLRGSCREELKRIKRAVQLAVFAAYHLSLETSFFADEGATLPKLPSRHVVVDPDTRNCTNSNSAALTNVGMPHGRKSEHDKLSQTAMVNIMFENTPVSPSSLPSNGEGHMFVGACQHKETEYSVDHKNSCEHCVSRATGSCNGYETSLCSSDNDSMTQNQNLQNSAKLTSNAHQYEFPAKECQQVDHWDRQPHDDQSVDQRDLNKFSGEYFPGSDNHQSILVSLSSTCIPKGLVCERSHLFRIKFYGSFDKPLGRYLRDDLFDEAYRCQSCKEPSESHIRRYTHQHGSLTISVRRLQSRKLPGERDGRIWMWHRCLKCKPKDGVPPATRRIIMSDAAWGLSLGKFLELSFSNHASANRVASCGHSLQRDCLRFYGYGNMVAFFRYSPVDILSVNLPPPVLDFNCCSTQEWLKRVAVEIFGKMESLHVEVSEFLHCTEKNIVTEDEPVRECVQRQIIEMKDWLKMQRNEYEMLLLPVMRESNHPMQTSIDILELNRLRRGLLLDAYIWDRRLCHIDSVLNTHGHISKTNPDNLDILLCTRLKEWKADLLCGDTEIEKSLGSPKKSLLSREGHLNDNEYSVADTNLEICLEGHPVDDADDLDKVYNKFSGVKKRPTAEPTDGLEPVERLPSLASIFSDTIDLAWTGSCDLQHDLPQAFTKIDENVSFNLDSPKYSNLVTPVRIHSFSSTLGLRQRERTGLVPASLHLSSFKSAEYFGAMRSILKDPMPNMRRSCSQRSPGTIEKLNVVLARKPTYISSTSNIINDGARLLLPQTGYEHDVVVAVYEDEPTSIISYAMTSEEYVEQVTHRLNSSLSFSHQPNTNGISSHGLEASSPSQGDHLHSKGTHFKLSFDDDSPISPDKTKFSVICYFAKHFAALRKKCCPKDIDYIRSLSRCKRWNAQGGKSNVYFAKTLDERFIIKQVTRTELESFVEFAPQYFKYLMESLASGSPTCLAKIVGLYQVGVKSLKTGKEVRMDLMVMENVFFERKISRVYDLKGSLRSRYTAGDSKVLLDANLIEALHTKPIFLGSKAKRRLERAVWNDTSFLALADVMDYSLLVGIDEEKKELVIGIIDYLRQYTWDKQLETWVKASGILGGPKNESPTVISPMQYKKRFRKAMSKYFLTVPDQWSS

SEQ ID NO: 158967 - protein, 1616 aa, Zea Mays
MGVVDFSVLGALQKVRSFVAGATPAEAADGRLPATPRSRSGGPSPENSPPPAATRSGGRRAIALRRQISSPELLRCRAVRRADDEDDDEPGVQFFTHGNDFLHDFSDTESVSVSTPNDINRSLTPSPLESPTWMVKQNDSSPISRKNGRFSPDSPGYGTKASLGSDGSPQQINGSVTDSGDGSKTQYPVEFGANIWCPPPPEDEGDDIESRLFGFQDEDDEAGDSSGLLVSGSFSANKIAAIDEVTNTAQEECLKTAVLGHFRALVAQLLKAEGIDMGKDDGSKGWLDIVSSLTWQAASYVRPDTKKGGSMDPTDYVKVKCIASGDPRDSNFVRGVVCSKNVKHKRMVSEHRNAKLLILGGALEYHRVPNKLASIGRILEQEKEHMKMIVGKIESRRPNVVLVEKTVSSSAQELFSKDISLVLNVKRTLLDRVSRCTGAQIASSADSIASVRLGQCEAFKVQKVTEFPSAKQTNRRSSKTLMFFEGCPWRLGCTVLLRGSCREELKRIKRAVQLAVFAAYHLSLETSFFADEGATLPKLPSRHVVVDPDTRNCTNSNSAALTNVGMPHGRKSEHDKLSQTAMVNIMFENTPVSPSSLPSNGEGHMFVGACQHKETEYSVDHKNSCEHCVSRATGSCNGYETSLCSSDNDSMTQNQNLQNSAKLTSNAHQYEFPAKECQQVDHWDRQPHDDQSVDQRDLNKFSGEYFPGSDNHQSILVSLSSTCIPKGLVCERSHLFRIKFYGSFDKPLGRYLRDDLFDEAYRCQSCKEPSESHIRRYTHQHGSLTISVRRLQSRKLPGERDGRIWMWHRCLKCKPKDGVPPATRRIIMSDAAWGLSLGKFLELSFSNHASANRVASCGHSLQRDCLRFYGYSPVDILSVNLPPPVLDFNCCSTQEWLKRVAVEIFGKMESLHVEVSEFLHCTEKNIVTEDEPVRECVQRQIIEMKDWLKMQRNEYEMLLLPVMRESNHPMQTSIDILELNRLRRGLLLDAYIWDRRLCHIDSVLNTHGHISKTNPDNLDILLCTRLKEWKADLLCGDTEIEKSLGSPKKSLLSREGHLNDNEYSVADTNLEICLEGHPVDDADDLDKVYNKFSGVKKRPTAEPTDGLEPVERLPSLASIFSDTIDLAWTGSCDLQHDLPQAFTKIDENVSFNLDSPKYSNLVTPVRIHSFSSTLGLRQRERTGLVPASLHLSSFKSAEYFGAMRSILKDPMPNMRRSCSQRSPGTIEKLNVVLARKPTYISSTSNIINDGARLLLPQTGYEHDVVVAVYEDEPTSIISYAMTSEEYVEQVTHRLNSSLSFSHQPNTNGISSHGLEASSPSQGDHLHSKGTHFKLSFDDDSPISPDKTKFSVICYFAKHFAALRKKCCPKDIDYIRSLSRCKRWNAQGGKSNVYFAKTLDERFIIKQVTRTELESFVEFAPQYFKYLMESLASGSPTCLAKIVGLYQVGVKSLKTGKEVRMDLMVMENVFFERKISRVYDLKGSLRSRYTAGDSKVLLDANLIEALHTKPIFLGSKAKRRLERAVWNDTSFLALADVMDYSLLVGIDEEKKELVIGIIDYLRQYTWDKQLETWVKASGILGGPKNESPTVISPMQYKKRFRKAMSKYFLTVPDQWSS

SEQ ID NO: 158968 - protein, 133 aa, Zea Mays
MDVDVDEATATPASASAKPASNGEAPSGAREVDVGEEYTLAGVLRSFVDGVWYPDEPLLRRLRAASCEAAPRLKGASRNSARDLLEWTRQGSGLRAILVISLKTCISRWRLESASCKRKQKHGGLLSVATEHG

SEQ ID NO: 158969 - protein, 51 aa, Zea Mays
MLGGQSETVKYRVFAGTWNVGGLAPPDDLDLEDWLDTKNDSYDIYVLGERL

SEQ ID NO: 158970 - protein, 175 aa, Zea Mays
MRASDSDKQPYVARVEKMEADGRGSVRVQVRWYYRPEESKGGRRQFHGAKELFLSDHFDLQSAHTIEGKCVVHSFKNYTKLDNVGPEDFFSRFEYKAATGSFTPDRVAVYCKCEMPYNPDDLMVQCEACKDWFHPSCMAMTIEQAKKLDHFVCSDCLKENGSKRLSNVYATSSNS

SEQ ID NO: 158971 - protein, 164 aa, Zea Mays
MVRMKQVKISVKKDVDSYTIRGTNKVVHVGDCVLMRASDSDKQPYVARVEKMEADGRGSVRVQVRWYYRPEESKGGRRQFHGAKELFLSDHFDLQSAHTIEGKCVVHSFKNYTKLDNVGPEDFFSRFEYKAATGIANVRCHTTRMTSWCSAKLARTGSIHLAWL

SEQ ID NO: 158972 - protein, 52 aa, Zea Mays
MGWGCMDLAQTHEGGGARAGGRSAPMKAERDTRQAECLRRVQFRVDPRTGST

SEQ ID NO: 158973 - protein, 345 aa, Zea Mays
MQIREGPARRQAPSAAGALRSPMSAMMLAMFATMASFYVAGRLWQDAQNRLHLIKELDRRTGQGQSAISVDDTLKVVACRQQGKRLASLEMELAAAKHKGFVGKYTPETNGTHSGKKPLIVIGIMSSFGRKNYRDAVRKSWLPTGSMLKKLEEEKGIVVRFVVGRSANRGDTFDREIDDENRSTKDFLILDDHIESDEELPKKTKSFFANAAETFNAAFYAKVNDDIYINVDTLSAMLETHWDRPRVYIGCMKSGEVFSDLTHKWYESDWWKFGDGKSYFRHASGEMFVISRAIAQFISINKSALRTYAHDDVSVGSWMIGLAVNHVNEAKLCCSSWPSGPGFEP

SEQ ID NO: 158974 - protein, 346 aa, Zea Mays
MQIREGPARRQAPSAAGALRSPMSAMMLAMFATMASFYVAGRLWQDAQNRLHLIKELDRRTGQGQSAISVDDTLKVVACRQQGKRLASLEMELAAAKHKGFVGKYTPETNGTHSGKKPLIVIGIMSSFGRKNYRDAVRKSWLPTGSMLKKLEEEKGIVVRFVVGRSANRGDTFDREIDDENRSTKDFLILDDHIESDEELPKKTKSFFANAAETFNAAFYAKVNDDIYINVDTLSAMLETHWDRPRVYIGCMKSGEVFSDLTHKWYESDWWKFGDGKSYFRHASGEMFVISRAIAQFISINKSALRTYAHDDVSVGSWMIGLAVNHVNEAKLCCSSWPSARPNFIR

SEQ ID NO: 158975 - protein, 395 aa, Zea Mays
MVGCSRGSLPTWMTAAAARVDLSGGVTPSHQGSPSPPHSSSGPAPAAGADQQLGLFERALSAAGAAFVSAIIVNPLDVAKTRLQAQAAGVLYHQPAQMAALGPDILSEFRCSPSCTRGLLLGSEPVCPPDCFQYKGTLDVFLKVVRQEGFSRLWRGTNAGLALAVPTVGIYLPCYDIFRNGIEDFTRSNAPGLTPYAPLVAGSVARSLACIACSPIELARTRMQAYKEFRPGLKPPGMWKTLVGVLPPLAGSSQNVQNYRVLWTGVGAQLARDVPFSAICWSTLEPIRRQLLGLLGEDGNAASVLGANFAAGFVAGSLAAGATCPLDVAKTRRQIEKDTEKAMRMTTRQTLTEIWRSGGLKGLFTGVGPRVARAGPSVGIVVSFYEGAGVVSSVL

SEQ ID NO: 158976 - protein, 386 aa, Zea Mays
MVGCSRGSLPTWMTAAAARVDLSGGVTPSHQGSPSPPHSSSGPAPAAGADQQLGLFERALSAAGAAFVSAIIVNPLDVAKTRLQAQAAGVLYHQPAQMAALGPDAILSEFRCSPSCTRGLLLGSEPVCPPDCFQYKGTLDVFLKVVRQEGFSRLWRGTNAGLALAVPTVGIYLPCYDIFRNGIEDFTRSNAPGLTPYAPLVAGSVARSLACIACSPIELARTRMQAYKEFRPGLKPPGMWKTLVGVLPPLAGSSQNVQNYRVLWTGVGAQLARDVPFSAICWSTLEPIRRQLLGLLGEDGNAASVLGANFAAGFVAGSLAAGATCPLDVAKTRRQIEKDTEKAMRMTTRQTLTEIWSHPFSSVVIPSSSPTPSSPAALLCSGGPLL

SEQ ID NO: 158977 - protein, 384 aa, Zea Mays
MVGCSRGSLPTWMTAAAARVDLSGGVTPSHQGSPSPPHSSSGPAPAAGADQQLGLFERALSAAGAAFVSAIIVNPLDVAKTRLQAQAAGVLYHQPAQMAALGPDILSEFRCSPSCTRGLLLGSEPVCPPDCFQYKGTLDVFLKVVRQEGFSRLWRGTNAGLALAVPTVGIYLPCYDIFRNGIEDFTRSNAPGLTPYAPLVAGSVARSLACIACSPIELARTRMQAYKEFRPGLKPPGMWKTLVGVLPPLAGSSQNVQNYRVLWTGVGAQLARDVPFSAICWSTLEPIRRQLLGLLGEDGNAASVLGANFAAGFVAGSLAAGATCPLDVAKTRRQIEDTEKAMRMTTRQTLTEIWSHPFSSVVIPSSSPTPSSPAALLCSGGPLL

SEQ ID NO: 158978 - protein, 398 aa, Zea Mays
MVGCSRGSLPTWMTAAAARVDLSGGVTPSHQGSPSPPHSSSGPAPAAGADQQLGLFERALSAAGAAFVSAIIVNPLDVAKTRLQAQAAGVLYHQPAQMAALGPDAILSEFRCSPSCTRGLLLGSEPVCPPDCFQYKGTLDVFLKVVRQEGFSRLWRGTNAGLALAVPTVGIYLPCYDIFRNGIEDFTRSNAPGLTPYAPLVAGSVARSLACIACSPIELARTRMQAYKEFRPGLKPPGMWKTLVGVLPPLAGSSQNVQNYRVLWTGVGAQLARDVPFSAICWSTLEPIRRQLLGLLGEDGNAASVLGANFAAGFVAGSLAAGATCPLDVAKTRRQIEDTEKAMRMTTRQTLTEIWRSGGLKGLFTGVGPRVARAGPSVGIVVSFYEVVKYAIHQRHTS

SEQ ID NO: 158979 - protein, 423 aa, Zea Mays
MLNCKVNYYLISKLRDDIQKLQASEAEIKALSFNYAAMLKEKEEQLGKLREENGSLKRSLESCKAVSANSNGTLERSPRVQRNAVQENSLNLTKQNGYGGGSSHSTQTNGLHPMAGYQKGSISEEERSSFTTKQASLENEIKQLKQQLSNNSEKETEIRRRLEDETKRSEFLQQQLNELKMDKERMTTSMEELQKELSEKKSEFRRVQDEQSKRDKEHVSDGSLQSLRNMLMALQKENSSLKIEKVKLDADLKSMKSTSQKTVDSTLDANKISDLEKVKKEMDSLKRALQDASRERDKAVQDLARLKQHLLDKDLEDQEKMDEDSKLIEELRVVCEQQRAHIMQLERALKVEMAKQEENKKVISEEHQRSNEQIENLNYKLASCMSALESKNVELLNLQTALGQYYAESEAKVRVIKGGKSNH

SEQ ID NO: 158980 - protein, 341 aa, Zea Mays
MDEDSKLIEELRVVCEQQRAHIMQLERALKVEMAKQEENKKVISEEHQRSNEQIENLNYKLASCMSALESKNVELLNLQTALGQYYAESEAKDRLGGDLAVAREELSKLSESLKVANQTIEISRREKEDMATKLSQAERMLADGKRSMQKLEDDNSRLRRALEQSMTTVNRMSLDSDNSVDRRIVIKLLVTYFQRNHSKEVLDLMVRMLGFSEEDKQRIGFAQSNAGRGVVRGVLGLPGRLVGGIVGGGPSGKSTQSSQDSQSFADLWVDFLLKETEEREKREASEAARQSQQESHTTTGPSTSSSIQQPSQHNPSNVAPGPSTMPHTAWVSQNRNPQQFR

SEQ ID NO: 158981 - protein, 573 aa, Zea Mays
MELLSGGALAWQQYRALLRKNATLTWRNRRSAALQLFSSLVFIFLIFCIDRAVRSRFSSTTAYRNVPDPEALVAPPIPPCEDKFFIKSPCYDFLWSDGGSARIRGLVDAIRRNNPGRPIAPEKVLGFRTPDDVDAWLFQNPMRCPGALHFQDINATQIKYGIQTNSTPVARRGTYEDPTFKFQIPLQVAAEREMARLLIGDPNFSWTVGFKEFAHPATETFSTIAQAGPTFFLAIAMFGFVFQISALVAEKELKLRQVQTSLTTVCLHIFMLKFDFFLHNNFGILFLLFFLFQLNMLSFAFMISTFVAKAASATTVGFAIFIIGFLTQLVTTFGFPYSSDYKKLYRTLWSLFPPDLFAKALNILGKATATPEDKGFSWNQRGECPSFETDCVITIDDIYKWLISTFFLWFVLAIYFDNILPNVNGVRKSVFYFLMPSYWTGKGGKMEEGGLFSFFGSSRPADDATPTDEDVLAEQNLVKEQAANNAVDPNVAVQIHGLRKTYPGTFSIGCCCKCSKSKPFHSVKGLWVNLEKDQLFCLLGPNGAGKTTTISCLTGITPITGGDALWECQTSVG

SEQ ID NO: 158982 - protein, 946 aa, Zea Mays
MELLSGGALAWQQYRALLRKNATLTWRNRRSAALQLFSSLVFIFLIFCIDRAVRSRFSSTTAYRNVPDPEALVAPPIPPCEDKFFIKSPCYDFLWSDGGSARIRGLVDAIRRNNPGRPIAPEKVLGFRTPDDVDAWLFQNPMRCPGALHFQDINATQIKYGIQTNSTPVARRGTYEDPTFKFQIPLQVAAEREMARLLIGATETFSTIAQAGPTFFLAIAMFGFVFQISALVAEKELKLRQAMSTMGLYESAYWLSWFTWEAFLTTLSALFTVLFGMMFQFDFFLHNNFGILFLLFFLFQLNMLSFAFMISTFVAKAASATTVGFAIFIIGFLTQLVTTFGFPYSSDYKKLYRTLWSLFPPDLFAKALNILGKATATPEDKGFSWNQRGECPSFETDCVITIDDIYKWLISTFFLWFVLAIYFDNILPNVNGVRKSVFYFLMPSYWTGKGGKMEEGGLFSFFGSSRPADDATPTDEDVLAEQNLVKEQAANNAVDPNVAVQIHGLRKTYPGTFSIGCCCKCSKSKPFHSVKGLWVNLEKDQLFCLLGPNGAGKTTTISCLTGITPITGGDAFIYGHSVRSTVGMSNIRRMIGVCPQFDILWDALTAKEHMELFASIKGLHPAAITSVAEESLAKVKLSQVTNARAGSYSGGMKRRLSVAIALIGDPKLVFLDEPTTGMDPITRRHVWDIIEEAKKGRAIVLTTHSMEEADILGDRIAIMAKGKLRCIGTSIRLKSKFGTGYIANVNFSGNGHMQSPNINSNTEAPVNPNIEAVKWFFKERLDVNPKEESRTFLTFVIPHHKEPLLTRFFGELQDREGEFGISDIQLGLTTLEEVFLNIAKQAELETSTAEGTLVTLNLSSGTTIQIPKGARFVGIPGTETEEHPRGIMVEVYWDQDENGSLCISGHSDEMPVPVHAELRRPPSLSRRASMDRGRPVGYMIDLNQVP

SEQ ID NO: 158983 - protein, 871 aa, Zea Mays
MLRLPLERRRERPHQGPRRRHPEEQPRPTHSTRKGFRTPDDVDAWLFQNPMRCPGALHFQDINATQIKYGIQTNSTPVARRGTYEDPTFKFQIPLQVAAEREMARLLIGDPNFSWTVGFKEFAHPATETFSTIAQAGPTFFLAIAMFGFVFQISALVAEKELKLRQAMSTMGLYESAYWLSWFTWEAFLTTLSALFTVLFGMMFQFDFFLHNNFGILFLLFFLFQLNMLSFAFMISTFVAKAASATTVGFAIFIIGFLTQLVTTFGFPYSSDYKKLYRTLWSLFPPDLFAKALNILGKATATPEDKGFSWNQRGECPSFETDCVITIDDIYKWLISTFFLWFVLAIYFDNILPNVNGVRKSVFYFLMPSYWTGKGGKMEEGGLFSFFGSSRPADDATPTDEDVLAEQNLVKEQAANNAVDPNVAVQIHGLRKTYPGTFSIGCCCKCSKSKPFHSVKGLWVNLEKDQLFCLLGPNGAGKTTTISCLTGITPITGGDAFIYGHSVRSTVGMSNIRRMIGVCPQFDILWDALTAKEHMELFASIKGLHPAAITSVAEESLAKVKLSQVTNARAGSYSGGMKRRLSVAIALIGDPKLVFLDEPTTGMDPITRRHVWDIIEEAKKGRAIVLTTHSMEEADILGDRIAIMAKGKLRCIGTSIRLKSKFGTGYIANVNFSGNGHMQSPNINSNTEAPVNPNIEAVKWFFKERLDVNPKEESRTFLTFVIPHHKEPLLTRFFGELQDREGEFGISDIQLGLTTLEEVFLNIAKQAELETSTAEGTLVTLNLSSGTTIQIPKGARFVGIPGTETEEHPRGIMVEVYWDQDENGSLCISGHSDEMPVPVHAELRRPPSLSRRASMDRGRPVGYMIDLNQVP

SEQ ID NO: 158984 - protein, 645 aa, Zea Mays
MMFHFAFMISTFVAKAASATTVGFAIFIIGFLTQLVTTFGFPYSSDYKKLYRTLWSLFPPDLFAKALNILGKATATPEDKGFSWNQRGECPSFETDCVITIDDIYKWLISTFFLWFVLAIYFDNILPNVNGVRKSVFYFLMPSYWTGKGGKMEEGGLFSFFGSSRPADDATPTDEDVLAEQNLVKEQAANNAVDPNVAVQIHGLRKTYPGTFSIGCCCKCSKSKPFHSVKGLWVNLEKDQLFCLLGPNGAGKTTTISCLTGITPITGGDAFIYGHSVRSTVGMSNIRRMIGVCPQFDILWDALTAKEHMELFASIKGLHPAAITSVAEESLAKVKLSQVTNARAGSYSGGMKRRLSVAIALIGDPKLVFLDEPTTGMDPITRRHVWDIIEEAKKGRAIVLTTHSMEEADILGDRIAIMAKGKLRCIGTSIRLKSKFGTGYIANVNFSGNGHMQSPNINSNTEAPVNPNIEAVKWFFKERLDVNPKEESRTFLTFVIPHHKEPLLTRFFGELQDREGEFGISDIQLGLTTLEEVFLNIAKQAELETSTAEGTLVTLNLSSGTTIQIPKGARFVGIPGTETEEHPRGIMVEVYWDQDENGSLCISGHSDEMPVPVHAELRRPPSLSRRASMDRGRPVGYMIDLNQVP

SEQ ID NO: 158985 - protein, 548 aa, Zea Mays
MRVLLPGYLAVESLFPEWNNWTQFLDETTSGLRLDALAESHPIEVEVNHASEIDAIFDSISYDKGASVIRMLQSYLGAECFQKALASYIKKYAYSNAKTEDLWVVLEEESGEPVKDLMTTWTKQQGYPVIYAKINGHDLELEQAQFLSDGSSGPGMWIVPVTACCGSYDAQKKFLLKDKMDKINIKEFSDSQSADGEKNQIIWIKLNIDQTGFYRVKYDDELAAGLVNAIKAKKLSLMDKIGIVEDSYALSVACKQTLTSLLRLLNAYNDESDYTVLSHVTSVCLSISKITVDATPDLNKDIKQLLINLLLPAVIKLGWDPKDGESHLDVMLRSLLLTALVRLGHNETINEGVRRFHIFFEDGKTSLLPPDTRKAAYLAVMRTVSTSSRSGFDALLKIYREASEPQEKSRVLGSLSSSPDQDIVLEALNFMFTDEVRNQDSFYILGGISLEGREIAWTWLKENWDHVLKTWKSSSLISDFIESIVPRFTSEEKAVEVTEFFAGQVKPSFERALKQSLERVRISARWIESIRSEPKLGQTVQELLQADA

SEQ ID NO: 158986 - protein, 136 aa, Zea Mays
MILEALRHSQTRAREADMAAKKAYNEKDDVIKLLLRQASHLFACNQWLKIMQLENIVLQLKNKEHQIAAIIPELPWLTLKEKPTQGQGQRDWTRRKGRRQKKAAGFFDAILFAVGLGLAGAGFLLGWTLGWLLPKF

SEQ ID NO: 158987 - protein, 191 aa, Zea Mays
MVSPAFTKYSLETGLEEMKTVGSYSQVSKCIETLSNCLYKDNEFPDFECIDPAPLKNPDKANFDIDAPWKGEKTRPWWQIADEDQLASLVAERATQHIENCDLPRPTQTVRINRTEPYTQKHIGDFGGPSSPAGRVSHPVPGHCDHIECTYSTGSTDELVLLYGNGVWEQHGSSDTYRCAFFSLAALPSRH

SEQ ID NO: 158988 - protein, 298 aa, Zea Mays
MAAAEARAAWQRAANRCLVQEDRKRAPKLACCPSSAEQHDVRWWVQSQPNFGIQKDIVSKRLCSLGRDIHEKQVEDSVPQPKHEETLLCQAVDTSTEKIGDALEPPWMVSPAFTKYSLETGLEEMKTVGSYSQVSKCIETLSNCLYKDNEFPDFECIDPAPLKNPDKANFDIDAPWKGEKTRPWWQIADEDQLASLVAERATQHIENCDLPRPTQTVRINRTEPYTQKHIGDFGGPSSPAGRVSHPVPGHCDHIECTYSTGSTDELVLLYGNGVWEQHGSSDTYRCAFFSLAALPSRH

SEQ ID NO: 158989 - protein, 146 aa, Zea Mays
MRDAEAASRRRWTLVLVNMASVLEKADEVLLPAVYKEVGTALGASPTALGSLTLCRALVQAACYPLAAYASARHDRARVVAVGAFLWAAATFLVAVSGSFLQSHLRGDCAGEGEDDGLRTGQVFRSSVRVVCVSHRRCSCRARVRL

SEQ ID NO: 158990 - protein, 117 aa, Zea Mays
MVPGDLFFPMTLTAVVLLWRVSAPCSAPCPIFLARPLLASRVLFKLGAPCSPSPASPAQIHGALDDRSSHPWSHSGFPLFALMSKRLASHVPVMSFVASARSHPLGPLCLRATPAAS

SEQ ID NO: 158991 - protein, 107 aa, Zea Mays
MRARDLLGFPPAGAAMSSAAALLLLPLLTVAGQGPVCQRPPVAAVILQQASTCRAVDAPGLRGHRAGFVESIVKVWSSCIPDDFPSELYSACALSWISGHEFRCYVL

SEQ ID NO: 158992 - protein, 238 aa, Zea Mays
MRARDLLGFPPAGAAMSSAAALLLLPLLTVAGQGPVCQRPPVAAVILQQAVALVLQNREDFVAILFYASWCPFSKIFRTDFQKLSSFFPTIAHFSFEESNIKPRVLSRYGVRAFPTIFLLNSTVRVRYHGSRAMNSVAMFYKDVTGLNPVSLDATCLERMEDSVTIVDHGKKAEKDDSLLSWARSPDRLLHQDTCLALASSFVLLRLLHFLLPKLNACMKQAWRMRLYELNRLFPSLS

SEQ ID NO: 158993 - protein, 145 aa, Zea Mays
MQLKLQYLNCRVLSRYGVRAFPTIFLLNSTVRVRYHGSRAMNSVAMFYKDVTGLNPVSLDATCLERMEDSVTIVDHGKKAEKDDSLLSWARSPDRLLHQDTCLALASSFVLLRLLHFLLPKLNACMKQAWRMRLYELNRLFPSLS

SEQ ID NO: 158994 - protein, 386 aa, Zea Mays
MEDRVFQELPDDFWDTPLARTSYKNSVGDGDSKKNRSSDVKKRKRMKHVNTSTDRNVLNSQDNVSSVMERHFLHLSSHTTSKSTSKQKENLSHLLHNEVPIRMGERNDLTENFENDSLSDSFSEPQISDTLCVEAQRKFTKTSAPSSSLRQSTMDSLYEFGETSRHEPAGKKEQDNVELRKTSRSFLPFDMSGQEPPFCTQEQVDKCSFGTLADDEMGYDNKPMEKSSNLERQTELSCVICWTDFSSTRGILPCGHRFCYSCIQGWSDCLASRGKVSTCPLCKASFTWISKVDEAGTLDQKVYSQTIPCEASTDVFVLGSEGYDFSGPTSGQGACYQCHFREPEELLLSCHVCRSLWVHSYCLDPPLTPWTCMHCRDLRVLFHRYR

SEQ ID NO: 158995 - protein, 500 aa, Zea Mays
MPIDGMVSVVATVSGYHGDERHRLVNLIAETGASYVGSMSRSITHLVCWRLEGKKYDIARRLGTLVVSHWWFTECLREGRRLPVDSYLMVSGEEAGPVPELPTRSRTQGKKSAIMEDRVFQELPDDFWDTPLARTSYKNSVGDGDSKKNRSSDVKKRKRMKHVNTSTDRNVLNSQDNVSSVMERHFLHLSSHTTSKSTSKQKENLSHLLHNEVPIRMGERNDLTENFENDSLSDSFSEPQISDTLCVEAQRKFTKTSAPSSSLRQSTMDSLYEFGETSRHEPAGKKEQDNVELRKTSRSFLPFDMSGQEPPFCTQEQVDKCSFGTLADDEMGYDNKPMEKSSNLERQTELSCVICWTDFSSTRGILPCGHRFCYSCIQGWSDCLASRGKVSTCPLCKASFTWISKVDEAGTLDQKVYSQTIPCEASTDVFVLGSEGYDFSGPTSGQGACYQCHFREPEELLLSCHVCRSLWVHSYCLDPPLTPWTCMHCRDLRVLFHRYR

SEQ ID NO: 158996 - protein, 341 aa, Zea Mays
MKHVNTSTDRNVLNSQDNVSSVMERHFLHLSSHTTSKSTSKQKENLSHLLHNEVPIRMGERNDLTENFENDSLSDSFSEPQISDTLCVEAQRKFTKTSAPSSSLRQSTMDSLYEFGETSRHEPAGKKEQDNVELRKTSRSFLPFDMSGQEPPFCTQEQVDKCSFGTLADDEMGYDNKPMEKSSNLERQTELSCVICWTDFSSTRGILPCGHRFCYSCIQGWSDCLASRGKVSTCPLCKASFTWISKVDEAGTLDQKVYSQTIPCEASTDVFVLGSEGYDFSGPTSGQGACYQCHFREPEELLLSCHVCRSLWVHSYCLDPPLTPWTCMHCRDLRVLFHRYR

SEQ ID NO: 158997 - protein, 163 aa, Zea Mays
MAMSLSRFSQWIWPGSRTRNPRGREPPAGSTALTEGLFPDSPSGFRDPDPGSGAAQRRKGKSRRRGGRVEAKVDGEHGMVIVQSDGDGCLSDSDSDGSDWSIGWLEPLAPDLQSDVDSEGSFAVLVRCYRRGRADRPDRPDGKFPAPGGVAHGHGGVSGTIKE

SEQ ID NO: 158998 - protein, 261 aa, Zea Mays
MAGSPRHLSLFPLRLLLLLPLLAAGKPVLEDGYTVTTFADLNPLPASGPHPYAVLPRSRAGDLLLLDSAGSALYTISLSSSPGEPRRLAGGKRGSGFNDGGPGDAAFDRPRSVAVDAADNVYVADRLHGAVRKVAPSGYTTTIAGGFSSGPGHRDGPAQNATFSPDFALVYVPKICALLVADRGNRMVRQINLKPEDCAHEKQSGLGNTLVSFIAVLCTLLGSLIGFLARHFYPVNDTEAIPEDTEEGNSDQLLRHKKRSC

SEQ ID NO: 158999 - protein, 331 aa, Zea Mays
MLIFSQYLPHAVHAAKPVFDRFSVIFTIAIVWLYAYILTVSGAYKSARTKTQLHCRVDRSGLVGGAPWISVPYPFQWGAPTFDAGESFAMMVAAFVALVESSGAFIAVSRYASATMIPPSVLGRGIGWQGIGTLLGAFFGTANGTAVSVENAGLLALTHVGSRRVVQISAGFMIFFSVLGKFGAIFASIPLPIFAALYCILFAYIGACGLSFLQFCNLNSFRTKFIMGFSLFMGLSVPQYFNEYTSVAGYGPVHTGARWFNDMINVPFSSKPFVAVLVAFLLDNTIQVRDSGVRRDRGYHWWDKFRSFKTDSRSEEFYSLPFNLNKFFPSV

SEQ ID NO: 159000 - protein, 531 aa, Zea Mays
MAGGGAAPPPKQEELQPHPVKDQLPSVSYCITSPPPWPEAVILGFQHYIVMLGTSVIIPSALVPQMGGGNEEKARVIQTLLFVAGINTLCQSFFGTRLPAVMGGSYTIVAPTISIIMAGRYSNEADPREKFLRTMRGTQGALIIASTIQIVLGFSGLWRNVVKLLSPLSAVPLVSLAGFGLYELGFPGVAKCVEIGLPEIILMLIFSQYLPHAVHAAKPVFDRFSVIFTIAIVWLYAYILTVSGAYKSARTKTQLHCRVDRSGLVGGAPCVPYPFQWGAPTFDAGESFAMMVAAFVALVESSGAFIAVSRYASATMIPPSVLGRGIGWQGIGTLLGAFFGTANGTAVSVENAGLLALTHVGSRRVVQISAGFMIFFSVLGKFGAIFASIPLPIFAALYCILFAYIGACGLSFLQFCNLNSFRTKFIMGFSLFMGLSVPQYFNEYTSVAGYGPVHTGARWFNDMINVPFSSKPFVAVLVAFLLDNTIQVRDSGVRRDRGYHWWDKFRSFKTDSRSEEFYSLPFNLNKFFPSV

SEQ ID NO: 159001 - protein, 291 aa, Zea Mays
MAGTVTATATTATTEVGTTVTAATSEMEATATAATSELEATATAAAIGPPSAIPDKYMHKNRLQSFAERTYKKTPIYKVESEGQSHQPKFTCTVEVGDQQFSSTGSFSRKKEAEQDAARVAYEILTTVSESDVKEAFELIDQPLTLFAAIVVFDGNAYHGESAPNKKDAEQNAARVVIKSILAKHDTCMVRIVRSKKQLITAVRSSGNTPATFTPIQFTRPVSYAAYGRPDDTTPVLPNESSSLAVQRGINVVPAVGTSVNPSSANVSRSKKRKGRVEGAGGNDTWVAKGH

SEQ ID NO: 159002 - protein, 927 aa, Zea Mays
MLLKCPEALKHYLSAGEKLYKMSSKIYKEICYFEASIKRPFFNVKTLDDDQLENWHQYLDFVEKNGDFDWAVKLYERCLIPCANYSEFWIRYSEYVDAKGGREIANHALGRASSCFAKEVPAFCMYYALFKEQIGDALVARSVFTKTRSYFTSGFYANINRLANMEKRMGNTKAASEIYETAIEDAMQKNNIELLPDLYSNFAQFIYVASHSIIQAKQVFVDGINRAPCKPLIKGFIQFMSTHGGPKDIPLLDSVISNAVTPGSDVSTALSREDREDISLLFLEFVDLYGGIKELRKAWARHSILFPHSTGNISRHYSTMGNSLQETKKRRNTEPLMIARDHSLEDTMKLKQTLKTDDFSLIVDKESEPQVDKDIVDSGKRHGDAGAQKALDLVNSHKETITTAQECTDMVYSEHILDKNRIEKQMNSHAKEDINQDLILHEQNDEKTNSHEAETPVAESGDCDSPSKAIASSENINFQGKVIEVSASSHLETVCSKYDSPSGPNMHKEGSSSGPARISPELEERHHVEVQVKVDTEHHFSVSNANLEISFDGPNPTECDKEISAIGHGSQDYIQSSQSHQLSACAKPWSLDSAKTKSDTVSIQAQLRNQLENAQTYQSNNLSQNMQQQELTMPHNVQTSAQIQDQLLAQPNHRNQQYLQMMQGYATQMGEYYQQQLYYLQAQHNQQMQSLQQQQLPTEHLQQTFMQQVQQLNQQLVLWQQQVQQQPQVVLQQALPVQQLPDEKQGQCPSGDSKHGQNKQQQQAPQMDQQSQQLQQQQLLYLQQQQQMYLIQQQQMYQQQQAQQQQLLQQQLMQQQQYVLQMPQHQQDSVRQQQQQLFEQQQQQMMLLQRQQQHIMQQQIQPYVQQQQNQQGPKDQTYKSNHQDGRNRQMEHGQLSEASQSDGSKLRSGEQSELSYPSTPQSERSNH

SEQ ID NO: 159003 - protein, 767 aa, Zea Mays
MYYALFKEQIGDALVARSVFTKTRSYFTSGFYANINRLANMEKRMGNTKAASEIYETAIEDAMQKNNIELLPDLYSNFAQFIYVASHSIIQAKQVFVDGINRAPCKPLIKGFIQFMSTHGGPKDIPLLDSVISNAVTPGSDVSTALSREDREDISLLFLEFVDLYGGIKELRKAWARHSILFPHSTGNISRHYSTMGNSLQETKKRRNTEPLMIARDHSLEDTMKLKQTLKTDDFSLIVDKESEPQVDKDIVDSGKRHGDAGAQKALDLVNSHKETITTAQECTDMVYSEHILDKNRIEKQMNSHAKEDINQDLILHEQNDEKTNSHEAETPVAESGDCDSPSKAIASSENINFQGKVIEVSASSHLETVCSKYDSPSGPNMHKEGSSSGPARISPELEERHHVEVQVKVDTEHHFSVSNANLEISFDGPNPTECDKEISAIGHGSQDYIQSSQSHQLSACAKPWSLDSAKTKSDTVSIQAQLRNQLENAQTYQSNNLSQNMQQQELTMPHNVQTSAQIQDQLLAQPNHRNQQYLQMMQGYATQMGEYYQQQLYYLQAQHNQQMQSLQQQQLPTEHLQQTFMQQVQQLNQQLVLWQQQVQQQPQVVLQQALPVQQLPDEKQGQCPSGDSKHGQNKQQQQAPQMDQQSQQLQQQQLLYLQQQQQMYLIQQQQMYQQQQAQQQQLLQQQLMQQQQYVLQMPQHQQDSVRQQQQQLFEQQQQQMMLLQRQQQHIMQQQIQPYVQQQQNQQGPKDQTYKSNHQIQLVHHFA

SEQ ID NO: 159004 - protein, 1089 aa, Zea Mays
MATLAPPAVEVEPEADAMALASEAAAPELPSSHSQLDFFKTRVQLLCESNTRDFDAWVSLINAAEGTSADDIEVMSLVYHNFLLEFPLCYGYWIKYAAHKARLCTTRYVMDVYEQAVHAVPHSVDIWVNYCEFGICAFEEPAHVRSLFERALSLVGKDYLCYHLWDKYIEFESSQKQLIHLATIFINTLKFPTKKLHMYYESFRKFVTLLEQEVTSCVAEILSEKVHASEMVGTEGSELDISTIIADLFDQKGGHLSPEALKHYLSAGEKLYKMSSKIYKEICYFEASIKRPFFNVKTLDDDQLENWHQYLDFVEKNGDFDWAVKLYERCLIPCANYSEFWIRYSEYVDAKGGREIANHALGRASSCFAKASHSIIQAKQVFVDGINRAPCKPLIKGFIQFMSTHGGPKDIPLLDSVISNAVTPGSDVSTALSREDREDISLLFLEFVDLYGGIKELRKAWARHSILFPHSTGNISRHYSTMGNSLQETKKRRNTEPLMIARDHSLEDTMKLKQTLKTDDFSLIVDKESEPQVDKDIVDSGKRHGDAGAQKALDLVNSHKETITTAQECTDMVYSEHILDKNRIEKQMNSHAKEDINQDLILHEQNDEKTNSHEAETPVAESGDCDSPSKAIASSENINFQGKVIEVSASSHLETVCSKYDSPSGPNMHKEGSSSGPARISPELEERHHVEVQVKVDTEHHFSVSNANLEISFDGPNPTECDKEISAIGHGSQDYIQSSQSHQLSACAKPWSLDSAKTKSDTVSIQAQLRNQLENAQTYQSNNLSQNMQQQELTMPHNVQTSAQIQDQLLAQPNHRNQQYLQMMQGYATQMGEYYQQQLYYLQAQHNQQMQSLQQQQLPTEHLQQTFMQQVQQLNQQLVLWQQQVQQQPQVVLQQALPVQQLPDEKQGQCPSGDSKHGQNKQQQQAPQMDQQSQQLQQQQLLYLQQQQQMYLIQQQQMYQQQQAQQQQLLQQQLMQQQQYVLQMPQHQQDSVRQQQQQLFEQQQQQMMLLQRQQQHIMQQQIQPYVQQQQNQQGPKDQTYKSNHQDGRNRQMEHGQLSEASQSDGSKLRSGEQSELSYPSTPQSERSNH

SEQ ID NO: 159005 - protein, 775 aa, Zea Mays
MSSKIYKEICYFEASIKRPFFNVKTLDDDQLENWHQYLDFVEKNGDFDWAVKLYERCLIPCANYSEFWIRYSEYVDAKGGREIANHALGRASSCFAKEVPAFCMYYALFKEQIGDALVARSVFTKTRSYFTSGFYANINRLANMEKRMGNTKAASEIYETAIEDAMQKNNIELLPDLYSNFAQFIYVASHSIIQAKQVFVDGINRAPCKPLIKGFIQFMSTHGGPKDIPLLDSVISNAVTPGSDVSTALSREDREDISLLFLEFVDLYGGIKELRKAWARHSILFPHSTGNISRHYSTMGNSLQETKKRRNTEPLMIARDHSLEDTMKLKQTLKTDDFSLIVDKESEPQVDKDIVDSGKRHGDAGAQKALDLVNSHKETITTAQECTDMVYSEHILDKNRIEKQMNSHAKEDINQDLILHEQNDEKTNSHEAETPVAESGDCDSPSKAIASSENINFQGKVIEVSASSHLETVCSKYDSPSGPNMHKEGSSSGPARISPELEERHHVEVQVKVDTEHHFSVSNANLEISFDGPNPTECDKEISAIGHGSQDYIQSSQSHQLSACAKPWSLDSAKTKSDTVSIQAQLRNQLENAQTYQSNNLSQNMQQQELTMPHNVQTSAQIQDQLLAQPNHRNQQYLQMMQGYATQMGEYYQQQLYYLQAQHNQQMQSLQQQQLPTEHLQQTFMQQVQQLNQQLVLWQQQVQQQPQVVLQQALPVQQLPDEKQGQCPSGDSKHGQNKQQQQAPQMDQQSQQLQQQQLLYLQQQQQMYLIQQQQM

SEQ ID NO: 159006 - protein, 580 aa, Zea Mays
MATLAPPAVEVEPEADAMALASEAAAPELPSSHSQLDFFKTRVQLLCESNTRDFDAWVSLINAAEGTSADDIEVMSLVYHNFLLEFPLCYGYWIKYAAHKARLCTTRYVMDVYEQAVHAVPHSVDIWVNYCEFGICAFEEPAHVRSLFERALSLVGKDYLCYHLWDKYIEFESSQKQLIHLATIFINTLKFPTKKLHMYYESFRKFVTLLEQEVTSCVAEILSEKVHASEMVGTEGSELDISTIIADLFDQKGGHLSPEALKHYLSAGEKLYKMSSKIYKEICYFEASIKRPFFNVKTLDDDQLENWHQYLDFVEKNGDFDWAVKLYERCLIPCANYSEFWIRYSEYVDAKGGREIANHALGRASSCFAKEVPAFCMYYALFKEQIGDALVARSVFTKTRSYFTSGFYANINRLANMEKRMGNTKAASEIYETAIEDAMQKNNIELLPDLYSNFAQFIYVASHSIIQAKQVFVDGINRAPCKPLIKGFIQFMSTHGGPKDIPLLDSVISNAVTPGSDVSTALSREDREDISLLFLEDGRNRQMEHGQLSEASQSDGSKLRSGEQSELSYPSTPQSERSNH

SEQ ID NO: 159007 - protein, 766 aa, Zea Mays
MFCEGFYANINRLANMEKRMGNTKAASEIYETAIEDAMQKNNIELLPDLYSNFAQFIYVASHSIIQAKQVFVDGINRAPCKPLIKGFIQFMSTHGGPKDIPLLDSVISNAVTPGSDVSTALSREDREDISLLFLEFVDLYGGIKELRKAWARHSILFPHSTGNISRHYSTMGNSLQETKKRRNTEPLMIARDHSLEDTMKLKQTLKTDDFSLIVDKESEPQVDKDIVDSGKRHGDAGAQKALDLVNSHKETITTAQECTDMVYSEHILDKNRIEKQMNSHAKEDINQDLILHEQNDEKTNSHEAETPVAESGDCDSPSKAIASSENINFQGKVIEVSASSHLETVCSKYDSPSGPNMHKEGSSSGPARISPELEERHHVEVQVKVDTEHHFSVSNANLEISFDGPNPTECDKEISAIGHGSQDYIQSSQSHQLSACAKPWSLDSAKTKSDTVSIQAQLRNQLENAQTYQSNNLSQNMQQQELTMPHNVQTSAQIQDQLLAQPNHRNQQYLQMMQGYATQMGEYYQQQLYYLQAQHNQQMQSLQQQQLPTEHLQQTFMQQVQQLNQQLVLWQQQVQQQPQVVLQQALPVQQLPDEKQGQCPSGDSKHGQNKQQQQAPQMDQQSQQLQQQQLLYLQQQQQMYLIQQQQMYQQQQAQQQQLLQQQLMQQQQYVLQMPQHQQDSVRQQQQQLFEQQQQQMMLLQRQQQHIMQQQIQPYVQQQQNQQGPKDQTYKSNHQTCEVQGHHNKQQSCAYGPSGWKEQANGAWTTV

SEQ ID NO: 159008 - protein, 263 aa, Zea Mays
MPGPTPSSTPPAAAANPSHNSRRKRKPRPKTAPPSALNPNWALLQSKLPHRPAATHLGKRKHDGATPAPAEPSPPPTAQEVRLEPTSDDTSLTKVVAIDCEMVGVGFDGGKSALGRVTLVNSFGNIVYDEYVRAVERIVDYRTWISGIRPKHMNKAKEFWAVQKEVAELIKGRILVGHALHNDLKVLLLSHPKKDIRDTSEYEVFRRERKRRSLKDLAAEVLDRGCESCDAHLQQAQESMGEEHEGTVQIQKEAQEARQEENY

SEQ ID NO: 159009 - protein, 187 aa, Zea Mays
MVGVGFDGGKSALGRVTLVNSFGNIVYDEYVRAVERIVDYRTWISGIRPKHMNKAKEFWAVQKEVAELIKGRILVGHALHNDLKVLLLSHPKKDIRDTSEYEVFRRERKRRSLKDLAAEVLGAKIQQNEHCPIEDARAAMLIYNKHKKAWEKNMKEQFRFKKKLKKRGKKKTTESNGNDPNVPTVLL

SEQ ID NO: 159010 - protein, 159 aa, Zea Mays
MPGPTPSSTPPAAAANPSHNSRRKRKPRPKTAPPSALNPNWALLQSKLPHRPAATHLGKRKHDGATPAPAEPSPPPTAQEVRLEPTSDDTSLTKVVAIDCEMVGVGFDGGKSALGRVTLVNSFGNIVYDEYVRAVERIVDYRTWISGIRPKHMNKEGSS

SEQ ID NO: 159011 - protein, 143 aa, Zea Mays
MASSLSRALLRRVAELARGRLRANHRMLSSASSTAAIERASQLPAEAQAVRMTEGCVRMLRLSVEAGGCSGFQYSFALDDKKNADDRFFETDGVRLVVDDISYNFVKGATVDYEEELIRSTFVVSTNPSAVGGCSCKSSFMVK

SEQ ID NO: 159012 - protein, 171 aa, Zea Mays
MSSSNQMCSDGKFGREIRKGEGMELDQLFQNSCSSEKTAYIQPFDMETLGQAFQLRETAPVDLPSAEKGTPTISGKSKVKSKDKVKKHKKHKEKDRDKEKEQKKHKHRHKDRSKDKDKDKDKDKEKKKDKSGNHDLGGDHSKKHEKKRKQEVTGSSANVQNHKKTQKHKIQ

SEQ ID NO: 159013 - protein, 171 aa, Zea Mays
MRKYPVHSNGLLDPPKVLCDIVESLIGAIYLDSNFDQEEVWRVFRTLADPLIGLETLGKHPVSELFEFCQKTHRGVKFLKDEWDKSLKVQVLIDGEVVGSAIYGPKKEIAQNRAAKDALDKLKDTHGHTQSESASVDVSEALDELDNTQSESASVDVSEALDELDIAGTLN

SEQ ID NO: 159014 - protein, 168 aa, Zea Mays
MSWERDERNSRISAEISPSPAYITWCRSSPPINEPADLQFVTARGEENPSWPRREGENGSWPIFVAPSTGLLYCALALPLACGRVSEAAPSGILARVFGIARRCQCAAAKPVSTVGKAGHYSTLGRLGRRISCAPVRFPSWGRWLSPPWWEPKRMTTVLPLIGYKRRY

SEQ ID NO: 159015 - protein, 136 aa, Zea Mays
MSWERDERNSRISAEISPSPAYITWCRSSPPINEPADLQFVTARGEENPSWPRREGENGSWPIFVAPSTGLLYCALALPLACGRVSEAAPSGILARVFGIARRCQCAAAKPVSTVGKAGHYSTLEARSRETRRSTW

SEQ ID NO: 159016 - protein, 132 aa, Zea Mays
MSWERDERNSRISAEISPSPAYITWCRSSPPINEPADLQFVTARGEENPSWPRREGENGSWPIFVAPSTGLLYCALALPLACGRVSEAAPSGILARVFGIARRCQCAAAKPVSTVGKAGHYSTLGQEQVPPR

SEQ ID NO: 159017 - protein, 128 aa, Zea Mays
MVLAKPEVWPWLIRAHPKVSKFRNKPFPLFYSLEGLYEAPSRSVSGQSPNPLSTNSLDLDGQETTSVFNLSTNAHSVPVSTNEPTEAQFVPSNQESSQREGASGRKRKQSHVGLALKVMWSLKRSIFY

SEQ ID NO: 159018 - protein, 215 aa, Zea Mays
MARLPDAILATPTPASRPSSPTPSPSASAAAPHPLPLYKVILISSRLHQQVRQFLLDEEEDDDELFFAILPAIIPYLSEEKEPIHTSSLTGAKKVREILEGHESWCKSEFQMEPAIFETTTNFLRRENLLRDTRGVIVEKQLGMFMYMISNNASNQMLQKAFQHSGETIHRKISEVFDIVPTLTQCFVKLPSSIQTHTKIATDSRFMPFLGELSI

SEQ ID NO: 159019 - protein, 380 aa, Zea Mays
MLLQPIPTATLAARPRSSEASFPFRCHRRRRVLLPVRADLTPISLSASAPSRPAKPAVCTADELHYASVDGAGWRLALWRYRPPRNAPVRNHPLMLLSGVGTNAVGFDLSPGASFARHMSSQGFDTWIVEVRGAGLSMREYDDSTPSGSVTFEDVSSGIQPLNSTFEATSIQSSGGYASDCDDLGIVALDEPPLLAELSNFFDRISKLMEEAVVNGNFHEITEKVSVLSEMVESSTIIGPVREESLRLLKNFQDQLDSWERFVATQMDLTSEYNWDFDHYLEEDIPAALEYIKQHSRAKDGKLLAIGHSMGGILLYAMLSRSGFEGVSSNLAAIVTLASSVDYTTSNSSLKLLLPLRRIRGHLVHHIFFPGLILKYQLRT

SEQ ID NO: 159020 - protein, 109 aa, Zea Mays
MDTIGPHVLIVDDTFVDRLVASRVLKTCNIQVTMVEGPKQALDFLDVENDVNLILTDYCMPGMTGYDLLMEVKESPKLKHIPVVVMSSDHIPQRMQKGKGIHHKAYQSY

SEQ ID NO: 159021 - protein, 305 aa, Zea Mays
MQSAAAFRPCPTRLLVSSPCRPLLSARPLRASAAGAVATRSSAVGPRGLGLGLLPASPDRDGKCRQRQVSCSAAGDAVAAPKAEEGGGLMKTLWLGSLFGLWYLFNIYFNIYNKQVLKVFPYPINITEVQFAVGTVAALFMWITGIIKRPKISGAQLVAILPLAIVHTMGNLFTNMSLGKVAVSFTHTIKAMEPFFSVILSAIFLGELPTIWVVSSLLPIVGGVALASLTEASFNWAGFWSAMASNVTFQSRNVLSKKLMVKKEESLDNLNLFSIITVMSFFLLAPVTFFTEGVKITPTFLQSAV

SEQ ID NO: 159022 - protein, 368 aa, Zea Mays
MQSAAAFRPCPTRLLVSSPCRPLLSARPLRASAAGAVATRSSAVGPRGLGLGLLPASPDRDGKCRQRQVSCSAAGDAVAAPKAEEGGGLMKTLWLGSLFGLWYLFNIYFNIYNKQVLKVFPYPINITEVQFAVGTVAALFMWITGIIKRPKISGAQLVAILPLAIVHTMGNLFTNMSLGKVAVSFTHTIKAMEPFFSVILSAIFLGELPTIWVVSSLLPIVGGVALASLTEASFNWAGFWSAMASNVTFQSRNVLSKKLMVKKEESLDNLNLFSIITGLNVNQVLTRCLFAGLCFHAYQQVSYMILAMVSPVTHSVGNCVKRVVVIVTSVLFFRTPVSPINSLGTAIALAGVFLYSQLKRLKPKPKTA

SEQ ID NO: 159023 - protein, 435 aa, Zea Mays
MAQDGRARESSSKAASAGSGGCSMPFRLNVHAREFVPVASPLAAAAAGGGYYSPFVQLSGDGGLGTDWMNFFAEPDPTSPSSFLPDFGHCDILRATGGINGYPNPKGGASVADIADKIVKQVEYQFSDTNLVANDFLTKIMNKDPEGYVPLSVISSWKKIKAMGVTSQLLVMALRTSDKLVVSDDGRKVRRAQPFTERHKEELQCRMVIAENLPQDSTRNSLEKIFGVIGSVKNIRICHPQEPGSARSSPRSSDTNTPASNKLHALIEYETSHQADRAVDKLNDERNWRKGLRVRPVLRRSPKTVARMKRPDLDHHVAASDEERVSTSDSPTATAAAHPPDNTQQQQEEEEEDQHQHQHGGAKKPWGSRGRGRPPPHSSAHSAGAPGHSVDSLAASPRHAAQGPRMPDGTRGFTMGRGRPAPPAAPSAAAAVRVV

SEQ ID NO: 159024 - protein, 51 aa, Zea Mays
MYQINTSSLLNSYRVFNMHVDSNDRSDKEKIPETTSGVKNAQIYYTYVYAN

SEQ ID NO: 159025 - protein, 111 aa, Zea Mays
MPMPMQCPPKLLEAMVACVAQWCALGRLYRLGSRCGWHQPAPSRCGGRRPSSGSGPPRRCLASPSQCLVGAFLSLVPFPPLVLVSTHLSAVSVSRATSSKLTQTLLPLWAY

SEQ ID NO: 159026 - protein, 159 aa, Zea Mays
MDDPRMFPSGSDDRSDAERRLYNPYQDLNMPYSYRTLYDLPTSPEFLFQEEALAQRRSWGENLTFYTGVGYLSGAVGGAVLGLRDAARGAEPGETAKIRANRVLNACGSSGRRVGNTLGVIGLMYAGIESAMVAGALGGILAAAAAGGKQLAKRYVNVI

SEQ ID NO: 159027 - protein, 317 aa, Zea Mays
MFPSPHRSENHSQARPTSCPCTTHGPRPNGPDSVRRLRAGHPEAPVRQRRVRRWQQQRQRHRREAQGAAAGGGPGGGAGRGAARVRRARRREHVHRGVGDVHGDGAGHDAAAVRGRAGPRPRRHVHLQPALQPDGAGAGAADGGAGGHGGGLLHGVRDVRHLVRADAAGGRRRARGGVAVPVRRDTRAAGPVPAARLRGARHLRGRRRRGRRARRGGPRRDAGGVRGDHVQPDARRRRHPHAGAGGARGRRQARGGQHLHPRGGVARAPRRRRRRPQRLQVHQRRRRHHRRSSALHRVAFVLAPDPATYDEPHGVRT

SEQ ID NO: 159028 - protein, 57 aa, Zea Mays
MSDYDMTHVSTAASLSPVAVDQFGNGGSTCAFTLSSQKFHCQGFCWAQIAKLICALD

SEQ ID NO: 159029 - protein, 388 aa, Zea Mays
MRRGVPAQSLEHDGLEVRHPVRVLLADLRLVVAARCPDLAVELLLRVRVLHQLGHDPLQRGGRRVGACGEEFGAEVGHLVVSERAVPLLGKPDVEQRVHVRVLERRRLLSWRHRGRGTALVLDPLLEHSARMDQWHEELLLPLSSGKPLLEAAAQEDPSQCRPEREQARVLGHEHEPAVLRGRDGAHRGLVQPLAEAHEHEEAEHGVPERLHRGGRRLGPRLRLLGLPPELLSEHAAHPRARRREQLHPRRVQRLGDEVAAQEAPHGPVAGPRDGVAALPQERARDRGAVGERGPALDQGRVRDAAVSDEDRQARPCPQGHDGAVTRDEAPEQRLHVGRVAPQQQQVAEERQTRWARREPGAVLALAGPVPLPEQDGGERQEEEGGEE

SEQ ID NO: 159030 - protein, 806 aa, Zea Mays
MSSRPSSSSSSRRSSSPFSAGHRRPPTASSSSSSSYFSSGRLIPRSSPSSASSSFYGGGGGGSTRSTTPGRRSSSVAPAPTPAPALAPVPFSSSDELVIEDTSRSGDSISVTIRFRPLSEREFQRGDEISWYPDGDRLVRCEYNPATAYAYDRVFGPSTTTEAVYDVAARPVVKGAMEGINGTVFAYGVTSSGKTHTMHGEHNCPGIIPLAIKDVFSMIQDSPGREFLLRVSYLEIYNEVINDLLDPTGQNLRVREDAQGTYVEGIKEEVVLSPGHALSFIAAGEEHRHVGSNNFNLFSSRSHTIFTLMIESSARGDEYDGVMYSQLNLIDLAGSESSKTETTGLRRREGSYINKSLLTLGTVIGKLSEGRATHIPYRDSKLTRLLQSSLSGHGHVSLICTITPASSNMEETHNTLKFASRAKRVEIYASRNRIIDEKSLIKKYQKEISSLKQELDQLRRGIVGGASQEEIMSLRQQLEEGQVKMQSRLEEEEEAKAALMSRIQRLTKLILVSTKNNIPALTDGHQRHNSVSEQDKLSTSQDSSTLVQNEGTTKDHLPDSLDEINQLRSGSGEHSSATCSATDSMQAGFTASDHMDLLIEQIKMLAGEVAFGTSSLKRLIEQSIDDPEGSKDQIENLEREIQQKRRHMRALEKQIMESGEASVANASMVDMQQTITKLTAQCSEKAFELELKSADNRVLQEQLQQKNAEVNDLQEKVFHLEQQLSAKVGISPEQETDCAQQEAIDLKSKLQSKVLLLILFFYFVYSRPWCSIPTCKIWHTLEHGIIHGLCYTFYGFLVDRNSLHVL

SEQ ID NO: 159031 - protein, 852 aa, Zea Mays
MEGINGTVFAYGVTSSGKTHTMHSPGREFLLRVSYLEIYNEVINDLLDPTGQNLRVREDAQGTYVEGIKEEVVLSPGHALSFIAAGEEHRHVGSNNFNLFSSRSHTIFTLMIESSARGDEYDGVMYSQLNLIDLAGSESSKTETTGLRRREGSYINKSLLTLGTVIGKLSEGRATHIPYRDSKLTRLLQSSLSGHGHVSLICTITPASSNMEETHNTLKFASRAKRVEIYASRNRIIDEKSLIKKYQKEISSLKQELDQLRRGIVGGASQEEIMSLRQQLEEGQVKMQSRLEEEEEAKAALMSRIQRLTKLILVSTKNNIPALTDGHQRHNSVSEQDKLSTSQDSSTLVQNEGTTKDHLPDSLDEINQLRSGSGEHSSATCSATDSMQAGFTASDHMDLLIEQIKMLAGEVAFGTSSLKRLIEQSIDDPEGSKDQIENLEREIQQKRRHMRALEKQIMESGEASVANASMVDMQQTITKLTAQCSEKAFELELKSADNRVLQEQLQQKNAEVNDLQEKVFHLEQQLSAKVGISPEQETDCAQQEAIDLKSKLQSKEAEFEKLKFEHLKITEEQCDLINQNHKLSEEAAYAKELASSAAVELKNLAEEVTKLSVLNVKQAKELLVAQEMAHSRVHGRKGRTTSRGRDEVGTWSLDLEDMKIELQARRQREAALEAALAEKELLEEEYKKKFDEAKKKELSLENDLAGMWVLVAKLKRGALGISDFNVDDRTVNLADITNGTKENKGEKNFALVEKQVSEDSVKSLSTEEHRSPEFEPLLVRLKAKIQEMKEKDTDPLSDKDGNSHVCKVCFESATAAVLLPCRHFCLCKPCSLACSECPLCRTRIADRIITFT

SEQ ID NO: 159032 - protein, 418 aa, Zea Mays
MIQDSPGREFLLRVSYLEIYNEVINDLLDPTGQNLRVREDAQGTYVEGIKEEVVLSPGHALSFIAAGEEHRHVGSNNFNLFSSRSHTIFTLMIESSARGDEYDGVMYSQLNLIDLAGSESSKTETTGLRRREGSYINKSLLTLGTVIGKLSEGRATHIPYRDSKLTRLLQSSLSGHGHVSLICTITPASSNMEETHNTLKFASRAKRVEIYASRNRIIDEKSLIKKYQKEISSLKQELDQLRRGIVGGASQEEIMSLRQQLEEGQVKMQSRLEEEEEAKAALMSRIQRLTKLILVSTKNNIPALTDGHQRHNSVSEQDKLSTSQDSSTLVQNEGTTKDHLPDSLDEINQLRSGSGEHSSATCSATDSMQAGFTASDHMDLLIEQIKMLAGEVAFGTSSLKRLIEQSIDDPEGSKDQRI

SEQ ID NO: 159033 - protein, 777 aa, Zea Mays
MLFLLLQRVKMTEHRHVGSNNFNLFSSRSHTIFTLMIESSARGDEYDGVMYSQLNLIDLAGSESSKTETTGLRRREGSYINKSLLTLGTVIGKLSEGRATHIPYRDSKLTRLLQSSLSGHGHVSLICTITPASSNMEETHNTLKFASRAKRVEIYASRNRIIDEKSLIKKYQKEISSLKQELDQLRRGIVGGASQEEIMSLRQQLEEGQVKMQSRLEEEEEAKAALMSRIQRLTKLILVSTKNNIPALTDGHQRHNSVSEQDKLSTSQDSSTLVQNEGTTKDHLPDSLDEINQLRSGSGEHSSATCSATDSMQAGFTASDHMDLLIEQIKMLAGEVAFGTSSLKRLIEQSIDDPEGSKDQIENLEREIQQKRRHMRALEKQIMESGEASVANASMVDMQQTITKLTAQCSEKAFELELKSADNRVLQEQLQQKNAEVNDLQEKVFHLEQQLSAKVGISPEQETDCAQQEAIDLKSKLQSKEAEFEKLKFEHLKITEEQCDLINQNHKLSEEAAYAKELASSAAVELKNLAEEVTKLSVLNVKQAKELLVAQEMAHSRVHGRKGRTTSRGRDEVGTWSLDLEDMKIELQARRQREAALEAALAEKELLEEEYKKKFDEAKKKELSLENDLAGMWVLVAKLKRGALGISDFNVDDRTVNLADITNGTKENKGEKNFALVEKQVSEDSVKSLSTEEHRSPEFEPLLVRLKAKIQEMKEKDTDPLSDKDGNSHVCKVCFESATAAVLLPCRHFCLCKPCSLACSECPLCRTRIADRIITFT

SEQ ID NO: 159034 - protein, 642 aa, Zea Mays
MEETHNTLKFASRAKRVEIYASRNRIIDEKSLIKKYQKEISSLKQELDQLRRGIVGGASQEEIMSLRQQLEEGQVKMQSRLEEEEEAKAALMSRIQRLTKLILVSTKNNIPALTDGHQRHNSVSEQDKLSTSQDSSTLVQNEGTTKDHLPDSLDEINQLRSGSGEHSSATCSATDSMQAGFTASDHMDLLIEQIKMLAGEVAFGTSSLKRLIEQSIDDPEGSKDQIENLEREIQQKRRHMRALEKQIMESGEASVANASMVDMQQTITKLTAQCSEKAFELELKSADNRVLQEQLQQKNAEVNDLQEKVFHLEQQLSAKVGISPEQETDCAQQEAIDLKSKLQSKEAEFEKLKFEHLKITEEQCDLINQNHKLSEEAAYAKELASSAAVELKNLAEEVTKLSVLNVKQAKELLVAQEMAHSRVHGRKGRTTSRGRDEVGTWSLDLEDMKIELQARRQREAALEAALAEKELLEEEYKKKFDEAKKKELSLENDLAGMWVLVAKLKRGALGISDFNVDDRTVNLADITNGTKENKGEKNFALVEKQVSEDSVKSLSTEEHRSPEFEPLLVRLKAKIQEMKEKDTDPLSDKDGNSHVCKVCFESATAAVLLPCRHFCLCKPCSLACSECPLCRTRIADRIITFT

SEQ ID NO: 159035 - protein, 449 aa, Zea Mays
MIESSARGDEYDGVMYSQLNLIDLAGSESSKTETTGLRRREGSYINKSLLTLGTVIGKLSEGRATHIPYRDSKLTRLLQSSLSGHGHVSLICTITPASSNMEETHNTLKFASRAKRVEIYASRNRIIDEKSLIKKYQKEISSLKQELDQLRRGIVGGASQEEIMSLRQQLEEGQVKMQSRLEEEEEAKAALMSRIQRLTKLILVSTKNNIPALTDGHQRHNSVSEQDLSTSQDSSTLVQNEGTTKDHLPDSLDEINQLRSGSGEHSSATCSATDSMQAGFTASDHMDLLIEQIKMLAGEVAFGTSSLKRLIEQSIDDPEGSKDQIENLEREIQQKRRHMRALEKQIMESGEASVANASMVDMQQTITKLTAQCSEKAFELELKSADNRVLQEQLQQKNAEVNDLQEKVFHLEQQLSAKVGISPEQETDCAQQEAIDLKSKLQSKLNSKS

SEQ ID NO: 159036 - protein, 186 aa, Zea Mays
MRGSCVVHWVTQGLGDVWVITNCSPEQFVLPHTTPRHGRLSGEKKGGDSAAAEPQFKLFFTRISGPPPWELHGRWLLLRHHGSNREKTKERESGGLCVVTAAPHRRSGSGEADRDLAAEPTSSQRGEFLGGRRGKHRASGRRGLPHLHQYSGSEVTSHLKIILIPGISSLRQVVPLITSFTHSCSD

SEQ ID NO: 159037 - protein, 416 aa, Zea Mays
MTTAISIEDVRREVKILKALSGHSNLVKFYDACEDALNVYIIMELCEGGELLDRILSRGGRYNEGDAKIIVEQILKVVAFCHLQGVVHRDLKPENFLFSTREEHSPMKIIDFGLSDFIRPDERLNDIVGSAYYVAPEVLHRSYSTEADMWSIGVITYILLCGSRPFWARTESGIFRSVLRADPNFDDSPWQSVSPEAKDFVKRLLNKDYRKRMTAAQALSHPWLRDEHRQIPLDMLVFKLVKAYLRSTPLKRAALKALSRAITEDELIYIRAQYNLLEPDSGDGRICIDNFRMALLQNCTDAMKESRTLEILNALEPLAYRRMDFEEFRAATISPYQLEAVPRWEEIASTAFEYFEQEGNRAITIEELAQEMNLSAAAYSIVRDWIRPLDGKLSFVGYTKFLHGLTMRSGNTRRHH

SEQ ID NO: 159038 - protein, 306 aa, Zea Mays
MGQCYARNVHGVDADGGGVEATTITVSAAGGPEDAASVGGGRGGGGRRSARPSPAGTPRGGRAGATPARSSAAGSPWTGSPLGLPDGIAPSPATSASTPRRFFRRPFPPPSPAKHIKASLARRLGHRSPASASQVPRPPVEVPIPEQGAGGAGEVERELDKSFGYDRHFAAKYELGKEVGRGHFGHTCLARARKGDMRGQVLAVKVISKAKMTTAISIEDVRREVKILKALSGHSNLVKFYDACEDALNVYIIMELCEGGELLDRILSRGGRYNEGDAKIIVEQILKVVAFCHLQGVVHRDLKPEH

SEQ ID NO: 159039 - protein, 204 aa, Zea Mays
MTAAQALSHPWLRDEHRQIPLDMLVFKLVKAYLRSTPLKRAALKALSRAITEDELIYIRAQYNLLEPDSGDGRICIDNFRMALLQNCTDAMKESRTLEILNALEPLAYRRMDFEEFRAATISPYQLEAVPRWEEIASTAFEYFEQEGNRAITIEELAQEMNLSAAAYSIVRDWIRPLDGKLSFVGYTKFLHGLTMRSGNTRRHH

SEQ ID NO: 159040 - protein, 192 aa, Zea Mays
MSRSNALMWLLLLALSCWSWCAGTDYPALCNATLAPYAAEVGASPARLSLAALTVTLDGARRATAAMKAMAAGGASSHHLVPVAAEAAADCVGMLEDAVDLLRQSVEAMERLGKEPASASASASGQAGRSVRFQVNSVQTWASAALTNDGMCMEGFKGQPAVVREAVRRNVAGAMHLTAIALAIINAMAKQM

SEQ ID NO: 159041 - protein, 180 aa, Zea Mays
MDSTANLFTAAPLDNDSNRSKPPATRCSAWRSKPPRTLIRSITANDGKRWRSESRRQACRHLHEDEAREAGSALGDPLETGATAAAPAAWVSNAATTAPSEPTGSPADVEAFADPTAVGDDEHDSKEVFLRRYFLHEWELVSAILRRIVAGGGVVQSVDVHSVRFLVSTLLSPFPNAPCR

SEQ ID NO: 159042 - protein, 303 aa, Zea Mays
MSSSSSSSSAATVFPPSPQLPPPLLVENLPPLHQLTPPVAAAAAPASEQLCYVHCHFCDTVLVVSVPTSSLFKTVTVRCGHCSSLLTVNMRGLLFPGTPANTAAAAAAAPPPPPAAAVTSTTATMTTAPPPPPATSVNNNGQFHFIPHSLDLALPIPPHQSLLLDEISSAANPSLQLLEQHGLGGMITSGRNAAAPHPHPPQPQAPAAAPEKRQRVPSAYNRFIKDEIQRIKAGNPDISHREAFSAAAKNWAHFPHIHFGLMPDHQGPKKTSLLPQDHQRSDGGGLLKEGLYAAAANMGVAPY

SEQ ID NO: 159043 - protein, 538 aa, Zea Mays
MASAPEPENGRELYALLHLSPDASSEEVRRAYRQFAQIYHPDKYQDPQMKDVATENFQRICEAYEILSDDNKRQVYDIYGMEGLNSGLELGPKLTKPEEIKEQLERLRRRKEEEKLFKHALPNGSIIANFSVPQYLNDGSIMRGMAMLSQVELPVSKQNTVVVGGNLIVNGSAGSGAATTVLRHQLSPVSSIEFMATAGLRSVIGGQMFRQISPHSTATSGLAVSLRDGSINLSNAWTRQLSDNTVGNIQLVLGDESSISVGWQKKDEKRTATGEFGTNFFGASAHYTHRFSSKSHARIAGRVGSTILDFEIGGGRRISEFSTVRMMYNIGIQGVSWKFELHRAGQKLIIPVLLSTDLNPLFVTSAFAIPSTLYFLLQTYVVKPYYLKREKQKTLEKMEGLSTQLTEARKAAEKAQKLLEPVSNRKKNRQLENNGLVITKALYGSRQKIKMSSELNDIHNDMASQVFDVTIPLNFLVTEAGQLKLHDGIKKSGIMGFYDPCPGDPKLLLVEYTFHGHKYKVMVDDYEALLIPQDIHQF

SEQ ID NO: 159044 - protein, 468 aa, Zea Mays
MSGPTLCRNSLNSPADVTNSPSLSGRRHGLSMERLKSAVPPDLRRAVGEGTAADLANTTSRLFAFFDSLPLFHQVMQELTDPELALCRKDKVKAVELKGHGNACFSRREFGKALRFYSQALRHVPINSGGMDVNLVSSLYVNRASTMHKLGLFEESLRDCDRAITISPNYSKAWYRKGMVKTALKNYSSAIHDLEVALSQEVTSSGKSNIEQELKLILEKHESVNEAGTSNCDSKDRDLPLAGQPHKIVIESISTPNKGRGMISTDDIPPASLIHVEDPLAAIIMKSSRETHCHFCFSETPADVVFCPSCTIPIYCSKRCQEQSAGHISRDEDTNLGYSTNVANLSITSSCKSPRSKLFAEHRHECGGAHWAAVLPADVVLAGRIIAHSIVKRMPSGKSFAFSGPNLDLVHHYDQHSPANKLESHIYAIVLLLCLQNHYRSDLLWTEDSLSQVYMAFIFRHYCSDIPG

SEQ ID NO: 159045 - protein, 815 aa, Zea Mays
MSGPTLCRNSLNSPADVTNSPSLSGRRHGLSMERLKSAVPPDLRRAVGEGTAADLANTTSRLFAFFDSLPLFHQVMQELTDPELALCRKDKVKAVELKGHGNACFSRREFGKALRFYSQALRHVPINSGGMDVNLVSSLYVNRASTMHKLGLFEESLRDCDRAITISPNYSKAWYRKGMVKTALKNYSSAIHDLEVALSQEVTSSGKSNIEQELKLILEKHESVNEAGTSNCDSKDRDLPLAGQPHKIVIESISTPNKGRGMISTDDIPPASLIHVEDPLAAIIMKSSRETHCHFCFSETPADVVFCPSCTIPIYCSKRCQEQSAGHISRDEDTNLGYSTNVANLSITSSCKSPRSKLFAEHRHECGGAHWAAVLPADVVLAGRIIAHSIVKRMPSGKSFAFSGPNLDLVHHYDQHSPANKLESHIYAIVLLLCLQNHYRSDLLWTEDSLSQLVLLIFQIKVNSIAIVCMRSMDRGPEHTINRGFYVAEGAKMCSVEQVRVAQALYVSGSLFNHSCQPNVHAYFLSRAFVLRTTEFIKSGSPVELSYGPQVGEMHISERQKSLQENYYFSCQCSSCSELNLSDLVMNSFCCPQSNCLGAISESTYYRSKENFVNVSLGGSYVCKLSLPDVSKVDMDMENVAKSLLQNSGVSLNIDHGCCMSCRSCIDLSSALATSHREESTIDRLKKHTFLDKTLITEALQSLKQLKKLRHPYSKALAQAEDTIAEAFAKVGDQELARKHCEASIQILEKLYHPKHIIIAHELIKLVSILLSLGDGASAAATFAQAEAIFSLYYGSHVEKVLTYMGALKKAVIDV

SEQ ID NO: 159046 - protein, 401 aa, Zea Mays
MAVSDCKVMQELTDPELALCRKDKVKAVELKGHGNACFSRREFGKALRFYSQALRHVPINSGGMDVNLVSSLYVNRASTMHKLGLFEESLRDCDRAITISPNYSKAWYRKGMVKTALKNYSSAIHDLEVALSQEVTSSGKSNIEQELKLILEKHESVNEAGTSNCDSKDRDLPLAGQPHKIVIESISTPNKGRGMISTDDIPPASLIHVEDPLAAIIMKSSRETHCHFCFSETPADVVFCPSCTIPIYCSKRCQEQSAGHISRDEDTNLGYSTNVANLSITSSCKSPRSKLFAEHRHECGGAHWAAVLPADVVLAGRIIAHSIVKRMPSGKSFAFSGPNLDLVHHYDQHSPANKLESHIYAIVLLLCLQNHYRSDLLWTEDSLSQVYMAFIFRHYCSDIPG

SEQ ID NO: 159047 - protein, 738 aa, Zea Mays
MERLKSAVPPDLRRAVGEGTAADLANTTSRLFAFFDSLPLFHQVMQELTDPELALCRKDKVKAVELKGHGNACFSRREFGKALRFYSQALRHVPINSGGMDVNLVSSLYVNRASTMHKLGLFEESLRDCDRAITISPNYSKAWYRKGMVKTALKNYSSAIHDLEVALSQEVTSSGKSNIEQELKLILEKHESVNEAGTSNCDSKDRDLPLAGQPHKIVIESISTPNKGRGMISTDDIPPASLIHVEDPLAAIIMKSSRETHCHFCFSETPADVVFCPSCTIPIYCSKRCQEQSAGHISRDEDTNLGYSTNVANLSITSSCKSPRSKLFAEHRHECGGAHWAAVLPADVVLAGRIIAHSIVKRMPSGKSFAFSGPNLDLVHHYDQHSPANKLESHIYAIVLLLCLQNHYRSDLLWTEDSLSQVRVAQALYVSGSLFNHSCQPNVHAYFLSRAFVLRTTEFIKSGSPVELSYGPQVGEMHISERQKSLQENYYFSCQCSSCSELNLSDLVMNSFCCPQSNCLGAISESTYYRSKENFVNVSLGGSYVCKLSLPDVSKVDMDMENVAKSLLQNSGVSLNIDHGCCMSCRSCIDLSSALATSHREESTIDRLKKHTFLDKTLITEALQSLKQLKKLRHPYSKALAQAEDTIAEAFAKVGDQELARKHCEASIQILEKLYHPKHIIIAHELIKLVSILLSLGDGASAAATFAQAEAIFSLYYGSHVEKVLTYMGALKKAVIDV

SEQ ID NO: 159048 - protein, 599 aa, Zea Mays
MERLKSAVPPDLRRAVGEGTAADLANTTSRLFAFFDSLPLFHQVMQELTDPELALCRKDKVKAVELKGHGNACFSRREFGKALRFYSQALRHVPINSGGMDVNLVSSLYVNRASTMHKLGLFEESLRDCDRAITISPNYSKAWYRKGMVKTALKNYSSAIHDLEVALSQEVTSSGKSNIEQELKLILEKHESVNEAGTSNCDSKDRDLPLAGQPHKIVIESISTPNKGRGMISTDDIPPASLIHVEDPLAAIIMKSSRETHCHFCFSETPADVVFCPSCTIPIYCSKRCQEQSAGHISRDEDTNLGYSTNVANLSITSSCKSPRSKLFAEHRHECGGAHWAAVLPADVVLAGRIIAHSIVKRMPSGKSFAFSGPNLDLVHHYDQHSPANKLESHIYAIVLLLCLQNHYRSDLLWTEDSLSQLVLLIFQIKVNSIAIVCMRSMDRGPEHTINRGFYVAEGAKMCSVEQVRVAQALYVSGSLFNHSCQPNVHAYFLSRAFVLRTTEFIKSGSPVELSYGPQVGEMHISERQKSLQENYYFSCQCSSCSELNLSDLVMNSFCCPQSNCLGAISESTYYRMYRRLIWIWRMSPNLSCKIVVSV

SEQ ID NO: 159049 - protein, 535 aa, Zea Mays
MQIIMKSSRETHCHFCFSETPADVVFCPSCTIPIYCSKRCQEQSAGHISRDEDTNLGYSTNVANLSITSSCKSPRSKLFAEHRHECGGAHWAAVLPADVVLAGRIIAHSIVKRMPSGKSFAFSGPNLDLVHHYDQHSPANKLESHIYAIVLLLCLQNHYRSDLLWTEDSLSQLVLLIFQIKVNSIAIVCMRSMDRGPEHTINRGFYVAEGAKMCSVEQVRVAQALYVSGSLFNHSCQPNVHAYFLSRAFVLRTTEFIKSGSPVELSYGPQVGEMHISERQKSLQENYYFSCQCSSCSELNLSDLVMNSFCCPQSNCLGAISESTYYRSKENFVNVSLGGSYVCKLSLPDVSKVDMDMENVAKSLLQNSGVSLNIDHGCCMSCRSCIDLSSALATSHREESTIDRLKKHTFLDKTLITEALQSLKQLKKLRHPYSKALAQAEDTIAEAFAKVGDQELARKHCEASIQILEKLYHPKHIIIAHELIKLVSILLSLGDGASAAATFAQAEAIFSLYYGSHVEKVLTYMGALKKAVIDV

SEQ ID NO: 159050 - protein, 284 aa, Zea Mays
MQIIMKSSRETHCHFCFSETPADVVFCPSCTIPIYCSKRCQEQSAGHISRDEDTNLGYSTNVANLSITSSCKSPRSKLFAEHRHECGGAHWAAVLPADVVLAGRIIAHSIVKRMPSGKSFAFSGPNLDLVHHYDQHSPANKLESHIYAIVLLLCLQNHYRSDLLWTEDSLSQLVLLIFQIKVNSIAIVCMRSMDRGPEHTINRGFYVAEGAKMCSVEQVRVAQALYVSGSLFNHSCQPNVHAYFLSRAFVLRTTEFIKSGSPVELSYGPQVSLNPSSLQASISL

SEQ ID NO: 159051 - protein, 520 aa, Zea Mays
MERLKSAVPPDLRRAVGEGTAADLANTTSRLFAFFDSLPLFHQVMQELTDPELALCRKDKVKAVELKGHGNACFSRREFGKALRFYSQALRHVPINSGGMDVNLKLGLFEESLRDCDRAITISPNYSKAWYRKGMVKTALKNYSSAIHDLEVALSQEVTSSGKSNIEQELKLILEKHESVNEAGTSNCDSKDRDLPLAGQPHKIVIESISTPNKGRGMISTDDIPPASLIHVEDPLAAIIMKSSRETHCHFCFSETPADVVFCPSCTIPIYCSKRCQEQSAGHISRDEDTNLGYSTNVANLSITSSCKSPRSKLFAEHRHECGGAHWAAVLPADVVLAGRIIAHSIVKRMPSGKSFAFSGPNLDLVHHYDQHSPANKLESHIYAIVLLLCLQNHYRSDLLWTEDSLSQLVLLIFQIKVNSIAIVCMRSMDRGPEHTINRGFYVAEGAKMCSVEQVRVAQALYVSGSLFNHSCQPNVHAYFLSRAFVLRTTEFIKSGSPVELSYGPQVSLNPSSLQASISL

SEQ ID NO: 159052 - protein, 476 aa, Zea Mays
MERLKSAVPPDLRRAVGEGTAADLANTTSRLFAFFDSLPLFHQVMQELTDPELALCRKDKVKAVELKGHGNACFSRREFGKALRFYSQALRHVPINSGGMDVNLVSSLYVNRASTMHKLGLFEESLRDCDRAITISPNYSKAWYRKGMVKTALKNYSSAIHDLEVALSQEVTSSGKSNIEQELKLILEKHESVNEAGTSNCDSKDRDLPLAGQPHKIVIESISTPNKGRGMISTDDIPPASLIHVEDPLAAIIMKSSRETHCHFCFSETPADVVFCPSCTIPIYCSKRCQEQSAGHISRDEDTNLGYSTNVANLSITSSCKSPRSKLFAEHRHECGGAHWAAVLPADVVLAGRIIAHSIVKRMPSGKSFAFSGPNLDLVHHYDQHSPANKLESHIYAIVLLLCLQNHYRSDLLWTEDSLSQLVLLIFQIKVNSIAIVCMRSMDRGPEHTINRGFYVAEGAKMCSVEQGCTSSLCIW

SEQ ID NO: 159053 - protein, 346 aa, Zea Mays
MRSMDRGPEHTINRGFYVAEGAKMCSVEQVRVAQALYVSGSLFNHSCQPNVHAYFLSRAFVLRTTEFIKSGSPVELSYGPQVGEMHISERQKSLQENYYFSCQCSSCSELNLSDLVMNSFCCPQSNCLGAISESTYYRSKENFVNVSLGGSYVCKLSLPDVSKVDMDMENVAKSLLQNSGVSLNIDHGCCMSCRSCIDLSSALATSHREESTIDRLKKHTFLDKTLITEALQSLKQLKKLRHPYSKALAQAEDTIAEAFAKVGDQELARKHCEASIQILEKLYHPKHIIIAHELIKLVSILLSLGDGASAAATFAQAEAIFSLYYGSHVEKVLTYMGALKKAVIDV

SEQ ID NO: 159054 - protein, 180 aa, Zea Mays
MLIGFIILGSEAIMSYKIWPWSHDTNKMVHMLLHAVALFLGSVGIYAAFKFHNESGIDNLYSLHSWVGLGTICLYGIQWLFGVATFFFPGASPTVRRRMLPWHTRAGLVVYILALLASELGFLEKLTFLQAAGLGRYSSEALLVNFTALVILLLGASVVLYVTAPMHNEHAHGYSAVHKP

SEQ ID NO: 159055 - protein, 250 aa, Zea Mays
MAVPAPAKAARLLAASAAVLVLLWCVHFRGGLSFGSPTNKGLIFNVHPVLMLIGFIILGSEAIMSYKIWPWSHDTNKMVHMLLHAVALFLGSVGIYAAFKFHNESGIDNLYSLHSWVGLGTICLYGIQLSFVSMQCPDLARDGGVFCLWLFGVATFFFPGASPTVRRRMLPWHTRAGLVVYILALLASELGFLEKLTFLQAAGLGRYSSEALLVNFTALVILLLGASVVLYVTAPMHNEHAHGYSAVHKP

SEQ ID NO: 159056 - protein, 149 aa, Zea Mays
MAVPAPAKAARLLAASAAVLVLLWCVHFRGGLSFGSPTNKGLIFNVHPVLMLIGFIILGSEAIMSYKIWPWSHDTNKMVHMLLHAVALFLGSVGIYAAFKFHNESGIDNLYSLHSWVGLGTICLYGIQLSFVSMQCPDLARDGGVFCLV

SEQ ID NO: 159057 - protein, 173 aa, Zea Mays
MSPTVAFKLAREPSHTLRKPLPLPLPPPPPPSVSVSTGALVSQPLPPPPPPRESRRSNPVAWGRSEDGQHQRVRHQVDQLLHHDTGATGGGLRVLDEHPRRRVQADLDRPRHRPRWSDLPHIARRIPWCLEEHLLLALDISDHAVRGLGGNHGVHGARVYHNKLRKWPYCSWG

SEQ ID NO: 159058 - protein, 168 aa, Zea Mays
MSPTVAFKLAREPSHTLRKPLPLPLPPPPPPSVSVSTGALVSQPLPPPPPPRESRRSNPVAWGRSEDGQHQRVRHQVDQLLHHDTGATGGGLRVLDEHPRRRVQADLDRPRHRPRWSDLPHIARRIPWCLEEHLLLALDSILPPPINRLSEALIALVPWYFLECHLLP

SEQ ID NO: 159059 - protein, 237 aa, Zea Mays
MSTHDDECRRTLTVPVIALGGVIFLISLVGFLGAWKNISCLLWTYLIMLFVVLVAIMVFTVLAFIITNSGSGHTVPGARYKEYRLQDYSSWFVKQLDDTEKWARLKSCLVKTDDCNSLSRRYKTAREYKLADLTPMESGCCRPPAECGFPALNASYFDLSYHPASANADCKLYRNARSVRCYDCSSCKAGVAQYMKTEWRVVAIFNVILFVILSFVYFVGCCARRNAGGGDAKGRGR

SEQ ID NO: 159060 - protein, 203 aa, Zea Mays
MSVLMKRATELGVSLQVVHPLDPQKLEDQPLGLHGEHQYMNAGLAIALANTWLERQGHLNRLHVKHSGTLPDQFIKGLSSACLQGRGQIIPNSQVNSENDRDSSLVFYLDGAHSSESMEMCARWFAHATNSDGIQPGPSEQPHTDRDSRKVSTLSMPYLCQTNHSTTSLDPLHPHLQSVNKLICHGSCRFKRCGETCLITIKV

SEQ ID NO: 159061 - protein, 220 aa, Zea Mays
MRAGGGAPPRHAPLSPTASATATLVPASVAMPTPRLVHLRHLLSFRSALPRPLGPNQSHPLPGSVHPSLLLPRAMAGVAYAGLATGSAEYEEVLGCLASLITQKVRADTGNRGNQWELMSKYVQILELEESIAQLKVVHVAGTKGKGSTCTFAESILRSCGFHTGLFTSPHLMDVRERFRLDGLDISEEKFIRYFWWCWKTLKDKTGDGVPMPAYFRWMS

SEQ ID NO: 159062 - protein, 328 aa, Zea Mays
MRAGGGAPPRHAPLSPTASATATLVPASVAMPTPRLVHLRHLLSFRSALPRPLGPNQSHPLPGSVHPSLLLPRAMAGVAYAGLATGSAEYEEVLGCLASLITQKVRADTGNRGNQWELMSKYVQILELEESIAQLKVVHVAGTKGKGSTCTFAESILRSCGFHTGLFTSPHLMDVRERFRLDGLDISEEKFIRYFWWCWKTLKDKTGDGVPMPAYFRFLALLAFKIFSDEQVDVVVLEVGLGGKYDATNVVRAPVVCGITSLGYDHMEILGNTLGEITREKAGILKKGVPAYTVPQPEEAMSVLMKRATELGVLQLHWLIPGLRGKAI

SEQ ID NO: 159063 - protein, 109 aa, Zea Mays
MFYGPGGPYALFAGKDASRALAKMSFEPQDLTGDISGLGPFELDALQDWEYKFMSKYVKVGTVKKSVPVEGGSTASTTEADKAPTTEEKPSEAVVEEKEAAANEGAQEN

SEQ ID NO: 159064 - protein, 155 aa, Zea Mays
MASCSSVRAAPSLPVSAPPSRRRASTAVCLQGVRRSRVASCRVRCSAGAGQGGVKVPAKLAELWSAAKGAPPLAVLAGVAAAVAIYKVGSSLLAPRHPPPRRLEAQTAPPPPVPEPVQVGEITEEELRQYDGSDPEKPLLMAIKGQIYDVSESRI

SEQ ID NO: 159065 - protein, 62 aa, Zea Mays
MPRLRPTQGRGKPAGPADRRGWGQNQRKMRSICFCTIALTNLILSAIPIPPDSSSKKGLMLF

SEQ ID NO: 159066 - protein, 194 aa, Zea Mays
MVVCDFDLNLTFVSCGWEGSASDAGVLQSTISKGFIVPEGKFYLVDGGYADTSSYIAPYRGVQYHLSMFRRRHSSQSGYANYKELFNHRHAILRNHIERAIGFLKKRFPILKVGTFHSIENQIKITAAAIAFHNIIRGQNGDEGWLDNQPAYISPSQYVDVPEGDNNYPNDIESSDGSTLRDQIALQMWATYNS

SEQ ID NO: 159067 - protein, 234 aa, Zea Mays
MLYALFYITNVFEYLLENIAMSKEVARAAWNSTYEKGLFDVLHDYKDNPKLKGQNGWNSEGWRCITAKFNERFSLAHFTKQQLQEKEKELKSSYKAVRDSRKESVNGWKDSLSRSTSEQTLHPFNTNPFDLDGQEMTSEAQSISAIHEAREGEGSKSRKRKQSHVGAALEDYVEFKKSQTNKTLDALKELSMRKCMKEMEAMAGFTDEEKSYAMEVFESEINRGFHVNNEPQCS

SEQ ID NO: 159068 - protein, 391 aa, Zea Mays
MVVCDFDLNLTFVSCGWEGSASDAGVLQSTISKGFIVPEGKFYLVDGGYADTSSYIAPYRGVQYHLSMFRRRHSSQSGYANYKELFNHRHAILRNHIERAIGFLKKRFPILKVGTFHSIENQIKITAAAIAFHNIIRGQNGDEGWLDNQPAYISPSQYVDVPEGDNNYPNDIESSDAMSKEVARAAWNSTYEKGLFDVLHDYKDNPKLKGQNGWNSEGWRCITAKFNERFSLAHFTKQQLQEKEKELKSSYKAVRDSRKESVNGWKDSLSRSTSEQTLHPFNTNPFDLDGQEMTSEAQSISAIHEAREGEGSKSRKRKQSHVGAALEDYVEFKKSQTNKTLDALKELSMRKCMKEMEAMAGFTDEEKSYAMEVFESEINRGFHVNNEPQCS

SEQ ID NO: 159069 - protein, 122 aa, Zea Mays
MPFFSGYANYKELFNHRHAILRNHIERAIGFLKKRFPILKVGTFHSIENQIKITAAAIAFHNIIRGQNGDEGWLDNQPAYISPSQYVDVPEGDNNYPNDIESSDGSTLRDQIALQMWATYNS

SEQ ID NO: 159070 - protein, 147 aa, Zea Mays
MRTQYGSRCLRRWGPRVSLTREVKVATGELRKGRVWGRSGGQENIGIGEEELVVPGGDEEDERAGPGAAGPQHGPAAEAATGGGGHRLSHEHQRERGAAQRRGGVRAVHAVGPLLPLVRLQPRLWNRDGKQGEEWWRRPRQRTGERK

SEQ ID NO: 159071 - protein, 1178 aa, Zea Mays
MGKANKSPSPAVAKEGDYSALRELFRPHVESFDYFLDKGLDEMIESIRPMVIRDPNSSNTLKIILEKGHVLSPMRGARPGVLPIYPQECRQARISYHGEFKVEVCFQYNEGAQIRHTFNFGHLPIMLMSKLCHLRGADPHKLVFHGEEATEMGGYFICGGMERLVRILVLQKRNYPMGLVRNSFLKRGAGYTDKAVVIRCVQRDQSSVTIKLYYILNGSARLGFWLGGREFLLPVGIVLKALIDASDREIFTSLTCCYSDKHGRGKGVVSTQLIGERAQIVLDEVRNLSILTRTQCLVHIGQYFRSVMEGFENDDYITVAEAVLKDYIFVHLENNHDKFNLLIFMLQKLYALVDQTASPDNPDALQYQEALLPGHLFTVFLKDRLQEWLRKSKRLILEEAAKNKGFDLGNALEIRKFLTKYTTSVGRAVESMIKVGNVNSRSGLDLPQREGMTIHAERLNFHRYISHFRSVHRGSAFAKMRTTSVRKLLPESWGFLCPVHTPDGEPCGLLNHMTSTCRVSSFYNSEGVIKNFGEMKKLLSAELVRVGMNPVLPKIEQTGPPEVLHVHLDGCILGTIASAMIEKAVNYLRTLKLLAHSGIPEDLEVGYVPPSFNGAFPGLYLFTNPARFVRPVRNLFILSDGKQSIELIGPFEQAFMEIRCPDGGDGGRQEPFPATHEEIHPTAILSVVANLTPWSDHNQSPRNMYQCQMAKQTMGFCGQALKFRTDVKAFHLQTPQTPIVRTGTYTKYCMDEFPSGTNAIVAVLSYTGYDMEDAMILNKSAVERGMFRGHIYQTECIDLSTKSRDNVPETFAKSILTRDTSNVIDSDGLPRLGQAVHPNEQYYSVHNSLTNVIRPVKLKGTEPAFIDYVAVNGTGSKCGLQKANIRLRRVRNPIIGDKFSSRHGQKGVCSQLWPDIDMPFSANTGMRPDLIINPHAFPSRMTIAMLLESMAAKAGSLHGKFIDATPFANSLKKDKDSDKPNSIVDELGPMLASYGFNYHGNEVLYSGVFGTEMDCEIFIGPVYYQRLRHMVSDKFQVRTTGRIDQITRQPIGGRKHGGGIRFGEMERDALLAHGSSYLLHDRLHSCSDYHIADVCSFCGSLLTATMIKSDTQKKVKHEMLGLPTVRPAKNFACQACKTSKGMETVAMPYVFRYLAAELAAMNIKLELRLSNKSGLPLS

SEQ ID NO: 159072 - protein, 1145 aa, Zea Mays
MGKANKSPSPAVAKEGDYSALRELFRPHVESFDYFLDKGLDEMIESIRPMVIRDPNSSNTLKIILEKGHVLSPMRGARPGVLPIYPQEQCRQARISYHGEFKVEVCFQYNEGAQIRHTFNFGHLPIMLMSKLCHLRGADPHKLVFHGEEATEMGGYFICGGMERLVRILVLQKRNYPMGLVRNSFLKRGAGYTDKAVVIRCVQRDQSSVTIKLYYILNGSARLGFWLGGREFLLPVGIVLKALIDASDREIFTSLTCCYSDKHGRGKGVVSTQLIGERAQIVLDEVAEAVLKDYIFVHLENNHDKFNLLIFMLQKLYALVDQTASPDNPDALQYQEALLPGHLFTVFLKDRLQEWLRKSKRLILEEAAKNKGFDLGNALEIRKFLTKYTTSVGRAVESMIKVGNVNSRSGLDLPQREGMTIHAERLNFHRYISHFRSVHRGSAFAKMRTTSVRKLLPESWGFLCPVHTPDGEPCGLLNHMTSTCRVSSFYNSEGVIKNFGEMKKLLSAELVRVGMNPVLPKIEQTGPPEVLHVHLDGCILGTIASAMIEKAVNYLRTLKLLAHSGIPEDLEVGYVPPSFNGAFPGLYLFTNPARFVRPVRNLFILSDGKQSIELIGPFEQAFMEIRCPDGGDGGRQEPFPATHEEIHPTAILSVVANLTPWSDHNQSPRNMYQCQMAKQTMGFCGQALKFRTDVKAFHLQTPQTPIVRTGTYTKYCMDEFPSGTNAIVAVLSYTGYDMEDAMILNKSAVERGMFRGHIYQTECIDLSTKSRDNVPETFAKSILTRDTSNVIDSDGLPRLGQAVHPNEQYYSVHNSLTNVIRPVKLKGTEPAFIDYVAVNGTGSKCGLQKANIRLRRVRNPIIGDKFSSRHGQKGVCSQLWPDIDMPFSANTGMRPDLIINPHAFPSRMTIAMLLESMAAKAGSLHGKFIDATPFANSLKKDKDSDKPNSIVDELGPMLASYGFNYHGNEVLYSGVFGTEMDCEIFIGPVYYQRLRHMVSDKFQVRTTGRIDQITRQPIGGRKHGGGIRFGEMERDALLAHGSSYLLHDRLHSCSDYHIADVCSFCGSLLTATMIKSDTQKKVKHEMLGLPTVRPAKNFACQACKTSKGMETVAMPYVFRYLAAELAAMNIKLELRLSNKSGLPLS

SEQ ID NO: 159073 - protein, 1053 aa, Zea Mays
MLMSKLCHLRGADPHKLVFHGEEATEMGGYFICGGMERLVRILVLQKRNYPMGLVRNSFLKRGAGYTDKAVVIRCVQRDQSSVTIKLYYILNGSARLGFWLGGREFLLPVGIVLKALIDASDREIFTSLTCCYSDKHGRGKGVVSTQLIGERAQIVLDEVRNLSILTRTQCLVHIGQYFRSVMEGFENDDYITVAEAVLKDYIFVHLENNHDKFNLLIFMLQKLYALVDQTASPDNPDALQYQEALLPGHLFTVFLKDRLQEWLRKSKRLILEEAAKNKGFDLGNALEIRKFLTKYTTSVGRAVESMIKVGNVNSRSGLDLPQREGMTIHAERLNFHRYISHFRSVHRGSAFAKMRTTSVRKLLPESWGFLCPVHTPDGEPCGLLNHMTSTCRVSSFYNSEGVIKNFGEMKKLLSAELVRVGMNPVLPKIEQTGPPEVLHVHLDGCILGTIASAMIEKAVNYLRTLKLLAHSGIPEDLEVGYVPPSFNGAFPGLYLFTNPARFVRPVRNLFILSDGKQSIELIGPFEQAFMEIRCPDGGDGGRQEPFPATHEEIHPTAILSVVANLTPWSDHNQSPRNMYQCQMAKQTMGFCGQALKFRTDVKAFHLQTPQTPIVRTGTYTKYCMDEFPSGTNAIVAVLSYTGYDMEDAMILNKSAVERGMFRGHIYQTECIDLSTKSRDNVPETFAKSILTRDTSNVIDSDGLPRLGQAVHPNEQYYSVHNSLTNVIRPVKLKGTEPAFIDYVAVNGTGSKCGLQKANIRLRRVRNPIIGDKFSSRHGQKGVCSQLWPDIDMPFSANTGMRPDLIINPHAFPSRMTIAMLLESMAAKAGSLHGKFIDATPFANSLKKDKDSDKPNSIVDELGPMLASYGFNYHGNEVLYSGVFGTEMDCEIFIGPVYYQRLRHMVSDKFQVRTTGRIDQITRQPIGGRKHGGGIRFGEMERDALLAHGSSYLLHDRLHSCSDYHIADVCSFCGSLLTATMIKSDTQKKVKHEMLGLPTVRPAKNFACQACKTSKGMETVAMPYVFRYLAAELAAMNIKLELRLSNKSGLPLS

SEQ ID NO: 159074 - protein, 1179 aa, Zea Mays
MGKANKSPSPAVAKEGDYSALRELFRPHVESFDYFLDKGLDEMIESIRPMVIRDPNSSNTLKIILEKGHVLSPMRGARPGVLPIYPQEQCRQARISYHGEFKVEVCFQYNEGAQIRHTFNFGHLPIMLMSKLCHLRGADPHKLVFHGEEATEMGGYFICGGMERLVRILVLQKRNYPMGLVRNSFLKRGAGYTDKAVVIRCVQRDQSSVTIKLYYILNGSARLGFWLGGREFLLPVGIVLKALIDASDREIFTSLTCCYSDKHGRGKGVVSTQLIGERAQIVLDEVRNLSILTRTQCLVHIGQYFRSVMEGFENDDYITVAEAVLKDYIFVHLENNHDKFNLLIFMLQKLYALVDQTASPDNPDALQYQEALLPGHLFTVFLKDRLQEWLRKSKRLILEEAAKNKGFDLGNALEIRKFLTKYTTSVGRAVESMIKVGNVNSRSGLDLPQREGMTIHAERLNFHRYISHFRSVHRGSAFAKMRTTSVRKLLPESWGFLCPVHTPDGEPCGLLNHMTSTCRVSSFYNSEGVIKNFGEMKKLLSAELVRVGMNPVLPKIEQTGPPEVLHVHLDGCILGTIASAMIEKAVNYLRTLKLLAHSGIPEDLEVGYVPPSFNGAFPGLYLFTNPARFVRPVRNLFILSDGKQSIELIGPFEQAFMEIRCPDGGDGGRQEPFPATHEEIHPTAILSVVANLTPWSDHNQSPRNMYQCQMAKQTMGFCGQALKFRTDVKAFHLQTPQTPIVRTGTYTKYCMDEFPSGTNAIVAVLSYTGYDMEDAMILNKSAVERGMFRGHIYQTECIDLSTKSRDNVPETFAKSILTRDTSNVIDSDGLPRLGQAVHPNEQYYSVHNSLTNVIRPVKLKGTEPAFIDYVAVNGTGSKCGLQKANIRLRRVRNPIIGDKFSSRHGQKGVCSQLWPDIDMPFSANTGMRPDLIINPHAFPSRMTIAMLLESMAAKAGSLHGKFIDATPFANSLKKDKDSDKPNSIVDELGPMLASYGFNYHGNEVLYSGVFGTEMDCEIFIGPVYYQRLRHMVSDKFQVRTTGRIDQITRQPIGGRKHGGGIRFGEMERDALLAHGSSYLLHDRLHSCSDYHIADVCSFCGSLLTATMIKSDTQKKVKHEMLGLPTVRPAKNFACQACKTSKGMETVAMPYVFRYLAAELAAMNIKLELRLSNKSGLPLS

SEQ ID NO: 159075 - protein, 1027 aa, Zea Mays
MGGYFICGGMERLVRILVLQKRNYPMGLVRNSFLKRGAGYTDKAVVIRCVQRDQSSVTIKLYYILNGSARLGFWLGGREFLLPVGIVLKALIDASDREIFTSLTCCYSDKHGRGKGVVSTQLIGERAQIVLDEVRNLSILTRTQCLVHIGQYFRSVMEGFENDDYITVAEAVLKDYIFVHLENNHDKFNLLIFMLQKLYALVDQTASPDNPDALQYQEALLPGHLFTVFLKDRLQEWLRKSKRLILEEAAKNKGFDLGNALEIRKFLTKYTTSVGRAVESMIKVGNVNSRSGLDLPQREGMTIHAERLNFHRYISHFRSVHRGSAFAKMRTTSVRKLLPESWGFLCPVHTPDGEPCGLLNHMTSTCRVSSFYNSEGVIKNFGEMKKLLSAELVRVGMNPVLPKIEQTGPPEVLHVHLDGCILGTIASAMIEKAVNYLRTLKLLAHSGIPEDLEVGYVPPSFNGAFPGLYLFTNPARFVRPVRNLFILSDGKQSIELIGPFEQAFMEIRCPDGGDGGRQEPFPATHEEIHPTAILSVVANLTPWSDHNQSPRNMYQCQMAKQTMGFCGQALKFRTDVKAFHLQTPQTPIVRTGTYTKYCMDEFPSGTNAIVAVLSYTGYDMEDAMILNKSAVERGMFRGHIYQTECIDLSTKSRDNVPETFAKSILTRDTSNVIDSDGLPRLGQAVHPNEQYYSVHNSLTNVIRPVKLKGTEPAFIDYVAVNGTGSKCGLQKANIRLRRVRNPIIGDKFSSRHGQKGVCSQLWPDIDMPFSANTGMRPDLIINPHAFPSRMTIAMLLESMAAKAGSLHGKFIDATPFANSLKKDKDSDKPNSIVDELGPMLASYGFNYHGNEVLYSGVFGTEMDCEIFIGPVYYQRLRHMVSDKFQVRTTGRIDQITRQPIGGRKHGGGIRFGEMERDALLAHGSSYLLHDRLHSCSDYHIADVCSFCGSLLTATMIKSDTQKKVKHEMLGLPTVRPAKNFACQACKTSKGMETVAMPYVFRYLAAELAAMNIKLELRLSNKSGLPLS

SEQ ID NO: 159076 - protein, 559 aa, Zea Mays
MGKANKSPSPAVAKEGDYSALRELFRPHVESFDYFLDKGLDEMIESIRPMGHVLSPMRGARPGVLPIYPQEQCRQARISYHGEFKVEVCFQYNEGAQIRHTFNFGHLPIMLMSKLCHLRGADPHKLVFHGEEATEMGGYFICGGMERLVRILVLQKRNYPMGLVRNSFLKRGAGYTDKAVVIRCVQRDQSSVTIKLYYILNGSARLGFWLGGREFLLPVGIVLKALIDASDREIFTSLTCCYSDKHGRGKGVVSTQLIGERAQIVLDEVRNLSILTRTQCLVHIGQYFRSVMEGFENDDYITVAEAVLKDYIFVHLENNHDKFNLLIFMLQKLYALVDQTASPDNPDALQYQEALLPGHLFTVFLKDRLQEWLRKSKRLILEEAAKNKGFDLGNALEIRKFLTKYTTSVGRAVESMIKVGNVNSRSGLDLPQREGMTIHAERLNFHRYISHFRSVHRGSAFAKMRTTSVRKLLPESWGFLCPVHTPDGEPCGLLNHMTSTCRVSSFYNSEGVIKNFGEMKKLLSAELVRVGMNPVLPKIEQTGPPEVLHVHLDGCILDS

SEQ ID NO: 159077 - protein, 1018 aa, Zea Mays
MERLVRILVLQKRNYPMGLVRNSFLKRGAGYTDKAVVIRCVQRDQSSVTIKLYYILNGSARLGFWLGGREFLLPVGIVLKALIDASDREIFTSLTCCYSDKHGRGKGVVSTQLIGERAQIVLDEVRNLSILTRTQCLVHIGQYFRSVMEGFENDDYITVAEAVLKDYIFVHLENNHDKFNLLIFMLQKLYALVDQTASPDNPDALQYQEALLPGHLFTVFLKDRLQEWLRKSKRLILEEAAKNKGFDLGNALEIRKFLTKYTTSVGRAVESMIKVGNVNSRSGLDLPQREGMTIHAERLNFHRYISHFRSVHRGSAFAKMRTTSVRKLLPESWGFLCPVHTPDGEPCGLLNHMTSTCRVSSFYNSEGVIKNFGEMKKLLSAELVRVGMNPVLPKIEQTGPPEVLHVHLDGCILGTIASAMIEKAVNYLRTLKLLAHSGIPEDLEVGYVPPSFNGAFPGLYLFTNPARFVRPVRNLFILSDGKQSIELIGPFEQAFMEIRCPDGGDGGRQEPFPATHEEIHPTAILSVVANLTPWSDHNQSPRNMYQCQMAKQTMGFCGQALKFRTDVKAFHLQTPQTPIVRTGTYTKYCMDEFPSGTNAIVAVLSYTGYDMEDAMILNKSAVERGMFRGHIYQTECIDLSTKSRDNVPETFAKSILTRDTSNVIDSDGLPRLGQAVHPNEQYYSVHNSLTNVIRPVKLKGTEPAFIDYVAVNGTGSKCGLQKANIRLRRVRNPIIGDKFSSRHGQKGVCSQLWPDIDMPFSANTGMRPDLIINPHAFPSRMTIAMLLESMAAKAGSLHGKFIDATPFANSLKKDKDSDKPNSIVDELGPMLASYGFNYHGNEVLYSGVFGTEMDCEIFIGPVYYQRLRHMVSDKFQVRTTGRIDQITRQPIGGRKHGGGIRFGEMERDALLAHGSSYLLHDRLHSCSDYHIADVCSFCGSLLTATMIKSDTQKKVKHEMLGLPTVRPAKNFACQACKTSKGMETVAMPYVFRYLAAELAAMNIKLELRLSNKSGLPLS

SEQ ID NO: 159078 - protein, 126 aa, Zea Mays
MKGLWVGFRGNNALLYRRENPLSLRCSFRSLKARNNRSSAVAPKDYCETYIQFLRDKWIVPDSDPPGPKDVDLLYQFIDKSKRLMVVTGAGMSTEFGIPDYRSPNGAYSTRFKPLSHQVCPALLIK

SEQ ID NO: 159079 - protein, 99 aa, Zea Mays
MTAAIADGHYARLQASGVCRAHFECQLCQVWEASIKDPHHWWGGFEGQSLGYRETRCPPGVFHCTLQSLSGFTSPVESVSFDSSEVTIGAGAASGTIKI

SEQ ID NO: 159080 - protein, 464 aa, Zea Mays
MCLNLLLMADGLFLVWDLTAGKLMHDFCLHEGPVNCLDVHPYEFLLATGSVDKTVKFWDLETFELIGSSGPENNREYFELASAIRSMKFNSDGKTIFCGLHESLKALSWEPTICHDVIDVGWSTLADLTVDEGKLLGCSYNQNCVGVWVVDLMRNEPYVDSSAGSHLNGSINRPIQSDDSMSSVFGRLSISRSPANEIGSDTLLGCSMSGSKESPVSTSASMRGLSKPPGKGDLRLSRSISTPLLSPRVRLNPNFIDRQKNQAATAVPLPEPIVRFKANLSSDAGMLSRKSHASAAPMYRSRSNSSRYGIMESSSIPVLALRHSSRKDAGPVHSEAATGELADIEPQNIEKEGLVANHGKEDGKLVPVIASRSSKIVEEVGYRRITNDVGCKRVTLESGLRVNSDMDYRSRAPESHEVQQLIHLSEPAGLHGKFIRESSGYLVLINGTLLLQGIQNLPASTEMK

SEQ ID NO: 159081 - protein, 627 aa, Zea Mays
MCLNLLLMADGLFLVWDLTAGKLMHDFCLHEGPVNCLDVHPYEFLLATGSVDKTVKFWDLETFELIGSSGPENNREYFELASAIRSMKFNSDGKTIFCGLHESLKALSWEPTICHDVIDVGWSTLADLTVDEGKLLGCSYNQNCVGVWVVDLMRNEPYVDSSAGSHLNGSINRPIQSDDSMSSVFGRLSISRSPANEIGSDTLLGCSMSGSKESPVSTSASMRGLSKPPGKGDLRLSRSISTPLLSPRVRLNPNFIDRQKNQAATAVPLPEPIVRFKANLSSDAGMLSRKSHASAAPMYRSRSNSSRYGIMESSSIPVLALRHSSRKDAGPVHSEAATGELADIEPQNIEKEGLVANHGKEDGKLVPVIASRSSKIVEEVGYRRITNDVGCKRVTLESGLRVNSDMDYRSRAPESHEVQQLIHLSEPAGLHGKFIRESSGAGDNNCSGSICTESAEFNEVDIWYRVSGFDKWNPAAARNPEFASIHRNEVIGIRQLMESSGKYVVDDRPSSSNYDNIQYVTTLYSSRLHPSLSGKLSASASYEDDISGLVENHQEFIHVMKSRLTKLEVVYRCWQRNDIKGSIDATWRMLDFAAYEHCLEDDSQFREELWSHNFFSLVGYTTCWGRP

SEQ ID NO: 159082 - protein, 648 aa, Zea Mays
MQNNREYFELASAIRSMKFNSDGKTIFCGLHESLKALSWEPTICHDVIDVGWSTLADLTVDEGKLLGCSYNQNCVGVWVVDLMRNEPYVDSSAGSHLNGSINRPIQSDDSMSSVFGRLSISRSPANEIGSDTLLGCSMSGSKESPVSTSASMRGLSKPPGKGDLRLSRSISTPLLSPRVRLNPNFIDRQKNQAATAVPLPEPIVRFKANLSSDAGMLSRKSHASAAPMYRSRSNSSRYGIMESSSIPVLALRHSSRKDAGPVHSEAATGELADIEPQNIEKEGLVANHGKEDGKLVPVIASRSSKIVEEVGYRRITNDVGCKRVTLESGLRVNSDMDYRSRAPESHEVQQLIHLSEPAGLHGKFIRESSGAGDNNCSGSICTESAEFNEVDIWYRVSGFDKWNPAAARNPEFASIHRNEVIGIRQLMESSGKYVVDDRPSSSNYDNIQYVTTLYSSRLHPSLSGKLSASASYEDDISGLVENHQEFIHVMKSRLTKLEVVYRCWQRNDIKGSIDATWRMLDFAVTNDIVNALMENRNCITLDVCASLLRLTTSLLESTYDRHMSIALRMILSFVKSFGPTISSALLAIPPVGVDLEAEQRMEWCNLCFQELKNVSVSLKFLTRRQGEVGRLAQELSLFLQDLFQLSSV

SEQ ID NO: 159083 - protein, 526 aa, Zea Mays
MKFNSDGKTIFCGLHESLKALSWEPTICHDVIDVGWSTLADLTVDEGKLLGCSYNQNCVGVWVVDLMRNEPYVDSSAGSHLNGSINRPIQSDDSMSSVFGRLSISRSPANEIGSDTLLGCSMSGSKESPVSTSASMRGLSKPPGKGDLRLSRSISTPLLSPRVRLNPNFIDRQKNQAATAVPLPEPIVRFKANLSSDAGMLSRKSHASAAPMYRSRSNSSRYGIMESSSIPVLALRHSSRKDAGPVHSEAATGELADIEPQNIEKEGLVANHGKEDGKLVPVIASRSSKIVEEVGYRRITNDVGCKRVTLESGLRVNSDMDYRSRAPESHEVQQLIHLSEPAGLHGKFIRESSGAGDNNCSGSICTESAEFNEVDIWYRVSGFDKWNPAAARNPEFASIHRNEVIGIRQLMESSGKYVVDDRPSSSNYDNIQYVTTLYSSRLHPSLSGKLSASASYEDDISGLVENHQEFIHVMKSRLTKLEVVYRCWQRNDIKGSIDATWRMLDFAELYHIRCLRFSLTSYHQSS

SEQ ID NO: 159084 - protein, 85 aa, Zea Mays
MHECLPSNVANTHLNMDKIEFERCIFCHYNQYSCLRISNVSDAYVKFELASTEGKPPEARAPRRPTRVLQLLSRQSTLQRAVMQG

SEQ ID NO: 159085 - protein, 363 aa, Zea Mays
MTPHLPAVSSSSTTTTSRAAAAAHHLLDAAAAPPSSPHQYRRRRRRRVLGCLRPRAASVRCCAAAARAAEATTRVFVVSDLHTDYPENMEWVRRLPAQVGAGEGRGVDALVVAGDVAETRDNFARTMEVLRERFAAVFYVPGNHDLWLRREGGLYMDSLEKLTALLDACSELGVDTGPRTIGDLGIIPLFSWYHKSFDKEKDVNSLNDKNHDAIEEVKSSSKHILTFSHFVPRQELCPEKRMLYYPYLPKVIGSDFLERRLRDIHSNREDRAACHVFGHTHFCWDSVVDEIRYVQAPLAYPRERKRRMNGEGWLPFCVYRDGFNPEIYPALWSDYYNKNKREPENTQLAPWVASHYAKYHKFH

SEQ ID NO: 159086 - protein, 233 aa, Zea Mays
MELALASAKPSPRAAGAFPPLIFSPLKPFPLLRFPPRRTAAAALRLRLRLRAAAADAGETSPGEEVFGARRELTGIQPLVEALPPAARTAAELAVAAAAVAAGYGIGLRAGGGSRAVAVAGAAVLCAASVAGAAAVNSVVPEVAAVGLHNYVAGHDDPTNLDNGEVEAIAKKYGVSTQDDAFKAELCDLYARDRSQGVGTVASLADFITTAGSLPSHDDRGSPAELQGDFIPR

SEQ ID NO: 159087 - protein, 569 aa, Zea Mays
MSEGDATQLALEKGLPQVSNDDGSSSPATMHKLKVDTEDAGSKIESPTPEKLESRSKGVVVSSLARNLLAERYKDRFANQFLEDEGDIDDEDYNDSISPGMSRSQRSRSIELLEKHKDLLNLFNRMESSIRLLRLRKRMATFNNIATQVEILAKRKLSYCHLAQMKYLFPEAIQIKRVLLHDEKSLCMYADMEIILVMDVVEYTSTDHSPSMTICDAFYSKLLTFLDAHHKSQLLFMQGTDIPEAILPEPFNLRSRGQLNLEASHNGHAAEPHLQGTTKDGFSNASHFPQSFRKLMSQKVITDGAERTQLLLDPTKLSSVSAYDTEGTNRSPKKQDKHASVTVNSEISATPSRHLISRCQEGTPKQETLESPLLAQTPATQTPKRQLPTPLEKLEATCGHISEPRSASSARRSLNTSLKFEGGSPSYHDRMEHVATSKIGILSEDSSSFNKSLEENGPVFFTDRDKINLADPVGVQEKMASLRSTFGIVCDISHSIKNSLITKQELFHNILANNLEIEQMGEIEEQLHILEDLAPNWISKKVINGEEILYSFETIADQNSVWERLVEAV

SEQ ID NO: 159088 - protein, 519 aa, Zea Mays
MSEGDATQLALEKGLPQVSNDDGSSSPATMHKLKVDTEDAGSKIESPTPEKLESRSKGVVVSSLARNLLAERHKDLLNLFNRMESSIRLLRLRKRMATFNNIATQVEILAKRKLSYCHLAQMKYLFPEAIQIKRVLLHDEKSLCMYADMEIILVMDVVEYTSTDHSPSMTICDAFYSKLLTFLDAHHKGTDIPEAILPEPFNLRSRGQLNLEASHNGHAAEPHLQGTTKDGFSNASHFPQSFRKLMSQKVITDGAERTQLLLDPTKLSSVSAYDTEGTNRSPKKQDKHASVTVNSEISATPSRHLISRCQEGTPKQETLESPLLAQTPATQTPKRQLPTPLEKLEATCGHISEPRSASSARRSLNTSLKFEGGSPSYHDRMEHVATSKIGILSEDSSSFNKSLEENGPVFFTDRDKINLADPVGVQEKMASLRSTFGIVCDISHSIKNSLITKQELFHNILANNLEIEQMGEIEEQLHILEDLAPNWISKKVINGEEILYSFETIADQNSVWERLVEAV

SEQ ID NO: 159089 - protein, 476 aa, Zea Mays
MSEGDATQLALEKGLPQVSNDDGSSSPATMHKLKVDTEDAGSKIESPTPEKLESRSKGVVVSSLARNLLAERYKDRFANQFLEDEGDIDDEDYNDSISPGMSRSQRSRSIELLEKHKDLLNLFNRMESSIRLLRLRKRMATFNNIATQVEILAKRKLSYCHLAQMKYLFPEAIQIKRVLLHDEKSLCMYADMEIILVMDVVEYTSTDHSPSMTICDAFYSKLLTFLDAHHKGTDIPEAILPEPFNLRSRGQLNLEASHNGHAAEPHLQGTTKDGFSNASHFPQSFRKLMSQKVITDGAERTQLLLDPTKLSSVSAYDTEGTNRSPKKQDKHASVTVNSEISATPSRHLISRCQEGTPKQETLESPLLAQTPATQTPKRQLPTPLEKLEATCGHISEPRSASSARRSLNTSLKFEGGSPSYHDRMEHVATSKIGILSEDSSSFNKSLETQWVSRKRWLRYVPHLASSAIFLILSRIR

SEQ ID NO: 159090 - protein, 792 aa, Zea Mays
MFVLTATTSTTTATSLLLRCRPLPSPKTVTLATPPAILPFCIRSRFSASASASASSVSPQSRATAAAAAGKSREKKPPTARAKRADAVPAAAAPGMSASGGGSAGKRTVADVLMGNARAAASKAKKAAPSPKKPQAKTDGAEVEPEAAAVAEKPPSPARSKRASSPAKSPKLLPDGSTSSAKSKGPAALAQLDAAKENPPSPKRSKTLAAKSDTQPSGEGVVGLGHTDGKKGSPSPTKAKGQASQSEEKKRAASPKKAKTTDSPKTEKNITLELKKKGSEFDPMAVAYWKPGEPVPFLFLARALDLISNESGRIVITEILSNVFRTVMATTPDDLLATVYLSANRIAPPHEGIELGIGDASVIRALAEAYGRKEEHVKKDLKELGDLGLVAKASRSSQKMMFKPKPLTIARVLSTFRTIAKESGKDSQDKKRNHMKGLLVAATDCEPQYITRLLQSKMRIGLAEKTVQMALGQAAVYADKNPLPPKVQSPFEEAAKIIKQAYSVLPIYDKIVPAILEVGVWKLPETCKFSIGVPVGPMLAKATKSVSEIIDKFQGLEYTCEYKYDGERAQIHCMEDGSVEIYSRNAERNTGKYPDVVDAVSRFRKATVKSFVLDCEIVAYDREKQKILPFQILSTRARKGVTINDIKVSVCTFGFDILYINGKPLLQEQLKIRREHLYNSFEEVPGVFKLATAITSNDLEEIQKFLDTAVNSSCEGLIIKTLDKDATYEPAKRSNNWLKLKKDYMDSIGDSLDLVPIAAFYGRGKRTGVFGSFLLACYDEQNEEYQTICNIA

SEQ ID NO: 159091 - protein, 720 aa, Zea Mays
MFVLTATTSTTTATSLLLRCRPLPSPKTVTLATPPAILPFCIRSRFSASASASASSVSPQSRATAAAAAGKSREKKPPTARAKRADAVPAAAAPGMSASGGGSAGKRTVADVLMGNARAAASKAKKAAPSPKKPQAKTDGAEVEPEAAAVAEKPPSPARSKRASSPAKSPKLLPDGSTSSAKSKGPAALAQLDAAKENPPSPKRSKTLAAKSDTQPSGEGVVGLGHTDGKKGSPSPTKAKGQASQSEEKKRAASPKKAKTTDSPKTEKNITLELKKKGSEFDPMAVAYWKPGEPVPFLFLARALDLISNESGRIVITEILSNVFRTVMATTPDDLLATVYLSANRIAPPHEGIELGIGDASVIRALAEAYGRKEEHVKKDLKELGDLGLVAKASRSSQKMMFKPKPLTIARVLSTFRTIAKESGKDSQDKKRNHMKGLLVAATDCEPQYITRLLQSKMRIGLAEKTVQMALGQAAVYADKNPLPPKVQSPFEEAAKIIKQAYSVLPIYDKIVPAILEVGVWKLPETCKFSIGVPVGPMLAKATKSVSEIIDKFQGLEYTCEYKYDGERAQIHCMEDGSVEIYSRNAERNTGKYPDVVDAVSRFRKATVKSFVLDCEIVAYDREKQKILPFQILSTRARKGVTINDIKVSVCTFGFDILYINGKPLLQEQLKIRREHLYNSFEEVPGVFKLATAITSNDLEEIQKFLDTAVNSRVDYQDIG

SEQ ID NO: 159092 - protein, 497 aa, Zea Mays
MFVLTATTSTTTATSLLLRCRPLPSPKTVTLATPPAILPFCIRSRFSASASASASSVSPQSRATAAAAAGKSREKKPPTARAKRADAVPAAAAPGMSASGGGSAGKRTVADVLMGNARAAASKAKKAAPSPKKPQAKTDGAEVEPEAAAVAEKPPSPARSKRASSPAKSPKLLPDGSTSSAKSKGPAALAQLDAAKENPPSPKRSKTLAAKSDTQPSGEGVVGLGHTDGKKGSPSPTKAKGQASQSEEKKRAASPKKAKTTDSPKTEKNITLELKKKGSEFDPMAVAYWKPGEPVPFLFLARALDLISNESGRIVITEILSNVFRTVMATTPDDLLATVYLSANRIAPPHEGIELGIGDASVIRALAEAYGRKEEHVKKDLKELGDLGLVAKASRSSQKMMFKPKPLTIARVLSTFRTIAKESGKDSQDKKRNHMKGLLVAATDCEPQYITRLLQSKMRIGLAEKTVQMALGQAAVYADKNPLPPKVQSPFEERYSK

SEQ ID NO: 159093 - protein, 89 aa, Zea Mays
MTAGAQGTITGMLTASDFVLILRKRNIQVIGNKEPISAWKEAKLQFYGVPDGAAMQRRPLIHVLLHIFANSMCKQLQDQHFHNINILPI

SEQ ID NO: 159094 - protein, 382 aa, Zea Mays
MPAVLNENEDGAAAADLERQQCWCSCSCSCLPLCLWPGASGSRGPRKPGGTGAKRRRWRRRLKLSWLVWPWSPKSGKGDAGGGGDDSSKEGMKKRRRKDGRRRLKLSWLAWPWSRRSDKGDAGGDGDDSSKEGKKRRRKGGRRRLLLLLTTTTSLQLKKALASVVSGESALLPAPAKVSSFGDAKKQSNRRPRRPTAEDAARGSRQPQPSATAATASTGSTTAVPAGSRPETTSQPSPKPTEGSAASGRTWRAPSRRQRHSLHQPDCSCSSSGLWTAATTLGVIVLLGRVIAVVFLCSCLYGARFVRAWAAGDAGASAKAQLSGEGGVVGVGSSSRCFSDPVAVAGDEVAAEMCTTEERKKKVVMAGLLDRAGKAPSSRFRR

SEQ ID NO: 159095 - protein, 212 aa, Zea Mays
MVLSDCKGNSMYAEIPANLAEEKGALIETNQIYDISRFRVTAAKTAYKPIDGDKMIQFTIYTIIKPASNPPPTFPLYIYQLTPFDEIESQIQHKTKFLDVLGTITEVTALKIVHIEGQLSPTIIRDVMIEDLSRKTHKITLWAKRATSFTIQNVYDPISKKPILALFVGCLPKFYKGKYLLQLQIFITIYTSHITQRKDIRDYNSKQYQVFT

SEQ ID NO: 159096 - protein, 230 aa, Zea Mays
MSQENGLSMVPLKMVPCSTSTWSYQIASMYAEIPANLAEEKGALIETNQIYDISRFRVTAAKTAYKPIDGDKMIQFTIYTIIKPASNPPPTFPLYIYQLTPFDEIESQIQHKTKFLDVLGTITEVTALKIVHIEGQLSPTIIRDVMIEDLSRKTHKITLWAKRATSFTIQNVYDPISKKPILALFVGCLPKFYKGKYLLQLQIFITIYTSHITQRKDIRDYNSKQYQVFT

SEQ ID NO: 159097 - protein, 712 aa, Zea Mays
MGEETLVAMPPALPHHHAPTPPQPPSGPVAADKGEEGDHRRPAEGVAGPPQVQPRSVTPHGLGGEEGDVYYARKMLQGAVLRPPPHLPQPEAPPGLARARSTPAAPHEYAAQGDGEDEERESKRPVERSASANSASTAVVDVESIGRFFRDRRDVLSSAITRRISSLKESTSAAKAGAYGVQEIHLPNVKVTVRLKDAIAAADDTDTDTYDVGYTFSGGRIKGRVSFFSRSGCRDCAAVRAFFRQSGLPYVEVNLDVFPEREAELGSRAGAAARVPQIFLNEKLLGGLVVLNSLRNGGEFERRVRDLAGRRCPDSAPRVPVYGFDDDAGKADEEAEDAMVGIVRVLRHRLPIQDRFVRVKLVKNCFSGTDMVDGIVNHLDCSRKKAVEIGKELARKHFIHHVFRENDFEDGNQNLYRFLEHDPAVPKYYNFRGSTNDGEPRPAAAIGQRMTRIMLAILEAYASDDRRHLDYGRIAASEEFRRCGALHGRSGNTHHRHNFSAHAQLRELQRADMTQLPAEERLPFFLNLHNAMAIHAVVRVGQPGAVDRRPFFSDFQYVVGGHPYSLAAIRNGILRGNRRQPYTLAKPFGSSDRRLELAQRRANPLVHFALCDATRSSPTVRFYTAQGVEPELRHAAREFFLHGGVEIDLESRTVHLTRIIKWYSADFGQDRDILRWLLNYLDPTKAGLLSHLLNEGGPISISYMNYDWSLNV

SEQ ID NO: 159098 - protein, 245 aa, Zea Mays
MTRIMLAILEAYASDDRRHLDYGRIAASEEFRRYANLVQELQRADMTQLPAEERLPFFLNLHNAMAIHAVVRVGQPGAVDRRPFFSDFQYVVGGHPYSLAAIRNGILRGNRRQPYTLAKPFGSSDRRLELAQRRANPLVHFALCDATRSSPTVRFYTAQGVEPELRHAAREFFLHGGVEIDLESRTVHLTRIIKWYSADFGQDRDILRWLLNYLDPTKAGLLSHLLNEGGPISISYMNYDWSLNV

SEQ ID NO: 159099 - protein, 263 aa, Zea Mays
MCFVLLFLRCRIHTGCQIANRKYCNCNVKLSMLVRLQRAAVDIRVPRVEAPPISRTSFPAQPSSLSPVHTGRAAAAHPTRQRRRRPPPAPSSRRRETEQPVAAGVGAPCPAIQHQKWNPSHPREVVDTRRRAAKEEELAVAGSSRPPMSSGADGSDPITGLGPSTIPEPPDREPPHLQSPSPAAQQEVAASQAETPVPAVTIVISRPGEEVQTPDAMGGSPACSTQAGDGKATATSVSLTASAAAKEAELARSDSFDDYEQCR

SEQ ID NO: 159100 - protein, 348 aa, Zea Mays
MCFVLLFLRCRIHTGCQIANRKYCNCNVKLSMLVRLQRAAVDIRVPRVEAPPISRTSFPAQPSSLSPVHTGRAAAAHPTRQRRRRPPPAPSSRRRETEQPVAAGVGAPCPAIQHQKWNPSHPREVVDTRRRAAKEEELAVAGSSRPPMSSGADGSDPITGLGPSTIPEPPDREPPHLQSPSPAAQQEVAASQAETPVPAVTIVISRPGEEVQTPDAMGGSPACSTQAGDGKATATSVSLTASAAAKEAELARSDSFDDYEQCRVCQQKTEEPLVDLGCRCRGDLAKAHRTCIDVWFRTRGSNKCEICQLLPISPLQRRKQVQVIGFGGLIRLMEGDEEDVKGYFYHWI

SEQ ID NO: 159101 - protein, 357 aa, Zea Mays
MCFVLLFLRCRIHTGCQIANRKYCNCNVKLSMLVRLQRAAVDIRVPRVEAPPISRTSFPAQPSSLSPVHTGRAAAAHPTRQRRRRPPPAPSSRRRETEQPVAAGVGAPCPAIQHQKWNPSHPREVVDTRRRAAKEEELAVAGSSRPPMSSGADGSDPITGLGPSTIPEPPDREPPHLQSPSPAAQQEVAASQAETPVPAVTIVISRPGEEVQTPDAMGGSPACSTQAGDGKATATSVSLTASAAAKEAELARSDSFDDYEQCRVCQQKTEEPLVDLGCRCRGDLAKAHRTCIDVWFRTRGSNKCEICQQVAANIPPPETQASVCLLFCTSYLSICIGSFGECMPLVHMYIHCRLCSN

SEQ ID NO: 159102 - protein, 83 aa, Zea Mays
MISILAQERLLGFALGSVSIGGFVLHQRRAIYRSIAEADGSPYFYQPGEIASRRSSTELAHVWNKAVDETLGRLVVYLSSRGW

SEQ ID NO: 159103 - protein, 180 aa, Zea Mays
MGACASSSRGRPNHGKNQKSAKVAAIPCTPAAQVGRGAASSEMEEKSSFIWQIDGFSSLLDKQEGWTNSGYFKIKDLNWYLQLNLKDRKSGDEREYVSLILVLSKTSGLEPDTIVEASFKLLIYDQAYGRHSEHESVSSEWSSSSSPLLKSRTVQERCMFRRELASVVPGRPTPGSSMTS

SEQ ID NO: 159104 - protein, 183 aa, Zea Mays
MNEPSSGFIVGDSCVFGVELIKFTTAKVKDGSGTLHVQKRIGFCSAREAYTWIINDFLSLKGRCYSPEFEIGGHKWYLTMYPSGTGIDGDKEILSLYLHMAKPNGDASLQNSGVLVEVSLSIKDKVTSNRKTMTGRCQLQATEGEGWGWSNFMATKSVKDWYLVKGSCLIEADVAILGSSKMN

SEQ ID NO: 159105 - protein, 76 aa, Zea Mays
MTQFSYMIREKKISQICNFVILIIVQENKMQKLSKEALSTHVFNQHSTSKPLGDSSGFEPPKLHAISGLEACYSEI

SEQ ID NO: 159106 - protein, 466 aa, Zea Mays
MERLFERGGIFCTSNVTTMIFTGATVGGGSAVNWSASIRTPEEVTQEWAREHGLPVFASPGYAQAMDAVCARLGVTDGCQEEGFQNKVVRRGCEALGLCADAVPRNSSDAHFCGSCNFGCPTGDKRGTDTTWLVDAVARGAVILTGCKAEYFVLEKNHSSGSGSGRGKKCVGLVATCASNGVTKKLRIEAKVSIAACGALMTPPLLRRSGLKNRHIGSNLHLHPVSMAWGYFPENKQDPPLSGKCYEGGIITSMHRVTDRTIIETPALGPGAFAAMVPWESGRDMKERMRRYSRTAHAFALVRDRGVGFVDGEGRVRFTPSREDVDELRNGLRRVLRILVAAGAAEVGTHRSDGLRLRCKGLRDEDLEGFLDEVTIEKGPMHSRVDKWALHCSAHQMGSCRMGSSPKDGAVDGRGESWEAEGLYVCDGSLLPTAVGVNPMITIQSIAFCLSKGIAETMAQGQGKGQ

SEQ ID NO: 159107 - protein, 633 aa, Zea Mays
MPVERRERVLQRWSGARWLFPLKITFVIAKLLSHYAFYTMVNENSDNPSWKAIGYSVPVPAAAADVDRLRPRELGPAEAEAPSPRPLDSGVVETRSLNDATLLKSLTERGVAVKAGVSGAHHTVQCDVVIVGSGCGGGVAAAVLAAAGRKVVVVEKGDYFTAESYTSVEGPSMERLYEKGGIFCTSNVTTIMFAGTTVGGGSAINWSASVRTPEWVTQEWAREHGLPMFGRPEYAHAMDAVCARLAVTGGCREEGFQNKVLRRGCEALGLRGDAVPRNSSEGHFCGSCHLGCPTGDKRGTDTTWLVDAVARGAVVLTGCKAERFVLESNPGGRDGRSNRCVGLVATCMSDGITKKLRIEAKVSVSACGALMTPPLLRNSGLQNSHVGRNLHLHPVSMAWGYFPDSTPEAELSGKCYEGGIITTMRRVTARTIIQTPALGPGCWASLVPWESGRDMKERMLRYARTAHAFALVRDRGAGHVDGEGRVRYTPSREDVDELRNGLRQTLRILVAAGAAEVGTHRSDGLRLRCDGLRDEDLEAFLKQVTVEKGPMVPGHDKWALHCSAHQMGSCRMGSSPKHGAVDGRGESWEAEGLYVCDGSLLPTAVGVNPMITIQSTAYCVSKGIAESLARDNK

SEQ ID NO: 159108 - protein, 174 aa, Zea Mays
MATGRRGSPLLRRCKREGYTHGLRPPQMEALRAMCGALIPSLPVEGLHVQPQPGRGKDDLDRFFRASAADGAIPDEVAEMVTRCVWEGVLLMRIVLWVLSTRIGTLALCGRLCFSAGKSSFPYACRFADMPVERRERVLQRWSGARWLFPLKITFVIAKLLSHYAFYTMSYRLS

SEQ ID NO: 159109 - protein, 645 aa, Zea Mays
MFPQRKCGTPCYSAGPSMPSSPGQKLCAAVSASTWVEPHGRCTVVFALAWSSPKVKFQKGCTYNRRYTQFYGTSEKSAVNLVHDALTKYKLWEEEIEKWQNPILKDERLPEWYKFTLFNELYFLVAGGTVWTDGQPPAIDEKKSPGFNHQKSSKRGTKDTNQGSVKDRHVNLAVEQVPHGGYMANGDDHSVSKFAAVHGSEMQEQINGLKSEEPIPYLISKDGPEHVGKFLYLEGVEYIMWNTYDVHFYASFALLDLFPKIELSIQRDFANAVLYEDRRKVKFLADGTSGIRKVKGAVPHDLGTHDPWHEMNAYNIHDTSKWKDLNPKFVLQIYRDFAATGDMQFGRDVWPAVCAAMDYMDQFDRDGDGLIENDGFPDQTYDAWTVHGISAYCGCLWLAALQAAATMAHRLGDRHFAEKYKLKFIKAKAVYEAKLWNGSYFNYDSGTSSNSRSIQADQLAGQWYAASSGLPPLFDEHKIRTALQKIFEFNVMKVKGGRMGAVNGMTPKGKVDETCMQSREIWTGVTYAVAANMLLHGMEHQGFTTAEGIFTAGWSEEGYGYWFQTPEGWTTDGHYRSLVYMRPLAIWAIQYAVSPPKAILEAPKVNLMDRIHISPHMVRAISEISIRKVAPDNRCFPSSAFHCEC

SEQ ID NO: 159110 - protein, 914 aa, Zea Mays
MVSGHIFHCRKNSWPAEEYVGRTALQLLDFDGGAPPEQAWRRRLNSHANILKEFSVTFMEAMRMMSLGLRLWSYVREEASHGRKAPIDPFTKERCKPSASQGVPLGGMGSGSISRGFRGEFKNWHIIPGLCESSPVMENQFSIFVSRDGGNKKYSSVLAPGHHEGLKKNSDSGISSWDWNLSGQHSTYHALFPRAWTVYDGEPDPDLKISCRQISPFIPHDYKDSSLPTSVFVYTLVNTGRDRAKVSLLMTWANSIGGFSHNSGGHYNEPFIAEDGVSGVLLHHKTAKDNPPVTFAVAACETQNVNVTVLPVFGLSGENHVSAKEMWNTMLQNGHFDRENFSAGPSMPSSPGQKLCAAVSASTWVEPHGRCTVVFALAWSSPKVKFQKGCTYNRRYTQFYGTSEKSAVNLVHDALTKYKLWEEEIEKWQNPILKDERLPEWYKFTLFNELYFLVAGGTVWTDGQPPAIDEKKSPGFNHQKSSKRGTKDTNQGSVKDRHVNLAVEQVPHGGYMANGDDHSVSKFAAVHGSEMQEQINGLKSEEPIPYLISKDGPEHVGKFLYLEGVEYIMWNTYDVHFYASFALLDLFPKIELSIQRDFANAVLYEDRRKVKFLADGTSGIRKVKGAVPHDLGTHDPWHEMNAYNIHDTSKWKDLNPKFVLQIYRDFAATGDMQFGRDVWPAVCAAMDYMDQFDRDGDGLIENDGFPDQTYDAWTVHGISAYCGCLWLAALQAAATMAHRLGDRHFAEKYKLKFIKAKAVYEAKLWNGSYFNYDSGTSSNSRSIQADQLAGQWYAASSGLPPLFDEHKIRTALQKIFEFNVMKVKGGRMGAVNGMTPKGKVDETCMQSREIWTGVTYAVAANMLLHGMEHQGFTTAEGIFTAGWSEEGYGYALSHTLLSRSFRFFFSVVQLFTLP

SEQ ID NO: 159111 - protein, 585 aa, Zea Mays
MFPQRKCGTPCYSAGPSMPSSPGQKLCAAVSASTWVEPHGRCTVVFALAWSSPKVKFQKGCTYNRRYTQFYGTSEKSAVNLVHDALTKYKLWEEEIEKWQNPILKDERLPEWYKFTLFNELYFLVAGGTVWTDGQPPAIDEKKSPGFNHQKSSKRGTKDTNQGSVKDRHVNLAVEQVPHGGYMANGDDHSVSKFAAVHGSEMQEQINGLKSEEPIPYLISKDGPEHVGKFLYLEGVEYIMWNTYDVHFYASFALLDLFPKIELSIQRDFANAVLYEDRRKVKFLADGTSGIRKVKGAVPHDLGTHDPWHEMNAYNIHDTSKWKDLNPKFVLQIYRDFAATGDMQFGRDVWPAVCAAMDYMDQFDRDGDGLIENDGFPDQTYDAWTVHGISAYCGCLWLAALQAAATMAHRLGDRHFAEKYKLKFIKAKAVYEAKLWNGSYFNYDSGTSSNSRSIQADQLAGQWYAASSGLPPLFDEHKIRTALQKIFEFNVMKVKGGRMGAVNGMTPKGKVDETCMQSREIWTGVTYAVAANMLLHGMEHQGFTTAEGIFTAGWSEEGYGYALSHTLLSRSFRFFFSVVQLFTLP

SEQ ID NO: 159112 - protein, 78 aa, Zea Mays
MALGDSGVCGVDLTDKVVDIIFHVFDANCDGKLSSEEFLRSLQRRENDIRQPATSGFLGVITCWLNCTKCSLQQMLPQ

SEQ ID NO: 159113 - protein, 553 aa, Zea Mays
MILDIVEAAVPEGLPAGFGKGCKLNEIICKAVELLPELWKSGGFSLETISSYRRSLLNNWNLDGETIARIQKKFAVFLLYSGCEARPPNLHSQLDGSFVPRNNIEEAILLLMILLRKSNLKRIEQDPSVMHHLTFALSMSGQLIPLAGQFEELLPGVLDKKEWLYSVALCYLAEEDDLSALNLLKIILKSGEDSVQLIELLLASKACIEMSIHTEGAFYARRAIANMQGGCKPMAGLANLLLGVALSNQARSAISDTDRASWQCEALEALGNAEKNIHGKDSRALYSLSLENAVQRKLELAAFYAKRLVKLEAGSELRSWLLLARILSAQKLFADAETVVDAALDQTGKWCQGDLLRTKARIQAAQGQFREAVETYTQLLAIIQLRTKSLTAGVCLPKGNKDDKGLETETWYDLALLYLGMAQWRDAEVCVLKIRSISPYSALAWHATGKIYEAKGLRKEALGAFFRALDLDPKHVPSLISTATVLQQLGDRPLPSIRCFLTDALQLDRTNHVAWFNLGLLYKEEGGRSAAEAAECFQAAAFLKETAPSEPFR

SEQ ID NO: 159114 - protein, 583 aa, Zea Mays
MDGRKRKGKFRNSLRRMAMECLCSGEQLKASDETMRSSDSTITKDFSASGYSSRNGEIEQYLDNGNIEEAELSLREGICLNYEEARALLGRLEYQRGHVEAALRVFDGIDISALVPKMKISIARKTDRRKTHSQWDSPPMPLHAVSLLMEAIYLKARALHDLGKDKEAAQECRMILDIVEAAVPEGLPAGFGKGCKLNEIICKAVELLPELWKSGGFSLETISSYRRSLLNNWNLDGETIARIQKKFAVFLLYSGCEARPPNLHSQLDGSFVPRNNIEEAILLLMILLRKSNLKRIEQDPSVMHHLTFALSMSGQLIPLAGQFEELLPGVLDKKEWLYSVALCYLAEEDDLSALNLLKIILKSGEDSVQLIELLLASKACIEMSIHTEGAFYARRAIANMQGGCKPMAGLANLLLGVALSNQARSAISDTDRASWQCEALEALGNAEKNIHGKDSRALYSLSLENAVQRKLELAAFYAKRLVKLEAGSELRSWLLLARILSAQKLFADAETVVDAALDQTGKWCQGDLLRTKARIQAAQGQFREAVETYTQLLAIIQLRTKSLTAGVCLPKVWHNGGMQRFVY

SEQ ID NO: 159115 - protein, 901 aa, Zea Mays
MDKIYLQTWLRDKEFTYSNAYNKGKTLVFSKVPLPDYRADLDDRHGSTQKEIKMSNQTEARVEDLLSRSKWNNNSASTSTVSTRQIFPGASSSVVEPAAPIDKEKLSSQLRELQNSRKTTASARSMQSFREKLPAFSMREGFLKAVAANQVLVISGETGCGKTTQLPQFILEEEINSLRGADCNIICTQPRRISAISVAARVSAERGEELGEAVGYQIRLESKRSAQTRLLFCTTGVLLRRLVQEPDLIGVSHLLVDEIHERGMNEDFLIIILRDLLPRRPDLRLVLMSATINAELFSMYFGDAPVMHIPGFTFPVAELFLEDVLEKTRYRINSERDNFAGSSRRKRFSSVKSDPLSDVFEDIDITKEYGNYSSSTRQSLEAWSAAELDLSLVENTIEYICRYEAEGAILVFLTGWDEISKLLDKIKGNNFLGSPNRFLVLPLHGSMPTVNQREIFDRPPANMRKIVLATNIAESSITIDDVVYVIDCGKAKETSYDALNKLACLLPSWISKASAHQRRGRAGRVQPGFCYRLYPKIIHDAMPQFQLPEILRTPLQELCLTIKSLQLGAVSSFLAKSLQPPDPLSVKNAIELLKTIGALDDMEELTSLGRHLCTLPLDPNIGKMLLMGSVFQCLDPVLTIAAALAYRNPFVLPIDRKEEADAVKRSFAGDSCSDHIALVKAFVAWKDAKRSGRERTFCWESFLSPMTLKMMDDMRNQFFDLLSDIGFVSKTAGVKAYNRYGNDLEMVCAVLCAGLYPNVVQCKRRGKRTAFYTKDVGKVDIHPSSVNAFVNQFPLPFLVYSEKVKTASIYVRDSTNISDYALLLFGGSLSPSKTGEGIEMLGGYLHFSAPKRTIELIQKLRGELDKLLQKKIEEPGLDIFSQGKGVVAAAVELLHSQNFDH

SEQ ID NO: 159116 - protein, 1024 aa, Zea Mays
MKRAIVSAGEGGDTRGPGGNAPGASDGGERSPSGSRGEEKLYQTWWMKAHGEWGKESKKERNLWANMYDEKIWDVEIGPEIIDEALHPATVGRGIIELDVWPAPSHEQIVRLETPVSERADKDEGRARNGGRESSSCSRHYLLSSFASTPLKTLNALRTLVVMSYRGGRGGGGPNSHRGRGRGGGGGAGRRGGGGGRGEQRWWDPEWRAERLRQMHGEVEKVDENEWWNKIGQLREGSQQELVVKRNFGRDGQNILANMAQRQGIYFNAYNKGKTLVFSKVPLPDYRADLDDRHGSTQKEIKMSNQTEARVEDLLSRSKWNNNSASTSTVSTRQIFPGASSSVVEPAAPIDKEKLSSQLRELQNSRKTTASARSMQSFREKLPAFSMREGFLKAVAANQVLVISGETGCGKTTQLPQFILEEEINSLRGADCNIICTQPRRISAISVAARVSAERGEELGEAVGYQIRLESKRSAQTRLLFCTTGVLLRRLVQEPDLIGVSHLLVDEIHERGMNEDFLIIILRDLLPRRPDLRLVLMSATINAELFSMYFGDAPVMHIPGFTFPVAELFLEDVLEKTRYRINSERDNFAGSSRRKRFSSVKSDPLSDVFEDIDITKEYGNYSSSTRQSLEAWSAAELDLSLVENTIEYICRYEAEGAILVFLTGWDEISKLLDKIKGNNFLGSPNRFLVLPLHGSMPTVNQREIFDRPPANMRKIVLATNIAESSITIDDVVYVIDCGKAKETSYDALNKLACLLPSWISKASAHQRRGRAGRVQPGFCYRLYPKIIHDAMPQFQLPEILRTPLQELCLTIKSLQLGAVSSFLAKSLQPPDPLSVKNAIELLKTIGALDDMEELTSLGRHLCTLPLDPNIGKMLLMGSVFQCLDPVLTIAAALAYRNPFVLPIDRKEEADAVKRSFAGDSCSDHIALVKAFVAWKDAKRSGRERTFCWESFLSPMTLKMMDDMRNQFFDLLSDIGFVSKTAGVKAYNRYGNDLEMVCAVLCAGLYPNVVQCKRRGKRTAFYTKD

SEQ ID NO: 159117 - protein, 360 aa, Zea Mays
MPQFQLPEILRTPLQELCLTIKSLQLGAVSSFLAKSLQPPDPLSVKNAIELLKTIGALDDMEELTSLGRHLCTLPLDPNIGKMLLMGSVFQCLDPVLTIAAALAYRNPFVLPIDRKEEADAVKRSFAGDSCSDHIALVKAFVAWKDAKRSGRERTFCWESFLSPMTLKMMDDMRNQFFDLLSDIGFVSKTAGVKAYNRYGNDLEMVCAVLCAGLYPNVVQCKRRGKRTAFYTKDVGKVDIHPSSVNAFVNQFPLPFLVYSEKVKTASIYVRDSTNISDYALLLFGGSLSPSKTGEGIEMLGGYLHFSAPKRTIELIQKLRGELDKLLQKKIEEPGLDIFSQGKGVVAAAVELLHSQNFDH

SEQ ID NO: 159118 - protein, 412 aa, Zea Mays
MNEDFLIIILRDLLPRRPDLRLVLMSATINAELFSMYFGDAPVMHIPGFTFPVAELFLEDVLEKTRYRINSERDNFAGSSRRKRFSSVKSDPLSDVFEDIDITKEYGNYSSSTRQSLEAWSAAELDLSLVENTIEYICRYEAEGAILVFLTGWDEISKLLDKIKGNNFLGSPNRFLVLPLHGSMPTVNQREIFDRPPANMRKIVLATNIAESSITIDDVVYVIDCGKAKETSYDALNKLACLLPSWISKASAHQRRGRAGRVQPGFCYRLYPKIIHDAMPQFQLPEILRTPLQELCLTIKSLQLGAVSSFLAKSLQPPDPLSVKNAIELLKTIGALDDMEELTSLGRHLCTLPLDPNIGKMLLMGSVFQCLDPVLTIAAALAYRNPFVLPIDRKEEADAVKRSFAGDSCRRL

SEQ ID NO: 159119 - protein, 157 aa, Zea Mays
MLFQVGGQGARPTFFEMSAAQQLPASLRAALTYSLGVFALRRPLLHTVLDYEDDFFALLMGVLESHSLRTTDGSFSESLYGLRRRPVKVAVKRKSPGTESNDKVYGSALRKRQKILSVVFLVSRLHTSSCICWMQLHFIVQHYMYLGFMFVVLLDKS

SEQ ID NO: 159120 - protein, 210 aa, Zea Mays
MLFQVGGQGARPTFFEMSAAQQLPASLRAALTYSLGVFALRRPLLHTVLDYEDDFFALLMGVLESHSLRTTDGSFSESLYGLRRRPVKVAVKRKSPGTESNDKVYGSALRKRQKILSVVFLVVLPYFKSKLQSIYNKEREARLQATLWGQDDVRFDEVDFVLDQEQTSQAQTEPTTGEMSNLTRFKKNFASLIGVCYPWIHATNEDGFIF

SEQ ID NO: 159121 - protein, 153 aa, Zea Mays
MAEAKGPHKLHRQWTFCLYDHVFRPSKLPGTADFHLFKAGVEPKWEDPECANGGKWTVPCNRKPTFETMWLETLMALVGEQFDETDDICGIVASVRPRGDKLALWTRTASNEAVQVNIGKKWKDVIDYNDKIIYTFHDDSRRDKPSRGGRYTV

SEQ ID NO: 159122 - protein, 325 aa, Zea Mays
MSTATATLAAARSPAVALLSLRRRAPAAAPIRFPGLRVGSGCRHIAMASAAHSRAPTDPLPKGADLFFRAVISNMEKVYLSRNPTAKTILELVRSYDELRFPAKKLRALWFSPPTNDGYSGTGTYGPLPRIFISELLVDELTTQSQEIIHKYIKTSGNGNNHAAIASTSGELTWEKPIYSDFQILSRESEYAAWTLVNGYALNHATIATHRLESDIRSINKFNKFVEDNGFKLNSEGGILKVSPDGLLQQSSTVADSSLFTFADGITESIPRSYIEFAERLLLPQFKDLQDEEVKEYHRRDGFEVGNADKIFESTSKDQLTRRSA

SEQ ID NO: 159123 - protein, 77 aa, Zea Mays
MTSFVFVNFCCSLFCILSLMVMVNVLGILGTVKAGVLPCRGAETVHLSALRCSVDVLSSDGVWFPAIHISLVCAYFL

SEQ ID NO: 159124 - protein, 93 aa, Zea Mays
MICARTGAQASRCRKHSLDRSCSCRLRAGRPLSRTSPPCGCSTRVFSWTSCRGRPMILAKLNRENFSKVLSFLVFTVSERHPYPSKASVSKMP

SEQ ID NO: 159125 - protein, 419 aa, Zea Mays
MARAPKSAGIALSLLLLAAAAKASAFPLLNSSLPDPAAVVADLHSKVATSRRRMQESGGGGGGGGGGCLTGNPIDDCWRCAGTDWRQDRQRLADCGIGFGRNALGGKGGPVYVVTDPSDRDPVNPSPGTLRHAAIQEGPLWIVFASDMAIRLNEELLVNSYKTIDGRGARVHVGGGGACITLQYVSNVIIHNVHVHDCVPAGNADVRSSPTHYGWRTRSDGDGISLFGARDVWVDHCALWRCADGLVDAIMGSTAITVSNSYFAHHDEVMLLGASDAYLPDSGMQVTIAFNRFGPGLVQRMPRCRRGYFHIVNNDYTSWEMYAIGGSAGPTINSQGNRYIAPADPNAKEVTKRVETAEGQWAGWNWRTEGDMMVNGAFFVPSGEGMEDIYGKASSTDPKSSALVDVLTQNAGVLGDPSC

SEQ ID NO: 159126 - protein, 387 aa, Zea Mays
MQESGGGGGGGGGGCLTGNPIDDCWRCAGTDWRQDRQRLADCGIGFGRNALGGKGGPVYVVTDPSDRDPVNPSPGTLRHAAIQEGPLWIVFASDMAIRLNEELLVNSYKTIDGRGARVHVGGGGACITLQYVSNVIIHNVHVHDCVPAGNADVRSSPTHYGWRTRSDGDGISLFGARDVWVDHCALWRCADGLVDAIMGSTAITVSNSYFAHHDEVMLLGASDAYLPDSGMQVTIAFNRFGPGLVQRMPRCRRGYFHIVNNDYTSWEMYAIGGSAGPTINSQGNRYIAPADPNAKEVTKRVETAEGQWAGWNWRTEGDMMVNGAFFVPSGEGMEDIYGKASSTDPKSSALVDVLTQNAGVLGDPRYGTRQPRTGGPPRVFLYTRRFC

SEQ ID NO: 159127 - protein, 430 aa, Zea Mays
MQESGGGGGGGGGGCLTGNPIDDCWRCAGTDWRQDRQRLADCGIGFGRNALGGKGGPVYVVTDPSDRDPVNPSPGTLRHAAIQEGPLWIVFASDMAIRLNEELLVNSYKTIDGRGARVHVGGGGACITLQYVSNVIIHNVHVHDCVPAGNADVRSSPTHYGWRTRSDGDGISLFGARDVWVDHCALWRCADGLVDAIMGSTAITVSNSYFAHHDEVMLLGASDAYLPDSGMQVTIAFNRFGPGLVQRMPRCRRGYFHIVNNDYTSWEMYAIGGSAGPTINSQGNRYIAPADPNAKEVTKRVETAEGQWAGWNWRTEGDMMVNGAFFVPSGEGMEDIYGKASSTDPKSSALVDVLTQNAGVLGDPRNDAEETGYRGVNYAGGRTGGGGGYGYGYLGMVYAGGGDQRWRSHSALSLVSSAITVVALGCLHLL

SEQ ID NO: 159128 - protein, 257 aa, Zea Mays
MDSEAVQHGCAHYSRGCSVVAPCCGQAFGCRHCHNDAKNSLEVDPRDRHEIPRHEIKKVICSLCSKEQDNCSSCGACMGKYFCKVCKFFDDDVSKGQYHCDGCGICRTGGVENFFHCDKCGCCYSNVLKDSHHCVERAMHHNCPVCFEYLFDSTKDISVLQCGHTIHLECMNEMRAHHHFSCPVCSRSACDMSATWRKLDEEVAATPMPDIYQKHMVWILCNDCSATSSVRFHVLGHKCPACSSYNTRETRAACPRI

SEQ ID NO: 159129 - protein, 190 aa, Zea Mays
MLPCFLIFSIFQKLGGHRVLFVYVYLWVGSLKSLWLHCSLLRRACHQAGQERFRTITSSYYRGAQGIILVYDVTKRESFSNLADVWTKEIEANSTNKDCIKMLVGNKVDKDDERMVTEEEGLAFAEESGCLFLESSAKTRENVEKCFEELALKILEVPSLLEEGSSSVVKRNILKQKQESHAKNGSGCCQ

SEQ ID NO: 159130 - protein, 72 aa, Zea Mays
MGHITGRMKTRASFQRTVLPAIKSLGCSWHRVLTPTESHLSRTCRVDLFAQLASNLLVSIDDGGLLLAGTRK

SEQ ID NO: 159131 - protein, 151 aa, Zea Mays
MQRHSAAKPCTAAPYKYTASSSLHTARKHTQQPHSCTELAAKMATKHLALCLLVLFSIGMGMVAVVVVAKVGLAMALVQDMDQVKDTDKVVVALAMDLDPAPVMEAATTTDIIRLFLRARYMLYKYVTRHESVLLHGMLAVSIVCVTPQGL

SEQ ID NO: 159132 - protein, 234 aa, Zea Mays
MQRHSAAKPCTAAPYKYTASSSLHTARKHTQQPHSCTELAAKMATKHLALCLLVLFSIGMGMATAAANRKLGYGSGSGYGEGGGSGGAAGGYGHGGGGGGGGGEGAGAGGSGYGSGQGSGYGAGSGAAGGYGSGGGGGGGGGQGGGSGYGHGGGEGYGSGSGFGGGAAGGGGGHGGGGGGGQGGSGYGSGSGYGSGEGYGQGGAHGGGYGSGGGSGYGSGSGSGYGGGNDNGHY

SEQ ID NO: 159133 - protein, 249 aa, Zea Mays
MQRHSAAKPCTAAPYKYTASSSLHTARKHTQQPHSCTELAAKMATKHLALCLLVLFSIGMGMATAAANRKLGYGPGGGGGGGGSGGGGGGGYGGPGYGSGSGYGEGGGSGGAAGGYGHGGGGGGGGGEGAGAGGSGYGSGQGSGYGAGSGAAGGYGSGGGGGGGGGQGGGSGYGHGGGEGYGSGSGFGGGAAGGGGGHGGGGGGGQGGSGYGSGSGYGSGEGYGQGGGGSGYGSGSGSGYGGGNDNGHY

SEQ ID NO: 159134 - protein, 137 aa, Zea Mays
MQLAPSCPPATSHGRRRSLETTSVRPRASTTTLALARSGPRGSVEAAARTSLCLQSKKRRRKHLNMLLIIQKKKKKKPKLLDSPIRLHLKMTCRVVTTTLQGSRASTKRAAMVTTMGLVSVAATWMELLIPRLASVR

SEQ ID NO: 159135 - protein, 388 aa, Zea Mays
MRIRKSASRLLGSAYSASAAPTVDAAPRLDLLPPPHPAPCSAPESCGGSAFSSPSVSTAEPCELSRSPWDLIADLSLSDKKVEDELVDKYFVHVTTRASWLFSSTVSATTSTKKKKKLPAAVYEDSTQLRREAAKKTATNREEGETKKKAKVKKEEVQQDGAAAAAAQVWKCKKNDGRRWHCNRPVSQPNTLCEYHFVQKRSYLNPGFEFHSTAELEGAAPAPAPVHAASSKLSTSNKPRKKKKPGNDFSATEGFYYYAGFGPFRTKRQCRSGGTNEPLPAKQEEEEETPEYASHHTEEEEKEAKVAGFTNQAASQDDVSSCDDDIAGIAGVDEESSDGDYDGIGLGGCNVDGAADPQASIGEVRRKAPWKRWRKPVKARSLKSLICC

SEQ ID NO: 159136 - protein, 123 aa, Zea Mays
MTSSASGAGQIRPASPPPPTALQPSPRCLGPSRRGYLQPPVNLPTWPPPAAQIRCTTSRRQPPTAQTPCSTRESRQPLPLAAGRVDPLLHQGVGRPDPLLHQGEPPAAPPLCPNPRPRDCAPP

SEQ ID NO: 159137 - protein, 248 aa, Zea Mays
MRKFQDSIKALQADIDHANAMASEFLRDYDGSVIQMRVAYSAVAHFLLQWTDCKLAGALGLLKVMLYKVCADGSSALPDWEMEASIREFYGVIFPSLLQLPSGITELDDRKQRKLCLKKFRSRDEQLSEVDTERELECGICLEVSPKVVLPDCAHMLCMRCFEDWYEYGYNFIPMSGYEFFNEYNFISRTSIGKHYLMGTYPLLSLHMLPWQTLEEGSRPANFLERIKRGLGRRQQGDQGDQHLKERH

SEQ ID NO: 159138 - protein, 339 aa, Zea Mays
MCRAGAASLSIRSAMHCFRFASWERDADERRESAAAATTGRSLSARSNGSTTSTDRDVRRSASECSLKASELSSASSLGRGRQLSLSQRPPNTLRVFTFQELKSATRGFSRALMLGEGGFGCVYRGTVRSALEPRRSLDVAIKQLGRKGLQGHKEWMTEVNVLGVVDHANLVKLIGYCAEDDERGMQLLLVYEFMPNGSLADHLSSRSPRPASWAMRLRVALDTARGLKYLHEESEFKIIFRDLKPSNILLDDNWNAKLSDFGLARLGPQEGSHVSTVVQVICIKGGEIACAVPYKLPEHAPGLQADCKIAPYTVSPDAFGLQNGHEVFNQICHTGSSW

SEQ ID NO: 159139 - protein, 445 aa, Zea Mays
MCRAGAASLSIRSAMHCFRFASWERDADERRESAAAATTGRSLSARSNGSTTSTDRDVRRSASECSLKASELSSASSLGRGRQLSLSQRPPNTLRVFTFQELKSATRGFSRALMLGEGGFGCVYRGTVRSALEPRRSLDVAIKQLGRKGLQGHKEWMTEVNVLGVVDHANLVKLIGYCAEDDERGMQLLLVYEFMPNGSLADHLSSRSPRPASWAMRLRVALDTARGLKYLHEESEFKIIFRDLKPSNILLDDNWNAKLSDFGLARLGPQEGSHVSTVVVGTIGYAAPEYIHTGRLSTKNDIWSFGVVLLELLTGRRPLDRNRPRGEQNLVDWMKPYSSDAKKLEAAIDPRLQGNYSKRSAAQLASVANKCLVRHARHRPKMSEVQVICIKGGEIACAVPYKLPEHAPGLQADCKIAPYTVSPDAFGLQNGHEVFNQICHTGSSW

SEQ ID NO: 159140 - protein, 431 aa, Zea Mays
MHCFRFASWERDADERRESAAAATTGRSLSARSNGSTTSTDRDVRRSASECSLKASELSSASSLGRGRQLSLSQRPPNTLRVFTFQELKSATRGFSRALMLGEGGFGCVYRGTVRSALEPRRSLDVAIKQLGRKGLQGHKEWMTEVNVLGVVDHANLVKLIGYCAEDDERGMQLLLVYEFMPNGSLADHLSSRSPRPASWAMRLRVALDTARGLKYLHEESEFKIIFRDLKPSNILLDDNWNAKLSDFGLARLGPQEGSHVSTVVVGTIGYAAPEYIHTGRLSTKNDIWSFGVVLLELLTGRRPLDRNRPRGEQNLVDWMKPYSSDAKKLEAAIDPRLQGNYSKRSAAQLASVANKCLVRHARHRPKMSEVLEMVRKIVENSETGTPEHPLISNSEELVSDERKRKRLGLKRRIADIKAGEGRWFAWQRYR

SEQ ID NO: 159141 - protein, 136 aa, Zea Mays
MGQEEAVAANGTGTGVGRGRPHAVVMPYPLQGHVIPAVHLALRLAERGCSPTPPSPPSSRTAAGTPSWRASGRGCPCSASRCSRTSSPTAASSCGSGAPASPSGTAARCTPTRSGRGFKGSWPGNTASSSGTRSGS

SEQ ID NO: 159142 - protein, 493 aa, Zea Mays
MRTRSGKDHGAGASQRNIDAPNPSPTSALDDVVAQLVNVSTVLQQIAQPTTSTQYGRHDSNAAILYKEFLSTQPPMFTIAEDPLEAEDWLRTIEQKLGLICCDDVQKTQCAAQQLQGQAGAWWAEYFALQPEGHQISWAEFREVFRTHYIPKALMEIKFNEFLDLKQGEEESVMEYFERFTRLSQYVLDFVNTNEKKRFYFLRGLNKKLQGLMATSLAERYNEVVSQAVLGDNKIRLHQESKRKKIVEESSGKIKQCRRVVYQSVYYPRSSPPQLSSSPQSCEKQVVIPFIPHEPDAPDIRSKDISDNVNSCENCGKSGHSTQDCHFPKLVNERLSLVNLPRGNQQKARKNKVVLKLGQVHYTKIKAIPEGEPVMMGTFPVANRLAGILFDSGASHTFINRMFVLKHQLSLEVVENGYCIQSPGGRLHTKEMVYQIPIKLGGHMFPTNMLVLPNQDIDVILGMNWLSQHGAVINALQRTIQLDSPNGNYKLLI

SEQ ID NO: 159143 - protein, 76 aa, Zea Mays
MTSSSFSRRPRLTHSSFASSSWTTRSLCSDLVALALLTPDKPSCSACFLRAALRVPLASSACRVLEQERFLMPWLY

SEQ ID NO: 159144 - protein, 191 aa, Zea Mays
MNGFGMTVPSQFIERNAVKEVLQIIQVARDRNIPIYYPTDLWCLKNGDSEISGVINSTGQLAGWTPADIGPSTLEKISSIITSYKKILWIGPTNYGLTEKNSVGGTQLGEILESASSDGCDVILVGDAACKAVKRKTDSSPQYTEFQKSTVVWEFLKGRILPGIAALDKEMVCFFFKWLKVVKVQISLGLR

SEQ ID NO: 159145 - protein, 219 aa, Zea Mays
MKASNFQLRSSRLPWLESWLLPPGFPVAMNSSYFLGGQGLSTLKFRVRCSQLQLSTNSVHNKKEKEKYSCFDQSTSYLHVQCLRDFPTEKLSGEVVVVRLDSSLILGHLGPCTSSLERALLTIKYLCKARAKVAIATSWDTILQYDNPVTESVASFAEYMSSLLQVEVIPVDGAPSSTSFKQEEWAQNSIILFENLLNFTGEVANCKDFSQKLASDWRQ

SEQ ID NO: 159146 - protein, 496 aa, Zea Mays
MKASNFQLRSSRLPWLESWLLPPGFPVAMNSSYFLGGQGLSTLKFRVRCSQLQLSTNSVHNKKEKEKYSCFDQSTSYLHVQCLRDFPTEKLSGEVVVVRLDSSLILGHLGPCTSSLERALLTIKYLCKARAKVAIATSWDTILQYDNPVTESVASFAEYMSSLLQVEVIPVDGAPSSTSFKQEEWAQNSIILFENLLNFTGEVANCKDFSQKLASGAMIFVNDSFSLSHKILASTVGITCFCYASLAGFHFEEELMKLIKITDSTRRPYIAIIGGSNFLRKAPALQTLTCLCDGLFFVGKLSFQIMNGFGMTVPSQFIERNAVKEVLQIIQVARDRNIPIYYPTDLWCLKNGDSEISGVINSTGQLAGWTPADIGPSTLEKISSIITSYKKILWIGPTNYGLTEKNSVGGTQLGEILESASSDGCDVILVGDAACKAVKRKTDSSPQYTEFQKSTVVWEFLKGRILPGIAALDKEMVCFFFKWLKVVKVQISLGLR

SEQ ID NO: 159147 - protein, 201 aa, Zea Mays
MNGFGMTVPSQFIERNAVKEVLQIIQVARDRNIPIYYPTDLWCLKNGDSEISGVINSTGQLAGWTPADIGPSTLEKISSIITSYKKILWIGPTNYGLTEKNSVGGTQLGEILESASSDGCDVILVGDAACKAVKRKTDSSPQYTEFQKSTVVWEFLKGRILPGIAALDKIFCVNKCNVHISFHSFKLSWTVDSCHNTVPKS

SEQ ID NO: 159148 - protein, 646 aa, Zea Mays
MKASNFQLRSSRLPWLESWLLPPGFPVAMNSSYFLGGQGLSTLKFRVRCSQLQLSTNSVHNKKEKEKYSCFDQSTSYLHVQCLRDFPTEKLSGEVVVVRLDSSLILGHLGPCTSSLERALLTIKYLCKARAKVAIATSWDTILQYDNPVTESVASFAEYMSSLLQVEVIPVDGAPSSTSFKQEEWAQNSIILFENLLNFTGEVANCKDFSQKLASGAMIFVNDSFSLSHKILASTVGITCFCYASLAGFHFEEELMKLIKITDSTRRPYIAIIGGSNFLRKAPALQTLTCLCDGLFFVGKLSFQIMNGFGMTVPSQFIERNAVKEVLQIIQVARDRNIPIYYPTDLWCLKNGDSEISGVINSTGQLAGWTPADIGPSTLEKISSIITSYKKILWIGPTNYGLTEKNSVGGTQLGEILESASSDGCDVILVGDAACKAVKRKTDSSPQYTEFQKSTVVWEFLKGRILPGIAALDKVSHGNGLFLFQMAKSCESSNFLGFEMNEKLVIRCLQGMASDEKRNLYFVSTNATSTFRSIVSSYPGRLTLVTIQCPNPDFNKEQNRWRMVRRMLIEAIVDLLHTNGQVYLQSDVESVLLVMKEQFLSYSKGQLVTDGDGGNCIDNPFGVVSDWERHVLARGAPMYRAMLKKM

SEQ ID NO: 159149 - protein, 228 aa, Zea Mays
MNGFGMTVPSQFIERNAVKEVLQIIQVARDRNIPIYYPTDLWCLKNGDSEISGVINSTGQLAGWTPADIGPSTLEKISSIITSYKKILWIGPTNYGLTEKNSVGGTQLGEILESASSDGCDVILVGDAACKAVKRKTDSSPQYTEFQKSTVVWEFLKGRILPGIAALDKCYPYRIPWSTVFCEPTLPLVVDIGSGNGLFLFQMAKSCESSNFLGFEMNEKVPPRYGFR

SEQ ID NO: 159150 - protein, 84 aa, Zea Mays
MPCCSTKCPICILLYSNLVCCCWSSLYFPPLLQGDVEAVDPGNKAVAEPVGDVAAAEHERVHHWNKLETTSVISPLIFTLSGSS

SEQ ID NO: 159151 - protein, 225 aa, Zea Mays
MSVPMAIALSGQPLLGQAVMVKPSEAEKNLVQSNATSGGAASGGARKLYVGNLHSNITEDQLRQVFEPFGQVELVQLPVDPMTGLCKGYGFIQFARLEDAKAAQSLNGQLDIAGRVIKVSAVTDHVGMQASGATTGDLDDDEGTKCKFQSCSNAQIGQEWYCDQLNSWYWCCWCGCTSYFCYWGSRSCFSSTTNSCCCWISSWGTCASCYHSECDHVYTYRILVA

SEQ ID NO: 159152 - protein, 259 aa, Zea Mays
MSVPMAIALSGQPLLGQAVMVKPSEAEKNLVQSNATSGGAASGGARKLYVGNLHSNITEDQLRQVFEPFGQVELVQLPVDPMTGLCKGYGFIQFARLEDAKAAQSLNGQLDIAGRVIKVSAVTDHVGMQASGATTGDLDDDEGGGLALNASSRAALMLKLDRSGTATSLTRGIGAAGVAVPATSVIGAPGAASLLPPTVAAVGSVPGAPVLPVTTQNVTMSTPTEFLLLKNMFDPALEILILTWIFEMMSKMSVPSLVQ

SEQ ID NO: 159153 - protein, 337 aa, Zea Mays
MDRNSRRSKGVGYIEFYDVMSVPMAIALSGQPLLGQAVMVKPSEAEKNLVQSNATSGGAASGGARKLYVGNLHSNITEDQLRQVFEPFGQVELVQLPVDPMTGLCKGYGFIQFARLEDAKAAQSLNGQLDIAGRVIKVSAVTDHVGMQASGATTGDLDDDEGGGLALNASSRAALMLKLDRSGTATSLTRGIGAAGVAVPATSVIGAPGAASLLPPTVAAVGSVPGAPVLPVTTQNVTMSTPTEFLLLKNMFDPALETDPDFDLDIRDDVQDECSKFGAVKHIFVDKNTAGFVYLQFDSVTAAAKAQNALHGRWFAGKMITATFMSALEYSTKFPNL

SEQ ID NO: 159154 - protein, 175 aa, Zea Mays
MALPTRSVVPLSTIRASIPFLRAAPFHPWLASRNPPTYGAASQSGIHPQNHYPLCGDGRESKRVLPPSILDVARIAWPSFRAPNPSMQGTRASPFHPRRCANCRLRIAWSSFRPSSLPASDGRAPRSASPPSMRCLPFLHGDAKEKEPVTKSASVRSMNIHQRSVMSAPVQTSPP

SEQ ID NO: 159155 - protein, 528 aa, Zea Mays
MDRNSLEHLLHHFCGVAANKEYQAADWRLRPLPDEMIKYAREDTHYLLYIYDLMRLRLVNGSSCENDLLLEVCKRSNEICLQLYEKEQLTDTSYLHIHGLKENELNATQLSVLSSLYRWRDGIARAEDESTGYILPNKTLLEIAKEMPVTSGKLKRMIKSRNSILERNLNHVINNIRDAIAASGAFESIVEQLKKGKLEELTLADVKNSSEDTEMIPAVDVDNIEDPSDESAVVPAVITNVGAAPCITSEASLGNMHLEDPVPKTKDSGASSGFTGLTDNKKLSNDQQQAAKATVQVSKRPTAFGALFGKAAAGRRPDLFLGFSNVQGKTKVDKITSSVVLPFHHFSGGAKLSSAALPAKESLHSEPDSIQHSDPACQLEEVIQLDMGTDEQQPPENGNEDDGHCETEDTEMSKSPSGDPSVTEQRFRSLNEERNVKQNQKTPREFEFSVPVVPFDYAEARKNLVSSLPKAERRKDDAVARAINTDAGDKQRGSKKPPGGGENEGNFQHPRRRQAFPPSGNRNATYHQ

SEQ ID NO: 159156 - protein, 573 aa, Zea Mays
MEADEASAPPPPPWMQNKSAAAIEASSGPLSAAASRLSARSRALPSSRDFHFYNNFPAFKSPVGAAAAKADASLGVLGGASILPTRQQPFPVGGDLDDAHDWLVALNDDLLERFGASTDEFKTLRRKEETSGRRAAPQAGDGFQVVCGKKKKKVGDGGEERVGRVEAFGGFGSVRMVTKDKAAAPGVKAKVPFHIRTIPRPQDVYCIVVDNSSKPFEHILLDRSEDGTRVVHPLEKLPVEQIISRNVPDNEPVKPPALDNTPFTFVEDLKTLEVLATKLKDATEFAVDLEHNHYRSFQGLTCLMQISTRTEDFIVDTLKLRKYLGDYLREFFRDPTKKKVMHGAGRDIIWLQRDFSIYVCNLFDTGQASKVLQMDRNSLEHLLHHFCGVAANKEYQAADWRLRPLPDEMIKYAREDTHYLLYIYDLMRLRLVNGSSCENDLLLEVCKRSNEICLQLYEKEQLTDTSYLHIHGLKENELNATQLSVLSSLYRWRDGIARAEDESTGYILPNKTLLEIAKEMPVTSGKLKRMIKSRNSILERNLNHVINNIRDAIAASGAFESIVEQLKKGKLEE

SEQ ID NO: 159157 - protein, 71 aa, Zea Mays
MQCTTKLLFLFSTKLWIPHPRRVGGRYFIKYGMPAMLSWILGDNMCIAKLLITVICSCFKNICNSNRFPLV

SEQ ID NO: 159158 - protein, 177 aa, Zea Mays
MEGDEMLRVKLGRQGLEVSKLGFGCMGLTGVYNAPVPDQAGIDIIKHAFEAGITFFDTADAYGPHTNEVLLGKMGELKKLVEEGKVRYVGLSEASADTIRRAHAVHPITAVQLEWSLWTRDIEEDIIPVCRELGIGIVPYSPLGRGFFAGRAAVERVPSESLLEQQKPRTLTKISVL

SEQ ID NO: 159159 - protein, 287 aa, Zea Mays
MEGDEMLRVKLGRQGLEVSKLGFGCMGLTGVYNAPVPDQAGIDIIKHAFEAGITFFDTADAYGPHTNEVLLGKALKHFPREKVQIATKCGIAGFDASGMRVKGTPDYVRACCEASLQRLATDYIDIYYQHRIDQSVPIEETMGELKKLVEEGKVRYVGLSEASADTIRRAHAVHPITAVQLEWSLWTRDIEEDIIPVCRELGIGIVPYSPLGRGFFAGRAAVERVPSESLLSKHPRYSGENLEKNKVLYTRLEMLSKKYGCTPAQLALSWVLHQGEDVVPIPGNNLL

SEQ ID NO: 159160 - protein, 316 aa, Zea Mays
MEGDEMLRVKLGRQGLEVSKLGFGCMGLTGVYNAPVPDQAGIDIIKHAFEAGITFFDTADAYGPHTNEVLLGKALKHFPREKVQIATKCGIAGFDASGMRVKGTPDYVRACCEASLQRLATDYIDIYYQHRIDQSVPIEETMGELKKLVEEGKVRYVGLSEASADTIRRAHAVHPITAVQLEWSLWTRDIEEDIIPVCRELGIGIVPYSPLGRGFFAGRAAVERVPSESLLSKHPRYSGENLEKNKVLYTRLEMLSKKYGCTPAQLALSWVLHQGEDVVPIPGTTKAKNLDENIGAVKAIISSSYRKQRCADSETD

SEQ ID NO: 159161 - protein, 328 aa, Zea Mays
MNLASAVRVFLSYYLLVQRWMGSEQGGGVFDQGGHSVSLTRLDEARAPPRCAVRSSPSSAASLPPKPLLVAAPRETGEYPVILFLHGYLAVNSFYSQLFEHVASHGFIVVGPQLYTISGADTTEEINSAAAVIDWLATGLPSTLPLGVRANLTKVSISGHSRGGKVAFALALGHAKAKLAVPLAAVVAVDPVDGMGVGKQTPPPILTGRHGSLHVAAPRLTAPAVRAPGRQSRGLLRRAGRRGASVPPGGQGLRAHGHDGRRHAGRQGDAHAHHLQERRGQGAHAPLRGRRHRRVPQEMGGWGRRGDGQHHGAAGPGPRRAVRGGVWR

SEQ ID NO: 159162 - protein, 213 aa, Zea Mays
MDILTEMRTCGVPPAASSFNILLSCLGRARRVKEAYRILYLMREGKAGCSPDWVSYYLVVRVLYLTRRILRGKRLVDAMLESGVLPTAKFFHGLIGILCGTEEVDHALDMFKLMKRCELVDARIYDLLIEKLCRIGRFEIGRELWDEATNSGLVLGCSQDLLDPLKTEVFRPICPAQRLSPQNYKRLAWKKKVTAVGVKKDIAISASRKKSGV

SEQ ID NO: 159163 - protein, 320 aa, Zea Mays
MRDGGGGGGSSKTSKLSWSKSLVRKWFNIRGKSQDFHADAAAVGTGSVRSGRGDGDWMDGSFTRRDSYGAKKSRTERASRRSHERSRRSKIDLDAAEATVMLDYRIFAATWNVGGRAPPGSLSLDDWLRTSPPADIYVLGFQEIVPLNAGNVLGAEDNGPARKWVSLVRRTLNSLPGSSGSGSLQTPSPAPYLVAEMDADFERSTTQNNPSFFHRRSFHSGLSRSMRVDGDLLAGPGPGPARLERRYSVNDRVMYGSRPSDYEANCQWGAGQLVDEDDGGGGESPVTVFSPMSHGYGNAPPPMEECNGSARGLARWLDCS

SEQ ID NO: 159164 - protein, 368 aa, Zea Mays
MRGLTRAAKRAGEMAFNAGGGAVNWFPGHMAAASRAIRDRLKLADLVIEIPLSSANEDLQPVLSAKRRILALNKKDLANPNIMNRWLNHFESCKQDCISINAHSSSSVNQLLGFAELKLKEAISKEPTLLIMLVGVPNVGKSALINSIHRIATSRFPAKDKNKRATVGPLPGVTQDIAGYKIATQPSIYVLDTPGVLVPSIPDMETGLKLALTGAVKDSVVGEERIAKYLLSLFNIKKTPLHWERLLHRKEEWCEEICSSNKKDNSLRRTRLNNSDAVYVQDLVTEVQRALCRTFLNFTGNIEEESELETLIDMQLVELRKVFRIPHKPFDETQGPTSKKLLTLFRSGSLGRSSSTTFLMDLRNNLFT

SEQ ID NO: 159165 - protein, 355 aa, Zea Mays
MRGLTRAAKRAGEMAFNAGGGAVNWFPGHMAAASRAIRDRLKLADLVIEVRDARIPLSSANEDLQPVLSAKRRILALNKKDLANPNIMNRWLNHFESCKQDCISINAHSSSSVNQLLGFAELKLKEAISKEPTLLIMLVGVPNVAKDKNKRATVGPLPGVTQDIAGYKIATQPSIYVLDTPGVLVPSIPDMETGLKLALTGAVKDSVVGEERIAKYLLSLFNIKKTPLHWERLLHRKEEWCEEICSSNKKDNSLRRTRLNNSDAVYVQDLVTEVQRALCRTFLNFTGNIEEESELETLIDMQLVELRKVFRIPHKPFDETQGPTSKKLLTLFRSGSLGRSSSTTFLMDLRNNLFT

SEQ ID NO: 159166 - protein, 286 aa, Zea Mays
MNRWLNHFESCKQDCISINAHSSSSVNQLLGFAELKLKEAISKEPTLLIMLVGVPNVGKSALINSIHRIATSRFPAKDKNKRATVGPLPGVTQDIAGYKIATQPSIYVLDTPGVLVPSIPDMETGLKLALTGAVKDSVVGEERIAKYLLSLFNIKKTPLHWERLLHRKEEWCEEICSSNKKDNSLRRTRLNNSDAVYVQDLVTEVQRALCRTFLNFTGNIEEESELETLIDMQLVELRKVFRIPHKPFDETQGPTSKKLLTLFRSGSLGRSSSTTFLMDLRNNLFT

SEQ ID NO: 159167 - protein, 273 aa, Zea Mays
MRGLTRAAKRAGEMAFNAGGGAVNWFPGHMAAASRAIRDRLKLADLVIEVRDARIPLSSANEDLQPVLSAKRRILALNKKDLANPNIMNRWLNHFESCKQDCISINAHSSSSVNQLLGFAELKLKEAISKEPTLLIMLVGVPNVGKSALINSIHRIATSRFPAKDKNKRATVGPLPGVTQDIAGYKDLVTEVQRALCRTFLNFTGNIEEESELETLIDMQLVELRKVFRIPHKPFDETQGPTSKKLLTLFRSGSLGRSSSTTFLMDLRNNLFT

SEQ ID NO: 159168 - protein, 165 aa, Zea Mays
METGLKLALTGAVKDSVVGEERIAKYLLSLFNIKKTPLHWERLLHRKEEWCEEICSSNKKDNSLRRTRLNNSDAVYVQDLVTEVQRALCRTFLNFTGNIEEESELETLIDMQLVELRKVFRIPHKPFDETQGPTSKKLLTLFRSGSLGRSSSTTFLMDLRNNLFT

SEQ ID NO: 159169 - protein, 121 aa, Zea Mays
MRRSRAPCAWTAWCAASWRTTSAARRLPTGAGTVTASTEAIIQMTRRTTKRRRRPPTSPRRSRLSCGAMLIEWNAGRKPSGLTVVHAMLTGLAVNKPLPMRRCNSSDFQIRLLNCLLQICS

SEQ ID NO: 159170 - protein, 786 aa, Zea Mays
MKLLSPAAAPSSSPLFPPRIVEAAARQSGPCRIRIRIRGKAAAAGGGGGAGATGPRGSLRLAGWWRAQQQAPATATTTQQPDNVSSAKVFQTSRVETESEIAKWPGKPQDLEDEHQAEEAELQPLIDQVRAMLRSMNDGDTSASAYDTAWVAMVPKVGGDGGAQPQFPATVRWIVDHQLPDGSWGDSALFSAYDRMINTLACVVALTKWSLEPARCEAGLSFLHENMWRLAEEEAESMPIGFEIAFPSLIQTARDLGVVDFPYGHPALQSIYANREVKLKRIPRDMMHRVPTSILHSLEGMPDLDWPRLLNLQSCDGSFLFSPSATAYALMQTGDKKCFEYIDRIVKKFNGGVPNVYPVDLFEHIWVVDRLERLGISRYFQREIEQCMDYVNRHWTEDGICWARKSNVKDVDDTAMAFRLLRLHGYNVSPSVFKNFEKDGEFFCFVGQSTQAVTGMYNLNRASQISFQGEDVLHRARVFSYEFLRQREEQGMIRDKWIVAKDLPGEVQYTLDFPWYASLPRVEARTYLDQYGGKDDVWIGKTLYRMPLVNNDTYLELAIRDFNHCQALHQLECNGLQTWYKDNCLDAFGVEPQDVLRSYFLAAACIFEPSRAAERLAWARTSMIANAISTHLRDISEDKKRLECFVHCLYEENDVSWLKRNPNDVILERALRRLINLLAQEALPIHEGQRFIHSLLSLAWTEWMLQKANKEENKYHKCSGIEPQYMVHDRQTYLLLVQVIEICAGRIGEAVSMINNKDNDWFIQLTCATCDSLNHRMLLSQVNLVS

SEQ ID NO: 159171 - protein, 327 aa, Zea Mays
MSSLLLLQALAPAMTVPRHHFLISPLRLASAATVPFARRFSNAASSNKPEPLLSEPDLESGLYLVSTPIGNLEDITLRALRVLKCANVILSEDTRHSGKLLQHYNIKTPLLSFHKFNEREREPTILRRLHEGEAVALISDAGTPGISDPGMELARLCATEKIPVIPIPGPSAAIAALSASVGFLPKHARSRRDRLEISAREAATQIFYVPPHGIQQFLVDAASSFGDSRHCVVAREITKIHEEFWRGTLGEANEAFATRQPKGEITVLIEGKLISDDEIPSEDFLEHELRELTAKGYTLSAAVKLVTEATSAKKKDVYALALRLFGK

SEQ ID NO: 159172 - protein, 154 aa, Zea Mays
MSSLLLLQALAPAMTVPRHHFLISPLRLASAATVPFARRFSNAASSNKPEPLLSEPDLESGLYLVSTPIGNLEDITLRALRVLKCANVILSEDTRHSGKLLQHYNIKTPLLSFHKFNEREREPTILRRLHEGEAVALISDAGTPGISDPGMELL

SEQ ID NO: 159173 - protein, 93 aa, Zea Mays
MEVPMNSTQSGPHFPVQHQSLSLDIKGNKTDIVISKYEDTFLLIVAQIGCMGTILAANGSGSARSLVISLGLKDHSQGTLKDIIVAVIENRLW

SEQ ID NO: 159174 - protein, 110 aa, Zea Mays
MEVPMNSTQSGPHFPVQHQSLSLDIKGNKTDIVISKYEDTFLLIVAQIGCMGTILAAKKDESVFSDPTYNVSVLFGKRNEPLLQACARQLIEHIRRVEQAFWISLHLASQ

SEQ ID NO: 159175 - protein, 89 aa, Zea Mays
MSKPVCKIIPLLLPQQVSILDDICSQAYQFTTGRLLLARCWLFENLNFQCWNLVNMLIIVIPSPYCIVSLLQKNCADHAIPFPNQMREP

SEQ ID NO: 159176 - protein, 77 aa, Zea Mays
MEVPMNSTQSGPHFPVQHQSLSLDIKGNKTDIVISKYEDTFLLIVAQIGCMGTILAAKRKCFLGPNLQCVCSFWEEK

SEQ ID NO: 159177 - protein, 74 aa, Zea Mays
MEARRVTPSRCACHQGMASHLEPRLFNEGYAFGSRGTPGDCASWKRLLSCQLSYFNFGLTIIVCVPLSSIFYLL

SEQ ID NO: 159178 - protein, 254 aa, Zea Mays
MAAAGDPPPPIYAEGAARTRGEISPHFQTYARDDDAKLETTRARLSNILKRHEDLKERLSRDSDKLIFERLQKEFEAARAAQTEEISINDDEWNDGLLATIREKVHMEADRKAMSNQVNVPADLSFQSRTTYRIRNKVIYCLDGARIGIQYETFFAGEPCEIFHCVLESKSFLEKMIMIEHTLPFFLPVRELESDLLSSNSIKFIDHLEEILQAYIDRREQVRLIKELYGNQIGELFHSLPYNMIEFVLEDFEW

SEQ ID NO: 159179 - protein, 152 aa, Zea Mays
MAAAGDPPPPIYAEGAARTRGEISPHFQTYARDDDAKLETTRARLSNILKRHEDLKERLSRDSDKLIFERLQKEFEAARAAQTEEISINDDEWNDGLLATIREKVHMEADRKAMSNQVNVPADLSFQSRTTYRIRNKVIYCLDGARIGIQRA

SEQ ID NO: 159180 - protein, 215 aa, Zea Mays
MFQQIFHFNQGLHIGLEIRLYIAWMELGLAYREPCEIFHCVLESKSFLEKMIMIEHTLPFFLPVRELESDLLSSNSIKFIDHLEEILQAYIDRREQVRLIKELYGNQIGELFHSLPYNMIEFVLEDFECKVTISIRYSDLLQTLPSQARVLAWPLRSAKKISTRSSSASAAQPVPFHLSYAEEALKTLCLPEAYADIVLELPHALKRILSSRDSD

SEQ ID NO: 159181 - protein, 329 aa, Zea Mays
MLRVLQGQEEKYLHISRHMQGTTMQNLRPHVQGVSNILKRHEDLKERLSRDSDKLIFERLQKEFEAARAAQTEEISINDDEWNDGLLATIREKVHMEADRKAMSNQVNVPADLSFQSRTTYRIRNKVIYCLDGARIGIQYETFFAGEPCEIFHCVLESKSFLEKMIMIEHTLPFFLPVRELESDLLSSNSIKFIDHLEEILQAYIDRREQVRLIKELYGNQIGELFHSLPYNMIEFVLEDFECKVTISIRYSDLLQTLPSQARVLAWPLRSAKKISTRSSSASAAQPVPFHLSYAEEALKTLCLPEAYADIVLELPHALKRILSSRDSD

SEQ ID NO: 159182 - protein, 291 aa, Zea Mays
MAAAGDPPPPIYAEGAARTRGEISPHFQTYARDDDAKLETTRARLSNILKRHEDLKERLSRDSDKLIFERLQKEFEAARAAQTEEISINDDEWNDGLLATIREKVHMEADRKAMSNQVNVPADLSFQSRTTYRIRNKVACAPQIIAFFIALYLVIYCLDGARIGIQYETFFAGEPCEIFHCVLESKSFLEKMIMIEHTLPFFLPVRELESDLLSSNSIKFIDHLEEILQAYIDRREQVRLIKELYGNQIGELFHSLPYNMIEFVLEDFECIRRHCAGATPCFEEDFILSGQ

SEQ ID NO: 159183 - protein, 343 aa, Zea Mays
MAAAGDPPPPIYAEGAARTRGEISPHFQTYARDDDAKLETTRARLSNILKRHEDLKERLSRDSDKLIFERLQKEFEAARAAQTEEISINDDEWNDGLLATIREKVFNVHMEADRKAMSNQVNVPADLSFQSRTTYRIRNKVIYCLDGARIGIQYETFFAGEPCEIFHCVLESKSFLEKMIMIEHTLPFFLPVRELESDLLSSNSIKFIDHLEEILQAYIDRREQVRLIKELYGNQIGELFHSLPYNMIEFVLEDFECKVTISIRYSDLLQTLPSQARVLAWPLRSAKKISTRSSSASAAQPVPFHLSYAEEALKTLCLPEAYADIVLELPHALKRILSSRDSD

SEQ ID NO: 159184 - protein, 214 aa, Zea Mays
MEADRKAMSNQVIYCLDGARIGIQYETFFAGEPCEIFHCVLESKSFLEKMIMIEHTLPFFLPVRELESDLLSSNSIKFIDHLEEILQAYIDRREQVRLIKELYGNQIGELFHSLPYNMIEFVLEDFECKVTISIRYSDLLQTLPSQARVLAWPLRSAKKISTRSSSASAAQPVPFHLSYAEEALKTLCLPEAYADIVLELPHALKRILSSRDSD

SEQ ID NO: 159185 - protein, 169 aa, Zea Mays
MEADRKAMSNQVNVPADLSFQSRTTYRIRNKVIYCLDGARIGIQYETFFAGEPCEIFHCVLESKSFLEKMIMIEHTLPFFLPVRELESDLLSSNSIKFIDHLEEILQAYIDRREQVRLIKELYGNQIGELFHSLPYNMIEFVLEDFECIRRHCAGATPCFEEDFILSGQ

SEQ ID NO: 159186 - protein, 222 aa, Zea Mays
MEADRKAMSNQVNVPADLSFQSRTTYRIRNKVIYCLDGARIGIQYETFFAGEPCEIFHCVLESKSFLEKMIMIEHTLPFFLPVRELESDLLSSNSIKFIDHLEEILQAYIDRREQVRLIKELYGNQIGELFHSLPYNMIEFVLEDFEWLQSVSDIRIYCRPCRVRQGSWLGHFARPRKYLQEAAVHQLRNQYPFTFHMPRKHSKPCVYQKHTQTLCWSYPML

SEQ ID NO: 159187 - protein, 79 aa, Zea Mays
MIMIEHTLPFFLPVRELESDLLSSNSIKFIDHLEEILQAYIDRREQVRLIKELYGNQIGELFHSLPYNMIEFVLEDFEW

SEQ ID NO: 159188 - protein, 389 aa, Zea Mays
MTSRVIPAPTPTPRRLIQVNGDVLGHLDLDSQISSLGTFTVLSYNILADAYATTDAYSYCPTWALTWNYRRQNLLREIIGYHADIICLQEVQVNHFEDFFSPELDKHGYQALYKKRTTEVYSGNPMAIDGCATFFRRDKFSHVKKYEVEFNKAAQSLTDAIIPAAQKRVALSRLIKDNIALIAVLEAKFGNHGAENPGKRQLLCVANTHINVHQDLKDVKLWEVHTLLKGLEKIAVSADIPMLVCGDFNSTPGSSPHALLAMGKVDQHHPDLAIDPLGILRPPSKLNHQLPLVSAYSAFARMVGVGYDLEHQRRTDPATNEPLFTNCTRDFTGTIDYIFYTADSLTVDSLLELLDEESLRKDTALPSPEWSSDHIALLAEFRCKPRIRR

SEQ ID NO: 159189 - protein, 1240 aa, Zea Mays
MSARIKEMVRVATARLGGEQVGAGGVSSSGIARRESTARLGGGGTSLRRQPQPMAPSVRTVCCNDREANAPVGYKGNSVSTTKYSILTFLPKGLFEQFRRVANLYFLMISILSTTPISPVHPVTNVVPLSLVLLVSLIKEAFEDWKRFQNDMSINNAHVDVLQGQCWESTPWKRLQVGDIVRIKQDGYFPADLLFLSSTNPDGICYIETANLDGETNLKIRKALEKTWDYVIPEKASEFKGEVQCEQPNNSLYTFTGNLIMDKQTIPLSPNQLLLRGCSLRNTEYIVGVVIFTGHETKVMMNSMNVPSKRSTLEKKLDKLILALFATLFTMCVIGAIGSGIFINEKYFYLGLRGHVEDQFNPKNRFVVTILTMFTLITLYSTIIPISLYVSIEMIKFIQCTQFINNDLHMYHAESNTPALARTSNLNEELGQVEYIFSDKTGTLTRNLMEFFKCSIGGEMYGTGITEIEKGGAERAGIRIDDDEGKRSANAVHEKGFNFDDARIMRGAWRNEPNPEACKEFFRCLAICHTVLPEGEETPEKISYQAASPDEAALVSAAKNFGFFFYRRTPTTVMVRESHVERMGSIQDVPYEILNVLEFNSTRKRQSVVCRFTNGRLVLYCKGADNVVYERLADGNHDMKKISREHLEQFGSAGLRTLCLAYRDLSREQYESWNEKFVQAKSSLRDRDKKLDEVAELIEKDLILVGCTAIEDKLQEGVPTCIETLSAAGIKIWVLTGDKMETAINIAYACSLVNNDTKQFIISSETGAIREAEDRGDPVEIARVIKDSVKQNLKRFHEEARHSLISTPERKLALIIDGRCLMYALDPTLRVDLLGLSLSCHSVICCRVSPLQKAQVTSLVRKGAEKITLSIGDGANDVSMIQAAHVGIGISGQEGMQAVMASDFAIAQFRFLTDLLLVHGRWSYLRLCKVITYFFYKNLTFTLTQFWFTFQTGFSGQRFYDDWFQSLYNVIFTALPVIIVGLFDKDVSASLSKKYPQLYKEGIRNSFFKWRVIAVWGFFAFYQSIVFFYFTAAASRHGQGSSGKILGLWDVSTMAFTCVVVTVNLRLLMACNSITRWHYISVAGSIVAWFMFIFIYSAIMTSFDRQENVYFVIYVLMSTFFFYLTIVLVPIIALFGDFLYLSIQRWLFPYDYQIIQEQHKDEPHEYSRVPLPETSHLSPEEARSYMISMLPRESSKHTGFAFDSPGYESFFASQQGIGVPHKPWDVARRASMKPQRAGKS

SEQ ID NO: 159190 - protein, 941 aa, Zea Mays
MMNSMNVPSKRSTLEKKLDKLILALFATLFTMCVIGAIGSGIFINEKYFYLGLRGHVEDQFNPKNRFVVTILTMFTLITLYSTIIPISLYVSIEMIKFIQCTQFINNDLHMYHAESNTPALARTSNLNEELGQVEYIFSDKTGTLTRNLMEFFKCSIGGEMYGTGITEIEKGGAERAGIRIDDDEGKRSANAVHEKGFNFDDARIMRGAWRNEPNPEACKEFFRCLAICHTVLPEGEETPEKISYQAASPDEAALVSAAKNFGFFFYRRTPTTVMVRESHVERMGSIQDVPYEILNVLEFNSTRKRQSVVCRFTNGRLVLYCKGADNVVYERLADGNHDMKKISREHLEQFGSAGLRTLCLAYRDLSREQYESWNEKFVQAKSSLRDRDKKLDEVAELIEKDLILVGCTAIEDKLQEGVPTCIETLSAAGIKIWVLTGDKMETAINIAYACSLVNNDTKQFIISSETGAIREAEDRGDPVEIARVIKDSVKQNLKRFHEEARHSLISTPERKLALIIDGRCLMYALDPTLRVDLLGLSLSCHSVICCRVSPLQKAQVTSLVRKGAEKITLSIGDGANDVSMIQAAHVGIGISGQEGMQAVMASDFAIAQFRFLTDLLLVHGRWSYLRLCKVITYFFYKNLTFTLTQFWFTFQTGFSGQRFYDDWFQSLYNVIFTALPVIIVGLFDKDVSASLSKKYPQLYKEGIRNSFFKWRVIAVWGFFAFYQSIVFFYFTAAASRHGQGSSGKILGLWDVSTMAFTCVVVTVNLRLLMACNSITRWHYISVAGSIVAWFMFIFIYSAIMTSFDRQENVYFVIYVLMSTFFFYLTIVLVPIIALFGDFLYLSIQRWLFPYDYQIIQEQHKDEPHEYSRVPLPETSHLSPEEARSYMISMLPRESSKHTGFAFDSPGYESFFASQQGIGVPHKPWDVARRASMKPQRAGKS

SEQ ID NO: 159191 - protein, 1077 aa, Zea Mays
MLGKYSMETTAGWRYCEEQIKQDGYFPADLLFLSSTNPDGICYIETANLDGETNLKIRKALEKTWDYVIPEKASEFKGEVQCEQPNNSLYTFTGNLIMDKQTIPLSPNQLLLRGCSLRNTEYIVGVVIFTGHETKVMMNSMNVPSKRSTLEKKLDKLILALFATLFTMCVIGAIGSGIFINEKYFYLGLRGHVEDQFNPKNRFVVTILTMFTLITLYSTIIPISLYVSIEMIKFIQCTQFINNDLHMYHAESNTPALARTSNLNEELGQVEYIFSDKTGTLTRNLMEFFKCSIGGEMYGTGITEIEKGGAERAGIRIDDDEGKRSANAVHEKGFNFDDARIMRGAWRNEPNPEACKEFFRCLAICHTVLPEGEETPEKISYQAASPDEAALVSAAKNFGFFFYRRTPTTVMVRESHVERMGSIQDVPYEILNVLEFNSTRKRQSVVCRFTNGRLVLYCKGADNVVYERLADGNHDMKKISREHLEQFGSAGLRTLCLAYRDLSREQYESWNEKFVQAKSSLRDRDKKLDEVAELIEKDLILVGCTAIEDKLQEGVPTCIETLSAAGIKIWVLTGDKMETAINIAYACSLVNNDTKQFIISSETGAIREAEDRGDPVEIARVIKDSVKQNLKRFHEEARHSLISTPERKLALIIDGRCLMYALDPTLRVDLLGLSLSCHSVICCRVSPLQKAQVTSLVRKGAEKITLSIGDGANDVSMIQAAHVGIGISGQEGMQAVMASDFAIAQFRFLTDLLLVHGRWSYLRLCKVITYFFYKNLTFTLTQFWFTFQTGFSGQRFYDDWFQSLYNVIFTALPVIIVGLFDKDVSASLSKKYPQLYKEGIRNSFFKWRVIAVWGFFAFYQSIVFFYFTAAASRHGQGSSGKILGLWDVSTMAFTCVVVTVNLRLLMACNSITRWHYISVAGSIVAWFMFIFIYSAIMTSFDRQENVYFVIYVLMSTFFFYLTIVLVPIIALFGDFLYLSIQRWLFPYDYQIIQEQHKDEPHEYSRVPLPETSHLSPEEARSYMISMLPRESSKHTGFAFDSPGYESFFASQQGIGVPHKPWDVARRASMKPQRAGKS

SEQ ID NO: 159192 - protein, 426 aa, Zea Mays
MMNSMNVPSKRSTLEKKLDKLILALFATLFTMCVIGAIGSGIFINEKYFYLGLRGHVEDQFNPKNRFVVTILTMFTLITLYSTIIPISLYVSIECTQFINNDLHMYHAESNTPALARTSNLNEELGQVEYIFSDKTGTLTRNLMEFFKCSIGGEMYGTGITEIEKGGAERAGIRIDDDEGKRSANAVHEKGFNFDDARIMRGAWRNEPNPEACKEFFRCLAICHTVLPEGEETPEKISYQAASPDEAALVSAAKNFGFFFYRRTPTTVMVRESHVERMGSIQDVPYEILNVLEFNSTRKRQSVVCRFTNGRLVLYCKGADNVVYERLADGNHDMKKISREHLEQFGSAGLRTLCLAYRDLSREQYESWNEKFVQAKSSLRDRDKKLDEVNELPSFGYMTIDMNSDSVFCICLKMWSFLLELMLLDL

SEQ ID NO: 159193 - protein, 739 aa, Zea Mays
MSARIKEMVRVATARLGGEQVGAGGVSSSGIARRESTARLGGGGTSLRRQPQPMAPSVRTVCCNDREANAPVGYKGNSVSTTKYSILTFLPKGLFEQFRRVANLYFLMISILSTTPISPVHPVTNVVPLSLVLLVSLIKEAFEDWKRFQNDMSINNAHVDVLQGQCWESTPWKRLQVGDIVRTANLDGETNLKIRKALEKTWDYVIPEKASEFKGEVQCEQPNNSLYTFTGNLIMDKQTIPLSPNQLLLRTSNIFGVPKIGRIAFTGGCSNTPAPALQDSTSVVSRPAPVSNDEEDLMTGAGPFLLPLFYLIISMSTLCGAWSVLRDDQLVARLEISGGKGYDEFHECSLKKKYIGKKARQAYPCSFCNPLYNVCYWRHWKVTILTMFTLITLYSTIIPISLYVSIECTQFINNDLHMYHAESNTPALARTSNLNEELGQVEYIFSDKTGTLTRNLMEFFKCSIGGEMYGTGITEIEKGGAERAGIRIDDDEGKRSANAVHEKGFNFDDARIMRGAWRNEPNPEACKEFFRCLAICHTVLPEGEETPEKISYQAASPDEAALVSAAKNFGFFFYRRTPTTVMVRESHVERMGSIQDVPYEILNVLEFNSTRKRQSVVCRFTNGRLVLYCKGADNVVYERLADGNHDMKKISREHLEQFGSAGLRTLCLAYRDLSREQYESWNEKFVQAKSSLRDRDKKLDEVNELPSFGYMTIDMNSDSVFCICLKMWSFLLELMLLDL

SEQ ID NO: 159194 - protein, 1234 aa, Zea Mays
MSARIKEMVRVATARLGGEQVGAGGVSSSGIARRESTARLGGGGTSLRRQPQPMAPSVRTVCCNDREANAPVGYKGNSVSTTKYSILTFLPKGLFEQFRRVANLYFLMISILSTTPISPVHPVTNVVPLSLVLLVSLIKEAFEDWKRFQNDMSINNAHVDVLQGQCWESTPWKRLQVGDIVRIKQDGYFPADLLFLSSTNPDGICYIETANLDGETNLKIRKALEKTWDYVIPEKASEFKGEVQCEQPNNSLYTFTGNLIMDKQTIPLSPNQLLLRGCSLRNTEYIVGVVIFTGHETKVMMNSMNVPSKRSTLEKKLDKLILALFATLFTMCVIGAIGSGIFINEKYFYLGLRGHVEDQFNPKNRFVVTILTMFTLITLYSTIIPISLYVSIECTQFINNDLHMYHAESNTPALARTSNLNEELGQVEYIFSDKTGTLTRNLMEFFKCSIGGEMYGTGITEIEKGGAERAGIRIDDDEGKRSANAVHEKGFNFDDARIMRGAWRNEPNPEACKEFFRCLAICHTVLPEGEETPEKISYQAASPDEAALVSAAKNFGFFFYRRTPTTVMVRESHVERMGSIQDVPYEILNVLEFNSTRKRQSVVCRFTNGRLVLYCKGADNVVYERLADGNHDMKKISREHLEQFGSAGLRTLCLAYRDLSREQYESWNEKFVQAKSSLRDRDKKLDEVAELIEKDLILVGCTAIEDKLQEGVPTCIETLSAAGIKIWVLTGDKMETAINIAYACSLVNNDTKQFIISSETGAIREAEDRGDPVEIARVIKDSVKQNLKRFHEEARHSLISTPERKLALIIDGRCLMYALDPTLRVDLLGLSLSCHSVICCRVSPLQKAQVTSLVRKGAEKITLSIGDGANDVSMIQAAHVGIGISGQEGMQAVMASDFAIAQFRFLTDLLLVHGRWSYLRLCKVITYFFYKNLTFTLTQFWFTFQTGFSGQRFYDDWFQSLYNVIFTALPVIIVGLFDKDVSASLSKKYPQLYKEGIRNSFFKWRVIAVWGFFAFYQSIVFFYFTAAASRHGQGSSGKILGLWDVSTMAFTCVVVTVNLRLLMACNSITRWHYISVAGSIVAWFMFIFIYSAIMTSFDRQENVYFVIYVLMSTFFFYLTIVLVPIIALFGDFLYLSIQRWLFPYDYQIIQEQHKDEPHEYSRVPLPETSHLSPEEARSYMISMLPRESSKHTGFAFDSPGYESFFASQQGIGVPHKPWDVARRASMKPQRAGKS

SEQ ID NO: 159195 - protein, 1192 aa, Zea Mays
MSARIKEMVRVATARLGGEQVGAGGVSSSGIARRESTARLGGGGTSLRRQPQPMAPSVRTVCCNDREANAPVGYKGNSVSTTKYSILTFLPKGLFEQFRRVANLYFLMISILSTTPISPVHPVTNVVPLSLVLLVSLIKEAFEDWKRFQNDMSINNAHVDVLQGQCWESTPWKRLQVGDIVRTANLDGETNLKIRKALEKTWDYVIPEKASEFKGEVQCEQPNNSLYTFTGNLIMDKQTIPLSPNQLLLRVMMNSMNVPSKRSTLEKKLDKLILALFATLFTMCVIGAIGSGIFINEKYFYLGLRGHVEDQFNPKNRFVVTILTMFTLITLYSTIIPISLYVSIEMIKFIQCTQFINNDLHMYHAESNTPALARTSNLNEELGQVEYIFSDKTGTLTRNLMEFFKCSIGGEMYGTGITEIEKGGAERAGIRIDDDEGKRSANAVHEKGFNFDDARIMRGAWRNEPNPEACKEFFRCLAICHTVLPEGEETPEKISYQAASPDEAALVSAAKNFGFFFYRRTPTTVMVRESHVERMGSIQDVPYEILNVLEFNSTRKRQSVVCRFTNGRLVLYCKGADNVVYERLADGNHDMKKISREHLEQFGSAGLRTLCLAYRDLSREQYESWNEKFVQAKSSLRDRDKKLDEVAELIEKDLILVGCTAIEDKLQEGVPTCIETLSAAGIKIWVLTGDKMETAINIAYACSLVNNDTKQFIISSETGAIREAEDRGDPVEIARVIKDSVKQNLKRFHEEARHSLISTPERKLALIIDGRCLMYALDPTLRVDLLGLSLSCHSVICCRVSPLQKAQVTSLVRKGAEKITLSIGDGANDVSMIQAAHVGIGISGQEGMQAVMASDFAIAQFRFLTDLLLVHGRWSYLRLCKVITYFFYKNLTFTLTQFWFTFQTGFSGQRFYDDWFQSLYNVIFTALPVIIVGLFDKDVSASLSKKYPQLYKEGIRNSFFKWRVIAVWGFFAFYQSIVFFYFTAAASRHGQGSSGKILGLWDVSTMAFTCVVVTVNLRLLMACNSITRWHYISVAGSIVAWFMFIFIYSAIMTSFDRQENVYFVIYVLMSTFFFYLTIVLVPIIALFGDFLYLSIQRWLFPYDYQIIQEQHKDEPHEYSRVPLPETSHLSPEEARSYMISMLPRESSKHTGFAFDSPGYESFFASQQGIGVPHKPWDVARRASMKPQRAGKS

SEQ ID NO: 159196 - protein, 890 aa, Zea Mays
MISILSTTPISPVHPVTNVVPLSLVLLVSLIKEAFEDWKRFQNDMSINNAHVDVLQGQCWESTPWKRLQVGDIVRIKQDGYFPADLLFLSSTNPDGICYIETANLDGETNLKIRKALEKTWDYVIPEKASEFKGEVQCEQPNNSLYTFTGNLIMDKQTIPLSPNQLLLRGCSLRNTEYIVGVVIFTGHETKVMMNSMNVPSKRSTLEKKLDKLILALFATLFTMCVIGAIGSGIFINEKYFYLGLRGHVEDQFNPKNRFVVTILTMFTLITLYSTIIPISLYVSIECTQFINNDLHMYHAESNTPALARTSNLNEELGQVEYIFSDKTGTLTRNLMEFFKCSIGGEMYGTGITEIEKGGAERAGIRIDDDEGKRSANAVHEKGFNFDDARIMRGAWRNEPNPEACKEFFRCLAICHTVLPEGEETPEKISYQAASPDEAALVSAAKNFGFFFYRRTPTTVMVRESHVERMGSIQDVPYEILNVLEFNSTRKRQSVVCRFTNGRLVLYCKGADNVVYERLADGNHDMKKISREHLEQFGSAGLRTLCLAYRDLSREQYESWNEKFVQAKSSLRDRDKKLDEVAELIEKDLILVGCTAIEDKLQEGVPTCIETLSAAGIKIWVLTGDKMETAINIAYACSLVNNDTKQFIISSETGAIREAEDRGDPVEIARVIKDSVKQNLKRFHEEARHSLISTPERKLALIIDGRCLMYALDPTLRVDLLGLSLSCHSVICCRVSPLQKAQVTSLVRKGAEKITLSIGDGANDVSMIQAAHVGIGISGQEGMQAVMASDFAIAQFRFLTDLLLVHGRWSYLRLCKVITYFFYKNLTFTLTQFWFTFQTGFSGQRFYDDWFQSLYNVIFTALPVIIVGLFDKVGLFLLVYGVVSCNCTKL

SEQ ID NO: 159197 - protein, 1234 aa, Zea Mays
MSARIKEMVRVATARLGGEQVGAGGVSSSGIARRESTARLGGGGTSLRRQPQPMAPSVRTVCCNDREANAPVGYKGNSVSTTKYSILTFLPKGLFEQFRRVANLYFLMISILSTTPISPVHPVTNVVPLSLVLLVSLIKEAFEDWKRFQNDMSINNAHVDVLQGQCWESTPWKRLQIKQDGYFPADLLFLSSTNPDGICYIETANLDGETNLKIRKALEKTWDYVIPEKASEFKGEVQCEQPNNSLYTFTGNLIMDKQTIPLSPNQLLLRGCSLRNTEYIVGVVIFTGHETKVMMNSMNVPSKRSTLEKKLDKLILALFATLFTMCVIGAIGSGIFINEKYFYLGLRGHVEDQFNPKNRFVVTILTMFTLITLYSTIIPISLYVSIEMIKFIQCTQFINNDLHMYHAESNTPALARTSNLNEELGQVEYIFSDKTGTLTRNLMEFFKCSIGGEMYGTGITEIEKGGAERAGIRIDDDEGKRSANAVHEKGFNFDDARIMRGAWRNEPNPEACKEFFRCLAICHTVLPEGEETPEKISYQAASPDEAALVSAAKNFGFFFYRRTPTTVMVRESHVERMGSIQDVPYEILNVLEFNSTRKRQSVVCRFTNGRLVLYCKGADNVVYERLADGNHDMKKISREHLEQFGSAGLRTLCLAYRDLSREQYESWNEKFVQAKSSLRDRDKKLDEVAELIEKDLILVGCTAIEDKLQEGVPTCIETLSAAGIKIWVLTGDKMETAINIAYACSLVNNDTKQFIISSETGAIREAEDRGDPVEIARVIKDSVKQNLKRFHEEARHSLISTPERKLALIIDGRCLMYALDPTLRVDLLGLSLSCHSVICCRVSPLQKAQVTSLVRKGAEKITLSIGDGANDVSMIQAAHVGIGISGQEGMQAVMASDFAIAQFRFLTDLLLVHGRWSYLRLCKVITYFFYKNLTFTLTQFWFTFQTGFSGQRFYDDWFQSLYNVIFTALPVIIVGLFDKDVSASLSKKYPQLYKEGIRNSFFKWRVIAVWGFFAFYQSIVFFYFTAAASRHGQGSSGKILGLWDVSTMAFTCVVVTVNLRLLMACNSITRWHYISVAGSIVAWFMFIFIYSAIMTSFDRQENVYFVIYVLMSTFFFYLTIVLVPIIALFGDFLYLSIQRWLFPYDYQIIQEQHKDEPHEYSRVPLPETSHLSPEEARSYMISMLPRESSKHTGFAFDSPGYESFFASQQGIGVPHKPWDVARRASMKPQRAGKS

SEQ ID NO: 159198 - protein, 1208 aa, Zea Mays
MSARIKEMVRVATARLGGEQVGAGGVSSSGIARRESTARLGGGGTSLRRQPQPMAPSVRTVCCNDREANAPVGYKGNSVSTTKYSILTFLPKGLFEQFRRVANLYFLMISILSTTPISPVHPVTNVVPLSLVLLVSLIKEAFEDWKRFQNDMSINNAHVDVLQGQCWESTPWKRLQVGDIVRTANLDGETNLKIRKALEKTWDYVIPEKASEFKGEVQCEQPNNSLYTFTGNLIMDKQTIPLSPNQLLLRGCSLRNTEYIVGVVIFTGHETKVMMNSMNVPSKRSTLEKKLDKLILALFATLFTMCVIGAIGSGIFINEKYFYLGLRGHVEDQFNPKNRFVVTILTMFTLITLYSTIIPISLYVSIECTQFINNDLHMYHAESNTPALARTSNLNEELGQVEYIFSDKTGTLTRNLMEFFKCSIGGEMYGTGITEIEKGGAERAGIRIDDDEGKRSANAVHEKGFNFDDARIMRGAWRNEPNPEACKEFFRCLAICHTVLPEGEETPEKISYQAASPDEAALVSAAKNFGFFFYRRTPTTVMVRESHVERMGSIQDVPYEILNVLEFNSTRKRQSVVCRFTNGRLVLYCKGADNVVYERLADGNHDMKKISREHLEQFGSAGLRTLCLAYRDLSREQYESWNEKFVQAKSSLRDRDKKLDEVAELIEKDLILVGCTAIEDKLQEGVPTCIETLSAAGIKIWVLTGDKMETAINIAYACSLVNNDTKQFIISSETGAIREAEDRGDPVEIARVIKDSVKQNLKRFHEEARHSLISTPERKLALIIDGRCLMYALDPTLRVDLLGLSLSCHSVICCRVSPLQKAQVTSLVRKGAEKITLSIGDGANDVSMIQAAHVGIGISGQEGMQAVMASDFAIAQFRFLTDLLLVHGRWSYLRLCKVITYFFYKNLTFTLTQFWFTFQTGFSGQRFYDDWFQSLYNVIFTALPVIIVGLFDKDVSASLSKKYPQLYKEGIRNSFFKWRVIAVWGFFAFYQSIVFFYFTAAASRHGQGSSGKILGLWDVSTMAFTCVVVTVNLRLLMACNSITRWHYISVAGSIVAWFMFIFIYSAIMTSFDRQENVYFVIYVLMSTFFFYLTIVLVPIIALFGDFLYLSIQRWLFPYDYQIIQEQHKDEPHEYSRVPLPETSHLSPEEARSYMISMLPRESSKHTGFAFDSPGYESFFASQQGIGVPHKPWDVARRASMKPQRAGKS

SEQ ID NO: 159199 - protein, 240 aa, Zea Mays
MYGTGITEIEKGGAERAGIRIDDDEGKRSANAVHEKGFNFDDARIMRGAWRNEPNPEACKEFFRCLAICHTVLPEGEETPEKISYQAASPDEAALVSAAKNFGFFFYRRTPTTVMVRESHVERMGSIQDVPYEILNVLEFNSTRKRQSVVCRFTNGRLVLYCKGADNVVYERLADGNHDMKKISREHLEQFGSAGLRTLCLAYRDLSREQYESWNEKFVQAKSSLRDRDKKLDEVISIKL

SEQ ID NO: 159200 - protein, 758 aa, Zea Mays
MHSRYPTYDTEVECLPFGLATSSPWLGPIAYMSEPRQDGKLVGNVIEVRVWLHPIDTMLEIAVVNVVKVVDVEVAVYEAADTKRCHDDDKDVSGGIFINEKYFYLGLRGHVEDQFNPKNRFVVTILTMFTLITLYSTIIPISLYVSIEMIKFIQCTQFINNDLHMYHAESNTPALARTSNLNEELGQVEYIFSDKTGTLTRNLMEFFKCSIGGEMYGTGITEIEKGGAERAGIRIDDDEGKRSANAVHEKGFNFDDARIMRGAWRNEPNPEACKEFFRCLAICHTVLPEGEETPEKISYQAASPDEAALVSAAKNFGFFFYRRTPTTVMVRESHVERMGSIQDVPYEILNVLEFNSTRKRQSVVCRFTNGRLVLYCKGADNVVYERLADGNHDMKKISREHLEQFGSAGLRTLCLAYRDLSREQYESWNEKFVQAKSSLRDRDKKLDEVAELIEKDLILVGCTAIEDKLQEGVPTCIETLSAAGIKIWVLTGDKMETAINIAYACSLVNNDTKQFIISSETGAIREAEDRGDPVEIARVIKDSVKQNLKRFHEEARHSLISTPERKLALIIDGRCLMYALDPTLRVDLLGLSLSCHSVICCRVSPLQKAQVTSLVRKGAEKITLSIGDGANDVSMIQAAHVGIGISGQEGMQAVMASDFAIAQFRFLTDLLLVHGRWSYLRLCKVITYFFYKNLTFTLTQFWFTFQTGFSGQRFYDDWFQSLYNVIFTALPVIIVGLFDKVGLFLLVYGVVSCNCTKL

SEQ ID NO: 159201 - protein, 995 aa, Zea Mays
MHSRYPTYDTEVECLPFGLATSSPWLGPIAYMSEPRQDGKLVGNVIEVRVWLHPIDTMLEIAVVNVVKVVDVEVAVYEAADTKRCHDDDKDVSGGIFINEKYFYLGLRGHVEDQFNPKNRFVVTILTMFTLITLYSTIIPISLYVSIEMIKFIQCTQFINNDLHMYHAESNTPALARTSNLNEELGQVEYIFSDKTGTLTRNLMEFFKCSIGGEMYGTGITEIEKGGAERAGIRIDDDEGKRSANAVHEKGFNFDDARIMRGAWRNEPNPEACKEFFRCLAICHTVLPEGEETPEKISYQAASPDEAALVSAAKNFGFFFYRRTPTTVMVRESHVERMGSIQDVPYEILNVLEFNSTRKRQSVVCRFTNGRLVLYCKGADNVVYERLADGNHDMKKISREHLEQFGSAGLRTLCLAYRDLSREQYESWNEKFVQAKSSLRDRDKKLDEVAELIEKDLILVGCTAIEDKLQEGVPTCIETLSAAGIKIWVLTGDKMETAINIAYACSLVNNDTKQFIISSETGAIREAEDRGDPVEIARVIKDSVKQNLKRFHEEARHSLISTPERKLALIIDGRCLMYALDPTLRVDLLGLSLSCHSVICCRVSPLQKAQVTSLVRKGAEKITLSIGDGANDVSMIQAAHVGIGISGQEGMQAVMASDFAIAQFRFLTDLLLVHGRWSYLRLCKVITYFFYKNLTFTLTQFWFTFQTGFSGQRFYDDWFQSLYNVIFTALPVIIVGLFDKDVSASLSKKYPQLYKEGIRNSFFKWRVIAVWGFFAFYQSIVFFYFTAAASRHGQGSSGKILGLWDVSTMAFTCVVVTVNLRLLMACNSITRWHYISVAGSIVAWFMFIFIYSAIMTSFDRQENVYFVIYVLMSTFFFYLTIVLVPIIALFGDFLYLSIQRWLFPYDYQIIQEQHKDEPHEYSRVPLPETSHLSPEEARSYMISMLPRESSKHTGFAFDSPGYESFFASQQGIGVPHKPWDVARRASMKPQRAGKS

SEQ ID NO: 159202 - protein, 610 aa, Zea Mays
MIKFIQCTQFINNDLHMYHAESNTPALARTSNLNEELGQVEYIFSDKTGTLTRNLMEFFKCSIGGEMYGTGITEIEKGGAERAGIRIDDDEGKRSANAVHEKGFNFDDARIMRGAWRNEPNPEACKEFFRCLAICHTVLPEGEETPEKISYQAASPDEAALVSAAKNFGFFFYRRTPTTVMVRESHVERMGSIQDVPYEILNVLEFNSTRKRQSVVCRFTNGRLVLYCKGADNVVYERLADGNHDMKKISREHLEQFGSAGLRTLCLAYRDLSREQYESWNEKFVQAKSSLRDRDKKLDEVAELIEKDLILVGCTAIEDKLQEGVPTCIETLSAAGIKIWVLTGDKMETAINIAYACSLVNNDTKQFIISSETGAIREAEDRGDPVEIARVIKDSVKQNLKRFHEEARHSLISTPERKLALIIDGRCLMYALDPTLRVDLLGLSLSCHSVICCRVSPLQKAQVTSLVRKGAEKITLSIGDGANDVSMIQAAHVGIGISGQEGMQAVMASDFAIAQFRFLTDLLLVHGRWSYLRLCKVITYFFYKNLTFTLTQFWFTFQTGFSGQRFYDDWFQSLYNVIFTALPVIIVGLFDKVGLFLLVYGVVSCNCTKL

SEQ ID NO: 159203 - protein, 143 aa, Zea Mays
MFLRRRLLSTAAAATAARGPPPIRVSLTESAGRGVFATRPVSSGELLHSAQPLVSHPSHSLLHEVCYNCLRRKPGEGRASSGGDYFCSDACRDHAKGFHDIEKNVDWSLFDYHCSALLAWLYQELLMQIALTYFSQLCCTRGR

SEQ ID NO: 159204 - protein, 103 aa, Zea Mays
MSVPHRPPPRHPFDDLSHSTTPHGRDSTGHHRLAFPRILSTVVISDSGTPAQATAPPQADKLLAPEFQPSVEALVHFLPPSRQQQPFLLMSRDSKRNIFLDLM

SEQ ID NO: 159205 - protein, 278 aa, Zea Mays
MDAASRPPPPHGTGVRVRAPLVESVSCYCRLDTGLKTVVEARKFVPGAKMCMQPEVKQNKRKSRGSKKERCRTQAPLLPGLPDDLAIACLIRVPRLEQPKLRMVCKRWNRLLSGNYFYSLRKKIGVAEEWVYVFKRDREGKISWYAFDPLHQLWKSLPPVPQEYSEALGFGCAVLSGCYLYLFGGKDPLRGSMRRVVFYNARTNKWHRAPDMMRKRHFFGSCVINNCLYVAGGECEGIQRTLQSAEVYDPTQEHGQGSWTASTTWAAHVPLKLQLWCH

SEQ ID NO: 159206 - protein, 314 aa, Zea Mays
MAQQQPVRRILKVAPPGKGDGESFPTVQAAVDAVPLGNRARVVIRLAPGVYREPVYVAKTKNFITVAGASPEATVVSWDNTATRIRHSQSSRVIGTGTFGCGTFIIEGEDFIAENITFENSAPQGSGQAVAVRVTADRCAFYNCRFLGWQYLRDCYIEGHCDFIFGNSVALMEHCHIHCKAAGYITAHSRKSTSESTGYVFLRCTITGHGEAGYMFLGRPWGPFGRVVFAYTFMDRCIKPSGWHNWDKSENERTACFYEYRCSGPGALPSNRVTWCRQLLDVEAEQFLAHTFIDPDVDRPWLLQMMAIRIPASA

SEQ ID NO: 159207 - protein, 478 aa, Zea Mays
MAVAPMDCGAGSISLGHKVLCRFGVPNSSRLRWVGYDRKQRTDQLIARAVSVDRTQLDFSNPDWKTQFQEDFDKRFSLPHLTDVIDVEPRPTTFSLKSRAPLENANGTMQGSWNGYVNDDDRALLKVIKFASPTSAGADCIDPDCSWVEQWVHRAGPRKQIYFEPQYVKAGIVSCGGLCPGLNDVIRQIVLTLEKYGVKNIVGIQHGFRGFFEDHLSEVPLSRHVVQNINLAGGSFLGVSRGGANISDIVDSIQARRLDMLFVLGGNGTHAGANAIHDEAHSAFHGIGLVKLMGRSSGFITMHASLSSGQVDICLIPEVPFTVDGPNGVLRHLEHLIETKGFALVCVAEGAGQEYFQKSNATDASGNMVLSDIGVHLQQKIKSHFKDIGVHSDVKYIDPTYMLRAVRANASDAILCTVLGQNAVHGAFAGFSGITTGVCNTHNVYLPIPEVIKSTRFIDPNSRMWHRCLTSTGQPDFH

SEQ ID NO: 159208 - protein, 142 aa, Zea Mays
MALKGGGGGGGRQEAASELINLNVRETEASCSENNSSEINGLDVSRPDPAAGESPAMNSYRGGLPFYASAAARADIHHQLLHSGGQPSPAAAAPPKMELAPGSPPATAGGGGGTFGSLLCGAAVDEPPPFWSWADGHHTCFQ

SEQ ID NO: 159209 - protein, 55 aa, Zea Mays
MATRGCNDEFHGEREESAWRGWGGQALAPRGLSSLFIERGKQRERQGEKWRSLHH

SEQ ID NO: 159210 - protein, 344 aa, Zea Mays
MIYTAIDTFYLTEEQLRNSPSRKDGIDEATETVLRVYGCDLIQESGILLRLPQAVMATAQVLFHRFYCKKSFVRFSAKRVAASCVWLAGKLEESPRKSKHIIFVFHRMECRRENLPIEFLDVFSKKYSELRRDLIRTERHLLKEMGFICHVEHPHKFISNYLATLEAPPELTQEAWNLANDSLRTTLCVRFKSEVVACGVVYAAARRHRVPLPEDPPWWTVFDADEAGIQEVCSVLAHLYSLPKAQYIPVYKEYDSFTVKRISDPQALKESPARAVASDKGTPIPSSSNQEKDSVAKTIPNRVKEKSDDEGHSDKEKSRRHPSHDRVDYYSSHSSREKDRHRHH

SEQ ID NO: 159211 - protein, 91 aa, Zea Mays
MLGVGILIMIAGVVTLIARGIGDVALGIEVQTRRNQGAIHHTTELTTTVRIHLVKKIGIDTIDQGEEDPGFAGLCCMETTTWQCRQNHENL

SEQ ID NO: 159212 - protein, 94 aa, Zea Mays
MLGVGILIMIAGVVTLIARGIGDVALGIEVQDTQTRRNQGAIHHTTELTTTVRIHLVKKIGIDTIDQGEEDPGFAGLCCMETTTWQCRQNHENL

SEQ ID NO: 159213 - protein, 68 aa, Zea Mays
MDASFLICVQGFPSHGRPQPHGRPRLALPPSPPQARFGMEAGHRTQHTNLTGHTLCFSPLSAALMSSS

SEQ ID NO: 159214 - protein, 68 aa, Zea Mays
MDASFLICVQGFPSHGRPQPHGRPRLALPPSLPQARFGMEAGHRTQHTNLTGHTLCFSPLSAAPMSSS

SEQ ID NO: 159215 - protein, 70 aa, Zea Mays
MPVSSHRVGSKVWASCCGTLMMGIPSPGEIGGEAAWELLVRIAESLSCRISSWSGTYMAPNLWSRTGTPG

SEQ ID NO: 159216 - protein, 1005 aa, Zea Mays
MADGGRMKGVQSAGGGAGDDEEGNEEVREEPELALSLGRRVWHLPPRQEAAPRSLNWTPVLPEWNPDAAGSSQGVERALGGQSISSLGFHDMFGGILDDPQAGGSMEVGWGKLNEEDEDRDLQNKRLRVRHFGEENPLHSEHELEFGLSLFANDGSESPRDANNEQVDDAENSGGRNSVDVGIRMDLSDDFLHMIFSFLDQKDLCRAGVTCKQWRSASVHDDFWKCLKFENTSVSLENFVNICRHYQSVTELNLHGVINAETLVLEAIMFLRHLKTLTMGKGQLGESFFQALAECPLLTALTVNDASLGSGIQEVTVNHDGLRELHILKCRALRISVRCSQLQILSLRRTGMAHVSLNCPQLLELDFQSCHKLSDNAIRQAATACPLLAKLDMSSCSCVTDETLRDIASSCPSLSVLDASNCPNISFESVRLPMLIDLRLLSCEGITSASMAAIAYSRLLEALQLDNCSLLTSVSLDLPHLKNISLVHLRKFADLNLRSPVLSYIKVSRCSALHRVSITSTTLQKLVLQKQESLSSLSLQCHNLIDVDLTECESLTNAVCEVFSDGGGCPMLRSLILDNCENLSIVELNSSSLSCLSLAGCRSMTLLRLSCPNLQHVNLDGCDHLQSAAFCPVGLESLNLGICPKLSVLHIEAPNMSILELKGCGVLSKASINCPRLTSLDASFCRQLVDDSLTCMSEACPMIEHLILSSCLSIGIDGLSSLHCLHKLTLLDLSYTFLDNLKPVFNSCLQLKVLKLSACKYLSDSSLDALYREGALPLLVELDLSYSSIGQNAIEDLLACCTNLVNVNLNGCTNFQELVCGSDDSSCVDMPVDFCAPSSAIKSEEIRSGFDMSQSFNVKLELTGGAESLIAPRLSNLQLLRQEAAPRSLNWTPVLQEWNPDAAGSSQGVERALGGQSISSLGFHDMFGGILDDPQAGGSMEVGWGKLNEEDEDRDLQNTNIKSGQALSLELLYIVPKHCRYIARHGILGARGNDILFFQSIHVAE

SEQ ID NO: 159217 - protein, 464 aa, Zea Mays
MADGGRMKGVQSAGGGAGDDEEGNEEVREEPELALSLGRRVWHLPPRQEAAPRSLNWTPVLPEWNPDAAGSSQGVERALGGQSISSLGFHDMFGGILDDPQAGGSMEVGWGKLNEEDEDRDLQNKRLRVRHFGEENPLHSGASATPFGSESSFLPISDECVHLKLSRFPEHELEFGLSLFANDGSESPRDANNEQVDDAENSGGRNSVDVGIRMDLSDDFLHMIFSFLDQKDLCRAGVTCKQWRSASVHDDFWKCLKFENTSVSLENFVNICRHYQSVTELNLHGVINAETLVLEAIMFLRHLKTLTMGKGQLGESFFQALAECPLLTALTVNDASLGSGIQEVTVNHDGLRELHILKCRALRISVRCSQLQILSLRRTGMAHVSLNCPQLLELDFQSCHKLSDNAIRQAATACPLLAKLDMSSCSCVTDETLRDIASSCPSLSVLDASNCPNISFEAQCRRLP

SEQ ID NO: 159218 - protein, 882 aa, Zea Mays
MKTETCRINGSEYDTLAKHELEFGLSLFANDGSESPRDANNEQVDDAENSGGRNSVDVGIRMDLSDDFLHMIFSFLDQKDLCRAGVTCKQWRSASVHDDFWKCLKFENTSVSLENFVNICRHYQSVTELNLHGVINAETLVLEAIMFLRHLKTLTMGKGQLGESFFQALAECPLLTALTVNDASLGSGIQEVTVNHDGLRELHILKCRALRISVRCSQLQILSLRRTGMAHVSLNCPQLLELDFQSCHKLSDNAIRQAATACPLLAKLDMSSCSCVTDETLRDIASSCPSLSVLDASNCPNISFESVRLPMLIDLRLLSCEGITSASMAAIAYSRLLEALQLDNCSLLTSVSLDLPHLKNISLVHLRKFADLNLRSPVLSYIKVSRCSALHRVSITSTTLQKLVLQKQESLSSLSLQCHNLIDVDLTECESLTNAVCEVFSDGGGCPMLRSLILDNCENLSIVELNSSSLSCLSLAGCRSMTLLRLSCPNLQHVNLDGCDHLQSAAFCPEKDKLVADVMHYVLFRTHQNFDCPIKQEELTGIVTKNYRQRVLPTLVIKEAKDMLAATFGYEMRELQRSRALWSGFWTSWSEAAAPTKEVGLESLNLGICPKLSVLHIEAPNMSILELKGCGVLSKASINCPRLTSLDASFCRQLVDDSLTCMSEACPMIEHLILSSCLSIGIDGLSSLHCLHKLTLLDLSYTFLDNLKPVFNSCLQLKVLKLSACKYLSDSSLDALYREGALPLLVELDLSYSSIGQNAIEDLLACCTNLVNVNLNGCTNFQELVCGSDDSSCVDMPVDFCAPSSAIKSEEISERSGRLLEVLNCTGCPNIKKVVIPSIANFLHLSKINLNLSTNLKEVDLTCPNLLTLNLSNCSSLEVLKA

SEQ ID NO: 159219 - protein, 720 aa, Zea Mays
MADGGRMKGVQSAGGGAGDDEEGNEEVREEPELALSLGRRVWHLPPRQEAAPRSLNWTPVLPEWNPDAAGSSQGVERALGGQSISSLGFHDMFGGILDDPQAGGSMEVGWGKLNEEDEDRDLQNKRLRVRHFGEENPLHSGASATPFGSESSFLPISDECVHLKLSRFPEHELEFGLSLFANDGSESPRDANNEQVDDAENSGGRNSVDVGIRMDLSDDFLHMIFSFLDQKDLCRAGVTCKQWRSASVHDDFWKCLKFENTSVSLENFVNICRHYQSVTELNLHGVINAETLVLEAIMFLRHLKTLTMGKGQLGESFFQALAECPLLTALTVNDASLGSGIQEVTVNHDGLRELHILKCRALRISVRCSQLQILSLRRTGMAHVSLNCPQLLELDFQSCHKLSDNAIRQAATACPLLAKLDMSSCSCVTDETLRDIASSCPSLSVLDASNCPNISFESVRLPMLIDLRLLSCEGITSASMAAIAYSRLLEALQLDNCSLLTSVSLDLPHLKNISLVHLRKFADLNLRSPVLSYIKVSRCSALHRVSITSTTLQKLVLQKQESLSSLSLQCHNLIDVDLTECESLTNAVCEVFSDGGGCPMLRSLILDNCENLSIVELNSSSLSCLSLAGCRSMTLLRLSCPNLQHVNLDGCDHLQSAAFCPVGLESLNLGICPKLSVLHIEAPNMSILELKGCGVLSKASINCPRLTSLDASFCSLWMIL

SEQ ID NO: 159220 - protein, 511 aa, Zea Mays
MLIDLRLLSCEGITSASMAAIAYSRLLEALQLDNCSLLTSVSLDLPHLKNISLVHLRKFADLNLRSPVLSYIKVSRCSALHRVSITSTTLQKLVLQKQESLSSLSLQCHNLIDVDLTECESLTNAVCEVFSDGGGCPMLRSLILDNCENLSIVELNSSSLSCLSLAGCRSMTLLRLSCPNLQHVNLDGCDHLQSAAFCPVGLESLNLGICPKLSVLHIEAPNMSILELKGCGVLSKASINCPRLTSLDASFCRLCHFQFFIYFFIYAINCYLCSLYFCMFRQLVDDSLTCMSEACPMIEHLILSSCLSIGIDGLSSLHCLHKLTLLDLSYTFLDNLKPVFNSCLQLKVLKLSACKYLSDSSLDALYREGALPLLVELDLSYSSIGQNAIEDLLACCTNLVNVNLNGCTNFQELVCGSDDSSCVDMPVDFCAPSSAIKSEEISERSGRLLEVLNCTGCPNIKKVVIPSIANFLHLSKINLNLSTNLKEVDLTCPNLLTLNLSNCSSLEVLKA

SEQ ID NO: 159221 - protein, 529 aa, Zea Mays
MADGGRMKGVQSAGGGAGDDEEGNEEVREEPELALSLGRRVWHLPPRQEAAPRSLNWTPVLPEWNPDAAGSSQGVERALGGQSISSLGFHDMFGGILDDPQAGGSMEVGWGKLNEEDEDRDLQNKRLRVRHFGEENPLHSGASATPFGSESSFLPISDECVHLKLSRFPEHELEFGLSLFANDGSESPRDANNEQVDDAENSGGRNSVDVGIRMDLSDDFLHMIFSFLDQKDLCRAGVTCKQWRSASVHDDFWKCLKFENTSVSLENFVNICRHYQSVTELNLHGVINAETLVLEAIMFLRHLKTLTMGKGQLGESFFQALAECPLLTALTVNDASLGSGIQEVTVNHDGLRELHILKCRALRISVRCSQLQILSLRRTGMAHVSLNCPQLLELDFQSCHKLSDNAIRQAATACPLLAKLDMSSCSCVTDETLRDIASSCPSLSVLDASNCPNISFESVRLPMLIDLRLLSCEGITSASMAAIAYSRLLEALQLDNCSLLTSVSLDLPHLKNISLVHLRNFQMFGTPSS

SEQ ID NO: 159222 - protein, 648 aa, Zea Mays
MFLRHLKTLTMGKGQLGESFFQALAECPLLTALTVNDASLGSGIQEVTVNHDGLRELHILKCRALRISVRCSQLQILSLRRTGMAHVSLNCPQLLELDFQSCHKLSDNAIRQAATACPLLAKLDMSSCSCVTDETLRDIASSCPSLSVLDASNCPNISFESVRLPMLIDLRLLSCEGITSASMAAIAYSRLLEALQLDNCSLLTSVSLDLPHLKNISLVHLRKFADLNLRSPVLSYIKVSRCSALHRVSITSTTLQKLVLQKQESLSSLSLQCHNLIDVDLTECESLTNAVCEVFSDGGGCPMLRSLILDNCENLSIVELNSSSLSCLSLAGCRSMTLLRLSCPNLQHVNLDGCDHLQSAAFCPVGLESLNLGICPKLSVLHIEAPNMSILELKGCGVLSKASINCPRLTSLDASFCRQLVDDSLTCMSEACPMIEHLILSSCLSIGIDGLSSLHCLHKLTLLDLSYTFLDNLKPVFNSCLQLKVLKLSACKYLSDSSLDALYREGALPLLVELDLSYSSIGQNAIEDLLACCTNLVNVNLNGCTNFQELVCGSDDSSCVDMPVDFCAPSSAIKSEEISERSGRLLEVLNCTGCPNIKKVVIPSIANFLHLSKINLNLSTNLKEVDLTCPNLLTLNLSNCSSLEVLKA

SEQ ID NO: 159223 - protein, 374 aa, Zea Mays
MAVLALRLGFVAPPHPRTSSGRFAFSPPSSRAVANAGVAAGPSRPITVDGDPPTVVSAPGRRIVAIGDAHGDLSQTRAALVLAGVLSTESEGHVWTGGRTILVQVGDILDRGEDEIAILSLLSSLNMQAKSQGGAVFQVNGNHETMNVEGDFRYCDPGGFDECMRFLDYLDECDGNWDNAFLNWVNVCERRKKEYVALPNGDWGPWNFVKKQKGFAARSSLLKRGGPLAHELARHPVVLKINDWIFCHGGLLPHHVEYGIERMNREVSMWMKCSGEDSGDETDIPFIATRGYDSVVWSRMYSQDPAERTRRALMLSSIAAEQTLEAVGAKGMVVGHTPQTHGVTCKCDGKVWCVDVGMSCGVLCSRPEVHNRKH

SEQ ID NO: 159224 - protein, 394 aa, Zea Mays
MAVLALRLGFVAPPHPRTSSGRFAFSPPSSRAVANAGVAAGPSRPITVDGDPPTVVSAPGRRIVAIGDAHGDLSQTRAALVLAGVLSTESEGHVWTGGRTILVQVGDILDRGEDEIAILSLLSSLNMQAKSQGGAVFQVNGNHETMNVEGDFRYCDPGGFDECMRFLDYLDECDGNWDNAFLNWVNVCERRKKEYVALPNGDWGPWNFVKKGFAARSSLLKRGGPLAHELARHPVVLKINDWIFCHGGLLPHHVEYGIERMNREVSMWMKCSGEDSGDETDIPFIATRGYDSVVWSRMYSQDPAERTRRALMLSSIAAEQTLEAVGAKGMVVGHTPQTHGVTCKCDGKVWCVDVGMSCGVLCSRPEVLEIVNDRPRVLKERRELYDEMEVLDYL

SEQ ID NO: 159225 - protein, 271 aa, Zea Mays
MAHNWSPCTPWTQVNGNHETMNVEGDFRYCDPGGFDECMRFLDYLDECDGNWDNAFLNWVNVCERRKKEYVALPNGDWGPWNFVKKQKGFAARSSLLKRGGPLAHELARHPVVLKINDWIFCHGGLLPHHVEYGIERMNREVSMWMKCSGEDSGDETDIPFIATRGYDSVVWSRMYSQDPAERTRRALMLSSIAAEQTLEAVGAKGMVVGHTPQTHGVTCKCDGKVWCVDVGMSCGVLCSRPEVLEIVNDRPRVLKERRELYDEMEVLDYL

SEQ ID NO: 159226 - protein, 444 aa, Zea Mays
MAVLALRLGFVAPPHPRTSSGRFAFSPPSSRAVANAGVAAGPSRPITVDGDPPTVVSAPGRRIVAIGDAHGDLSQTRAALVLAGVLSTESEGHVWTGGRTILVQVGDILDRGEDEIAILSLLSSLNMQAKSQGGAVFQSCGSDSTVIPTNSDATNYIRHGLHGTQLVTMHSVDSGMHLTNSKRDSKVNGNHETMNVEGDFRYCDPGGFDECMRFLDYLDECDGNWDNAFLNWVNVCERRKKEYVALPNGDWGPWNFVKKQKGFAARSSLLKRGGPLAHELARHPVVLKINDWIFCHGGLLPHHVEYGIERMNREVSMWMKCSGEDSGDETDIPFIATRGYDSVVWSRMYSQDPAERTRRALMLSSIAAEQTLEAVGAKGMVVGHTPQTHGVTCKCDGKVWCVDVGMSCGVLCSRPEVLEIVNDRPRVLKERRELYDEMEVLDYL

SEQ ID NO: 159227 - protein, 262 aa, Zea Mays
MAVLALRLGFVAPPHPRTSSGRFAFSPPSSRAVANAGVAAGPSRPITVDGDPPTVVSAPGRRIVAIGDAHGDLSQTRAALVLAGVLSTESEGHVWTGGRTILVQVGDILDRGEDEIAILSLLSSLNMQAKSQGGAVFQVNGNHETMNVEGDFRYCDPGGFDECMRFLDYLDECDGNWDNAFLNWVNVCERRKKEYVALPNGDWGPWNFVKKQKGFAARSSLLKRGGPLAHELARHPVVLKINDWIFCHGGLLPHHGQNLPDR

SEQ ID NO: 159228 - protein, 166 aa, Zea Mays
MAVLALRLGFVAPPHPRTSSGRFAFSPPSSRAVANAGVAAGPSRPITVDGDPPTVVSAPGRRIVAIGDAHGDLSQTRAALVLAGVLSTESEGHVWTGGRTILVQVGDILDRGEDEIAILSLLSSLNMQAKSQGGAVFQVLEIVNDRPRVLKERRELYDEMEVLDYL

SEQ ID NO: 159229 - protein, 129 aa, Zea Mays
MPCQTQHEMPKAIGRQTIKHGAPPRIRIQKLALRCPVSAPASTHGSSTPLVRACLFASSPCRELRYPAPAVRGVSTPRGQEGEAAEREVRAGSQGRWRAGRVAEPRGDAGLRRSGGRGADHRERRASDV

SEQ ID NO: 159230 - protein, 174 aa, Zea Mays
MPCQTQHEMPKAIGRQTIKHGAPPRIRIQKLALRCPVSAPASTHGSSTPLVRACLFASSPCRELRYPAPAVRGVSTPRGQEGEAAEREVRAGSQGRWRAGRVAEPRGDAGLRRSGGRGADHRERRASECGIDRAGADAGAGAHRRGRRPHGLPHLPVRDAGLMGELSKLPKGHA

SEQ ID NO: 159231 - protein, 211 aa, Zea Mays
MPDVQPLVSDFVLKLKRRKVEGSHAVARQTAELLRSVVSQHRMGSSANQAAALADAVRAVGEQLISANPIVSEFYQGDLKTVLVSNCEVILTLGRSRTVKEFLYAAKEKKRSFRVFVAEGAPRYQGHVLAKELVEKGVQTTVITDSAVFAMISRVNMVIIGAHAIMANGGVIAPVGMNMVALAAQRHAVPFVVVAGSHKVDFYTSPSSFAT

SEQ ID NO: 159232 - protein, 72 aa, Zea Mays
MELLVGPVTVKQQEIDGSILAFGRKLSREWDVTSWNCCRTTGEVHIHEYMIDWLCRGSLFLIWALAGPNFVL

SEQ ID NO: 159233 - protein, 76 aa, Zea Mays
MYAYVTFVSGCLIRIDSNNISISPAIIRASLVIKRHLNQYDGRYKVHIYCKPAPTTMLPLLPFQYDFKSTRKDLKL

SEQ ID NO: 159234 - protein, 218 aa, Zea Mays
MDGVTQAVENLKKEWGQAVSQLDENITAIKSCGKTGKGTEEANSLPRLNGSAQDALQLLKSLQFQLDLLAQQLPTFDEVQSGQATLKSWDEQYKKLRISLRNANLEAKDNIRQAAEEERALLLGGGEESTIRRRNLQTKAGMTSAAESITESLRRSRQMMVQEVERSASTLATFDESTSVLQKAEGEYQGHRSLLMRTRGLLSTMQRQDVFDRSREGT

SEQ ID NO: 159235 - protein, 132 aa, Zea Mays
MDGVTQAVENLKKEWGQAVSQLDENITAIKSCGKTGKGTEEANSLPRLNGSAQDALQLLKSLQFQLDLLAQQLPTFDEVQSGQATLKSWDEQYKKLRISLRNANLEAKDNIRQAAEEESIAGAIITWLSVSN

SEQ ID NO: 159236 - protein, 182 aa, Zea Mays
MDGVTQAVENLKKEWGQAVSQLDENITAIKSCGKTGKGTEEANSLPRLNGSAQDALQLLKSLQFQLDLLAQQLPTFDEVQSGQATLKSWDEQYKKLRISLRNANLEAKDNIRQAAEEERALLLGGGEESTIRRRNLQTKAGMTSAAESITESLRRSRQMMVQTNQQVFSRRLKVNIKDIALC

SEQ ID NO: 159237 - protein, 197 aa, Zea Mays
MPEHNWSAYEEALKANPVLAKMMISGVVYSLGDWIAQCYEGKPIFDFDRARMFRSGLVGFTLHGSLSHYYYHICEALFPFKDWWVVPAKVAFDQTVWSAIWNSIYFVVLGFLRLESPTTIYSELKSTFWPMLTAGWKLWPFAHLITYGVVPVEQRLLWVDCVELVWVTILSTYSNEKSEARNSDSTSTPDASKDNSR

SEQ ID NO: 159238 - protein, 251 aa, Zea Mays
MGDHEGHGVDFEKKADQKLSGWGLFGNKYEEAADLLDRAGSFFKLAKNWSRAAAVYKKIADCHLQEISRLNMAARYSKDIGEIYLQEQDLENAAVYLNRAADLFDSEGQSSQANSMTQKIAEIYAQLEKYQKATELFEEIARKSINNNLLKYGVRGTLLNAGICQLCRGDVVAINNSLERYQDIDPTFSGTREYKLLADLAASTDEGDVGKFTDAVKEFDSMTRLDPWKTTLLLKAKNELKKKEEDEDDLT

SEQ ID NO: 159239 - protein, 169 aa, Zea Mays
MLPLLMLRQQTATRSSPCKEISRLNMAARYSKDIGEIYLQEQDLENAAVYLNRAADLFDSEGQSSQANSMTQKIAEIYAQLEKYQKATELFEEIARKSINNNLLKYGVRGTLLNAGICQLCRGDVVAINNSLERYQDIDPTFSGTREYKLLAVPYNTHIPFVHCVHHDT

SEQ ID NO: 159240 - protein, 248 aa, Zea Mays
MGDHEGHGVDFEKKADQKLSGWGLFGNKYEEAADLLDRAGSFFKLAKNWSRAAAVYKKIADCHLQGDNKHDAASAYVEAANCYKKFSLQDAAQALNSAVNLFQEISRLNMAARYSKDIGEIYLQEQDLENAAVYLNRAADLFDSEGQSSQANSMTQKIAEIYAQLEKYQKATELFEEIARKSINNNLLKYGVRGTLLNAGICQLCRGDVVAINNSLERYQGHANTSFWQYHTILTFLLFTVFIMIRSP

SEQ ID NO: 159241 - protein, 144 aa, Zea Mays
MAARYSKDIGEIYLQEQDLENAAVYLNRAADLFDSEGQSSQANSMTQKIAEIYAQLEKYQKATELFEEIARKSINNNLLKYGVRGTLLNAGICQLCRGDVVAINNSLERYQDIDPTFSGTREYKLLAVPYNTHIPFVHCVHHDT

SEQ ID NO: 159242 - protein, 112 aa, Zea Mays
MEDEYVLPTEYYGVTTARGAQGERQQRPWLVEMDELLFVRIGLTRQADGSYDIASSSKQSSSSARHADRPPSLELTDNLAFLVHSGDSLLADFVQDMLSELVVKAQSCSESV

SEQ ID NO: 159243 - protein, 411 aa, Zea Mays
MDEGLRCLRQHESMVRMWTVQDQLAAVKTLCATFRRSPVNIKNIRCVTTFAALMLSPYTTVARACEDALLSLPSIPGFAFAIARAYCHIIIAMPPESSPEISSAAAVLGRLNQISMATVEGDHRGFGDLAMDVLGDALANRNLPVRKKALNLVASLLTPRNVCDVLGLLNSELVVAASANLQIEYRQMLEKAIRECHSAHPGSILEFTLDPKYAVFTDCIRYTMDIMNSNPLLRVQLLKGLLRMLRHVRSPPVCAAAVWIISVFSESPVEVDDAIAALSCLFKDLLDRRKIEKQILGSEMEDEYVLPTEYYGVTTARGAQGERQQRPWLVEMDELLFVRIGLTRQADGSYDIASSSKQSSSSARHADRPPSLELTDNLAFLVHSGDSLLADFVQDMLSELVVKAQSCSESV

SEQ ID NO: 159244 - protein, 312 aa, Zea Mays
MENTKPCSDFGMIMADLESENPVTNVAAMNRASELIAEGKLPEPQLLRRLISCLASNLEKPDHESAVKRKVHLTLEAIREAITSNRVNIESPARGEALHAIWCCFMDEGLRCLRQHESMVRMWTVQDQLAAVKTLCATFRRSPVNIKNIRSPPVCAAAVWIISVFSESPVEVDDAIAALSCLFKDLLDRRKIEKQILGSEMEDEYVLPTEYYGVTTARGAQGERQQRPWLVEMDELLFVRIGLTRQADGSYDIASSSKQSSSSARHADRPPSLELTDNLAFLVHSGDSLLADFVQDMLSELVVKAQSCSESV

SEQ ID NO: 159245 - protein, 579 aa, Zea Mays
MGKTLLEFQPNKGDVLPSHKFGTHDVVALKPNKADAGSASLGQGVVYRLKDSSITVAFDDIPEDGLNSPLRLEKLANEVTYRRMKDALIELSKAVQTGPCANLVPVLFGEKAPMRSKDAMKFSPFNKNLDDSQKEAISKALGSRDVFLLHGPPGTGKTTTIIEIILQEVKRGSKILACAASNIAVDNIVERLARYRTKLVRLGHPARLLPQVLDSALDAQVLRADNSSLAGDIRKEMKVLNSKLLKAKDRNTKRDIRKELKTLAKEERKRQQLAVTDVLKNADVVLTTLTGASSKKLNGITFDLVVIDEAAQALEVACWIALLKGPRCILAGDHLQLPPTIQSVEAEKKGMGKTLFERLTEAYGEEITSMLTVQYRMHEHIMSWSSKELYNNKIKAHSSVAGHMLYDLEEVTRSSSTEPTIVLIDTTGCDMEEVKDEEESTMNEGEAAVSIAHAKLLVESGVNASDIGIITPYAAQVTCLKMMRNKDAKLKDLEISTVDGFQGREKEAIIISMVRSNSKKEVGFLSDHRRMNVAVTRARRQCCLVCDVETVSSDRFLKRLVEYFEENGEYLSASEYQSS

SEQ ID NO: 159246 - protein, 614 aa, Zea Mays
MAGRGGGGKGAAGRMMSLQEFVSCMQPLIDLEKAAEISAESETSAKSLERRGCVIANLKCTDAQTGLMGKTLLEFQPNKGDVLPSHKFGTHDVVALKPNKADAGSASLGQGVVYRLKDSSITVAFDDIPEDGLNSPLRLEKLANEVTYRRMKDALIELSKAVQTGPCANLVPVLFGEKAPMRSKDAMKFSPFNKNLDDSQKEAISKALGSRDVFLLHGPPGTGKTTTIIEIILQEVKRGSKILACAASNIAVDNIVERLARYRTKLVRLGHPARLLPQVLDSALDAQVLRADNSSLAGDIRKEMKVLNSKLLKAKDRNTKRDIRKELKTLAKEERKRQQLAVTDVLKNADVVLTTLTGASSKKLNGITFDLVVIDEAAQALEVACWIALLKGPRCILAGDHLQLPPTIQSVEAEKKGMGKTLFERLTEAYGEEITSMLTVQYRMHEHIMSWSSKELYNNKIKAHSSVAGHMLYDLEEVTRSSSTEPTIVLIDTTGCDMEEVKDEEESTMNEGEAAVSIAHAKLLVESGVNASDIGIITPYAAQVFGPLDSLCIFKIIANFTSHALMPAAHDLLVNNHALYFLYCRHDSLCICLHSFECRRKKIGLENMSTFSCN

SEQ ID NO: 159247 - protein, 466 aa, Zea Mays
MRSKDAMKFSPFNKNLDDSQKEAISKALGSRDVFLLHGPPGTGKTTTIIEIILQEVKRGSKILACAASNIAVDNIVERLARYRTKLVRLGHPARLLPQVLDSALDAQVLRADNSSLAGDIRKEMKVLNSKLLKAKDRNTKRDIRKELKTLAKEERKRQQLAVTDVLKNADVVLTTLTGASSKKLNGITFDLVVIDEAAQALEVACWIALLKGPRCILAGDHLQLPPTIQSVEAEKKGMGKTLFERLTEAYGEEITSMLTVQYRMHEHIMSWSSKELYNNKIKAHSSVAGHMLYDLEEVTRSSSTEPTIVLIDTTGCDMEEVKDEEESTMNEGEAAVSIAHAKLLVESGVNASDIGIITPYAAQVTCLKMMRNKDAKLKDLEISTVDGFQGREKEAIIISMVRSNSKKEVGFLSDHRRMNVAVTRARRQCCLVCDVETVSSDRFLKRLVEYFEENGEYLSASEYQSS

SEQ ID NO: 159248 - protein, 169 aa, Zea Mays
MPGADVGADEQQEPAAARAEEMPEPAPAPAAPPPLTIFYGGTVVVFEDFPAEKTAEVMRLAAGDDLPIARKASLPWFLAKRKDRLVERAPYARPLSPAKEPEKKTFTFCLRIHMTGMAYDPLRTHLERRAAEQLDIFKEMVSLRVFERYMISVMVSRCLQILFGYSLDE

SEQ ID NO: 159249 - protein, 81 aa, Zea Mays
MEVVFEVLKSLEDVEELDPEWLHDPHKLHTCVEKDTSLSDSCGVDPFGLVVMAPEGMQSRSRSPYSSGSDQDLSFSIYASL

SEQ ID NO: 159250 - protein, 76 aa, Zea Mays
MYAAHHQEQTDPAHISARFADFILGILNLACPLRIFKWCVLFVDRFGAANRVLEPNSCQAKPIYIIDAEKRNKGDF

SEQ ID NO: 159251 - protein, 254 aa, Zea Mays
MYAAHHQEQTDPAHISARFADFILGILNLACPLRIFKWCVLFVDRFGAANRVLEPNSCQAKPIYIIDAGTCAVCPHMDGHISRNGCGFTTLGYQSIDKIRRGFLCRGRKEAREGHCLVAWGKVCRPLELGGLGISNLNDLAWALRMRWLWLAKTDPRRPWASLAIQVPSNAKDFFSVAMQTEIRNGASTLFWSYRWLMGHRVVDIAPSLFQNIPKRRVNKKIVLDYLSNHTWISDIQGALTVYLALWDNHLGST

SEQ ID NO: 159252 - protein, 115 aa, Zea Mays
MESYTGNLLSQLWIRSKKSLGNQLSVDMVLMMVFPSFEKRFLTRIVTWIYDNSHSSTQNRMSKLGTKRRKEGMIYMIDRRAETSSITMVVLVFACVPVALVYAFAGWILSYFGGD

SEQ ID NO: 159253 - protein, 421 aa, Zea Mays
MGLVCIRNRKWDGTKSLVEIRFMNKSPNHSLYIDSAVILQTELIFLALDSADSPFDEWEIRSVGNAARFSMCSPIGFCPISPVPMEHSSAEDSDISDSDIAEHKEEICAQLRAGKLNVKRGEAFRCPFCPGKKRQDYNLKDLLQHATGIGAASKRSAKVKASHLGLAMFLEKDIASTLEQPLQIVPYKPKTPKDEEIFVWPWMGIVVNLQCEFKGKECSRESEERLTAQFSRFRPLQATTLRDGKNQQFCAIVKFAKDWSGFKDAMAFENHFVLEQYSKPDWKKRNCRKDDLYGWLAKTDDYNSPEPIGEYLRKNGNLRSVGDLEREGLKETGERVAHYARQIDATNKHMSELELKNNQNAMKLDRMLEENDRLVEEHNERILNMQKDARRNSWKIINDNIRLHKELETKKKRNWQETRGT

SEQ ID NO: 159254 - protein, 1108 aa, Zea Mays
MMKAHIYRLETQTTARRTQDSSPRSFFPFPGSLHWPSPPTSKFESWGALRPHRMLLSPHGRLGSHRDASVAVPAPKPVRKEIKWKTSSSPSPVVSPPIHFSSRFSPLALPMAIPEDLEGTSGDGGVTNRGSRGRRKGAAKGRGRGRPRSADRSFPPPAMAGVAVGDRVLRERRHTTNVFCERDTDVDDEDDVETVRSKDSRSGDVLQTAKKRKKGGAGKVSVTKRSKREGEEQKKASPSKDKDCAETNGKRKMLTGDNALMCHQCQRNDKGRVVWCNSCRNKRFCVPCIERWYPNLSEDEFAAKCPYCRKNCNCKGCLRMRGVEEPPKKEISEENQISYACNVVRLLLPWLRKLRQEQMEEKKLEAKIKGVLVNEMKLEQAEYNLDERVYCNNCKTSIVDFHRSCKYCFYDLCLDCCVEIRRGEIPGGEEIMRVKPEDRGRAYLFGTTNSKDGSKRFSMRRHSSSLENEPSNVVGSSEGANNSLELWKAESDGSIPCPPKELGGCGGSILDLKCFFPEKMLSNLEERADRIMRSEVFAKAVAKRSDQCPCYDHSGNIRTQDVRETANTKGSSDNHLYCPVATAIKEDDLAHFQMHWTKGEPVIVSDVLHLTSGLSWEPLVMWRALREKKTNGDVEDEHFAVRALDCLDWCEVEINIHMFFVGYMKGRTHHMTHWPEMLKLKDWPPSSSFDQRLPRHGAEFISALPFPEYTDPRYGPLNLTVKLPDGALKPDLGPKTYIAYGFYQELGRGDSVTKLHCDMSDAVNILTHTAQVPYARYQLEKIEETRKKMKEQDLQELYGVSELNLSSPFTDSRNISADEMSKTSCNYGLDVNDVPPVNNESEVQSGAGQCSDYIDKDRSYAGMHNGERTGGALWDIFRREDSDKIQDYLRKHATEFRHIFCNPVKQVIHPIHDQTFYLTEEHKRKLKEEYGVEPWTFEQKLGEAVFIPAGCPHQVRNLKSCIKVAMDFVSPESVNECMKLTGEFRRLPPDHRAKEDKLEIKKIALHALNQVVNFLDPSSEWSKSWFAQLKNKKKAGAEEQEKPKRKRGRPCRKSNDEAAGDRHRKKGGRQRGRKRGYGKSKDGAGAVDVKPPKRQRNLLKGSGNRVGG

SEQ ID NO: 159255 - protein, 556 aa, Zea Mays
MAIPEDLEGTSGDGGVTNRGSRGRRKGAAKGRGRGRPRSADRSFPPPAMAGVAVGDRVLRERRHTTNVFCERDTDVDDESIYFQDDVETVRSKDSRSGDVLQTAKKRKKGGAGKVSVTKRSKREGEEQKKASPSKDKDCAETNGKRKMLTGDNALMCHQCQRNDKGRVVWCNSCRNKRFCVPCIERWYPNLSEDEFAAKCPYCRKNCNCKGCLRMRGVEEQPPKKEISEENQISYACNVVRLLLPWLRKLRQEQMEEKKLEAKIKGVLVNEMKLEQAEYNLDERVYCNNCKTSIVDFHRSCKYCFYDLCLDCCVEIRRGEIPGGEEIMRVKPEDRGRAYLFGTTNSKDGSKRFSMRRHSSSLENEPSNVVGSSEGANNSLELWKAESDGSIPCPPKELGGCGGSILDLKCFFPEKMLSNLEERADRIMRSEVFAKAVAKRSDQCPCYDHSGNIRTQDVRETANTKGSSDNHLYCPVATAIKEDDLAHFQMHWTKGEPVIVSDVLHLTSGLSWEPLVMWRALREKKTNGDVEDEHFAVRALDCLDWCEVRSYISLNV

SEQ ID NO: 159256 - protein, 980 aa, Zea Mays
MAIPEDLEGTSGDGGVTNRGSRGRRKGAAKGRGRGRPRSADRSFPPPAMAGVAVGDRVLRERRHTTNVFCERDTDVDDETAKKRKKGGAGKVSVTKRSKREGEEQKKASPSKDKDCAETNGKRKMLTGDNALMCHQCQRNDKGRVVWCNSCRNKRFCVPCIERWYPNLSEDEFAAKCPYCRKNCNCKGCLRMRGVEEPPKKEISEENQISYACNVVRLLLPWLRKLRQEQMEEKKLEAKIKGVLVNEMKLEQAEYNLDERVYCNNCKTSIVDFHRSCKYCFYDLCLDCCVEIRRGEIPGGEEIMRVKPEDRGRAYLFGTTNSKDGSKRFSMRRHSSSLENEPSNVVGSSEGANNSLELWKAESDGSIPCPPKELGGCGGSILDLKCFFPEKMLSNLEERADRIMRSEVFAKAVAKRSDQCPCYDHSGNIRTQDVRETANTKGSSDNHLYCPVATAIKEDDLAHFQMHWTKGEPVIVSDVLHLTSGLSWEPLVMWRALREKKTNGDVEDEHFAVRALDCLDWCEVEINIHMFFVGYMKGRTHHMTHWPEMLKLKDWPPSSSFDQRLPRHGAEFISALPFPEYTDPRYGPLNLTVKLPDGALKPDLGPKTYIAYGFYQELGRGDSVTKLHCDMSDAVNILTHTAQVPYARYQLEKIEETRKKMKEQDLQELYGVSELNLSSPFTDSRNISADEMSKTSCNYGLDVNDVPPVNNESEVQSGAGQCSDYIDKDRSYAGMHNGERTGGALWDIFRREDSDKIQDYLRKHATEFRHIFCNPVKQVIHPIHDQTFYLTEEHKRKLKEEYGVEPWTFEQKLGEAVFIPAGCPHQVRNLKSCIKVAMDFVSPESVNECMKLTGEFRRLPPDHRAKEDKLEIKKIALHALNQVVNFLDPSSEWSKSWFAQLKNKKKAGAEEQEKPKRKRGRPCRKSNDEAAGDRHRKKGGRQRGRKRGYGKSKDGAGAVDVKPPKRQRNLLKGSGNRVGG

SEQ ID NO: 159257 - protein, 562 aa, Zea Mays
MAIPEDLEGTSGDGGVTNRGSRGRRKGAAKGRGRGRPRSADRSFPPPAMAGVAVGDRVLRERRHTTNVFCERDTDVDDESIYFQDDVETVRSKDSRSGDVLQTAKKRKKGGAGKVSVTKRSKREGEEQKKASPSKDKDCAETNGKRKMLTGDNALMCHQCQRNDKGRVVWCNSCRNKRFCVPCIERWYPNLSEDEFAAKCPYCRKNCNCKGCLRMRGVEEQPPKKEISEENQISYACNVVRLLLPWLRKLRQEQMEEKKLEAKIKGVLVNEMKLEQAEYNLDERVYCNNCKTSIVDFHRSCKYCFYDLCLDCCVEIRRGEIPGGEEIMRVKPEDRGRAYLFGTTNSKDGSKRFSMRRHSSSLENEPSNVVGSSEGANNSLELWKAESDGSIPCPPKELGGCGGSILDLKCFFPEKMLSNLEERADRIMRSEVFAKAVAKRSDQCPCYDHSGNIRTQDVRETANTKGSSDNHLYCPVATAIKEDDLAHFQMHWTKGEPVIVSDVLHLTSGLSWEPLVMWRALREKKTNGDVEDEHFAVRALDCLDWCEIDCSQLCCQQAERIT

SEQ ID NO: 159258 - protein, 995 aa, Zea Mays
MAIPEDLEGTSGDGGVTNRGSRGRRKGAAKGRGRGRPRSADRSFPPPAMAGVAVGDRVLRERRHTTNVFCERDTDVDDEDDVETVRSKDSRSGDVLQTAKKRKKGGAGKVSVTKRSKREGEEQKKASPSKDKDCAETNGKRKMLTGDNALMCHQCQRNDKGRVVWCNSCRNKRFCVPCIERWYPNLSEDEFAAKCPYCRKNCNCKGCLRMRGVEEPPKKEISEENQISYACNVVRLLLPWLRKLRQEQMEEKKLEAKIKGVLVNEMKLEQAEYNLDERVYCNNCKTSIVDFHRSCKYCFYDLCLDCCVEIRRGEIPGGEEIMRVKPEDRGRAYLFGTTNSKDGSKRFSMRRHSSSLENEPSNVVGSSEGANNSLELWKAESDGSIPCPPKELGGCGGSILDLKCFFPEKMLSNLEERADRIMRSEVFAKAVAKRSDQCPCYDHSGNIRTQDVRETANTKGSSDNHLYCPVATAIKEDDLAHFQMHWTKGEPVIVSDVLHLTSGLSWEPLVMWRALREKKTNGDVEDEHFAVRALDCLDWCEVEINIHMFFVGYMKGRTHHMTHWPEMLKLKDWPPSSSFDQRLPRHGAEFISALPFPEYTDPRYGPLNLTVKLPDGALKPDLGPKTYIAYGFYQELGRGDSVTKLHCDMSDAVNILTHTAQVPYARYQLEKIEETRKKMKEQDLQELYGVSELNLSSPFTDSRNISADEMSKTSCLDVNDVPPVNNESEVQSGAGQCSDYIDKDRSYAGMHNGERTGGALWDIFRREDSDKIQDYLRKHATEFRHIFCNPVKQVIHPIHDQTFYLTEEHKRKLKEEYGVEPWTFEQKLGEAVFIPAGCPHQVRNLKSCIKVAMDFVSPESVNECMKLTGEFRRLPPDHRAKEDKLEIKKIALHALNQVVNFLDPSSEWSKSWFAQLKNKKKAGAEEQEKPKRKRGRPCRKSNDEAAGDRHRKKGGRQRGRKRGYGKSKDGAGAVDVKPPKRQRNLLKGSGNRVGG

SEQ ID NO: 159259 - protein, 806 aa, Zea Mays
MAIPEDLEGTSGDGGVTNRGSRGRRKGAAKGRGRGRPRSADRSFPPPAMAGVAVGDRVLRERRHTTNVFCERDTDVDDEDDVETVRSKDSRSGDVLQTAKKRKKGGAGKVSVTKRSKREGEEQKKASPSKDKDCAETNGKRKMLTGDNALMCHQCQRNDKGRVVWCNSCRNKRFCVPCIERWYPNLSEDEFAAKCPYCRKNCNCKGCLRMRGVEEPPKKEISEENQISYACNVVRLLLPWLRKLRQEQMEEKKLEAKIKGVLVNEMKLEQAEYNLDERVYCNNCKTSIVDFHRSCKYCFYDLCLDCCVEIRRGEIPGGEEIMRVKPEDRGRAYLFGTTNSKDGSKRFSMRRHSSSLENEPSNVVGSSEGANNSLELWKAESDGSIPCPPKELGGCGGSILDLKCFFPEKMLSNLEERADRIMRSEVFAKAVAKRSDQCPCYDHSGNIRTQDVRETANTKGSSDNHLYCPVATAIKEDDLAHFQMHWTKGEPVIVSDVLHLTSGLSWEPLVMWRALREKKTNGDVEDEHFAVRALDCLDWCEVEINIHMFFVGYMKGRTHHMTHWPEMLKLKDWPPSSSFDQRLPRHGAEFISALPFPEYTDPRYGPLNLTVKLPDGALKPDLGPKTYIAYGFYQELGRGDSVTKLHCDMSDAVNILTHTAQVPYARYQLEKIEETRKKMKEQDLQELYGVSELNLSSPFTDSRNISADEMSKTSCNYGLDVNDVPPVNNESEVQSGAGQCSDYIDKDRSYAGMHNGERTGGALWDIFRREDSDKIQDYLRKHATEFRHIFCNPVKLFTQFTIRLST

SEQ ID NO: 159260 - protein, 52 aa, Zea Mays
MPLMASFSNGQVQRHPPVRTKLRFGSFTSGLDSEQVSAPTPQDTEQPEHTPY

SEQ ID NO: 159261 - protein, 86 aa, Zea Mays
MEGSSTMDQVVKNTQENMSWLSIWWQQFVDASMMPLMASFSNGQVQRHPPVRTKLRFGSFTSGLDSEQVSAPTPQDTEQPEHSTPY

SEQ ID NO: 159262 - protein, 81 aa, Zea Mays
MLGSCSTECPTGTKYYGLLTDRPALQAASYRRRRAKCNRRTKEKMRLFRTPPEATHNRICKARPQDWSRLNGKLSHQQQGN

SEQ ID NO: 159263 - protein, 391 aa, Zea Mays
MIDLNLVIGKAYITSDGGWFMDVFNVTDKEGKKIKDEATLTQIEDYIRKSLGADSRYIPSRRRSVDVAAAADHNIIELTGTDRPGLLSEVSAVLTSLKCNVVSAEIWTHNTRAAAVMRVTDEDTGLAVTDAERLERIREKLSYLFRGGNLSRGATVSSRTATTHTERRLHQMMLDDGDYEQLQRQAPGQSQRPNVTVRNWNDKDYSVVTIRCKDRSKLLFDTVCTLTDLQYVVFHANIDAKDNQAYQEFYVRHVNGSPMNTETERLRVIQCLEAAIERRVSEGVKLELCTNDKVGLLSEVTRIFRENSLTVTRAEVTTRGRMAVNTFYVRGSAGEAVDQKAIDSIREAIGHSLQVKGQAEPPEPQKKESPTWFLFANLFRPRSLYSFGFMR

SEQ ID NO: 159264 - protein, 265 aa, Zea Mays
MRRSSSAPSTSQATSTRQYRSGVLHWVRSCVLELEESSARLELGRGEARDGVPALLHGVLGGRLGSAARELLVPTMAFPLLPQFELVTALFQFLPSQGSAACHRCDTRVAPDGGRSPPANQVDSLDTLGLPPRPLPYDDPQSSPRMVQHPLVSGHDKAPTHVQKLGQPAETKNTHTGSTCTAHKVSASSPKQHSEGSRMDDGVQFCDSSDSEDDCPVCLEEYDYENPKIALQCKHNFHLSCIYEWMERSQACPVCAKTMLFNEDE

SEQ ID NO: 159265 - protein, 450 aa, Zea Mays
MDVDDVLSNLRVVGVPTKSAIYIWGYNHSGQTARKGKECHLRIPKSLPPKLFKLGNGKSLRWTDIACGREHTAAVASDGSLFTWGANEFGQLGDGTEDSAKEPKKVKSLETEFVKSVSCGAHCTAAVAEPRENDGTVSKSRLWVWGQNQGSDYPRLFWGAFTPNTVIKQVSCGAVHVMALSEDGLLQAWGYNEYGQLGRGRTSQGLQGARVLNAYARYTWGLGSMGQLGHCSLQSGDNELIPRRVVALDGIVVGDVSCGGVHSCAVTEGGALYAWGGGHVGQLGVGPQGGFFSCSLNGSDMLLRNIPVLVIPSGVRLATCGHSHTLVSMKDGRIYGWGYNSYGQATNEKSTYAWFPSPVDWCVGEVRRLAAGGGHSAVLTDACSLKELCEFKLAETVNLSNAQLIEDVASRTGADALARLCEKVREHLDKEGECEFLEKQVAEEVNTIGS

SEQ ID NO: 159266 - protein, 348 aa, Zea Mays
MDVDDVLSNLRVVGVPTKSAIYIWGYNHSGQTARKGKECHLRIPKSLPPKLFKLGNGKSLRWTDIACGREHTAAVASDGSLFTWGANEFGQLGDGTEDSAKEPKKVKSLETEFVKSVSCGAHCTAAVAEPRENDGTVSKSRLWVWGQNQGSDYPRLFWGAFTPNTVIKQVSCGAVHVMALSEDGLLQAWGYNEYGQLGRGRTSQGLQGARVLNAYARFLDDAPEQVKIVRVSCGEYHTAAISENGEVYTWGLGSMGQLGHCSLQSGDNELIPRRVVALDGIVVGDVSCGGVHSCAVTEGGALYAWGGGHVGQLGVGPQGGFFSCSLNGSDMLLRNIPVLVIPSGVLVK

SEQ ID NO: 159267 - protein, 194 aa, Zea Mays
MDVDDVLSNLRVVGVPTKSAIYIWGYNHSGQTARKGKECHLRIPKSLPPKLFKLGNGKSLRWTDIACGREHTAAVASDGSLFTWGANEFGQLGDGTEDSAKEPKKVKSLETEFVKSVSCGAHCTAAVAEPRENDGTVSKSRLWVWGQNQGSDYPRLFWGAFTPNTVIKQVSCGAVHVMALSEDGLLQAWGVLVK

SEQ ID NO: 159268 - protein, 212 aa, Zea Mays
MDVDDVLSNLRVVGVPTKSAIYIWGYNHSGQTARKGKECHLRIPKSLPPKLFKLGNGKSLRWTDIACGREHTAAVASDGSLFTWGANEFGQLGDGTEDSAKEPKKVKSLETEFVKSVSCGAHCTAAVAEPRENDGTVSKSRLWVWGQNQGSDYPRLFWGAFTPNTVIKQVSCGAVHVMALSEDGLLQAWGILGDWEAWGSLGIAPSNLEIMS

SEQ ID NO: 159269 - protein, 1099 aa, Zea Mays
MTRWETLNHMAYKFGSLGKSDGKLALKILSSIVERSGLDRITYVYCMAVPILIQAQMHSQAMSVLKHLAVTGFSCTAIFTSLLRTISRFDPTNHVVFELLVKAYVKERKVLDAAVAVLFMDDCGFKASPVSCNTILNALVEEGESKHVWLFLRESLARKFPLGVTTCNILLNSLCTNGEFRKAEDMLQKMKSCHISNSVTYNTILHWYVKKGRFKAALCVLEDMERDSVQADVYTYNIMIDKLCRIKRSTRAFLLLKRMRKDDLTPDECTYNTLINGFFREGKINHARYVFNHMLRQNLVPSVATYTTMIDGYCRNRRIDKALSILSEMQITGVMPSELTYSALLNGYCKVSMLGPAIYLMEDLKSRGITINKTMRTILIDGFCQVGEISKAKQILKSMFEDGIDPDVITYSALINGMCRMAKMHETKEILSRMQKSGILPNDVLYTTLICYYCKAGYVKEALKHFVDIYRRGLVANPVIHNALLHAFYREGMITEAEHFRQYMSRMNISFDSVSFNRIIDSYCHRGNIVGAFSVYDDMVRYGYSPNVCTYQNLLRGLCQGGHLVQARQFMSCLLDIPFAIDEKTFNALLLGICRYGTLDEALDLCEKMIKNNCLPDIHTYTILLSGFCRKGKILPALVILQMMLEKGVVPDTVAYTCLLNGLINEGQVKAASYVFHEIICKEGLYADCIAYNSLMNGYLKSRNVNTIKRMMSDMYQNEVYPNSASYNILMHGYVKRGQFSKSLYLYKYMVRKGIRPDNVTYRLLILGLSECGLIDIAVKFLEKMVLEGIFPDRLVFDILITAFSEKSKMHNALQVFNCMKWLHMSPSSKTFSAMINGLIRKGYLDHSHKVLHEMLQVGLQPNHTHYIALVNAKCRVGEIDRAFRLKEEMKAIGIVPAEVAESSIIRGLCRCGKLEEAVIVFSSMMRSGMVPTVATFTTLMHSLCKESKIADALHLKRLMELCRLRVDVVSYNVLITGLCKDKHISDALDLYGEMKSKGLWPNITTYITLTGAMYSTGRVQNGEELLEDIEERGLIPAYKQPENLERRMEDAIIRLNMIRNCRKEVPFRGVELLPLDPKPVCSAASDCNPTETRQHKGI

SEQ ID NO: 159270 - protein, 877 aa, Zea Mays
MARPFSSLVDSSYRRRIIECKAAAYSLRLPSCARPPARPRFAASSDNTPAHGIDSSIITIQTMTRWETLNHMAYKFGSLGKSDGKLALKILSSIVERSGLDRITYVYCMAVPILIQAQMHSQAMSVLKHLAVTGFSCTAIFTSLLRTISRFDPTNHVVFELLVKAYVKERKVLDAAVAVLFMDDCGFKASPVSCNTILNALVEEGESKHVWLFLRESLARKFPLGVTTCNILLNSLCTNGEFRKAEDMLQKMKSCHISNSVTYNTILHWYVKKGRFKAALCVLEDMERDSVQADVYTYNIMIDKLCRIKRSTRAFLLLKRMRKDDLTPDECTYNTLINGFFREGKINHARYVFNHMLRQNLVPSVATYTTMIDGYCRNRRIDKALSILSEMQITGVMPSELTYSALLNGYCKVSMLGPAIYLMEDLKSRGITINKTMRTILIDGFCQVGEISKAKQILKSMFEDGIDPDVITYSALINGMCRMAKMHETKEILSRMQKSGILPNDVLYTTLICYYCKAGYVKEALKHFVDIYRRGLVANPVIHNALLHAFYREGMITEAEHFRQYMSRMNISFDSVSFNRIIDSYCHRGNIVGAFSVYDDMVRYGYSPNVCTYQNLLRGLCQGGHLVQARQFMSCLLDIPFAIDEKTFNALLLGICRYGTLDEALDLCEKMIKNNCLPDIHTYTILLSGFCRKGKILPALVILQMMLEKGVVPDTVAYTCLLNGLINEGQVKAASYVFHEIICKEGLYADCIAYNSLMNGYLKSRNVNTIKRMMSDMYQNEVYPNSASYNILMHGYVKRGQFSKSLYLYKYMVRKGIRPDNVTYRLLILGLSECGLIDIAVKFLEKMVLEGIFPDRESAEWRGTTGGYRRKGTYSGI

SEQ ID NO: 159271 - protein, 191 aa, Zea Mays
MLPGHPKQDRPRNAWSPESKLVYCLEGTVLFVFHCSWYLFLGCLQDNVDLKYHVSIKNSLRYAIQEMRRQSTLLHTINSICSSIPEVEGGKIGKVVGHLDHVCKMLEKTSIVCEQDLDNKCPSWDLFDPPSDVEDHPDVDELLEGYNSEDPELWEMAFEDRKWEENKVAVSLAEHCRIMGYNYEEIYDRTV

SEQ ID NO: 159272 - protein, 294 aa, Zea Mays
MALLSALRQIAGISAGPLSDALKAELYTLVLGTFSLPINVPGTNYSKGLQARKKLVAMLRQMIADRRSSGCARDDMLDALLSGNEGTRAKLSDDQIIDLLITLIYSGYETVSTTSMMAVKYLSDNPKALGQIRKEHLDIRKAKSPEDPLDWNDYKSMTFTKAVIYETLRLATVVNGLLRKTTHDVEMNGYVIPKGWRIYVYTREINYDPFLYPEPMVFNPWRWMETNLESHPHFMLFGGGARMCPGKEVGTVEIATFLHYFVTRYRWEEEGNNTISKFPRVAAPNGLHIRVQDY

SEQ ID NO: 159273 - protein, 571 aa, Zea Mays
MVASSIGIKGSTTNVSMDVRRYNSMPFHYTGEEEEIGTSRAKKIGLGKCGGGPISFDLRRRRHRGERCAMRRLGRKTTGYANRIRKRINGIRLFWGQIHYKTNNMGKNMAKSTVSLLNRSANFASRTSQDAVDGLSDESDGETSTKKKRTPRRGRKKATVETSRDVGEEIEVITEQTAAEETKEVKRRGRKKAATSASSEEEKDKAKEPKKRGRRKVKTVEEPIDNAGEHLSKDLMLYNEREDQTRLQNSASVLESKIASVLHEDIGEVDDLIPLVCCFGPAKYSFIPSGRPANRLIDHEIHDRMKDMFWSPDKFVRAPGGSSSNVALALAAIGGRVAFMGKLGDDDYGQSLLYHLNINGVQTRAVYMDPSAPTAVSLMKVRTEGSLKTNCVKPCAEDCFLPSDINPAVLKEAKMFYYNSSALLEPTTESSLLKAIDVSKKFGGTIFFDLNLPLPLWSSSKETKSLIKEAWEAANIIEVTKQELEFLCSIKPSEKFDTNDNDKSKFTHYSSEVIMKLWHSNLKVLFVTNGTSKIHYYTETHNGWVRGTEDAPITPFTGDMSQSGDAIVAAS

SEQ ID NO: 159274 - protein, 691 aa, Zea Mays
MVASSIGIKGSTTNVSMDVRRYNSMPFHYTGEEEEIGTSRAKKIGLGKCGGGPISFDLRRRRHRGERCAMRRLGRKTTGYANRIRKRINGIRLFCDWRGYRDFCYLPPLMAYLLLHPQFTCSQPPSHRLRGQIHYKTNNMGKNMAKSTVSLLNRSANFASRTSQDAVDGLSDESDGETSTKKKRTPRRGRKKATVETSRDVGEEIEVITEQTAAEETKEVKRRGRKKAATSASSEEEKDKAKEPKKRGRRKVKTVEEPIDNAGEHLSKDLMLYNEREDQTRLQNSASVLESKIASVLHEDIGEVDDLIPLVCCFGPAKYSFIPSGRPANRLIDHEIHDRMKDMFWSPDKFVRAPGGSSSNVALALAAIGGRVAFMGKLGDDDYGQSLLYHLNINGVQTRAVYMDPSAPTAVSLMKVRTEGSLKTNCVKPCAEDCFLPSDINPAVLKEAKMFYYNSSALLEPTTESSLLKAIDVSKKFGGTIFFDLNLPLPLWSSSKETKSLIKEAWEAANIIEVTKQELEFLCSIKPSEKFDTNDNDKSKFTHYSSEVIMKLWHSNLKVLFVTNGTSKIHYYTETHNGWVRGTEDAPITPFTGDMSQSGDAIVAALMRMLVINPHLITDKVYLHKAVKHAIKCGVIDQWVLARERGFLPKERADPTSEQYEVKSITEREYRTLPDAMQSENTSTSELAYVE

SEQ ID NO: 159275 - protein, 466 aa, Zea Mays
MAYLLLHPQFTCSQPPSHRLRTSQDAVDGLSDESDGETSTKKKRTPRRGRKKATVETSRDVGEEIEVITEQTAAEETKEVKRRGRKKAATSASSEEEKDKAKEPKKRGRRKVKTVEEPIDNAGEHLSKDLMLYNEREDQTRLQNSASVLESKIASVLHEDIGEVDDLIPLVCCFGPAKYSFIPSGRPANRLIDHEIHDRMKDMFWSPDKFVRAPGGSSSNVALALAAIGGRVAFMGKLGDDDYGQSLLYHLNINGVQTRAVYMDPSAPTAVSLMKVRTEGSLKTNCVKPCAEDCFLPSDINPAVLKEAKMFYYNSSALLEPTTESSLLKAIDVSKKFGGTIFFDLNLPLPLWSSSKETKSLIKEAWEAANIIEVTKQELEFLCSIKPSEKFDTNDNDKSKFTHYSSEVIMKLWHSNLKVLFVTNGTSKIHYYTETHNGWVRGTEDAPITPFTGDMSQSGDAIVAAS

SEQ ID NO: 159276 - protein, 421 aa, Zea Mays
MLYNEREDQTRLQNSASVLESKIASVLHEDIGEVDDLIPLVCCFGPAKYSFIPSGRPANRLIDHEIHDRMKDMFWSPDKFVRAPGGSSSNVALALAAIGGRVAFMGKLGDDDYGQSLLYHLNINGVQTRAVYMDPSAPTAVSLMKVRTEGSLKTNCVKPCAEDCFLPSDINPAVLKEAKMFYYNSSALLEPTTESSLLKAIDVSKKFGGTIFFDLNLPLPLWSSSKETKSLIKEAWEAANIIEVTKQELEFLCSIKPSEKFDTNDNDKSKFTHYSSEVIMKLWHSNLKVLFVTNGTSKIHYYTETHNGWVRGTEDAPITPFTGDMSQSGDAIVAALMRMLVINPHLITDKVYLHKAVKHAIKCGVIDQWVLARERGFLPKERADPTSEQYEVKSITEREYRTLPDAMQSENTSTSELAYVE

SEQ ID NO: 159277 - protein, 86 aa, Zea Mays
MPYAALVFYSLSSRHANAMLPPCHPLCLAIQPCNRGMAGCGGSLASPSPTSHQPPSFPLPRYIEHASARPPGSQIWHTSIPPNIPA

SEQ ID NO: 159278 - protein, 182 aa, Zea Mays
MSDGWLRQPLFIQSFAPTSLIYVSNMTDSPKLLLIDDTTVPTQDTNQSYHEITSDAYLAFIGSYVVGIGPWKDTLVPPDPTDNRLGRPADLVARAHALRLQVHPYTFRNENQYLHFDFRQDPYAEYAYWLDEVAVDGLFTDFTGSLHKYQEWTRPYRKEQEKTSPEALLREIAGMLKNDGYD

SEQ ID NO: 159279 - protein, 711 aa, Zea Mays
MGRHPPVDEAMDFNGNGRDEANPSGSEAGNHNEHRGDDPSRVGQSLPADIRQNGQPTLGEEITAPLWEEFEALGIHVRRSEPVFPPRPGYGAAGTPYVVRANLFLGRLVDEALHQYNVTISPEPTPKAAYREIMTKLLSENQHTDFDGRFSVYDDGDSLFTAGALPFDTKEFEVPLSAGGDEKMDRKYKVMINHAATISLLQLRMLLAGYPTDIPAQALVVLDTVLRDVFNERNDMECVVIDKKDRTLGVDAWKGLYLSIRPTQNCLSLIADVSSSVFVQPLLLIEFVQKILKIDAVDRNLTKPEYDKLLKALRGVRIQVTHRDNRRRVWSKKKDNRRQLSTYRVAGLSVNPTNDLSFESKVGVTTTVIDYFREIYGLELKYKYLPCVNAGSEQDPIYFPIEVCKIAPKQCYQKKLEGSQFSTPRKSAWIHPEAEQSCPQLKYDDSVSQKTWFPLDGYWNMKDKKVINGAKIRNWACLNFCEDLSKEDIKKFCFKLAEMSRITGLDFADLKLPIFTARPDRVEDGIRRCYQEAKNKLRDQKIDLLLAILPDKKDSLYGNIKRICETDIGLVSQCCRRSRVLVNNNQILANIAIKINAKVGGRISVFDDVQKSLPVVSNKPTIIFGAHVSHPSVVDGSTGPSIASVVASQDWHEVSKYNGVVRAQGHTEEIGGLEDIVKELLHAFANESKEKLQQLIFYRFIYLILFCDATT

SEQ ID NO: 159280 - protein, 396 aa, Zea Mays
MGISSKWIKSLVGIRKQEKAQNAEKQEKGWNAESSETKHSLDPGAALAVEEITVQSEALTDNKSAQMVSNSFFSDSTPLDVHISQAEHHSNEDLAATVVQSAFRAFLARRALRALKGIVLLQALIRGHSVRRQTAETLQCMQALVKAKARVRARQVRVALENQVARKKIPEQDDHENHVREVEGGWCGSIGSMEEMQAKALKRREAAAKRERAMAYALTHQRQAGSKQQNSLSLQGLELGENHWESNWLDRWMAVRPWENRLLDCNAKESLPTHEDKDEEANSQITPKGKVSTSNTPGLSKKKGVNHKKSYSDVSCTSFARPANVLPSTSLGSSKQKAKAVGEVFEEVSSQPTDIGSKDVHNSKDKLVQVNGPAKKRLSLPNNVQPCMRLGVRGIS

SEQ ID NO: 159281 - protein, 222 aa, Zea Mays
MMSFKGHEGFGQVAAAGAGSQAASHGGAGPLPWWAGPQLLFGEPAPPSPEETRRDAQFQVVPGVQGTPDPAPPKTGTPEVLKFSVFQGNLESGGKGEKTPKNSTTIALQSPFPEYNGRFEIGLGQSMLAPSNYPCADQCYGMLAAYGMRSMSGGRMLLPLNATADAPIYVNPKQYEGILRRRRARAKAESENRLAKGRKWSLCCSCRSPISTSRATSTRCVG

SEQ ID NO: 159282 - protein, 855 aa, Zea Mays
MDVDSRMTTESDSDSDAAAAAARGGNAGGSGSGSETSSSSAPSTPGTPGTPAAAPNPAPVGAVGPRPAPGYTAVNAVIEKKEDGPGCRCGHTLTAVPAVGEEGAPGYIGPRLILFGGATALEGNSATPPSSAGSAGIRLAGATADVHCYDVSLNKWSRLTPLGEPPSPRAAHVATAVGTMVVIQGGIGPAGLSAEDLHVLDLTQQRPRWHRVVVQGPGPGPRYGHVMALVGQRFLLTIGGNDGKRPLADVWALDTAAKPYEWRKLEPEGEGPPPCMYATASARSDGLLLLCGGRDANSVPLSSAYGLAKHRDGRWEWAIAPGVSPSPRYQHAAVFVNARLHVSGGALGGGRMVEDSSSVAVLDTAAGVWCDTKSVVTTPRTGRFSADAAGGDAAVELTRRCRHAAAAVNDLIFIYGGLRGGVLLDDLLVAEDLAAAETTNAANHAAANAAATNLQAGRTPGKYAYNEQTRQTITESGPDGAVVLGTPVAPPVNGDMYTDISPENAVLQGQRRLSKGVDYLVEASAAEAEAISATLAAVKARQVNGEMEQLPDKEQSPDSTSTSKHSSLIKLDSALSNNLAAPPGVRLHHRAVVVAAETGGALGGMVRQLSIDQFENEGRRVSYGTPENATAARKLLDRQMSINSVPKKVIASLLKPRGWKPPVRRQFLLDCNEIADLCDSAERIFSSEPSVLQLKAPVKIFGDLHGQFGDLMRLFDEYGAPSTAGDIAYIDYLFLGDYVDRGQHSLETITLLLALKVEYPQNVHLIRGNHEAADINALFGFRIECIERMGERDGIWTWHRMNRLFNWLPLAALIEKKIVCMHGGIGRSINHVEQIENLQRPITMEAGSVVLMDLL

SEQ ID NO: 159283 - protein, 60 aa, Zea Mays
MNLEHMLCPEITAVHPPPSTLLVQCHWLTGPEFLVLLDQQGVLDELRQKLQMMLSIGHEY

SEQ ID NO: 159284 - protein, 138 aa, Zea Mays
MCSCLSSSTDAASMPAQSLRAYCRVSLHGYRSSMSRVRVRVPASIFEVNADVVKDLNMAHIISGSKDPCPKVPAVKVSSSIHVVRNLNTTDTLVLLGPCFVAPKVLREEAASAEIVLRKWPKVPFYRASALQTDIKIE

SEQ ID NO: 159285 - protein, 182 aa, Zea Mays
MCMNEGAHFDMSGTAFGAMAKPGMADQLRAAGLLQIQYTRVQCEWPGVDVTFSVDSGSNPNYLAVLIEYEDCESDLSAVDIMQSSAGQWVPMQHSWGAIWRLDSGSALQGPFHLRLTFSSGRVLIASNAIPAGWNAGVAYRAGGVAVTRARPRSGGSQAGEAAAGTFRGLVYHLLMFVVLAL

SEQ ID NO: 159286 - protein, 335 aa, Zea Mays
MDSGPVPTRPTGGSAAVASSSSSLIFLGTGCSGALPDARCLIQPSEPPCTVCSTALSLPPDRNPNYRCNTSLLVDYCHDDGAHRYILIDVGKTFREQVLRWFVHHEVPSIDSVILTHEHADAVLGLDDLWVALPSCQRNGSAKVPVFLTQFTMDSVAARFPNLVEQKLQGGDDFARPAQLHWTIIEGDVDKPFVASELQFWPLPVRVMHGEDYVCLGFLFGRKARVAYLSDVSRILPRTEHAISKSGTATGQGQLDLLILETNRLHGAGDGRSCHLTLSQSLDAVKRIRPKRALLIGMNHEFEHHRENQLLARWSCRERIPVQLAHDGLRVFIDL

SEQ ID NO: 159287 - protein, 280 aa, Zea Mays
MDSGPVPTRPTGGSAAVASSSSSLIFLGTGCSGALPDARCLIQPSEPPCTVCSTALSLPPDRNPNYRCNTSLLVDYCHDDGAHRYILIDVGKTFREQVLRWFVHHEVPSIDSVILTHEHADAVLGLDDLWVALPSCQRNGSAKVPVFLTQFTMDSVAARFPNLVEQKLQGGDDFARPAQLHWTIIEGDVDKPFVASELQFWPLPVMHGEDYVCLGFLFGRKARVAYLSDVSRILPRTEHAISKSGTATGQGQLDLLILETNRLHGAGDGRSCHLTLSQVI

SEQ ID NO: 159288 - protein, 128 aa, Zea Mays
MDSVAARFPNLVEQKLQGGDDFARPAQLHWTIIEGDVDKPFVASELQFWPLPVMHGEDYVCLGFLFGRKARVAYLSDVSRILPRTEHAISKSGTATGQGQLDLLILETNRLHGAGDGRSCHLTLSQVI

SEQ ID NO: 159289 - protein, 115 aa, Zea Mays
MDSVAARFPNLVEQKLQGGDDFARPAQLHWTIIEGDVDKPFVASELQFWPLPVMHGEDYVCLGFLFGRKARVAYLSDVSRILPRTEHAISKSGTATGQGQLDLLILETNRLHGAI

SEQ ID NO: 159290 - protein, 267 aa, Zea Mays
MDSGPVPTRPTGGSAAVASSSSSLIFLGTGCSGALPDARCLIQPSEPPCTVCSTALSLPPDRNPNYRCNTSLLVDYCHDDGAHRYILIDVGKTFREQVLRWFVHHEVPSIDSVILTHEHADAVLGLDDLWVALPSCQRNGSAKVPVFLTQFTMDSVAARFPNLVEQKLQGGDDFARPAQLHWTIIEGDVDKPFVASELQFWPLPVMHGEDYVCLGFLFGRKARVAYLSDVSRILPRTEHAISKSGTATGQGQLDLLILETNRLHGAI

SEQ ID NO: 159291 - protein, 593 aa, Zea Mays
MSFHLHKFPLLSKSAFLERSIEENSDQEECIIKLNDIPGGAKSFELVARFCYGVKIELSPANVVYLRCASEHLEMTEEVAEENLIAQSEMFLNQVVLRNWKDSLAALETCDDLLPHAEDLQIVNRCIESLASKATSNPNLFGWPIREHGMMQSPGGSVLWNGISTGARPRNFNSDWWYGDASSLSFPMYKRLISTMESRGIRPEIIAGSLTYYAKKYLPGLRRHSHSMGTMPLTATLSEVEQKKLLEEIDRLLPLHRGIASTKVLLGLLRTAMILKASPTCISNLEKRIGMQLDQATLEDLLLPNFSYTMETLYNVECVHRILDHFLAMDQANGGESPCLDDVMASPSLTPITSVAKLIDGYLAEIAPDINLKPPKFQALASAIPEYARPLDDGLYRAIDIYLKAHSWLSEAEREQFCRLLDCQKLSLEACTHAAQNERLPLRVVVQVLFFEQLQLRTSIAGCLLVSDNLEGSRPLRSGIATSGEAGGWATAVRENQVLKVGMDNMRTRLAELEKECSSMRQEIEKLGGRAGKGGGGGWASRVVPRRLGLKVRSQMCSAQEGSVSEQHRSMSAKLDKLQAKVSKQKKQLAADA

SEQ ID NO: 159292 - protein, 50 aa, Zea Mays
MCVALPNLTLCFLCDLNCKGERLQIVEIPRKRETYSKGKDRGIKVDHQIT

SEQ ID NO: 159293 - protein, 296 aa, Zea Mays
MHWDVETGKCEKYIWPSENVLVSHHAKPPISAKRSKQVLALAASSDGRYLASGGLDRHIHLWDVRSREHIQAFSGHRGPISCLAFAPDSSELFSGSFDRSIMQWNAEDRTYMNCLYGHQNEILTMDALSKDRILTVARDRTMHLWKIPEESQLVFRAPAAASLECCCFIDDKEFLSGSDDGSIELWSIMRKKPILIIKNAHPVLCTNLNSVDNDDESPKENGMHKPENVPSAAQSWVGTVAARRGSDLVASGAGNGLVRLWAIKPDSKGAEPLFDLKLINSLSCGFDSWKAMIDVH

SEQ ID NO: 159294 - protein, 184 aa, Zea Mays
MAPRPRKRASRPKPRPGSRRGGGGGDDDPFFESEPKRRRGGRDEDIESEDSDDDGVAAFGGGFDEDGDERGREEEDEETVGEKKMRMTKEWLKKVTEVAKRGQEDDDEDESGGRRVAEILQRKQLEESGRKRREIAARVLPPGPQDGFKVLVKHRQPVTAVALSKDSDKGFSASKRWNYYALGC

SEQ ID NO: 159295 - protein, 283 aa, Zea Mays
MGFCSSRPLKPEFFFGMLLVMSNIDFFLQAVLSALSWRWLLALSSLPCFLLLLFFRITPESPRYLCAQNRMTDARFVLERMAIANQAALPMGVLTYHQETKTECITHVSEDEHLIPVREKEHTDRNAISSKSGAVAVLHKLLSHNLLKSTLLLWFVYYASSFAYYGITLLTSQLSDVNRSCKSDLVFEVHQNNGNLYKDTFITSLAEIPGLILSALLVDRFGRKATMSCLMFACCAFLGPLVLHQNELLTTTLLFGARACGTGATTTLCLYAPELTETPTKAR

SEQ ID NO: 159296 - protein, 273 aa, Zea Mays
MTDARFVLERMAIANQAALPMGVLTYHQETKTECITHVSEDEHLIPVREKEHTDRNAISSKSGAVAVLHKLLSHNLLKSTLLLWFVYYASSFAYYGITLLTSQLSDVNRSCKSDLVFEVHQNNGNLYKDTFITSLAEIPGLILSALLVDRFGRKATMSCLMFACCAFLGPLVLHQNELLTTTLLFGARACGTGATTTLCLYAPEVYPTYVRSTGVGIATAIGKIGGVICPLVAVGMLRSCHQMEAVLVFELVLFLAGVSCILFPVETKGREMD

SEQ ID NO: 159297 - protein, 293 aa, Zea Mays
MGFCSSRPLKPEFFFGMLLVMSNIDFFLQAVLSALSWRWLLALSSLPCFLLLLFFRITPESPRYLCAQNRMTDARFVLERMAIANQAALPMGVLTYHQETKTECITHVSEDEHLIPVREKEHTDRNAISSKSGAVAVLHKLLSHNLLKSTLLLWFVYYASSFAYYGITLLTSQLSDVNRSCKSDLVFEVHQNNGNLYKDTFITSLAARACGTGATTTLCLYAPEVYPTYVRSTGVGIATAIGKIGGVICPLVAVGMLRSCHQMEAVLVFELVLFLAGVSCILFPVETKGREMD

SEQ ID NO: 159298 - protein, 223 aa, Zea Mays
MTDARFVLERMAIANQAALPMGVLTYHQETKTECITHVSEDEHLIPVREKEHTDRNAISSKSGAVAVLHKLLSHNLLKSTLLLWFVYYASSFAYYGITLLTSQLSDVNRSCKSDLVFEVHQNNGNLYKDTFITSLAARACGTGATTTLCLYAPEVYPTYVRSTGVGIATAIGKIGGVICPLVAVGMLRSCHQMEAVLVFELVLFLAGVSCILFPVETKGREMD

SEQ ID NO: 159299 - protein, 287 aa, Zea Mays
MECQEKNNICNEHASKVAHVRRRRASKEGCLNSQATVNWRPNTSHKNKIGHRKIDTDTHSTHQISVVRSRCYTHWFSESAGAAHMETYTTDDALTLMGFGKFQALVLAYAGMGWVAEAMEVMLLSFLGPVVREEWNVSPQDESLLSSVVFAGMLIGACAWGFISDRYGRKTVLLLSTLLTSGLGLLSALSINYLCLLVLRFFVGIGVGSGHVFSSWFLEFVPAGNRGTWMAVLSALSWRWLLALSSLPCFLLLLFFRITPESPRYLCAQNRMTDARDPRLDFIRFAC

SEQ ID NO: 159300 - protein, 284 aa, Zea Mays
MVIFSFFWTIGTVLEASLAWAVLSALSWRWLLALSSLPCFLLLLFFRITPESPRYLCAQNRMTDARFVLERMAIANQAALPMGVLTYHQETKTECITHVSEDEHLIPVREKEHTDRNAISSKSGAVAVLHKLLSHNLLKSTLLLWFVYYASSFAYYGITLLTSQLSDVNRSCKSDLVFEVHQNNGNLYKDTFITSLAARACGTGATTTLCLYAPEVYPTYVRSTGVGIATAIGKIGGVICPLVAVGMLRSCHQMEAVLVFELVLFLAGVSCILFPVETKGREMD

SEQ ID NO: 159301 - protein, 563 aa, Zea Mays
MECQEKNNICNEHASKVAHVRRRRASKEGCLNSQATVNWRPNTSHKNKIGHRKIDTDTHSTHQISVVRSRCYTHWFSESAGAAHMETYTTDDALTLMGFGKFQALVLAYAGMGWVAEAMEVMLLSFLGPVVREEWNVSPQDESLLSSVVFAGMLIGACAWGFISDRYGRKTVLLLSTLLTSGLGLLSALSINYLCLLVLRFFVGIGVGSGHVFSSWFLEFVPAGNRGTWMVIFSFFWTIGTVLEASLAWAVLSALSWRWLLALSSLPCFLLLLFFRITPESPRYLCAQNRMTDARFVLERMAIANQAALPMGVLTYHQETKTECITHVSEDEHLIPVREKEHTDRNAISSKSGAVAVLHKLLSHNLLKSTLLLWFVYYASSFAYYGITLLTSQLSDVNRSCKSDLVFEVHQNNGNLYKDTFITSLAEIPGLILSALLVDRFGRKATMSCLMFACCAFLGPLVLHQNELLTTTLLFGARACGTGATTTLCLYAPEVYPTYVRSTGVGIATAIGKIGGVICPLVAVGMLRSCHQMEAVLVFELVLFLAGVSCILFPVETKGREMD

SEQ ID NO: 159302 - protein, 513 aa, Zea Mays
MECQEKNNICNEHASKVAHVRRRRASKEGCLNSQATVNWRPNTSHKNKIGHRKIDTDTHSTHQISVVRSRCYTHWFSESAGAAHMETYTTDDALTLMGFGKFQALVLAYAGMGWVAEAMEVMLLSFLGPVVREEWNVSPQDESLLSSVVFAGMLIGACAWGFISDRYGRKTVLLLSTLLTSGLGLLSALSINYLCLLVLRFFVGIGVGSGHVFSSWFLEFVPAGNRGTWMVIFSFFWTIGTVLEASLAWAVLSALSWRWLLALSSLPCFLLLLFFRITPESPRYLCAQNRMTDARFVLERMAIANQAALPMGVLTYHQETKTECITHVSEDEHLIPVREKEHTDRNAISSKSGAVAVLHKLLSHNLLKSTLLLWFVYYASSFAYYGITLLTSQLSDVNRSCKSDLVFEVHQNNGNLYKDTFITSLAARACGTGATTTLCLYAPEVYPTYVRSTGVGIATAIGKIGGVICPLVAVGMLRSCHQMEAVLVFELVLFLAGVSCILFPVETKGREMD

SEQ ID NO: 159303 - protein, 544 aa, Zea Mays
MECQEKNNICNEHASKVAHVRRRRASKEGCLNSQATVNWRPNTSHKNKIGHRKIDTDTHSTHQISVVRSRCYTHWFSESAGAAHMETYTTDDALTLMGFGKFQALVLAYAGMGWVAEAMEVMLLSFLGPVVREEWNVSPQDESLLSSVVFAGMLIGACAWGFISDRYGRKTVLLLSTLLTSGLGLLSALSINYLCLLVLRFFVGIGVGSGHVFSSWFLEFVPAGNRGTWMAVLSALSWRWLLALSSLPCFLLLLFFRITPESPRYLCAQNRMTDARFVLERMAIANQAALPMGVLTYHQETKTECITHVSEDEHLIPVREKEHTDRNAISSKSGAVAVLHKLLSHNLLKSTLLLWFVYYASSFAYYGITLLTSQLSDVNRSCKSDLVFEVHQNNGNLYKDTFITSLAEIPGLILSALLVDRFGRKATMSCLMFACCAFLGPLVLHQNELLTTTLLFGARACGTGATTTLCLYAPEVYPTYVRSTGVGIATAIGKIGGVICPLVAVGMLRSCHQMEAVLVFELVLFLAGVSCILFPVETKGREMD

SEQ ID NO: 159304 - protein, 322 aa, Zea Mays
MCDACLMIILLPTHLNSDFSASNKNVWNSVSYVWIWYTSDLYMYTFSDKKCSFLFALQAVLSALSWRWLLALSSLPCFLLLLFFRITPESPRYLCAQNRMTDARFVLERMAIANQAALPMGVLTYHQETKTECITHVSEDEHLIPVREKEHTDRNAISSKSGAVAVLHKLLSHNLLKSTLLLWFVYYASSFAYYGITLLTSQLSDVNRSCKSDLVFEVHQNNGNLYKDTFITSLAARACGTGATTTLCLYAPEVYPTYVRSTGVGIATAIGKIGGVICPLVAVGMLRSCHQMEAVLVFELVLFLAGVSCILFPVETKGREMD

SEQ ID NO: 159305 - protein, 476 aa, Zea Mays
METYTTDDALTLMGFGKFQALVLAYAGMGWVAEAMEVMLLSFLGPVVREEWNVSPQDESLLSSVVFAGMLIGACAWGFISDRYGRKTVLLLSTLLTSGLGLLSALSINYLCLLVLRFFVGIGVGSGHVFSSWFLEFVPAGNRGTWMVIFSFFWTIGTVLEASLAWAVLSALSWRWLLALSSLPCFLLLLFFRITPESPRYLCAQNRMTDARFVLERMAIANQAALPMGVLTYHQETKTECITHVSEDEHLIPVREKEHTDRNAISSKSGAVAVLHKLLSHNLLKSTLLLWFVYYASSFAYYGITLLTSQLSDVNRSCKSDLVFEVHQNNGNLYKDTFITSLAEIPGLILSALLVDRFGRKATMSCLMFACCAFLGPLVLHQNELLTTTLLFGARACGTGATTTLCLYAPEGSGSQPPSVRSAGLFAPSSPWACCGAAIRWKRCWCLSWCCSSLGSPASSSLWRPRAEKWTEHARWW

SEQ ID NO: 159306 - protein, 460 aa, Zea Mays
METYTTDDALTLMGFGKFQALVLAYAGMGWVAEAMEVMLLSFLGPVVREEWNVSPQDESLLSSVVFAGMLIGACAWGFISDRYGRKTVLLLSTLLTSGLGLLSALSINYLCLLVLRFFVGIGVGSGHVFSSWFLEFVPAGNRGTWMAVLSALSWRWLLALSSLPCFLLLLFFRITPESPRYLCAQNRMTDARFVLERMAIANQAALPMGVLTYHQETKTECITHVSEDEHLIPVREKEHTDRNAISSKSGAVAVLHKLLSHNLLKSTLLLWFVYYASSFAYYGITLLTSQLSDVNRSCKSDLVFEVHQNNGNLYKDTFITSLAEIPGLILSALLVDRFGRKATMSCLMFACCAFLGPLVLHQNELLTTTLLFGARACGTGATTTLCLYAPEVYPTYVRSTGVGIATAIGKIGGVICPLVAVGMLRSCHQMEAVLVFELVLFLAGVSCILFPVETKGREMD

SEQ ID NO: 159307 - protein, 410 aa, Zea Mays
METYTTDDALTLMGFGKFQALVLAYAGMGWVAEAMEVMLLSFLGPVVREEWNVSPQDESLLSSVVFAGMLIGACAWGFISDRYGRKTVLLLSTLLTSGLGLLSALSINYLCLLVLRFFVGIGVGSGHVFSSWFLEFVPAGNRGTWMAVLSALSWRWLLALSSLPCFLLLLFFRITPESPRYLCAQNRMTDARFVLERMAIANQAALPMGVLTYHQETKTECITHVSEDEHLIPVREKEHTDRNAISSKSGAVAVLHKLLSHNLLKSTLLLWFVYYASSFAYYGITLLTSQLSDVNRSCKSDLVFEVHQNNGNLYKDTFITSLAARACGTGATTTLCLYAPEVYPTYVRSTGVGIATAIGKIGGVICPLVAVGMLRSCHQMEAVLVFELVLFLAGVSCILFPVETKGREMD

SEQ ID NO: 159308 - protein, 429 aa, Zea Mays
METYTTDDALTLMGFGKFQALVLAYAGMGWVAEAMEVMLLSFLGPVVREEWNVSPQDESLLSSVVFAGMLIGACAWGFISDRYGRKTVLLLSTLLTSGLGLLSALSINYLCLLVLRFFVGIGVGSGHVFSSWFLEFVPAGNRGTWMVIFSFFWTIGTVLEASLAWAVLSALSWRWLLALSSLPCFLLLLFFRITPESPRYLCAQNRMTDARFVLERMAIANQAALPMGVLTYHQETKTECITHVSEDEHLIPVREKEHTDRNAISSKSGAVAVLHKLLSHNLLKSTLLLWFVYYASSFAYYGITLLTSQLSDVNRSCKSDLVFEVHQNNGNLYKDTFITSLAARACGTGATTTLCLYAPEVYPTYVRSTGVGIATAIGKIGGVICPLVAVGMLRSCHQMEAVLVFELVLFLAGVSCILFPVETKGREMD

SEQ ID NO: 159309 - protein, 315 aa, Zea Mays
MAVLSALSWRWLLALSSLPCFLLLLFFRITPESPRYLCAQNRMTDARFVLERMAIANQAALPMGVLTYHQETKTECITHVSEDEHLIPVREKEHTDRNAISSKSGAVAVLHKLLSHNLLKSTLLLWFVYYASSFAYYGITLLTSQLSDVNRSCKSDLVFEVHQNNGNLYKDTFITSLAEIPGLILSALLVDRFGRKATMSCLMFACCAFLGPLVLHQNELLTTTLLFGARACGTGATTTLCLYAPEVYPTYVRSTGVGIATAIGKIGGVICPLVAVGMLRSCHQMEAVLVFELVLFLAGVSCILFPVETKGREMD

SEQ ID NO: 159310 - protein, 273 aa, Zea Mays
MSDATSVLERMANANQSALPPGVLTYNRQTKCDHDVLAPESECLLPVREKECTVDNAKSSESGSLAALRMLLSRELLRSTLLLWFVFYANSFAYYGLVLLTSQLSDANKSCASGVSFGLRQKEINLYKDTFITSLAEIPGLFLSAVLVDWFGRKASMWSMMFACCAFLGPLVLQQTELLTTILLFGARACAMGSFTVLCLYAPEVYPTFVRSTGAGIATAIGRIGGVVCPLVAVAMLRSCHQMEALIVFEVILCLAAVACMFFPVETKGRGMD

SEQ ID NO: 159311 - protein, 325 aa, Zea Mays
MGFLSALSPNYLCLVALRFLVGVGVGGSHVFISWFLEFVPAQNRGTWMVIFSLFWTLGTILEASLAWVVLPALNWRWLLVFTALPCFLLLPFFGLTPESPRYLCAQNRMSDATSVLERMANANQSALPPGVLTYNRQTKCDHDVLAPESECLLPVREKECTVDNAKSSESGSLAALRMLLSRELLRSTLLLWFVFYANSFAYYGLVLLTSQLSDANKSCASGVSFGLRQKEINLYKDTFITSLAEIPGLFLSAVLVDWFGRKASMWSMMFACCAFLGPLVLQQTELLTTILLFGARACAMGSFTVLCLYAPEVCIRVLWRIILVI

SEQ ID NO: 159312 - protein, 361 aa, Zea Mays
MDGGVGGSHVFISWFLEFVPAQNRGTWMVIFSLFWTLGTILEASLAWVVLPALNWRWLLVFTALPCFLLLPFFGLTPESPRYLCAQNRMSDATSVLERMANANQSALPPGVLTYNRQTKCDHDVLAPESECLLPVREKECTVDNAKSSESGSLAALRMLLSRELLRSTLLLWFVFYANSFAYYGLVLLTSQLSDANKSCASGVSFGLRQKEINLYKDTFITSLAEIPGLFLSAVLVDWFGRKASMWSMMFACCAFLGPLVLQQTELLTTILLFGARACAMGSFTVLCLYAPEVYPTFVRSTGAGIATAIGRIGGVVCPLVAVAMLRSCHQMEALIVFEVILCLAAVACMFFPVETKGRGMD

SEQ ID NO: 159313 - protein, 278 aa, Zea Mays
MVIFSLFWTLGTILEASLAWVVLPALNWRWLLVFTALPCFLLLPFFGLTPESPRYLCAQNRMSDATSVLERMANANQSALPPGVLTYNRQTKCDHDVLAPESECLLPVREKECTVDNAKSSESGSLAALRMLLSRELLRSTLLLWFVFYANSFAYYGLVLLTSQLSDANKSCASGVSFGLRQKEINLYKDTFITSLAEIPGLFLSAVLVDWFGRKASMWSMMFACCAFLGPLVLQQTELLTTILLFGARACAMGSFTVLCLYAPEVCIRVLWRIILVI

SEQ ID NO: 159314 - protein, 331 aa, Zea Mays
MCLCQNTMLRVKHICHNVVLPALNWRWLLVFTALPCFLLLPFFGLTPESPRYLCAQNRMSDATSVLERMANANQSALPPGVLTYNRQTKCDHDVLAPESECLLPVREKECTVDNAKSSESGSLAALRMLLSRELLRSTLLLWFVFYANSFAYYGLVLLTSQLSDANKSCASGVSFGLRQKEINLYKDTFITSLAEIPGLFLSAVLVDWFGRKASMWSMMFACCAFLGPLVLQQTELLTTILLFGARACAMGSFTVLCLYAPEVYPTFVRSTGAGIATAIGRIGGVVCPLVAVAMLRSCHQMEALIVFEVILCLAAVACMFFPVETKGRGMD

SEQ ID NO: 159315 - protein, 175 aa, Zea Mays
MGTTDLKIPSNNSNGAARTNLPARACCVVVEYLAGGTLKQYLIKNSRRKLAYKVVVQLALDLARGLSYLHSRKIVHRDVKSENMLLTPQRNLKIADFGVARVEAQNPKDMTGATGTLGYMAPEVLDGKPYNRKCDVSKFCRCLICRCSPEFAPRHSSLLPKRICECYAEMLGCKP

SEQ ID NO: 159316 - protein, 96 aa, Zea Mays
MGIPVVVPVAAAGMSSRASSFVGGSGGDLAAVAASVAARPRRAGSGGGGALGCKCLFGLGVPELAVIAGVAALVFGPKQLPEIGRSIGKTVKSFQQ

SEQ ID NO: 159317 - protein, 164 aa, Zea Mays
MAILAVASPFKTLNPSPPDHSRTRRRLPSSILHLPLPVPRCRRLRCSAKYSEAAAPSASTTTPRPSEIPWSKDICNSVRLIGTVGTDVELRQLPSGSAVARGRLAVWKSATETTWVTLQFWDDMAIVSSEHVKKGDRIFVAGRLVSDTVDEGPEKRHVYYKFNS

SEQ ID NO: 159318 - protein, 120 aa, Zea Mays
MAILAVASPFKTLNPSPPDHSRTRRRLPSSILHLPLPVPRCRRLRCSAKYSEAAAPSASTTTPRPSEIPWSKDICNSVRLIGTVGTDVELRQLPSGSAVARGRLAVWKSATETTCLQFNS

SEQ ID NO: 159319 - protein, 505 aa, Zea Mays
MQPGPTSPPHESPSPPHEVTPQEEPATLPLPGEEAQPQGQADDGDAVKAAAGAREDRNDRSGATASARGRKRRRRGGTSSTSPSPFPSPAAAAGTTRGVVMVKRDLLARCMTCPLCRRLLRDATTISECLHTFCRKCIYQKFDDEEVECCPVCKIDLGCTPTEKLRADHSLQDVRSKLFPFKRKKINAEEVSSSISLPTKIKERSISSLVVDTPKVKPTGLTGRRTRAVARKAAAVATATVTLHELRPVIEDPVKKEIDSCDSHPHDSNLPASSSKAPQIRRQISPNVEASNRSSNKDTEGDSNDELADKSELWRPLNCLVEAANRTKSFRSSSQSPVVKGEQPNGSTSSTFASKAKARENLEKSKIQDDKKDVPMPPVLPKRRAQGTARKKRDRLQAPTDVKPDAAVAQNAKKFSSIWFSLIASFDQQGDPPLPQIPSHYLRIKDGNIPASSILKYLMQKLSLPSGNKVLRAASEPFTTSAQFSRAVAEGKSNTDNSDHDRFVR

SEQ ID NO: 159320 - protein, 420 aa, Zea Mays
MTMSSSATICSIVVYFTERELLTGITVCRKCIYQKFDDEEVECCPVCKIDLGCTPTEKLRADHSLQDVRSKLFPFKRKKINAEEVSSSISLPTKIKERSISSLVVDTPKVKPTGLTGRRTRAVARKAAAVATATVTLHELRPVIEDPVKKEIDSCDSHPHDSNLPASSSKAPQIRRQISPNVEASNRSSNKDTEGDSNDELADKSELWRPLNCLVEAANRTKSFRSSSQSPVVKGEQPNGSTSSTFASKAKARENLEKSKIQDDKKDVPMPPVLPKRRAQGTARKKRDRLQAPTDVKPDAAVAQNAKKFSSIWFSLIASFDQQGDPPLPQIPSHYLRIKDGNIPASSILKYLMQKLSLPSESEVEIKCCEQPVNPSQPLRNLVELWLKGRATQTTQTMTGSSAKEFVMVLTYGRPKAPAM

SEQ ID NO: 159321 - protein, 404 aa, Zea Mays
MPLLTETTVFVCRKCIYQKFDDEEVECCPVCKIDLGCTPTEKLRADHSLQDVRSKLFPFKRKKINAEEVSSSISLPTKIKERSISSLVVDTPKVKPTGLTGRRTRAVARKAAAVATATVTLHELRPVIEDPVKKEIDSCDSHPHDSNLPASSSKAPQIRRQISPNVEASNRSSNKDTEGDSNDELADKSELWRPLNCLVEAANRTKSFRSSSQSPVVKGEQPNGSTSSTFASKAKARENLEKSKIQDDKKDVPMPPVLPKRRAQGTARKKRDRLQAPTDVKPDAAVAQNAKKFSSIWFSLIASFDQQGDPPLPQIPSHYLRIKDGNIPASSILKYLMQKLSLPSESEVEIKCCEQPVNPSQPLRNLVELWLKGRATQTTQTMTGSSAKEFVMVLTYGRPKAPAM

SEQ ID NO: 159322 - protein, 151 aa, Zea Mays
MPPVLPKRRAQGTARKKRDRLQAPTDVKPDAAVAQNAKKFSSIWFSLIASFDQQGDPPLPQIPSHYLRIKDGNIPASSILKYLMQKLSLPSESEVEIKCCEQPVNPSQPLRNLVELWLKGRATQTTQTMTGSSAKEFVMVLTYGRPKAPAM

SEQ ID NO: 159323 - protein, 185 aa, Zea Mays
MFKRSNSGVNLKFESASGTAGTMSSARSFLSSLSMDGSVASLDAKSSSFHLIGGPAMSDPLNAQQPPRRRCTGRGEDGTGKCAVTGRCHCSKRSRKLRVKRSIKVPAISNKIADIPPDEYSWRKYGQKPIKGSPHPRGYYKCSSVRGCPARKHVERCVDDSAMLIVTYEGEHNHTRMPTTQSAQV

SEQ ID NO: 159324 - protein, 55 aa, Zea Mays
MICAETFSAVVEMFGPAATIHMICSENGVGGEHKIFFSLMEVITMMTRKNKPLDR

SEQ ID NO: 159325 - protein, 98 aa, Zea Mays
MKRWSSSCFCFFSQERLFTFFVLIFFLYILKASCSLELYTSSFFSPPQDRESTIGLFGYGPLDGLPSDESTGRERSRREKNAVPPLVPVLPLSLAGSS

SEQ ID NO: 159326 - protein, 683 aa, Zea Mays
MISCPKQKRRKKTWRHFLTREADAFSERLKQELVALEAANVYQLLESEPLIEEVLQGLDAASATVDDMDEWLRIFNLKLRHMREDIASIESRNNGLEMQSVNNKGLMEELDKLLERLRIPQEFAASLTGGSFEESRMLKNVEACEWLTGAIRSLEVPNLDPCYVNMRAVREKKAELEKLKTTFVRRASEFLRNYFSSLVDFMISDKSYFSQRGQLKRPDHADLRYKCRTYARLLQHLKSLDKSCLGPLRKAYCHSLNLLLRREAREFANELRASTKAPKNPAVWLEGSGGSGHNGSSSDTSQVSDAYSKMLTIFIPLLVDESSFFAHFMCFEVPALVPAGSPNANKSKSGGNDPDDDLGLMDPDGNDLKPDSTSAELGTLNEALQELLDGIQEDFYAVVDWAYKIDPLRCISMHGITERYLSGQKADAAGFVRKLLDDLESRISVQFSRFIDEACHQIERNERNVRQTGILAYIPRFAVLASRMEQYIQGQSRDLIDKAYTKLVSTMFATLEKIAQSDPKTADIVLIENYAAFQNSLYDLANVVPTLAKFYHQASESYELACTRHISSLIYLQFERLFQFNRKVDELTYTIAAEEIPFQLGLSKTDLRRVLKSSLSGIDKSISAMYRRLQKTLTSDELFPSLWDKCKKEFLDKYESFVQMVTRIYGNEPIMSVNEMKDVLAGF

SEQ ID NO: 159327 - protein, 676 aa, Zea Mays
MEALLDTYVMGIGEADAFSERLKQELVALEAANVYQLLESEPLIEEVLQGLDAASATVDDMDEWLRIFNLKLRHMREDIASIESRNNGLEMQSVNNKGLMEELDKLLERLRIPQEFAASLTGGSFEESRMLKNVEACEWLTGAIRSLEVPNLDPCYVNMRAVREKKAELEKLKTTFVRRASEFLRNYFSSLVDFMISDKSYFSQRGQLKRPDHADLRYKCRTYARLLQHLKSLDKSCLGPLRKAYCHSLNLLLRREAREFANELRASTKAPKNPAVWLEGSGGSGHNGSSSDTSQVSDAYSKMLTIFIPLLVDESSFFAHFMCFEVPALVPAGSPNANKSKSGGNDPDDDLGLMDPDGNDLKPDSTSAELGTLNEALQELLDGIQEDFYAVVDWAYKIDPLRCISMHGITERYLSGQKADAAGFVRKLLDDLESRISVQFSRFIDEACHQIERNERNVRQTGILAYIPRFAVLASRMEQYIQGQSRDLIDKAYTKLVSTMFATLEKIAQSDPKTADIVLIENYAAFQNSLYDLANVVPTLAKFYHQASESYELACTRHISSLIYLQFERLFQFNRKVDELTYTIAAEEIPFQLGLSKTDLRRVLKSSLSGIDKSISAMYRRLQKTLTSDELFPSLWDKCKKEFLDKYESFVQMVTRIYGNEPIMSVNEMKDVLAGF

SEQ ID NO: 159328 - protein, 397 aa, Zea Mays
MISCPKQKRRKKTWRHFLTREADAFSERLKQELVALEAANVYQLLESEPLIEEVLQGLDAASATVDDMDEWLRIFNLKLRHMREDIASIESRNNGLEMQSVNNKGLMEELDKLLERLRIPQEFAASLTGGSFEESRMLKNVEACEWLTGAIRSLEVPNLDPCYVNMRAVREKKAELEKLKTTFVRRASEFLRNYFSSLVDFMISDKSYFSQRGQLKRPDHADLRYKCRTYARLLQHLKSLDKSCLGPLRKAYCHSLNLLLRREAREFANELRASTKAPKNPAVWLEGSGGSGHNGSSSDTSQVSDAYSKMLTIFIPLLVDESSFFAHFMCFEVPALVPAGSPNANKSKSGGNDPDDDLGLMDPDGNDLKPDSTSAELGTLNEALQELLDGIQTSMRS

SEQ ID NO: 159329 - protein, 861 aa, Zea Mays
MAKSSADDAELRRACAAAVAASGARGEEVAFSIRVAKGRGIFEKLGRLAKPRVLALTVKQSSRGEANKAFLRVLKYSSGAVLEPAKLYKLKHLTKVEVISNDPSGCTFVLGFDNLRSQSVAPPQWTMRNIDDRNRLLFCILNMCKEILSYLPKVVGIDIVELALWAKENTLTIDNQVSTQDGQETSVATQTERKVTVTVENDLVSQAKEEEEDMEAANVYQLLESEPLIEEVLQGLDAASATVDDMDEWLRIFNLKLRHMREDIASIESRNNGLEMQSVNNKGLMEELDKLLERLRIPQEFAASLTGGSFEESRMLKNVEACEWLTGAIRSLEVPNLDPCYVNMRAVREKKAELEKLKTTFVRRASEFLRNYFSSLVDFMISDKSYFSQRGQLKRPDHADLRYKCRTYARLLQHLKSLDKSCLGPLRKAYCHSLNLLLRREAREFANELRASTKAPKNPAVWLEGSGGSGHNGSSSDTSQVSDAYSKMLTIFIPLLVDESSFFAHFMCFEVPALVPAGSPNANKSKSGGNDPDDDLGLMDPDGNDLKPDSTSAELGTLNEALQELLDGIQEDFYAVVDWAYKIDPLRCISMHGITERYLSGQKADAAGFVRKLLDDLESRISVQFSRFIDEACHQIERNERNVRQTGILAYIPRFAVLASRMEQYIQGQSRDLIDKAYTKLVSTMFATLEKIAQSDPKTADIVLIENYAAFQNSLYDLANVVPTLAKFYHQASESYELACTRHISSLIYLQFERLFQFNRKVDELTYTIAAEEIPFQLGLSKTDLRRVLKSSLSGIDKSISAMYRRLQKTLTSDELFPSLWDKCKKEFLDKYESFVQMVTRIYGNEPIMSVNEMKDVLAGF

SEQ ID NO: 159330 - protein, 462 aa, Zea Mays
MSTCALEKKAELEKLKTTFVRRASEFLRNYFSSLVDFMISDKSYFSQRGQLKRPDHADLRYKCRTYARLLQHLKSLDKSCLGPLRKAYCHSLNLLLRREAREFANELRASTKAPKNPAVWLEGSGGSGHNGSSSDTSQVSDAYSKMLTIFIPLLVDESSFFAHFMCFEVPALVPAGSPNANKSKSGGNDPDDDLGLMDPDGNDLKPDSTSAELGTLNEALQELLDGIQEDFYAVVDWAYKIDPLRCISMHGITERYLSGQKADAAGFVRKLLDDLESRISVQFSRFIDEACHQIERNERNVRQTGILAYIPRFAVLASRMEQYIQGQSRDLIDKAYTKLVSTMFATLEKIAQSDPKTADIVLIENYAAFQNSLYDLANVVPTLAKFYHQASESYELACTRHISSLIYLQFERLFQFNRKVDELTYTIAAEEIPFQLGLSKTDLRRVLKSSLSGRLVHPTVSP

SEQ ID NO: 159331 - protein, 547 aa, Zea Mays
MLKNVEACEWLTGAIRSLEVPNLDPCYVNMRAVREKKAELEKLKTTFVRRASEFLRNYFSSLVDFMISDKSYFSQRGQLKRPDHADLRYKCRTYARLLQHLKSLDKSCLGPLRKAYCHSLNLLLRREAREFANELRASTKAPKNPAVWLEGSGGSGHNGSSSDTSQVSDAYSKMLTIFIPLLVDESSFFAHFMCFEVPALVPAGSPNANKSKSGGNDPDDDLGLMDPDGNDLKPDSTSAELGTLNEALQELLDGIQEDFYAVVDWAYKIDPLRCISMHGITERYLSGQKADAAGFVRKLLDDLESRISVQFSRFIDEACHQIERNERNVRQTGILAYIPRFAVLASRMEQYIQGQSRDLIDKAYTKLVSTMFATLEKIAQSDPKTADIVLIENYAAFQNSLYDLANVVPTLAKFYHQASESYELACTRHISSLIYLQFERLFQFNRKVDELTYTIAAEEIPFQLGLSKTDLRRVLKSSLSGIDKSISAMYRRLQKTLTSDELFPSLWDKCKKEFLDKYESFVQMVTRIYGNEPIMSVNEMKDVLAGF

SEQ ID NO: 159332 - protein, 763 aa, Zea Mays
MRNIDDRNRLLFCILNMCKEILSYLPKVVGIDIVELALWAKENTLTIDNQVSTQDGQETSVATQTERKVTVTVENDLVSQAKEEEEDMEALLDTYVMGIGEADAFSERLKQELVALEAANVYQLLESEPLIEEVLQGLDAASATVDDMDEWLRIFNLKLRHMREDIASIESRNNGLEMQSVNNKGLMEELDKLLERLRIPQEFAASLTGGSFEESRMLKNVEACEWLTGAIRSLEVPNLDPCYVNMRAVREKKAELEKLKTTFVRRASEFLRNYFSSLVDFMISDKSYFSQRGQLKRPDHADLRYKCRTYARLLQHLKSLDKSCLGPLRKAYCHSLNLLLRREAREFANELRASTKAPKNPAVWLEGSGGSGHNGSSSDTSQVSDAYSKMLTIFIPLLVDESSFFAHFMCFEVPALVPAGSPNANKSKSGGNDPDDDLGLMDPDGNDLKPDSTSAELGTLNEALQELLDGIQEDFYAVVDWAYKIDPLRCISMHGITERYLSGQKADAAGFVRKLLDDLESRISVQFSRFIDEACHQIERNERNVRQTGILAYIPRFAVLASRMEQYIQGQSRDLIDKAYTKLVSTMFATLEKIAQSDPKTADIVLIENYAAFQNSLYDLANVVPTLAKFYHQASESYELACTRHISSLIYLQFERLFQFNRKVDELTYTIAAEEIPFQLGLSKTDLRRVLKSSLSGIDKSISAMYRRLQKTLTSDELFPSLWDKCKKEFLDKYESFVQMVTRIYGNEPIMSVNEMKDVLAGF

SEQ ID NO: 159333 - protein, 747 aa, Zea Mays
MCKEILSYLPKVVGIDIVELALWAKENTLTIDNQVSTQDGQETSVATQTERKVTVTVENDLVSQAKEEEEDMEALLDTYVMGIGEADAFSERLKQELVALEAANVYQLLESEPLIEEVLQGLDAASATVDDMDEWLRIFNLKLRHMREDIASIESRNNGLEMQSVNNKGLMEELDKLLERLRIPQEFAASLTGGSFEESRMLKNVEACEWLTGAIRSLEVPNLDPCYVNMRAVREKKAELEKLKTTFVRRASEFLRNYFSSLVDFMISDKSYFSQRGQLKRPDHADLRYKCRTYARLLQHLKSLDKSCLGPLRKAYCHSLNLLLRREAREFANELRASTKAPKNPAVWLEGSGGSGHNGSSSDTSQVSDAYSKMLTIFIPLLVDESSFFAHFMCFEVPALVPAGSPNANKSKSGGNDPDDDLGLMDPDGNDLKPDSTSAELGTLNEALQELLDGIQEDFYAVVDWAYKIDPLRCISMHGITERYLSGQKADAAGFVRKLLDDLESRISVQFSRFIDEACHQIERNERNVRQTGILAYIPRFAVLASRMEQYIQGQSRDLIDKAYTKLVSTMFATLEKIAQSDPKTADIVLIENYAAFQNSLYDLANVVPTLAKFYHQASESYELACTRHISSLIYLQFERLFQFNRKVDELTYTIAAEEIPFQLGLSKTDLRRVLKSSLSGIDKSISAMYRRLQKTLTSDELFPSLWDKCKKEFLDKYESFVQMVTRIYGNEPIMSVNEMKDVLAGF

SEQ ID NO: 159334 - protein, 177 aa, Zea Mays
MFATLEKIAQSDPKTADIVLIENYAAFQNSLYDLANVVPTLAKFYHQASESYELACTRHISSLIYLQFERLFQFNRKVDELTYTIAAEEIPFQLGLSKTDLRRVLKSSLSGIDKSISAMYRRLQKTLTSDELFPSLWDKCKKEFLDKYESFVQMVTRIYGNEPIMSVNEMKDVLAGF

SEQ ID NO: 159335 - protein, 173 aa, Zea Mays
MSSNLVASMYIYKIMISLSCLIIGGMRSSEDDEAHSVPSCILPRGTILDSMQRRKVKERLRAICSEIPIYVFVVKKSNIFGRSQDMVFSRKYPDVCLPFKSGAVILQCHGKSWEVILEVRKDQGESKRLRIGWAEFARDNNLQLGDICLFEPLKTMKYTMNVHIVRRRVRSGK

SEQ ID NO: 159336 - protein, 378 aa, Zea Mays
MESLDLIRSHSRASYSRNLSRLFSPKAAAPKSGDSIRIAVLGASGYTGAEIVRILANHPQFHIKVMTADRKAGEQFGSVFPHLITQDLPRLVAIKDADFSDVDAVFCCLPHGTTQEIIKSLPRHLKIVDLSADFRLRDINEYAEWYGHSHRAPELQGEAVYGLTELKRDDIRNARLVANPGCYPTSIQLPLVPLVKAKLIKLTNIIIDAKSGVSGAGRGAKEANLYTEIAEGIHAYGITSHRHVPEIEQGLTDAAESKVTISFTPHLMCMKRGMQSTVYVELASGVTPRDLYEHLKSTYENEEFVKLLHGSNVPCTSHVVGSNYCFMNVYEDRIPGRAIIISVIDNLVKGASGQALQNLNLMMGLPENMGLQYQPLFP

SEQ ID NO: 159337 - protein, 729 aa, Zea Mays
MTCPRILAMRAAAVDLLLAIRDLRSFQYNKVVGLGTLLSSLANDHPRIAQKITKLLIPSYFPSKLSPKEACARCIALIKRSPTAGARFCEFALSEGSSPRSIVELVKYSITLALSQTGLNSDQIDGLIIASVNLIKSLSNERSSLAALREFLANGKLRLVLQVAVSERARAALLGIVPVVLPDELSVLHEECMDIVVNAARISKQEEYQETVLEAHKLIVLGGWSDELFEALTNTLQSKASDFAEIYGVEPPPCPVASSRRKKGKSLKKIPVRDNVVGKGSSKSKISNEELAVAAGAAWQVNEIVKTKDLRDAFLQSSYSEIVFSSLKIISQVYIEQCLYLDSLDLAPVLAYLSLATCNDLPDVNQTGSCFESSTANQSLDHLLNCFDKLLNGTVSNPPSKLNKNGKALRSKDQQKGASEAKGTFNVIMLGASILKFIIDTNMKPLNDDKIRCLKFASSYIKYAVSSIKKHQEQSSCFKGGDLKDALLLVRSSFTYASKLLQLVLSSSPEESCPPEEAFFLANDLLDIVPAVESFAGSRFAPSIVSALKQWLPVLLLGLVCRWLIGSHNEMAPNVFHFADSVLPLWVTAVAKNELVDSKEPGQDEQSNLTAEGEDSLLSRKLAEMMAILLKKGSPRILDCASGVLLSTFQLTLRRSDYDIVLGMTRFICDKLLGNNSLALEKLQLTRDFLRENFLEIDRYVRDELVHDDDSRQQLEKAKALIRSVLTDV

SEQ ID NO: 159338 - protein, 189 aa, Zea Mays
MLRRLVGGAAAVRSPLPPPFCRLLHNGGGGGGCSSGEPESVAYRMSMLRRPSTVSKKGLTWNWCSLIGRLAAPVRPIDTSFLEVPRAYTFLSVTLSSPAPSSSSSNINVTLQLNGELANVGLKHLKHDDLVYVSGHLGSYHKVSPSGERHIVYKIYVRELNYVVDQNKKPQNDADSTSPPSMTSVTLKC

SEQ ID NO: 159339 - protein, 112 aa, Zea Mays
MTSVTLQMLKENECIGRLRLWQVFFANPYEWWDNRRSKPWANYPDFKHKDTREKIWLRPDDPPWVRKQLELYDLEVAENGHRCKSRLSKKQNWKTQDFDYFDDEEVQHLAEA

SEQ ID NO: 159340 - protein, 108 aa, Zea Mays
MLRRLVGGAAAVRSPLPPPFCRLLHNGGGGGGCSSGEPESVAYRMSMLRRPSTVSKKGLTWNWCSLIGRLAAPVRPIDTSFLEVPRAYTFLSVTLSSPAPSSSSSNIN

SEQ ID NO: 159341 - protein, 163 aa, Zea Mays
MLRRLVGGAAAVRSPLPPPFCRLLHNGGGGGGCSSGEPESVAYRMSMLRRPSTVSKKGLTWNWCSLIGRLAAPVRPIDTSFLEVPRAYTFLSVTLSSPAPSSSSSNIKLSPSLRIPLSQSLCYFLSHFLQSYLFSPSKGFPSKGLLGYSHPIGIERDFGLTRI

SEQ ID NO: 159342 - protein, 232 aa, Zea Mays
MIVTLNAYNVLAARCAAEYLEMFETIDKGNLIYKIDVFLTSSVFRTWKDSIIVLQSTRSLVPWCEDLKVISHCIDSIASKASIDPSEVEWSYTYNRKKLPSENGIDSHWNGVRMQPMVPTDWWVEDLCELEVDSYKRVIMSIKAKGSTPAVVVGEALRAYAYRRLLGSLEDAVSNGVDCAKPRAVLDAIVSLLPAEEGSVSCGFLLKLLGAACLLESDLVMAIVEEFHVVTE

SEQ ID NO: 159343 - protein, 374 aa, Zea Mays
MDFQVVVLAGGTSEKLSPLVSKDVPKALLPVANRPVLSYALDLLEASDLKDLIVVVEGQEAAQLVDAWVSSAYLDRLRVEVVVVSEDLGSAGALRAISKRLMANDILVVSGDLVTDVLPGAVAATHRRNGAAVTALLCSVPVSGPSDTSSSSGKDKAKKPNRLNIVGLDRSKQFLLHIVSGTDVEKDIQVHKRKIQAVGQMEIRSDLMDAHLYAFKRTILQDVLEQKEAYRSIRLEVLPYLVRSQLRSTPSGGSGTSVDEIESSAFQSSGNLQCLSQHRVIAPSAFKQDVLSRSSGGHRCCAYIASKSKYCHRLNSIQSYCDINRDVIGEVSHLSGYSFSAQNNIIHPSSVLGSKTTDHTVFLLRVHSLVTSVV

SEQ ID NO: 159344 - protein, 355 aa, Zea Mays
MANDILVVSGDLVTDVLPGAVAATHRRNGAAVTALLCSVPVSGPSDTSSSSGKDKAKKPNRLNIVGLDRSKQFLLHIVSGTDVEKDIQVHKRKIQAVGQMEIRSDLMDAHLYAFKRTILQDVLEQKEAYRSIRLEVLPYLVRSQLRSTPSGGSGTSVDEIESSAFQSSGNLQCLSQHRVIAPSAFKQDVLSRSSGGHRCCAYIASKSKYCHRLNSIQSYCDINRDVIGEVSHLSGYSFSAQNNIIHPSSVLGSKTTIGPHCILAEGSQLGDKCSVKRSVIGRHCRIGSNVKIVNSVVMNHVVIEDGCHIQGSVVCNNVQLQERAVLKDCQVGAGYIVTAGSEHKAESLARKYSEL

SEQ ID NO: 159345 - protein, 308 aa, Zea Mays
MDFQVVVLAGGTSEKLSPLVSKDVPKALLPVANRPVLSYALDLLEASDLKDLIVVVEGQEAAQLVDAWVSSAYLDRLRVEVVVVSEDLGSAGALRAISKRLMANDILVVSGDLVTDVLPGAVAATHRRNGAAVTALLCSVPVSGPSDTSSSSGKDKAKKPNRLNIVGLDRSKQFLLHIVSGTDVEKDIQVHKRKIQAVGQMEIRSDLMDAHLYAFKRTILQDVLEQKEAYRSIRLEVLPYLVRSQLVAVEHQLTKLRVVPFSPVVICSVCRSIGSLHHLLSSRMYYQDQVVDIGAVLILLVKANTVTA

SEQ ID NO: 159346 - protein, 256 aa, Zea Mays
MEIRSDLMDAHLYAFKRTILQDVLEQKEAYRSIRLEVLPYLVRSQLRSTPSGGSGTSVDEIESSAFQSSGNLQCLSQHRVIAPSAFKQDVLSRSSGGHRCCAYIASKSKYCHRLNSIQSYCDINRDVIGEVSHLSGYSFSAQNNIIHPSSVLGSKTTIGPHCILAEGSQLGDKCSVKRSVIGRHCRIGSNVKIVNSVVMNHVVIEDGCHIQGSVVCNNVQLQERAVLKDCQVGAGYIVTAGSEHKAESLARKYSEL

SEQ ID NO: 159347 - protein, 374 aa, Zea Mays
MIPGGWAAQRIGGRRVLLLSFVLWSMICGLIPLDPNRVTILVLSRLFVGVAQGFIFPAIHTVLAQWVPPQERSRSVSLTTSGMYLGAAGGMLFFPSLVKHTGPQSVFFVEAVLGVAWSVIWLKFSSDPPRTDLPKVSMPKVASRDMIKAQAGGVVAPRTVKIPWRRIIFSLPVWAIVVNNFTFHYALYVLMNWLPTYFELGLKLSLQDMGSSKMLPYFNMFIFSNIGGVIADHLITRRILSVTKTRKLLNTIGFIVSAFALMALPLFSTPSGTVTCSAISLGFLALGRAGFAVNHMDVAPKFAGIVMGVSNTAGTLAGIIGVGLTGNILEAAKASNKDLTDSETWKTVFFVPAYLCIFSSVIFLIFSTGEKIFE

SEQ ID NO: 159348 - protein, 118 aa, Zea Mays
MRLHTLRGMKAEDICIAFICILEVIFAEDMVLYSHRYEGRGPTYCIPMHTLKLYLQVLLKQGSVIQPIVVVRRNEMVLRLLGLLSSISTRILDLNCDFFKMLINSICGLNISSKQFAC

SEQ ID NO: 159349 - protein, 356 aa, Zea Mays
MDLERMDETSSVNDQSAERRPTVAGGGGGAMPWLDLTLAVTAPRDEFPATTDGDSSSAASDGEPPPKPVPVPSSPPPPPPSAPAPHKVFSCNFCMRKFFSSQALGGHQNAHKRERSAAKRSSAPSPAYQYQYHHLHAAQRMVMAGLPLEAHAALVRAALRVSPASAVIQKGAASQELAAAARKAAGAGAPGATSTAPRFHDGNSAAATSWAPALLYEIEEPVSSTWPGSFRMRTQPEPPSSEEQASASEQRESDMPQAARWCCGSSATAPSSGTSASTSTTKSSASSRATTAPLISLVLTTEAQQSIRRGPARLKPTARRRRGHMRGDTVLHVQFRYGFGRLKSFTEMYLNNVLFV

SEQ ID NO: 159350 - protein, 1605 aa, Zea Mays
MPEQSRSGAPMEWTTVQHLDLRHSGGRRGASARPMQPHAAAFRSSQAIVAVAIGTHVVEFDALSGSKIASIDLGARVVRMAYSPTTSHVVIAILEDATIRSCDFATEQTLVLHSPEKKTDHVSIDTEVHLALTPLEPIVFFGFHKRMSVTGYSLSLAVAVDSTIKLIGAGAFGFHPTLEWIFVGDRGGTLLAWDVSTERPSMIGITQAGSHPITSVSWLPTLRLLVTISKDGALQVWKTRVIINPNRQPMETHFFERAAVETMDITKILTLQGGEAVYPLPRIKNLAVHPKFNLAAVIFADMSGTEAAKNKAAYTREGRRQLFALLQGARGSTAAVLKEKLLALGSSGILAEHQLQAQLQEQHLKGQSQLTISDVARKAFLHSHFMEGHAQSGPIPRLPLVTISDSSNLLRDVPVCQLILQLQPFHLELNFFNKETRVVQYPVRAFYLDGFNLMAHNLSSGADNLYKKLYSTIPSNVECHPTNMSYSPKQHLFLVVFELSGTNGVVHEVVLYWEQTDLQTVNSKGSSIRGRDAAFLGPDDNQYAILEEDRTGLNLFSLKAVATKEALENNAAVLEENTFADNAASATSTERQGPLQFTFESEVDRIFSSPLESTLLYVISGKHIGLAKLLQGYRLSADNGLSITTKTDGKKFIKLKPNETVLQAHWQTTLRGPVVGILTNQRVLIASADLDILSSSSTKFDRGLPSYRSMLWVGPALIFSSATAISMLGWDNKVRSILSTSFPRSVLLGALNDRLLLVNPTDINPRQKKGVEIRACLVGLLEPLLIGFATMQQHFEQKLDLSEVLYQITSRFDSLRITPRSLDILTKGPPVCGDLAVSLSQAGPQFTQIMRCNYAIKALRFSTALSILKDEFLRSRDYPQCPPTSHLFQRFRELGYACIKYGQFDSAKETFEVITDHESMLDLFICHLNPSALRRLAQKLEESATDSELRRYLERILRVRSTGWTQGVFANFAAESMVPKGPEWAGGNWEIKTPTNIKNIPQWELAGEVMPYMKTTDAGIPSVVADHIGVYLGVMKGRGNVVEVSEKSLVKAIAAASSENTQPVSSASAEKSKAIPRGDSVGDTLARQLGVQIASSDEQAKAAEDFKKTLYGVVDDGSSDEDESTSKTKKIHIRIRDKPAAPTVDVNKLKEATKQLGLGPPLSRTRSLSGTPQDFNQAPTQPGGPAAAVSPAMPNSAIDLFGTNTLVQPQAPSSSTGPVIAGMGVTAGPIPEDFFQNTIPSHQLAAQLPPPGIVLSRMAQPAPGIEQGRPVPNQMMANVGLPDDGVPPQAPPQQSQFPPQQSQFPQQPGIPMDSIGLPDGGVPPQSQPLPSQGQFLPSQAQGFQLGIPAPSQPIDLSALEGPGAAKQAARPPAPTAVRPGQVPRGAPAAECYKMALAHLEQNQLTDALSCLDEAFLALAKDQSREADIKAQATICAQYKIAVALLQEIARLQRVQGAGALSAKEEMARLSRHLASLPIQAKHRINCIRTAIKRNMEVQNYAYAKQMLDLLYSKAPPTKQDELKSLIDMCVQRGLTNKSIDPFEDPSQFCSVTLSRLSTIGHDVCDLCGAKFSALSAPGCVICGMGSIKRSDALAGGPGPVPSPFG

SEQ ID NO: 159351 - protein, 1350 aa, Zea Mays
METHFFERAAVETMDITKILTLQGGEAVYPLPRIKNLAVHPKFNLAAVIFADMSGTEAAKNKAAYTREGRRQLFALLQGARGSTAAVLKEKLLALGSSGILAEHQLQAQLQEQHLKGQSQLTISDVARKAFLHSHFMEGHAQSGPIPRLPLVTISDSSNLLRDVPVCQPFHLELNFFNKETRVVQYPVRAFYLDGFNLMAHNLSSGADNLYKKLYSTIPSNVECHPTNMSYSPKQHLFLVVFELSGTNGVVHEVVLYWEQTDLQTVNSKGSSIRGRDAAFLGPDDNQYAILEEDRTGLNLFSLKAVATKEALENNAAVLEENTFADNAASATSTERQGPLQFTFESEVDRIFSSPLESTLLYVISGKHIGLAKLLQGYRLSADNGLSITTKTDGKKFIKLKPNETVLQAHWQTTLRGPVVGILTNQRVLIASADLDILSSSSTKFDRGLPSYRSMLWVGPALIFSSATAISMLGWDNKVRSILSTSFPRSVLLGALNDRLLLVNPTDINPRQKKGVEIRACLVGLLEPLLIGFATMQQHFEQKLDLSEVLYQITSRFDSLRITPRSLDILTKGPPVCGDLAVSLSQAGPQFTQIMRCNYAIKALRFSTALSILKDEFLRSRDYPQCPPTSHLFQRFRELGYACIKYGQFDSAKETFEVITDHESMLDLFICHLNPSALRRLAQKLEESATDSELRRYLERILRVRSTGWTQGVFANFAAESMVPKGPEWAGGNWEIKTPTNIKNIPQWELAGEVMPYMKTTDAGIPSVVADHIGVYLGVMKGRGNVVEVSEKSLVKAIAAASSENTQPVSSASAEKSKAIPRGDSVGDTLARQLGVQIASSDEQAKAAEDFKKTLYGVVDDGSSDEDESTSKTKKIHIRIRDKPAAPTVDVNKLKEATKQLGLGPPLSRTRSLSGTPQDFNQAPTQPGGPAAAVSPAMPNSAIDLFGTNTLVQPQAPSSSTGPVIAGMGVTAGPIPEDFFQNTIPSHQLAAQLPPPGIVLSRMAQPAPGIEQGRPVPNQMMANVGLPDDGVPPQAPPQQSQFPPQQSQFPQQPGIPMDSIGLPDGGVPPQSQPLPSQGQFLPSQAQGFQLGIPAPSQPIDLSALEGPGAAKQAARPPAPTAVRPGQVPRGAPAAECYKMALAHLEQNQLTDALSCLDEAFLALAKDQSREADIKAQATICAQYKIAVALLQEIARLQRVQGAGALSAKEEMARLSRHLASLPIQAKHRINCIRTAIKRNMEVQNYAYAKQMLDLLYSKAPPTKQDELKSLIDMCVQRGLTNKSIDPFEDPSQFCSVTLSRLSTIGHDVCDLCGAKFSALSAPGCVICGMGSIKRSDALAGGPGPVPSPFG

SEQ ID NO: 159352 - protein, 1231 aa, Zea Mays
MSPVLPHSSTGFPNVHFMEGHAQSGPIPRLPLVTISDSSNLLRDVPVCQPFHLELNFFNKETRVVQYPVRAFYLDGFNLMAHNLSSGADNLYKKLYSTIPSNVECHPTNMSYSPKQHLFLVVFELSGTNGVVHEVVLYWEQTDLQTVNSKGSSIRGRDAAFLGPDDNQYAILEEDRTGLNLFSLKAVATKEALENNAAVLEENTFADNAASATSTERQGPLQFTFESEVDRIFSSPLESTLLYVISGKHIGLAKLLQGYRLSADNGLSITTKTDGKKFIKLKPNETVLQAHWQTTLRGPVVGILTNQRVLIASADLDILSSSSTKFDRGLPSYRSMLWVGPALIFSSATAISMLGWDNKVRSILSTSFPRSVLLGALNDRLLLVNPTDINPRQKKGVEIRACLVGLLEPLLIGFATMQQHFEQKLDLSEVLYQITSRFDSLRITPRSLDILTKGPPVCGDLAVSLSQAGPQFTQIMRCNYAIKALRFSTALSILKDEFLRSRDYPQCPPTSHLFQRFRELGYACIKYGQFDSAKETFEVITDHESMLDLFICHLNPSALRRLAQKLEESATDSELRRYLERILRVRSTGWTQGVFANFAAESMVPKGPEWAGGNWEIKTPTNIKNIPQWELAGEVMPYMKTTDAGIPSVVADHIGVYLGVMKGRGNVVEVSEKSLVKAIAAASSENTQPVSSASAEKSKAIPRGDSVGDTLARQLGVQIASSDEQAKAAEDFKKTLYGVVDDGSSDEDESTSKTKKIHIRIRDKPAAPTVDVNKLKEATKQLGLGPPLSRTRSLSGTPQDFNQAPTQPGGPAAAVSPAMPNSAIDLFGTNTLVQPQAPSSSTGPVIAGMGVTAGPIPEDFFQNTIPSHQLAAQLPPPGIVLSRMAQPAPGIEQGRPVPNQMMANVGLPDDGVPPQAPPQQSQFPPQQSQFPQQPGIPMDSIGLPDGGVPPQSQPLPSQGQFLPSQAQGFQLGIPAPSQPIDLSALEGPGAAKQAARPPAPTAVRPGQVPRGAPAAECYKMALAHLEQNQLTDALSCLDEAFLALAKDQSREADIKAQATICAQYKIAVALLQEIARLQRVQGAGALSAKEEMARLSRHLASLPIQAKHRINCIRTAIKRNMEVQNYAYAKQMLDLLYSKAPPTKQDELKSLIDMCVQRGLTNKSIDPFEDPSQFCSVTLSRLSTIGHDVCDLCGAKFSALSAPGCVICGMGSIKRSDALAGGPGPVPSPFG

SEQ ID NO: 159353 - protein, 76 aa, Zea Mays
MTVSSICISILSMLSSSPEKVTYFLYITLLNWWVLLLTAIHYRLQQRPADNDRYVKNCRNGRSPKETRWWFHDDTV

SEQ ID NO: 159354 - protein, 66 aa, Zea Mays
MRMPHAIDHGFCFLGVRAGLLLTYKHIITEYCLTTIHDTLDFDGTSYYIHTPYYNQYKWLHLIDQM

SEQ ID NO: 159355 - protein, 409 aa, Zea Mays
MATYYSSPGSERDSQTMYSAESGNVSYPVPSALGNFLYTNNASSGPYTEFSGIVQPQQNFMELTGHPSAMSHDSSSNEATNMGSSLTEQRSFGPLKDMRNEMLMHLMDGAHSSGSDLIHNDAHSTVQLEFGMLNNHNSTSVPLAPGQGLSLSLNTHILAPSYPHWSAKQDLLTPNSYQGDDNRMKNMQSEASQAIRNSKYLKAAQELLDEIVSVWKCVKQKTDKGPAEAGKADGKETDGGIKSEGVSSNPQESGANAAAELSTAEKQELQNKMAKLMTMLDEVDRKYKHYYHQMQLVMSSFNMVAGAGAAKPYTAVALQTISRHFRCLKDAINDQISVIRKKLGEDDNTSGKEGKLTRLRYIDQQIRQQRAFQQYGMLQQNAWRPQRGLPENSVSILRAWLFEHFLHPF

SEQ ID NO: 159356 - protein, 67 aa, Zea Mays
MIPEKTQSRRQVDPCPQAIGGGGSFPLQTAGPRASTAGLWMRCPKNDVLPSPTFYGGHPAALISSVE

SEQ ID NO: 159357 - protein, 78 aa, Zea Mays
MIPEKTQSRRQVDPCPQAIGGGGSFPLQTAGPRASTAGLWMRCPKNDVLPSPTFYGGHPAALISSGKYEEVNGGASSM

SEQ ID NO: 159358 - protein, 128 aa, Zea Mays
MPCSIWQRIIRRHQHPPPTPRSRAHHSLLAINALLPTLRFAPSMEGGRCSDGSRTPPPSTPLSPQSPSIVVAHLPSTTLHFLGALCPPTTIKEIQRDDRCEAATRHPSSSHIPCFRFADLDPPADVSG

SEQ ID NO: 159359 - protein, 647 aa, Zea Mays
MHHVRIPSASLETFTIGNVEERSRWLWVHCVVLYIISAVACILLYLEYKHIARLRLYHISRATSNPSHFTILVRGIPKSSTESFSRTVESFFTKYHASSYLSHQVVYKVGKVQKIVSGAKKVYRKFRHFKGATVDRRCRPIRFQCCFCGASSNSFQLLPSDYEQESEKSDVNESSSSLPDEECGAAFVFFKTRYAALVVAKILQTSNPMRWVTTLAPEPDDIYWSNLWLPYKQLWIRHIVTLMCSIVFMVVFLIPVTFIQGLTQLEQLQQRLPFLRGILKKKYMTQLITGYLPSVILQIFLYTVPPTMMFFSTLEGPISHSERKKSACCKVLYFTIWNVFFVNVLSGSAISQLNALSSPKDIPMQLAKAVPVQATFFTTYVLTSGWASLSSELMQLFGLTWNFLRRYLLRIKEDSDFLYSFPYHTEMPKVLLFGLLGFTCSVLAPLILPFLLLYFFLGYVVYRNQFLNVYCTKYDTGGQYWPIAHNTTIFSLILTQIICLGVFGLKESPVAAGFTVPLIIFTLLFNQYCRKRHLPLFKTFPAQNLIDMDKEDQQSDTTEDLHERLHSAYFQFPDTDEVPLERVRVSVGRDEDGSGSSGESSRKESAEDEHKSGLSHPTLDGLPVSRLRNAVRSLGSVLRPQRRQLPV

SEQ ID NO: 159360 - protein, 74 aa, Zea Mays
MRRLQAERVRCRHGLLPCMHAYQHTYTYIRDHYLGIDGVDVSCFLYRNLIVSLLALLIRIHIYIYAADDRVIKL

SEQ ID NO: 159361 - protein, 243 aa, Zea Mays
MVARGDLGVQIPLEQIPAIQESIVKLCRHLNKPVIVASQLLESMVEYPTPTRAEVADVSEAVRQYADAVMLSAESAIGAYPQKALSVLRAASERMESWSREENMQKLLPRHQLAIALPDRISEQICSCAVEMANNLAVDAIFVYTKHGHMASLLSRNRPNPPIFAFTDNANSRKSMNLYWGVIPLHLPLSNSMEDNFNKTISLMRSKGSVKPGDTVLVVSDSDLNQPCAATSVFQSIQVRLVE

SEQ ID NO: 159362 - protein, 71 aa, Zea Mays
MPSNNFYPMSLHIILIWSMINSFVIKHCHASAITFIKSTCKLQIVLLHHSMILFHASSSLLKESNKNHYAS

SEQ ID NO: 159363 - protein, 110 aa, Zea Mays
MMLCLHFAVQVWPCFIPSKLTVMASQPCVHAPKPFYLAHSWTFLRLRTKTAKLRMTSLTQTQKTRRTSKARQDLPCQIRGKGITRMMPMDTSKTVRESSIFLNFGNVPVH

SEQ ID NO: 159364 - protein, 436 aa, Zea Mays
MVSARIVVLLATLLCAAAAVASSWEDDNHHHHGGHKSGQCVRRCEDRPWHQRPRCLEQCREEEREKRQERSRHEADDRSGEGSSEDEREQEKEKQKDRRPYVFDRRSFRRVVRSEQGSLRVLRPFDEVSRLLRGIRDYRVAVLEANPRSFVVPSHTDAHCICYVAEGEGVVTTIENGERRSYTIKQGHVFVAPAGAVTYLGQHRRPEETGHRQDPPYHLRAWRVPVLLRPRREEPGIVPVELQQEHPESCIQDLERPSGEAVREARAGGAKKKKKNRLRSRRRPGRGTTPSGRGCHRARRSWCPRATRSSRWRPGTATSRSCASRSTPTGTRRCSWPAPTTCCRSSTGSPRRCHSPPRRRRWTRCSARGARRGSFLAPRRAAATRSGSKRRRRNAKNATAAVGRGNATDVRSGRKRRRNAKDATAAGAARRWRRRS

SEQ ID NO: 159365 - protein, 162 aa, Zea Mays
MQFFGGSSLTSIAPEATPAPAAPPGTGTGASAQVLYVFNRNGVCLLYREWHRPLRTLDPTQDHKLMFGLLFSLRSFTAKIDPTTAEKGNLGVPLLPGQGCSFYSFKTNTYKLNFMESPSGIKLILITHPRTGDQRDSLKHIYNLYVEYVVKNPLYAPGTPIN

SEQ ID NO: 159366 - protein, 651 aa, Zea Mays
MGEPTAVPGRILSSSMPTAAKEFSQAVYWMKDDPHVSGHPNTPCHTDRKLIFINCENMQMKEHPYLRTQLCWRKVTEEFSVPCKSVVTDSSSKSCSSTVVQDEDAAIAAVIDAAELKSEQLPSKKGQGSGRFTSGRNYGSLEGEAPPPGYVCRSCGVPGHFIQHCSQENKIPPPGYICYRCRIPGHFIHRCPSIGDPKCDNNKMLCSLVPVVTPVNGILDSLVPASPVSAVDDLPAELHCRLCKKVMRDAVLTSKCCFDSFCDRCIRDYIITESKCICGVKTLADDLIPNQTLRSTISNMLGTQTISGGSGTTRHRSSSGSNPDPKIQSHTASTREVKQSRDHQLPAASALDDVLQVATEGALVNQPREKLVPSAKILGKDGGNFAQVSAEKTVANAEALKVKDGTESTSKATTVSGAREHNVTRTDQPKKWKKAVLTKNFQPNNVGYGYNVPFDPAYCNPFINGYPWATEPYMYSSMGVPYPGYPMDPYCVNSFTCIPSQALAMQGYATSYQRPETEPMHRGGTAAAPSKRPERSDRPKDTRHQPQSREHERQLGSSHVSESRTRNRTRSSSEGRDRGHSDRASVDHHEDHSTRKRTRDSSPKYGDRQSDRRSSHGSRSMMTPEEDASDDECNFKRRWGRRSSGGVDTRH

SEQ ID NO: 159367 - protein, 635 aa, Zea Mays
MGVVYYQYKSEKEICSMPVLHAFISVSELKQLILTSGKHGHGRTHGRAREDIIIFNAHSGEEYADERASIPQNTTVLVRRISIAGQLSEKIVLSPTRKVTEEFSVPCKSVVTDSSSKSCSSTVVQDEDAAIAAVIDAAELKSEQLPSKKGQGSGRFTSGRNYGSLEGEAPPPGYVCRSCGVPGHFIQHCSQENKIPPPGYICYRCRIPGHFIHRCPSIGDPKCDNNKMLCSLVPVVTPVNGILDSLVPASPVSAVDDLPAELHCRLCKKVMRDAVLTSKCCFDSFCDRCIRDYIITESKCICGVKTLADDLIPNQTLRSTISNMLGTQTISGGSGTTRHRSSSGSNPDPKIQSHTASTREVKQSRDHQLPAASALDDVLQVATEGALVNQPREKLVPSAKILGKDGGNFAQVSAEKTVANAEALKVKDGTESTSKATTVSGAREHNVTRTDQPKKWKKAVLTKNFQPNNVGYGYNVPFDPAYCNPFINGYPWATEPYMPETEPMHRGGTAAAPSKRPERSDRPKDTRHQPQSREHERQLGSSHVSESRTRNRTRSSSEGRDRGHSDRASVDHHEDHSTRKRTRDSSPKYGDRQSDRRSSHGSRSMMTPEEDASDDECNFKRRWGRRSSGGVDTRH

SEQ ID NO: 159368 - protein, 576 aa, Zea Mays
MGEPTAVPGRILSSSMPTAAKNMQMKEHPYLRTQLCWRKVTEEFSVPCKSVVTDSSSKSCSSTVVQDEDAAIAAVIDAAELKSEQLPSKKGQGSGRFTSGRNYGSLEGEAPPPGYVCRSCGVPGHFIQHCSQENKIPPPGYICYRCRIPGHFIHRCPSIGDPKCDNNKMLCSLVPVVTPVNGILDSLVPASPVSAVDDLPAELHCRLCKKVMRDAVLTSKCCFDSFCDRCIRDYIITESKCICGVKTLADDLIPNQTLRSTISNMLGTQTISGGSGTTRHRSSSGSNPDPKIQSHTASTREVKQSRDHQLPAASALDDVLQVATEGALVNQPREKLVPSAKILGKDGGNFAQVSAEKTVANAEALKVKDGTESTSKATTVSGAREHNVTRTDQPKKWKKAVLTKNFQPNNVGYGYNVPFDPAYCNPFINGYPWATEPYMPETEPMHRGGTAAAPSKRPERSDRPKDTRHQPQSREHERQLGSSHVSESRTRNRTRSSSEGRDRGHSDRASVDHHEDHSTRKRTRDSSPKYGDRQSDRRSSHGSRSMMTPEEDASDDECNFKRRWGRRSSGGVDTRH

SEQ ID NO: 159369 - protein, 539 aa, Zea Mays
MGVVYYQYKSEKEICSMPVLHAFISVSELKQLILTSGKHGHGRTHGRAREDIIIFNAHSGEEYADERASIPQNTTVLVRRISIAGQLSEKIVLSPTRKVTEEFSVPCKSVVTDSSSKSCSSTVVQDEDAAIAAVIDAAELKSEQLPSKKGQGSGRFTSGRNYGSLEGEAPPPGYVCRSCGVPGHFIQHCSQENKIPPPGYICYRCRIPGHFIHRCPSIGDPKCDNNKMLCSLVPVVTPVNGILDSLVPASPVSAVDDLPAELHCRLCKKVMRDAVLTSKCCFDSFCDRCIRDYIITESKCICGVKTLADDLIPNQTLRSTISNMLGTQTISGGSGTTRHRSSSGSNPDPKIQSHTASTREVKQSRDHQLPAASALDDVLQVATEGALVNQPREKLVPSAKILGKDGGNFAQVSAEKTVANAEALKVKDGTESTSKATTVSGAREHNVTRTDQPKKWKKAVLTKNFQPNNVGYGYNVPFDPAYCNPFINGYPWATEPYMYSSMGVPYPGYPMDPYCVNSFTCIPSQALAMQGYATSYQRA

SEQ ID NO: 159370 - protein, 597 aa, Zea Mays
MCFCLLKEFSQAVYWMKDDPHVSGHPNTPCHTDRKLIFINCENMQMKEHPYLRTQLCWRKVTEEFSVPCKSVVTDSSSKSCSSTVVQDEDAAIAAVIDAAELKSEQLPSKKGQGSGRFTSGRNYGSLEGEAPPPGYVCRSCGVPGHFIQHCSQENKIPPPGYICYRCRIPGHFIHRCPSIGDPKCDNNKMLCSLVPVVTPVNGILDSLVPASPVSAVDDLPAELHCRLCKKVMRDAVLTSKCCFDSFCDRCIRDYIITESKCICGVKTLADDLIPNQTLRSTISNMLGTQTISGGSGTTRHRSSSGSNPDPKIQSHTASTREVKQSRDHQLPAASALDDVLQVATEGALVNQPREKLVPSAKILGKDGGNFAQVSAEKTVANAEALKVKDGTESTSKATTVSGAREHNVTRTDQPKKWKKAVLTKNFQPNNVGYGYNVPFDPAYCNPFINGYPWATEPYMPETEPMHRGGTAAAPSKRPERSDRPKDTRHQPQSREHERQLGSSHVSESRTRNRTRSSSEGRDRGHSDRASVDHHEDHSTRKRTRDSSPKYGDRQSDRRSSHGSRSMMTPEEDASDDECNFKRRWGRRSSGGVDTRH

SEQ ID NO: 159371 - protein, 637 aa, Zea Mays
MCFCLLKEFSQAVYWMKDDPHVSGHPNTPCHTDRKLIFINCENMQMKEHPYLRTQLCWRKVTEEFSVPCKSVVTDSSSKSCSSTVVQDEDAAIAAVIDAAELKSEQLPSKKGQGSGRFTSGRNYGSLEGEAPPPGYVCRSCGVPGHFIQHCSQENKIPPPGYICYRCRIPGHFIHRCPSIGDPKCDNNKMLCSLVPVVTPVNGILDSLVPASPVSAVDDLPAELHCRLCKKVMRDAVLTSKCCFDSFCDRCIRDYIITESKCICGVKTLADDLIPNQTLRSTISNMLGTQTISGGSGTTRHRSSSGSNPDPKIQSHTASTREVKQSRDHQLPAASALDDVLQVATEGALVNQPREKLVPSAKILGKDGGNFAQVSAEKTVANAEALKVKDGTESTSKATTVSGAREHNVTRTDQPKKWKKAVLTKNFQPNNVGYGYNVPFDPAYCNPFINGYPWATEPYMYSSMGVPYPGYPMDPYCVNSFTCIPSQALAMQGYATSYQRPETEPMHRGGTAAAPSKRPERSDRPKDTRHQPQSREHERQLGSSHVSESRTRNRTRSSSEGRDRGHSDRASVDHHEDHSTRKRTRDSSPKYGDRQSDRRSSHGSRSMMTPEEDASDDECNFKRRWGRRSSGGVDTRH

SEQ ID NO: 159372 - protein, 52 aa, Zea Mays
MILYKCSKASIDYPRGTTITKSLCQIYCLKDKTHQETFILLLVLKFEENRYK

SEQ ID NO: 159373 - protein, 176 aa, Zea Mays
MSLNIPRHRVLGNHRAKRAPRPPRSCRTKSRFVQGTTTLASGERYARMGPRLPGGTLGRKTHICLARGHLGRRSSHEPGLNQNSRNLRTCTFNAHCTNTCPAEGAEVNKERCDRGQTYFHHPQRRTSVINEHYSPLRLLFQQLRVGHTTSGQGLDLRRKLCLARAQPRPTALAGAH

SEQ ID NO: 159374 - protein, 96 aa, Zea Mays
MLDTVLWEREGKPFSNTCVDEEESNPQIISLHIWPKPKCSMTTIRKGQETESNAFVISNLRRRLAFFLLMKKPRGLLHQHKIVLYETTLNESTLIR

SEQ ID NO: 159375 - protein, 77 aa, Zea Mays
MLEEAYETGVGILHKYADQRDRLKSAQRKALDVLNTVGLSNSVLKLIERRHRVDRWIAYAGMVITVVVMIAFWRLTH

SEQ ID NO: 159376 - protein, 62 aa, Zea Mays
MHVSLLLHRQFPSSLTLTLLRIHHRDIMKRSTTYSSLIWWGRCLQADSLCRRAPPHHRQIKP

SEQ ID NO: 159377 - protein, 230 aa, Zea Mays
MHVSLLLHRQFPSSLTLTLLRIHHRDIMKRSTTYSSLIWWGRCLQADSLCRRAPPHHRQDWARRRRAQGRDPLLQQDERRWSSKPSYRHMQTYLRGRQLYDRGVLLATGSGHASPRPPGHDGLHEGAHRVSAPGGLRLGPSPCLGRLLLGLPSPDAREEGAGRPRRHRSGVRLGAVPQQRREHAPLRGRGGRPLRVPRRPHAALRAHGPKALHLLPGPPLRTPSSSSLYL

SEQ ID NO: 159378 - protein, 380 aa, Zea Mays
MWTAVSSPYGNKYVDLKLADKKPARFTLSIQEEFQKWRLACLGIGFVLLFLSPIISKWVPFYYSSSMALGILAVVLIVIFQGMKLLPMGRKSLFYLAIYGSVLGVGSYAVHYFSTLVSSILENFGLSEELYNPVSIFLLVAIVLTGAGFGYWMVRRFILSKDGSVDAGIAQFVKWAMRVVATFFIMQSTLDPLLALVALAFSWWLCSLLTTKKVQKTMTQKQKQSKVLSQQMLTQGLPTGPKIQFLSPSKTGFGGTTSRTSATQYGRSNLANRGMVCSALAKRAVPNEDEDHYSTFHNIQPRKYTKQEWEDFTQESTRKALAECTATPEFAQWVGDNARRLQVEKEEDNLSEEEIMESSSSSEETGDEADGAPGLIRLWG

SEQ ID NO: 159379 - protein, 291 aa, Zea Mays
MPPTATEATSSSATSATSSTDADAPGPTSPSPSRRAAPTLLLVAFLAALLIFSTGDDATAQPLNGVSLQNPEVSFVPSPLAGQFCERVLLSGVPRLHLDSYASQIRVKMNVSQSIPEKFHWKIEVCFHRNASMGLCQCEAGEWQGFQGGMWTAVSSPYGNKYVDLKLADKKPARFTLSIQEEFQKWRLACLGIGFVLLFLSPIISKWVPFYYSSSMALGILAVVLIVIFQGMKLLPMGRKSLFYLAIYGSVLGVGSYAVHYFSTLVSSILENFGLSEELYNPVSKFFLHVF

SEQ ID NO: 159380 - protein, 317 aa, Zea Mays
MPPTATEATSSSATSATSSTDADAPGPTSPSPSRRAAPTLLLVAFLAALLIFSTGDDATAQPLNGVSLQNPEVSFVPSPLAGQFCERVLLSGVPRLHLDSYASQIRVKMNVSQSIPEKFHWKIEVCFHRNASMGLCQCEAGEWQGFQGGMWTAVSSPYGNKYVDLKLADKKPARFTLSIQEEFQKWRLACLGIGFVLLFLSPIISKWVPFYYSSSMALGILAVVLIVIFQGMKLLPMGRKSLFYLAIYGSVLGVGSYAVHYFSTLVSSILENFGLSEELYNPEIYPFQRWKCRCWDSAVCEVGYACCCYIFHYAEHT

SEQ ID NO: 159381 - protein, 228 aa, Zea Mays
MVRRFILSKDGSVDAGIAQFVKWAMRVVATFFIMQSTLDPLLALVALAFSWWLCSLLTTKKVQKTMTQKQKQSKVLSQQMLTQGLPTGPKIQFLSPSKTGFGGTTSRTSATQYGRSNLANRGMVCSALAKRAVPNEDEDHYSTFHNIQPRKYTKQEWEDFTQESTRKALAECTATPEFAQWVGDNARRLQVEKEEDNLSEEEIMESSSSSEETGDEADGAPGLIRLWG

SEQ ID NO: 159382 - protein, 418 aa, Zea Mays
MALEAGSSGCGGRGWGGGFRSLMRRKQVDSDRIRAEGQPQLAKELNVPELVAIGVGSTVGAGVYVLVGIIAREHAGPALTISFLIAGIAATLSAFCYAELASRCPSAGSAYHYSYICVGEGVAWLIGWALVLEYTIGGSAVARGISPNLALFFGGQDSLPWILARHQLPWFGIIIDPCAAALVCVVTVLLCMGIKESSFAQGVVTVLNAFVMIFVIVAGSYIGFQIGWVGYKDSDGYFPYGVNGMLAGSATVFFAYIGFDTVASTAEEVRNPQRDLPLGIGVALAICCALYMAVSVVIVGLVPYFAMDPDTPISSAFAKHGMQWAMYVVTTGAVLALCSNLMGSLLPQPRILMAMARDGLLPSFFSDVNKQTQVPVKSTIVTGICAAALAFTMDVSQLAGMRWSSKVPRTQGLFLWFV

SEQ ID NO: 159383 - protein, 336 aa, Zea Mays
MALEAGSSGCGGRGWGGGFRSLMRRKQVDSDRIRAEGQPQLAKELNVPELVAIGVGSTVGAGVYVLVGIIAREHAGPALTISFLIAGIAATLSAFCYAELASRCPSAGSAYHYSYICVGEGVAWLIGWALVLEYTIGGSAVARGISPNLALFFGGQDSLPWILARHQLPWFGIIIDPCAAALVCVVTVLLCMGIKESSFAQGVVTVLNAFVMIFVIVAGSYIGFQIGWVGYKDSDGYFPYGVNGMLAGSATVFFAYIGFDTVASTAEEVRNPQRDLPLGIGVALAICCALYMAVSVVIVGLVPYFAMDPDTPISSAFAKHGMQWAMYTVIKHKSIL

SEQ ID NO: 159384 - protein, 504 aa, Zea Mays
MDARKQIEREMERFKVCEKETKTKAFSKEGLGQQPKTDPKEKAKAETRDWLNNVVSDLESQIDNFEAEIEGLSIKKGKQRPPRLVHLEKSITRHKAHIKKLESILRLLDNDELSPEQVNDVKDFLDDYVERNQEDFDEFSDVEDLYSTLPMEKVEALEDMVSLAPSSLVKGVASVPTTAVSSTKSSIATSLTQPTVSTAPSQSTSQDQTEDTASQESNSESVPQTPPPKGGNSGPSIPAVPIAVSTGSAAISVLAETISSPVRPIVPTTVATILSSAIPRSAPENTSTVTSIPANLSITLKDDESMSFPPRRPSPAITEIGIGRGIARGTTSQALGTAPITIGPVPGNGSVSALPGINDLSKRNILNTDEKINSGGLSQQLVMPLGSKVQPQQVPRTNDAISSESANTNESPILGGRVFSPPVVSGVQWRPLGAAAFQNQSEISHFRGRPEISADHREKYIQRLQQVQQQGGSLLNVSHITGINQKQFPTQQPNPLLQQFVYAV

SEQ ID NO: 159385 - protein, 472 aa, Zea Mays
MSFPPRRPSPAITEIGIGRGIARGTTSQALGTAPITIGPVPGNGSVSALPGINDLSKRNILNTDEKINSGGLSQQLVMPLGSKVQPQQVPRTNDAISSESANTNESPILGGRVFSPPVVSGVQWRPLGAAAFQNQSEISHFRGRPEISADHREKYIQRLQQVQQQGGSLLNVSHITGINQKQFPTQQPNPLLQQFNSQSSSISSQVNLGVQGTDAGHIKSEEEEQLLAEDGVESSATTGANKQTSEDDTKIPYSNPSAPAAESNQLPRDTDPSPGQPLQPGMSSSGVGVIGRRSVSDLGAIGDNLTGTSASSGHDQLYNLQMLEAAFHKLPQPKDSERAKTYIPRHPAVTPASYPQVQPSIVSHPSFWERIGSDTLATDMLFFAFYYQQNTYQQYMAARELKKQSWRFHRRYNTWFQRHVEPQVTTDEYERGSYVYFDFHVTEDGSGWCQRIKNDFTFEYNFLEDELSVQTN

SEQ ID NO: 159386 - protein, 747 aa, Zea Mays
MDARKQIEREMERFKVCEKETKTKAFSKEGLGQQPKTDPKEKAKAETRDWLNNVVSDLESQIDNFEAEIEGLSIKKGKQRPPRLVHLEKSITRHKAHIKKLESILRLLDNDELSPEQVNDVKDFLDDYVERNQEDFDEFSDVEDLYSTLPMEKVEALEDMVSLAPSSLVKGVASVPTTAVSSTKSSIATSLTQPTVSTAPSQSTSQDQTEDTASQESNSESVPQTPPPKGGNSGPSIPAVPIAVSTGSAAISVLAETISSPVRPIVPTTVATILSSAIPRSAPENTSTVTSIPANLSITLKDDESMSFPPRRPSPAITEIGIGRGIARGTTSQALGTAPITIGPVPGNGSLVMPLGSKVQPQQVPRTNDAISSESANTNESPILGGRVFSPPVVSGVQWRPLGAAAFQNQSEISHFRGRPEISADHREKYIQRLQQVQQQGGSLLNVSHITGINQKQFPTQQPNPLLQQFNSQSSSISSQVNLGVQGTDAGHIKSEEEEQLLAEDGVESSATTGANKQTSEDDTKIPYSNPSAPAAESNQLPRDTDPSPGQPLQPGMSSSGVGVIGRRSVSDLGAIGDNLTGTSASSGHDQLYNLQMLEAAFHKLPQPKDSERAKTYIPRHPAVTPASYPQVQPSIVSHPSFWERIGSDTLATDMLFFAFYYQQNTYQQYMAARELKKQSWRFHRRYNTWFQRHVEPQVTTDEYERGSYVYFDFHVTEDGSGWCQRIKNDFTFEYNFLEDELSVQTN

SEQ ID NO: 159387 - protein, 395 aa, Zea Mays
MPLGSKVQPQQVPRTNDAISSESANTNESPILGGRVFSPPVVSGVQWRPLGAAAFQNQSEISHFRGRPEISADHREKYIQRLQQVQQQGGSLLNVSHITGINQKQFPTQQPNPLLQQFNSQSSSISSQVNLGVQGTDAGHIKSEEEEQLLAEDGVESSATTGANKQTSEDDTKIPYSNPSAPAAESNQLPRDTDPSPGQPLQPGMSSSGVGVIGRRSVSDLGAIGDNLTGTSASSGHDQLYNLQMLEAAFHKLPQPKDSERAKTYIPRHPAVTPASYPQVQPSIVSHPSFWERIGSDTLATDMLFFAFYYQQNTYQQYMAARELKKQSWRFHRRYNTWFQRHVEPQVTTDEYERGSYVYFDFHVTEDGSGWCQRIKNDFTFEYNFLEDELSVQTN

SEQ ID NO: 159388 - protein, 348 aa, Zea Mays
MRPNIITEAGIPTRLNQWWSSIPFVTSGVILICGVIYLLCLLIGYDSYVEICFLPSAVASHFQVYRFYTSVLFHGSLLHVLFNMLALVPLGTELERIMGSVRLLFLMLLLATTNAILHLTIAFLVAYNPLYHVPNLVNECSIGFSGVIFSMIVIETSLSGVQSRSVFGLFNVPAKWYAWILLVLFQFLASNVSLLGHLCGILSGFAYTYGLFNYLLPGPSFYSKIEGLSALSVCVRRPGFIMCTGGTTYGQLPTYSNTSAAPSALINGNFLRNISSWMPSRHTSTAQEGEDPRFPGRARTLGSVGTEPTAREASAHLHARLLDNTTPSDPLTNTHDQKQDQQRVWRPS

SEQ ID NO: 159389 - protein, 372 aa, Zea Mays
MRPNIITEAGIPTRLNQWWSSIPFVTSGVILICGVIYLLCLLIGYDSYVEICFLPSAVASHFQVYRFYTSVLFHGSLLHVLFNMLALVPLGTELERIMGSVRLLFLMLLLATTNAILHLTIAFLVAYNPLYHVPNLVNECSIGFSGVIFSMIVIETSLSGVQSRSVFGLFNVPAKWYAWILLVLFQFLASNVSLLGHLCGILSGFAYTYGLFNYLLPGPSFYSKIEGLSALSVCVRRPGFIMCTGGTTYGQLPTYSNTSAAPSALINGNFLRNISSWMPSRHTSTAQEGEDPRFPGRARTLGSVGTEPTAREASAHLHARLLDNTTPSDPLTNTQTHVFFYKKLGQGVNDCPPDIILRRDRNKGPDRKIPEP

SEQ ID NO: 159390 - protein, 175 aa, Zea Mays
MRPNIITEAGIPTRLNQWWSSIPFVTSGVILICGVIYLLCLLIGYDSYVEICFLPSAVASHFQVYRFYTSVLFHGSLLHVLFNMLALVPLGTELERIMGSVRLLFLMLLLATTNAILHLTIAFLVAYNPLYHVPNLVNECSIGFSGVIFSMIVIETSLSGVQSRSVFGLFNVPAK

SEQ ID NO: 159391 - protein, 189 aa, Zea Mays
MFLQNDTYGLFNYLLPGPSFYSKIEGLSALSVCVRRPGFIMCTGGTTYGQLPTYSNTSAAPSALINGNFLRNISSWMPSRHTSTAQEGEDPRFPGRARTLGSVGTEPTAREASAHLHARLLDNTTPSDPLTNTQHTAVNTVRADATVTAEQVDTFDEELKKLVGMGFEKRRWRGRRPPEKRRQLLLVHE

SEQ ID NO: 159392 - protein, 342 aa, Zea Mays
MKFGATYEEYLRAERDKFLGQCSHVEYKRLKKVLKKCRVGRSLQADGTNGDEQQEGRDESSNICECNSCTLCDEMFFTELNKEASEIAGCFRSRVQRLLHLHVPSGLQRCIWRFRQCFIDDQQIMVQEGRMLLNYVTMNAIAIRKILKKYDKIHGSVSGRDFKSKMQTEHIELLQSPWLIELAAFHLNCDDSDADEPRAGEFFKNGFFKNFSCDLSGAQPLLTMTISETLKYEYSLTCPICLDTLFNPYALSCGHLFCKACACGAASVYIFQGVKSAPPEAKCPVCRAVGVFDRAVRMTELELLLKRRDKDYFLQRLREERSVMVKQAKEYWDSQAMLSMGI

SEQ ID NO: 159393 - protein, 60 aa, Zea Mays
MLSSCPEPLKTISKVQPPPHIQCTMATTAPTVPYSAPCLGLKKSSRLASRLGLPQTQRGS

SEQ ID NO: 159394 - protein, 465 aa, Zea Mays
MFLLTMTAGANSLHPPECSVGETCEKATSYQFAVLFVAFAFLVLGSAGIRPCSMPFGADQFDPNTESGKRGINSFFNWYYFTFTAAMMISATVIIYVQSNVSWPIGLGIPTALMFLACVLFFMGTRLYVRVTPEGSPFTSVVQVLSAALKKRSLKQPKDPKQDLFDPPHTSAIVTKLAHTDQFRCLDKAAIVASPDEVRSGGGAPADPWRLCSVQQVEEVKCLIRIVPVWSTGIIYYVAVVQQSTYVVLSALQSDRHLGRAGFQIPAASFTVFAMLAQTLWIPFYDRLLLPKLRKITGKEEGFTLLQRQGIGIALSTVAMVISAIVEDRRRAIALSQPTLGTTITGGAISAMSSLWMVPQLMILGLSEAFNLISQIEFYYKEIPEHMRSVAGALAFCNLALGNYLSGFLVTIVHRTTGSGQNWLAQDLNKGRLDLFYWTIAGIGVFNFIYFVICARWYRFKGASN

SEQ ID NO: 159395 - protein, 467 aa, Zea Mays
MGMFLLTMTAGANSLHPPECSVGETCEKATSYQFAVLFVAFAFLVLGSAGIRPCSMPFGADQFDPNTESGKRGINSFFNWYYFTFTAAMMISATVIIYVQSNVSWPIGLGIPTALMFLACVLFFMGTRLYVRVTPEGSPFTSVVQVLSAALKKRSLKQPKDPKQDLFDPPHTSAIVTKLAHTDQFRCLDKAAIVASPDEVRSGGGAPADPWRLCSVQQVEEVKCLIRIVPVWSTGIIYYVAVVQQSTYVVLSALQSDRHLGRAGFQIPAASFTVFAMLAQTLWIPFYDRLLLPKLRKITGKEEGFTLLQRQGIGIALSTVAMVISAIVEDRRRAIALSQPTLGTTITGGAISAMSSLWMVPQLMILGLSEAFNLISQIEFYYKEIPEHMRSVAGALAFCNLALGNYLSGFLVTIVHRTTGSGQNWLAQDLNKGRLDLFYWTIAGIGVFNFIYFVICARWYRFKGASN

SEQ ID NO: 159396 - protein, 610 aa, Zea Mays
MFFETKNPIASQGDIAAAVSKDAGTTWQQLGVVLDEEWHLSYPYVFSYGNETYMMPESSKKGNLKLYRAVDFPLKWELEKVLLERPLVDSVIIHSKGSYWLIGSDLSSYGAKQTGELFIWYSSSPLGPWSSHKQNPIRNTGNRPSARNGGRPFIYNDNLYRVGKDRGGGSGYTIQVFKVQVLTEDHYKEVAVPFVLDKPLKGRNAWNGARSHHFDVQQLPSSQHWIGVMDGDRVLSGDSIHHLTIGCMFYGAACILVLLLGGLIGAIKCTLPLRWYLPHTEKRSDNFDIEKQVLLCHKLSWLICNVNRLGSLIGGKINYRAWKDRVYIAFIILVSVVLTFLGTNYIFGGDGAEEPYPIRGRYSQFTLLTMTYDARFWNLKMFVEHYSKCASVREIVVVWNKGRAPVQGELKSMVPVRIRVENNNTLNNRFKIDKEIKTGAVMELDDDIMMACDDLERGFKVWREHPDRIVGYYPRLAEGWPLEYRNERYARQQGGYNIILTGAAFMDHELAFKRYWSKEAEIGRQIVDSFFNCEDILLNFLFANASSASTVEYVKPAWAIDMSKFSGVAISRNTQEHYHARSKCLAMFSGIFGNLTSKRFFSSRGDGWDV

SEQ ID NO: 159397 - protein, 308 aa, Zea Mays
MATSPAASSSSAPTASAVAAATMAVEATDGPVLSVVSKRLRALRKKYNRITQMEESLAAGKTLNREQEEVLRSKPVVAALIDELERLRPPLASALAEELSSRPAPAPSAASSSDSDSSVQDLLALVYFGSLFDVKQQSDFVSLVYTRELERSSCLTYDYVGDDPEDSLAETDLNAVSALASLAALRPPAAAGVSHRDALQACAHHARLWLCRADEPIHPDSTITYAGVRAKLDRIMASGYFTAQLEMRTPLDLAAAVASFGAGGVQVQESMVVSPQAPEAVEESQAVEGHKVCWSLGRGRVETTVGEP

SEQ ID NO: 159398 - protein, 429 aa, Zea Mays
MATSPAASSSSAPTASAVAAATMAVEATDGPVLSVVSKRLRALRKKYNRITQMEESLAAGKTLNREQEEVLRSKPVVAALIDELERLRPPLASALAEELSSRPAPAPSAASSSDSDSSVQDLLALVYFGSLFDVKQQSDFVSLVYTRELERSSCLTYDYVGDDPEDSLAETDLNAVSALASLAALRPPAAAGVSHRDALQACAHHARLWLCRADEPIHPDSTITYAGVRAKLDRIMASGYFTAQLEMRTPLDLAAAVASFGAGGVQVQESMVVSPQAPEAVEESQAVEGHKEDEVLVHPTDEVPPAETEQEQETFDADVKDQEQKDQQFIQRRSYQNQRGGGRGGSRRGYPNGRGGRGGRGGGYQNGRGGYQNGRGGAGGYYYESGYYQPRNYNRGRGGRSGGGNSYYNSHGGGAQGHHPGSVELGANA

SEQ ID NO: 159399 - protein, 116 aa, Zea Mays
MVVMEGNGGAGRITIGVCVMEKKAFSSPMEQILERLRAFGEFEIIIFGDKVILDDPIEIWPNCDCLIAFYSSGFPLQKVQAYAALRRYIFYSLFLYISLSNGNYSCKHVSIFLIMS

SEQ ID NO: 159400 - protein, 69 aa, Zea Mays
MVVMEGNGGAGRITIGVCVMEKKAFSSPMEQILERLRAFGEFEIIIFGDKVILDDPIEMYVMRTQLAKL

SEQ ID NO: 159401 - protein, 217 aa, Zea Mays
MEKKRVRLDFQRAFSSPMEQILERLRAFGEFEDTATTRPWPVRRTNGAGQWVGASGASVGRGLGRSGLGQVQPMGPGHNQNTWPDDAGGSHGVAMAGEVADQGGPGVGARLRQKRAGAGTKEEEKAMEEEVKTKRTGTRVIGVKIIIFGDKVILDDPIEIWPNCDCLIAFYSSGFPLQKVQAYAALRRYIFYSLFLYISLSNGNYSCKHVSIFLIMS

SEQ ID NO: 159402 - protein, 88 aa, Zea Mays
MEQILERLRAFGEFEIIIFGDKVILDDPIEIWPNCDCLIAFYSSGFPLQKVQAYAALRRYIFYSLFLYISLSNGNYSCKHVSIFLIMS

SEQ ID NO: 159403 - protein, 60 aa, Zea Mays
MLRERDVGASTFICLLCKFLTTSSFEWLICIQSAYLFSYKKLNKGIKERDSCCLVLGHNL

SEQ ID NO: 159404 - protein, 629 aa, Zea Mays
MTGNGTSIPTLVMCTTPPKMQHLEKYGIPVPSYALVNREYPDQELDYFIEQEDFVEVHGKRFLKPFVEKPVNGDDHRIMIYYPSSAGGGMKELFRKVGNRSSEFHPDVRRVRREGSYIYEEFMPTGGTDVKVYTVGPGYAHAEARKSPVVDGVVMRNPDGKEVRYPVLLTPTEKQMARDVCNAFRQMVCGFDLLRCDGRSYVCDVNGWSFVKNSYKYYDDAACILRKIFLDAKAPHLSSTIPPTLPWKSEPVQPTEGLTRQGSGIIGTFGQSEELRCVIVVIRHGDRTPKQKVKLKVTEEKLLNLMLKYNGGKPRVETKLKSAVQLQDLLDATRQLVPPTRSGRESDSDADDIEHIEKLRQVKAVLEEGGHFSGIYRKVQLKPLKWIKVPKRNGDGEEERPIEALMILKYGGVLTHAGRKQAEELGRFFRNNIYPGEGTGLLRLHSTYRHDLKIYSSDEGRVQMSAAAFAKGLLDLEGQLTPILVSLVSKDSSMLDGLEDASTEMDEAKARLHEIIISSEKAKNTEGPVEFPWMVDGAGLPANASQLLPKMAKLTKEVTSQVKLLAEGEDERLALTSTFSKYDQAKALGKTTIDVARIAAGLPCGSESFLLMFARWRKLERDLYNERKE

SEQ ID NO: 159405 - protein, 463 aa, Zea Mays
MLDGLEDASTEMDEAKARLHEIIISSEKAKNTEGPVEFPWMVDGAGLPANASQLLPKMAKLTKEVTSQVKLLAEGEDERLALTSTFSKYDQAKALGKTTIDVARIAAGLPCGSESFLLMFARWRKLERDLYNERKDRFDITQIPDVYDSCKYDLLHNAHLNLKGLEELFKVAQILADGVIPNEYGINPKQKLKIGSKIARRLLGKILIDLRNTREEAISVAEPKFIEDEALFLPTKEAEHQQKVHVRNEDGRRSSSTSEKSLDQEDEDDRETKYRLDPKYANVRTPERHVRTRLYFTSESHIHSLMNVLRYCNLDESLQGEESLVCQSALDRLHRTRELDYMSNIVLRMFENIEVPLEDEKRFRIEMTFSRGADLSPLEDKTSESSSLLQEHTLPIMGPERLQEVGSCLTMDKFEKMVRPFAMPPEDFPPAAPPQALGYFSKGAGVLERLASLWPFHKSANGK

SEQ ID NO: 159406 - protein, 493 aa, Zea Mays
MSAAAFAKGLLDLEGQLTPILVSLVSKDSSMLDGLEDASTEMDEAKARLHEIIISSEKAKNTEGPVEFPWMVDGAGLPANASQLLPKMAKLTKEVTSQVKLLAEGEDERLALTSTFSKYDQAKALGKTTIDVARIAAGLPCGSESFLLMFARWRKLERDLYNERKDRFDITQIPDVYDSCKYDLLHNAHLNLKGLEELFKVAQILADGVIPNEYGINPKQKLKIGSKIARRLLGKILIDLRNTREEAISVAEPKFIEDEALFLPTKEAEHQQKVHVRNEDGRRSSSTSEKSLDQEDEDDRETKYRLDPKYANVRTPERHVRTRLYFTSESHIHSLMNVLRYCNLDESLQGEESLVCQSALDRLHRTRELDYMSNIVLRMFENIEVPLEDEKRFRIEMTFSRGADLSPLEDKTSESSSLLQEHTLPIMGPERLQEVGSCLTMDKFEKMVRPFAMPPEDFPPAAPPQALGYFSKGAGVLERLASLWPFHKSANGK

SEQ ID NO: 159407 - protein, 672 aa, Zea Mays
MIYYPSSAGGGMKELFRKVGNRSSEFHPDVRRVRREGSYIYEEFMPTGGTDVKVYTVGPGYAHAEARKSPVVDGVVMRNPDGKEVRYPVLLTPTEKQMARDVCNAFRQMVCGFDLLRCDGRSYVCDVNGWSFVKNSYKYYDDAACILRKIFLDAKAPHLSSTIPPTLPWKSEPVQPTEGLTRQGSGIIGTFGQSEELRCVIVVIRHGDRTPKQKVKLKVTEEKLLNLMLKYNGGKPRVETKLKSAVQLQDLLDATRQLVPPTRSGRESDSDADDIEHIEKLRQVKAVLEEGGHFSGIYRKVQLKPLKWIKVPKRNGDGEEERPIEALMILKYGGVLTHAGRKQAEELGRFFRNNIYPGEGTGLLRLHSTYRHDLKIYSSDEGRVQMSAAAFAKGLLDLEGQLTPILVSLVSKDSSMLDGLEDASTEMDEAKARLHEIIISSEKAKNTEGPVEFPWMVDGAGLPANASQLLPKMAKLTKEVTSQVKLLAEGEDERLALTSTFSKYDQAKALGKTTIDVARIAAGLPCGSESFLLMFARWRKLERDLYNERKDRFDITQIPDVYDSCKYDLLHNAHLNLKGLEELFKVAQILADGVIPNEYGINPKQKLKIGSKKLSVLPNQNLLKTKLYSYQQKKQSTSRRFMLEMRMEEDLALRVRSHWTKKMKMIEKLNTD

SEQ ID NO: 159408 - protein, 653 aa, Zea Mays
MVENQELSFGLFMQTKLKSAVQLQDLLDATRQLVPPTRSGRESDSDADDIEHIEKLRQVKAVLEEGGHFSGIYRKVQLKPLKWIKVPKRNGDGEEERPIEALMILKYGGVLTHAGRKQAEELGRFFRNNIYPGEGTGLLRLHSTYRHDLKIYSSDEGRVQMSAAAFAKGLLDLEGQLTPILVSLVSKDSSMLDGLEDASTEMDEAKARLHEIIISSEKAKNTEGPVEFPWMVDGAGLPANASQLLPKMAKLTKEVTSQVKLLAEGEDERLALTSTFSKYDQAKALGKTTIDVARIAAGLPCGSESFLLMFARWRKLERDLYNERKDRFDITQIPDVYDSCKYDLLHNAHLNLKGLEELFKVAQILADGVIPNEYGINPKQKLKIGSKIARRLLGKILIDLRNTREEAISVAEPKFIEDEALFLPTKEAEHQQKVHVRNEDGRRSSSTSEKSLDQEDEDDRETKYRLDPKYANVRTPERHVRTRLYFTSESHIHSLMNVLRYCNLDESLQGEESLVCQSALDRLHRTRELDYMSNIVLRMFENIEVPLEDEKRFRIEMTFSRGADLSPLEDKTSESSSLLQEHTLPIMGPERLQEVGSCLTMDKFEKMVRPFAMPPEDFPPAAPPQALGYFSKGAGVLERLASLWPFHKSANGK

SEQ ID NO: 159409 - protein, 376 aa, Zea Mays
MIYYPSSAGGGMKELFRKVYTVGPGYAHAEARKSPVVDGVVMRNPDGKEVRYPVLLTPTEKQMARDVCNAFRQMVCGFDLLRCDGRSYVCDVNGWSFVKNSYKYYDDAACILRKIFLDAKAPHLSSTIPPTLPWKSEPVQPTEGLTRQGSGIIGTFGQSEELRCVIVVIRHGDRTPKQKVKLKVTEEKLLNLMLKYNGGKPRVETKLKSAVQLQDLLDATRQLVPPTRSGRESDSDADDIEHIEKLRQVKAVLEEGGHFSGIYRKVQLKPLKWIKVPKRNGDGEEERPIEALMILKYGGVLTHAGRKQAEELGRFFRNNIYPGEGTGLLRLHSTYRHDLKIYSSDEGRVQMSAAAFAKGLLDLEGQLTPILGIFSK

SEQ ID NO: 159410 - protein, 507 aa, Zea Mays
MPTGGTDVKVYTVGPGYAHAEARKSPVVDGVVMRNPDGKEVRYPVLLTPTEKQMARDVCNAFRQMVCGFDLLRCDGRSYVCDVNGWSFVKNSYKYYDDAACILRKIFLDAKAPHLSSTIPPTLPWKSEPVQPTEGLTRQGSGIIGTFGQSEELRCVIVVIRHGDRTPKQKVKLKVTEEKLLNLMLKYNGGKPRVETKLKSAVQLQDLLDATRQLVPPTRSGRESDSDADDIEHIEKLRQVKAVLEEGGHFSGIYRKVQLKPLKWIKVPKRNGDGEEERPIEALMILKYGGVLTHAGRKQAEELGRFFRNNIYPGEGTGLLRLHSTYRHDLKIYSSDEGRVQMSAAAFAKGLLDLEGQLTPILVSLVSKDSSMLDGLEDASTEMDEAKARLHEIIISSEKAKNTEGPVEFPWMVDGAGLPANASQLLPKMAKLTKEVTSQVKLLAEGEDERLALTSTFSKYDQAKALGKTTIDVARIAAGLPCGSESFLLMFARWRKLERDLYNERKE

SEQ ID NO: 159411 - protein, 896 aa, Zea Mays
MQDATNGFLCGRGDDHRIMIYYPSSAGGGMKELFRKVGNRSSEFHPDVRRVRREGSYIYEEFMPTGGTDVKVYTVGPGYAHAEARKSPVVDGVVMRNPDGKEVRYPVLLTPTEKQMARDVCNAFRQMVCGFDLLRCDGRSYVCDVNGWSFVKNSYKYYDDAACILRKIFLDAKAPHLSSTIPPTLPWKSEPVQPTEGLTRQGSGIIGTFGQSEELRCVIVVIRHGDRTPKQKVKLKVTEEKLLNLMLKYNGGKPRVETKLKSAVQLQDLLDATRQLVPPTRSGRESDSDADDIEHIEKLRQVKAVLEEGGHFSGIYRKVQLKPLKWIKVPKRNGDGEEERPIEALMILKYGGVLTHAGRKQAEELGRFFRNNIYPGEGTGLLRLHSTYRHDLKIYSSDEGRVQMSAAAFAKGLLDLEGQLTPILVSLVSKDSSMLDGLEDASTEMDEAKARLHEIIISSEKAKNTEGPVEFPWMVDGAGLPANASQLLPKMAKLTKEVTSQVKLLAEGEDERLALTSTFSKYDQAKALGKTTIDVARIAAGLPCGSESFLLMFARWRKLERDLYNERKDRFDITQIPDVYDSCKYDLLHNAHLNLKGLEELFKVAQILADGVIPNEYGINPKQKLKIGSKIARRLLGKILIDLRNTREEAISVAEPKFIEDEALFLPTKEAEHQQKVHVRNEDGRRSSSTSEKSLDQEDEDDRETKYRLDPKYANVRTPERHVRTRLYFTSESHIHSLMNVLRYCNLDESLQGEESLVCQSALDRLHRTRELDYMSNIVLRMFENIEVPLEDEKRFRIEMTFSRGADLSPLEDKTSESSSLLQEHTLPIMGPERLQEVGSCLTMDKFEKMVRPFAMPPEDFPPAAPPQALGYFSKGAGVLERLASLWPFHKSANGK

SEQ ID NO: 159412 - protein, 626 aa, Zea Mays
MLQDNLYHQLGSGRESDSDADDIEHIEKLRQVKAVLEEGGHFSGIYRKVQLKPLKWIKVPKRNGDGEEERPIEALMILKYGGVLTHAGRKQAEELGRFFRNNIYPGEGTGLLRLHSTYRHDLKIYSSDEGRVQMSAAAFAKGLLDLEGQLTPILVSLVSKDSSMLDGLEDASTEMDEAKARLHEIIISSEKAKNTEGPVEFPWMVDGAGLPANASQLLPKMAKLTKEVTSQVKLLAEGEDERLALTSTFSKYDQAKALGKTTIDVARIAAGLPCGSESFLLMFARWRKLERDLYNERKDRFDITQIPDVYDSCKYDLLHNAHLNLKGLEELFKVAQILADGVIPNEYGINPKQKLKIGSKIARRLLGKILIDLRNTREEAISVAEPKFIEDEALFLPTKEAEHQQKVHVRNEDGRRSSSTSEKSLDQEDEDDRETKYRLDPKYANVRTPERHVRTRLYFTSESHIHSLMNVLRYCNLDESLQGEESLVCQSALDRLHRTRELDYMSNIVLRMFENIEVPLEDEKRFRIEMTFSRGADLSPLEDKTSESSSLLQEHTLPIMGPERLQEVGSCLTMDKFEKMVRPFAMPPEDFPPAAPPQALGYFSKGAGVLERLASLWPFHKSANGK

SEQ ID NO: 159413 - protein, 1142 aa, Zea Mays
MGLGCPISQIWTRHRQDNLSMAGVIVSSSAARTEKSQEQDRLTRTRVDERQSARGCDRGRGQQVGEEEYGEGREDERDVRRWRNRWCVHDVKRPRGRAIATVRVGPGLVSDEYGKGAHAPTPSAENGVVRSWRHKGREKISRMATEMVATEARTIIIVRRGTGGATEHSAEVRPSEGVAGAVVRGRSSDQRGVSMADNEGTLDAVLKEAVDLENIPLEEVFENLRCSRGGLTSEQAQQRLQLFGPNKLEEKEESKFLKFLGFMWNPLSWVMEAAAIMAIALANGGGKPPDWQDFVGIITLLLINSTISFIEENNAGNAAAALMARLAPKAKVLRDGRWAEEEAAVLVPGDVISIKLGDIIPADARLLDGDPLKIDQSSLTGESLPVTKGPGDGAYSGSTVKQGEIEAVVIATGVHTFFGKAAHLVDSTNQVLTAIGNFCICSIAVGMFVEIIVMYPIQHRAYRPGIDNLLVLLIGGIPIAMPTVLSVTMAIGSHRLAQQGAITKRMTAIEEMAGMDVLCSDKTGTLTLNKLTVDKNLIEVFEREVTQDQVILMAARASRIENQDAIDTAIVGMLADPKEARAGIQEVHFLPFNPTDKRTALTYIDSDGKMYRVSKGAPEQILNLVYNKLEIERRVHAVIDKFAERGLRSLAVAYQVVPDGRKESPGGPWHFVALMPLFDPPRHDSAETIRRALNLGVSVKMITGDQLAIGKETGRRLGMGTNMYPSSALLGQNKDESIAVLPVDDLIEKADGFAGVFPEHKYEIVKRLQARKHICGMTGDGVNDAPALKKADIGIAVADATDAARSASDIVLTEPGLSVIISAVLTSRAIFQRMKNYTIYAVSITIRIVLGFMLLALIWEFDFPPFMVLIIAILNDGTIMTISKDRVKPSPLPDSWKLAEIFTTGIVLGGYLAVMTVIFFWAAYKTNFFPRIFHVESLEKTAQDDYQKLASAVYLQVSTISQALIFVTRSRSWSFAERPGFLLVFAFLVAQLIATLVAVYADWGFTSIEGIGWGWAGVVWLYNLVFYFPLDLLKFLIRYALSGKAWDLVIEQRIAFTRKKDFGKEERALKWAHAQRTLHGLQPPDAKLFPDRVNELNQMAEEAKRRAEIARLRELHTLKGHVESVVKLKGLDIDTIQQSYTV

SEQ ID NO: 159414 - protein, 1131 aa, Zea Mays
MGLGCPISQIWTRHRQDNLSMAGVIVSSSAARTEKSQEQDRLTRTRVDERQSARGCDRGRGQQVGEEEYGEGREDERDVRRWRNRWCVHDVKRPRGRAIATVRVGPGLVSDEYGKGAHAPTPSAENGVVRSWRHKGREKISRMATEMVATEARTIIIVRRGTGGATEHSAEVRPSEGVAGAVVRGRSSDQRGVSMADNEGTLDAVLKEAVDLENIPLEEVFENLRCSRGGLTSEQAQQRLQLFGPNKLEEKEESKFLKFLGFMWNPLSWVMEAAAIMAIALANGGGKPPDWQDFVGIITLLLINSTISFIEENNAGNAAAALMARLAPKAKVLRDGRWAEEEAAVLVPGDVISIKLGDIIPADARLLDGDPLKIDQSSLTGESLPVTKGPGDGAYSGSTVKQGEIEAVVIATGVHTFFGKAAHLVDSTNQVLTAIGNFCICSIAVGMFVEIIVMYPIQHRAYRPGIDNLLVLLIGGIPIAMPTVLSVTMAIGSHRLAQQGAITKRMTAIEEMAGMDVLCSDKTGTLTLNKLTVDKNLIEVFEREVTQDQVILMAARASRIENQDAIDTAIVGMLADPKEARAGIQEVHFLPFNPTDKRTALTYIDSDGKMYRVSKGAPEQILNLVYNKLEIERRVHAVIDKFAERGLRSLAVAYQVVPDGRKESPGGPWHFVALMPLFDPPRHDSAETIRRALNLGVSVKMITGDQLAIGKETGRRLGMGTNMYPSSALLGQNKDESIAVLPVDDLIEKADGFAGVFPEHKYEIVKRLQARKHICGMTGDGVNDAPALKKADIGIAVADATDAARSASDIVLTEPGLSVIISAVLTSRAIFQRMKNYTLGFMLLALIWEFDFPPFMVLIIAILNDGTIMTISKDRVKPSPLPDSWKLAEIFTTGIVLGGYLAVMTVIFFWAAYKTNFFPRIFHVESLEKTAQDDYQKLASAVYLQVSTISQALIFVTRSRSWSFAERPGFLLVFAFLVAQLIATLVAVYADWGFTSIEGIGWGWAGVVWLYNLVFYFPLDLLKFLIRYALSGKAWDLVIEQRIAFTRKKDFGKEERALKWAHAQRTLHGLQPPDAKLFPDRVNELNQMAEEAKRRAEIARLRELHTLKGHVESVVKLKGLDIDTIQQSYTV

SEQ ID NO: 159415 - protein, 555 aa, Zea Mays
MGLGCPISQIWTRHRQDNLSMAGVIVSSSAARTEKSQEQDRLTRTRVDERQSARGCDRGRGQQVGEEEYGEGREDERDVRRWRNRWCVHDVKRPRGRAIATVRVGPGLVSDEYGKGAHAPTPSAENGVVRSWRHKGREKISRMATEMVATEARTIIIVRRGTGGATEHSAEVRPSEGVAGAVVRGRSSDQRGVSMADNEGTLDAVLKEAVDLENIPLEEVFENLRCSRGGLTSEQAQQRLQLFGPNKLEEKEESKFLKFLGFMWNPLSWVMEAAAIMAIALANGGGKPPDWQDFVGIITLLLINSTISFIEENNAGNAAAALMARLAPKAKVLRDGRWAEEEAAVLVPGDVISIKLGDIIPADARLLDGDPLKIDQSSLTGESLPVTKGPGDGAYSGSTVKQGEIEAVVIATGVHTFFGKAAHLVDSTNQVGHFQKVLTAIGNFCICSIAVGMFVEIIVMYPIQHRAYRPGIDNLLVLLIGGIPIAMPTVLSVTMAIGSHRLAQQGAITKRMTAIEEMAGMDVLCSDKTGTLTLNKLTVDKNLIEVRLEQPSLVL

SEQ ID NO: 159416 - protein, 905 aa, Zea Mays
MGLGCPISQIWTRHRQDNLSMAGVIVSSSAARTEKSQEQDRLTRTRVDERQSARGCDRGRGQQVGEEEYGEGREDERDVRRWRNRWCVHDVKRPRGRAIATVRVGPGLVSDEYGKGAHAPTPSAENGVVRSWRHKGREKISRMATEMVATEARTIIIVRRGTGGATEHSAEVRPSEGVAGAVVRGRSSDQRGVSMADNEGTLDAVLKEAVDLENIPLEEVFENLRCSRGGLTSEQAQQRLQLFGPNKLEEKELNWPWLQESKFLKFLGFMWNPLSWVMEAAAIMAIALANGGGKPPDWQDFVGIITLLLINSTISFIEENNAGNAAAALMARLAPKAKVLRDGRWAEEEAAVLVPGDVISIKLGDIIPADARLLDGDPLKIDQSSLTGESLPVTKGPGDGAYSGSTVKQGEIEAVVIATGVHTFFGKAAHLVDSTNQVLTAIGNFCICSIAVGMFVEIIVMYPIQHRAYRPGIDNLLVLLIGGIPIAMPTVLSVTMAIGSHRLAQQGAITKRMTAIEEMAGMDVLCSDKTGTLTLNKLTVDKNLIEVFEREVTQDQVILMAARASRIENQDAIDTAIVGMLADPKEARAGIQEVHFLPFNPTDKRTALTYIDSDGKMYRVSKGAPEQILNLVYNKLEIERRVHAVIDKFAERGLRSLAVAYQVVPDGRKESPGGPWHFVALMPLFDPPRHDSAETIRRALNLGVSVKMITGDQLAIGKETGRRLGMGTNMYPSSALLGQNKDESIAVLPVDDLIEKADGFAGVFPEHKYEIVKRLQARKHICGMTGDGVNDAPALKKADIGIAVADATDAARSASDIVLTEPGLSVIISAVLTSRAIFQRMKNYTIYAVSITIRIVVCFLGLCFRTRSCATLLYWPPLATVVVYLSVAYLCEICLCIYLSTYFGC

SEQ ID NO: 159417 - protein, 452 aa, Zea Mays
MFVEIIVMYPIQHRAYRPGIDNLLVLLIGGIPIAMPTVLSVTMAIGSHRLAQQGAITKRMTAIEEMAGMDVLCSDKTGTLTLNKLTVDKNLIEVFEREVTQDQVILMAARASRIENQDAIDTAIVGMLADPKEARAGIQEVHFLPFNPTDKRTALTYIDSDGKMYRVSKGAPEQILNLVYNKLEIERRVHAVIDKFAERGLRSLAVAYQVVPDGRKESPGGPWHFVALMPLFDPPRHDSAETIRRALNLGVSVKMITGDQLAIGKETGRRLGMGTNMYPSSALLGQNKDESIAVLPVDDLIEKADGFAGVFPEHKYEIVKRLQARKHICGMTGDGVNDAPALKKADIGIAVADATDAARSASDIVLTEPGLSVIISAVLTSRAIFQRMKNYTIYAVSITIRIVVCFLGLCFRTRSCATLLYWPPLATVVVYLSVAYLCEICLCIYLSTYFGC

SEQ ID NO: 159418 - protein, 585 aa, Zea Mays
MWNPLSWVMEAAAIMAIALANGGGKPPDWQDFVGIITLLLINSTISFIEENNAGNAAAALMARLAPKAKVLRDGRWAEEEAAVLVPGDVISIKLGDIIPADARLLDGDPLKIDQSSLTGESLPVTKGPGDGAYSGSTVKQGEIEAVVIATGVHTFFGKAAHLVDSTNQVGHFQKHRAYRPGIDNLLVLLIGGIPIAMPTVLSVTMAIGSHRLAQQGAITKRMTAIEEMAGMDVLCSDKTGTLTLNKLTVDKNLIEVFEREVTQDQVILMAARASRIENQDAIDTAIVGMLADPKEARAGIQEVHFLPFNPTDKRTALTYIDSDGKMYRVSKGAPEQILNLVYNKLEIERRVHAVIDKFAERGLRSLAVAYQVVPDGRKESPGGPWHFVALMPLFDPPRHDSAETIRRALNLGVSVKMITGDQLAIGKETGRRLGMGTNMYPSSALLGQNKDESIAVLPVDDLIEKADGFAGVFPEHKYEIVKRLQARKHICGMTGDGVNDAPALKKADIGIAVADATDAARSASDIVLTEPGLSVIISAVLTSRAIFQRMKNYTIYAVSITIRIVLGFMLLALIWEFDFPPFMVP

SEQ ID NO: 159419 - protein, 224 aa, Zea Mays
MAAAALRSSARRLLRLTPAPSSALFAASRPTARVAPLSRPIAALSGGNNPISWKLRRFFSSNEKHLPAISDPEIEAAFKDLLAASWNELPDSLVAEAKKAVSKATDDNAGQEALKNVFGAAEACEEFSGTLVTLRMALDDLCGLTGENVGPLPGYIEDAVKAAYNRYMTYLESFGPEENYLRKKVETELGTKMIHLKMRCSGIGSEWGKQNKYAFGLIPGQYCL

SEQ ID NO: 159420 - protein, 223 aa, Zea Mays
MAAAALRSSARRLLRLTPAPSSALFAASRPTARVAPLSRPIAALSGGNNPISWKLRRFFSSNEKHLPAISDPEIEAAFKDLLAASWNELPDSLVAEAKKAVSKATDDNAGQEALKNVFGAAEACEEFSGTLVTLRMALDDLCGLTGENVGPLPGYIEDAVKAAYNRYMTYLESFGPEENYLRKKVETELGTKMIHLKMRCSGIGSEWGKGNFVIFKLVNIFLV

SEQ ID NO: 159421 - protein, 60 aa, Zea Mays
MTYLESFGPEENYLRKKVETELGTKMIHLKMRCSGIGSEWGKISLIGTSGISGSYVELRA

SEQ ID NO: 159422 - protein, 553 aa, Zea Mays
MAIRAGRSPLLHLLALAFLILAASPCLQARVDHRKQKLRRVAVRKKMEVVQQDDEALVKLENAGIERSKAVDSAVLGKYSIWRRENENEKADSRVRLMRDQMIMARIYSVLAKSRDKLDLYQELLARLKESQRSLGEATADAELPKSASDRTKAMGQVLSKARDLLYDCKEITQRLRAMLQSADEQVRSLKKQSTFLSQLAAKTIPNGIHCLSMRLTIDYYLLSPEKRKFPNSENLENPDLYHYALFSDNVLAASVVVNSTIMNAKEPEKHVFHLVTDKLNFGAMNMWFLLNPPGDATIHVENVDDFKWLNSSYCPVLKQLESAAMKEYYFKADRPKTLSAGSSNLKYRNPKYLSMLNHLRFYLPQVYPKLNKILFLDDDIVVQRDLTGLWEVDLNGNVNGAVETCGESFHRFDKYLNFSNPNIAQNFDPNACGWAYGMNMFDLEEWKKKDITGIYHKWQNMNENRLLWKLGTLPPGLLTFYKLTHPLDKSWHVLGLGYNPTIERSEIDNAAVIHYNGNMKPWLEIAMIKYRPYWTKYINYQHSYIHGCKISQ

SEQ ID NO: 159423 - protein, 353 aa, Zea Mays
MRRPPIVARVRRSLFLLLCCCCCLAAWSSPPAVRALPLCTDGRAPVPLNRTLGFCSAYGGGGSSSSCCDAAADAALRKRFNAMNISDAACAGVIKSVLCAECSPFSAELFNSSSKIQMVPLLCNYTSSSSSAQSKDSTRDYCKLVWETCKNVTIVNSPFQPPLQGSARLPSSSSKLTDVWQSEHDFCTSFGGSSGEQSLCFNGNGIFFNSTEPSPTPKGICLERISNGSYLNMASHPDGSNRVFLSSQAGKIWLASIPEQGSGGTLQYDEANPFLDITDEVYHDSQFGLMGVHVILMLTVIRQSSALIMVLSHVNTKLLFRSILQKSPHLTFLWQHLPIHLRLEGFLQWDCRI

SEQ ID NO: 159424 - protein, 595 aa, Zea Mays
MVPLLCNYTSSSSSAQSKDSTRDYCKLVWETCKNVTIVNSPFQPPLQGSARLPSSSSKLTDVWQSEHDFCTSFGGSSGEQSLCFNGNGIFFNSTEPSPTPKGICLERISNGSYLNMASHPDGSNRVFLSSQAGKIWLASIPEQGSGGTLQYDEANPFLDITDEVYHDSQFGLMGIAFHPKFATNGRFFVSYNCDRTQSPKCAGRCSCNSDANCDPSKLGTDNGAQPCQYQVVVSEYSTKISSPNVSMATSANPSEVRRIFTMGLPYIAHHGGQILFGPTDGYLYLMMGDGGSEGDPFNFSQNKKSLLGKIMRLDVDSTQGQSQTTNQSLWGNYSIPKDNPFADDSDFQPEIWALGFSNPWRCSFDSERPSYFYCGDVGKDAYEEVDLVTKGGNYGWRVYEGPYIFHPQKSPGGNTSPESINAIFPVMGYDHSAVNKEIGSASITGGYVYRGSADPCLYGRYLYTDLYSSLMWTGTEAPEGSGNYTSAVKPVSCSKASPIGCESVAGSTDPLLGYVFSFGEDSRKDVFVLASKGVYRVVRPSLCGYTCPAERPATDNGTAPGPGGPSSGAPAATRLGRSVAAVAVALALIPCVLLL

SEQ ID NO: 159425 - protein, 159 aa, Zea Mays
MLKQVLNAEEEIRRRNMQASLRAAMPQPSENATDGSSVSRLAPRMTVDVNFGDVAGDSDAGSNQGTPGRPLHHFHSISPSTASFARSPFGSLQGHTPRSPATFSTASPSRFATNIHPGQPPALYSASLPGSNYVATSPSPAASGGSSSVFRDPRPPNST

SEQ ID NO: 159426 - protein, 419 aa, Zea Mays
METSGDIHKRIVQSPDSVNTLFPSCPRPITERGEAMKAAPIAKSRREPPSIPPNYVSLQQLLELRLKEKEEEEEKRQREEEAAAAMAAAVKREAALRAEEEAMAAAVKREAALKAETKGRSVSREAFCGAKDRQHGGQGHRWVAVVHRAPPTCGEVAAGKREWMVGGSRGKKGLDDVADSAPHPRGGRKYPRKGKRKGNKKGEPGNLAEAAPPTSNGGKVDIKSELKAMGKASVAPLDPAKAAVASSPGHLTCKGRKGKGAGNRSAETSRGDGPVKVKTAGPSLPRGVKSGNAGKPKPAAPRLADAGTGSDSPDGKAPAPSPAPAPALNPSTSPADGRSKSKSGGMLRKTMEAKPEGLVEGQRRQPVVEVQAVTGPNPRIARRSAQPWRPRGIRAAQPHGLVWVPKAAVAGPSSSGEDK

SEQ ID NO: 159427 - protein, 58 aa, Zea Mays
MDSPRNNEMLSMNFVLKELRLQYWSKLKPAPAVSGREASSDQQKMVWNGNTRIHISDD

SEQ ID NO: 159428 - protein, 71 aa, Zea Mays
MVPLRAAPPPAPPVGGSPTPPGMLKVAASGSTATPLRGGASVDDHLSAYCYFFSSMGLIHVAIRGCSAWVW

SEQ ID NO: 159429 - protein, 76 aa, Zea Mays
MVPLRAAPPPAPPVGGSPTPPGMLKVAASGSTATPLRGGASVDDHLSAYCYFFSSMGLIHVAIRGLDILGCSAWVW

SEQ ID NO: 159430 - protein, 62 aa, Zea Mays
MVYDDEFPELSTFKCVTRKESSKLESKNQDKLFDAYIMYGSAIQSTTHQIICEGQILSSQIC

SEQ ID NO: 159431 - protein, 56 aa, Zea Mays
MVYDDEFPELSTFKCVTRKESSKLESKNQDKLFDAYIMYGSAIQSTTHQIICEVIC

SEQ ID NO: 159432 - protein, 601 aa, Zea Mays
MAARMLIADPPRILRRQAPKPHAPTSPATPPAAKKPDLVERTADFAVIVSSRLPSPAPGGPPPVCSDDIELVPETPQFRVLRKLVDDASKFLNDKVTKAVITVPAYFNDSQRTATKDAGRIAGLEVLRIINEPTAASLAYGFEKKNNETILVFDLGGGTFDVSVLEVGDGVFEVLSTSGDTHLGGDDFDKRIVDWLAGNFKNDEGIDLLKDKQALQRLTEAAEKAKMELSSLTQTNMSLPFITATADGPKHIETTLTRAKFEELCSDLLDRLRTPVDNALRDAKLQFKDIDEVILVGGSTRIPAVQELVKKMTGKDPNVTVNPDEVVALGAAVQAGVLSGDVSDIVLLDVTPLSLGLETLGGVMTKIIPRNTTLPTSKSEVFSTAADGQTSVEINVLQGEREFVRDNKSIGSFRLDGIPPAPRGVPQIEVKFDIDANGILSVSAVDKGTGKKQDITITGASTLPKDEVERMVGEAEKFAKEDKEKRDAIDTKNQAESVIYQTEKQLKELGDKVPGDVKGKVESKLQELKDAVAGGSTQTMKDAMSALNQEVMQIGQALYSQQGAPGAGPGAADASSAGSAGTSEKPGDGGDVIDADFTDSK

SEQ ID NO: 159433 - protein, 564 aa, Zea Mays
MNEVDEESKQVSYLVIRDDNGNVKLDCPAIGKQFAAEEISAQVLRKLVDDASKFLNDKVTKAVITVPAYFNDSQRTATKDAGRIAGLEVLRIINEPTAASLAYGFEKKNNETILVFDLGGGTFDVSVLEVGDGVFEVLSTSGDTHLGGDDFDKRIVDWLAGNFKNDEGIDLLKDKQALQRLTEAAEKAKMELSSLTQTNMSLPFITATADGPKHIETTLTRAKFEELCSDLLDRLRTPVDNALRDAKLQFKDIDEVILVGGSTRIPAVQELVKKMTGKDPNVTVNPDEVVALGAAVQAGVLSGDVSDIVLLDVTPLSLGLETLGGVMTKIIPRNTTLPTSKSEVFSTAADGQTSVEINVLQGEREFVRDNKSIGSFRLDGIPPAPRGVPQIEVKFDIDANGILSVSAVDKGTGKKQDITITGASTLPKDEVERMVGEAEKFAKEDKEKRDAIDTKNQAESVIYQTEKQLKELGDKVPGDVKGKVESKLQELKDAVAGGSTQTMKDAMSALNQEVMQIGQALYSQQGAPGAGPGAADASSAGSAGTSEKPGDGGDVIDADFTDSK

SEQ ID NO: 159434 - protein, 228 aa, Zea Mays
MAKTTQPTAGMRDPLLPTSTAASPPPYLDPHPADSYTYTVFLVPVRLRRGLCRGGRCIVPCLTVLFLLALAGFLLWPADPDISLARLHLAHVSVVARPAVAVTISATLKVRVRNPDLFALDYTRLDVAIGYRGAGLGRVTSGGGRVRARAVSYVDANLQLDGIRVVEDAMYLLEDLAQGSVPFDTIAEVEGHLHFLFLSIPVKGRISCVMHINPHNQTIVHQDCYPEL

SEQ ID NO: 159435 - protein, 239 aa, Zea Mays
MSSMESRPGRTNLVEPIGHGAALPSGGQAVQPWWTSSGAVLGAVSPAVVAVAPGSGTGISLSSSPAGGSGGGGAAKGAASDESSEDSRRSGEPKDGSASQEKNHATSQIPALAPEYLAPYSQLELNQSIAHFQLPGLTQSRMPLPLEVSEEPVYVNAKQYHGILRRRQSRAKAELEKKVVKARKPYLHESRHQHAMRRARGNGGRFLNTKKSDSGAPNGENAEHLHVPPDLLQLRQNEA

SEQ ID NO: 159436 - protein, 82 aa, Zea Mays
MSVIPSANVTSGVKEDRMMMTGMHTVSDIFCVGCGSIVGWKYSQRYKEGKFILERYKVSGPDGSQYWIPQDPHLGGSDADDI

SEQ ID NO: 159437 - protein, 127 aa, Zea Mays
MAAATTPEENAAAAAAVDAITETTNRFTVNTDAAGAGPLKLDDVDGNVYSCKRCGTLLAVADDIVSKSFHCKNGKAYLFDNVRLHMRGARNTRKENLFSRGTSCLEQNEDLTAECYTRCSVAGWKRD

SEQ ID NO: 159438 - protein, 399 aa, Zea Mays
MPKHYRPAGKKKEGNAAKYITRTKAVNYLQVSLAIFRKLCILKGVFPRQPKKKVEGNHKTYYHTKDIAFLAHDPLIEKFREIKVHRRKVKKAVAKKNRDLADRLLNRPPTYKLDRLVLERYPTFVDALRDLDDCLTMVHLFAALPAVDGERVEVKRIHNCRRLSHECLTFISVKGIYYQAEVQGQKITWLTPHALQQVLTDDVDFNVMLSFLEFYETLLGFVNFKIYHSINVNYPPILDPRLEALAVELYALCRYMSAGSRRMIGNSQTDEVMEDKDEKSKAEEVIEEEKVVKNKASSKADESEFRLAQLQHQLPTNEPGALMNLVEESTADDADDDDTKDCKGLFKNLKFYLSREVPRESLLFIIPAFGGTVSWEGEGAPFKEIDEDITHQLKTCPTH

SEQ ID NO: 159439 - protein, 407 aa, Zea Mays
MPKHYRPAGKKKEGNAAKYITRTKAVNYLQVSLAIFRKLCILKGVFPRQPKKKVEGNHKTYYHTKDIAFLAHDPLIEKFREIKVHRRKVKKAVAKKNRDLADRLLNRPPTYKLDRLVLERYPTFVDALRDLDDCLTMVHLFAALPAVDGERVEVKRIHNCRRLSHECLTFISVKGIYYQAEVQGQKITWLTPHALQQVLTDDVDFNVMLSFLEFYETLLGFVNFKIYHSINVNYPPILDPRLEALAVELYALCRYMSAGSRRMIGNSQTDEVMEDKDEKSKAEEVIEEEKVVKNKASSKADESEFRLAQLQHQLPTNEPGALMNLVEESTADDADDDDTKDCKGLFKNLKFYLSREVPRESLLFIIPAFGGTVSWEGEGAPFKEIDEDITHQVDSICNNLLHQSLTI

SEQ ID NO: 159440 - protein, 271 aa, Zea Mays
MVHLFAALPAVDGERVEVKRIHNCRRLSHECLTFISVKGIYYQAEVQGQKITWLTPHALQQVLTDDVDFNVMLSFLEFYETLLGFVNFKIYHSINVNYPPILDPRLEALAVELYALCRYMSAGSRRMIGNSQTDEVMEDKDEKSKAEEVIEEEKVVKNKASSKADESEFRLAQLQHQLPTNEPGALMNLVEESTADDADDDDTKDCKGLFKNLKFYLSREVPRESLLFIIPAFGGTVSWEGEGAPFKEIDEDITHQVDSICNNLLHQSLTI

SEQ ID NO: 159441 - protein, 272 aa, Zea Mays
MVHLFAALPAVDGERVEVKRIHNCRSGYLLFSYHMMNHECLTFISVKGIYYQAEVQGQKITWLTPHALQQVLTDDVDFNVMLSFLEFYETLLGFVNFKIYHSINVNYPPILDPRLEALAVELYALCRYMSAGSRRMIGNSQTDEVMEDKDEKSKAEEVIEEEKVVKNKASSKADESEFRLAQLQHQLPTNEPGALMNLVEESTADDADDDDTKDCKGLFKNLKFYLSREVPRESLLFIIPAFGGTVSWEGEGAPFKEIDEDITHQLKTCPTH

SEQ ID NO: 159442 - protein, 236 aa, Zea Mays
MVHLFAALPAVDGERVEVKRIHNCRSGYLLFSYHMMNHECLTFISVKGIYYQAEVQGQKITWLTPHALQQVLTDDVDFNVMLSFLEFYETLLGFVNFKIYHSINVNYPPILDPRLEALAVELYALCRYMSAGSRRMIGNSQTDEVMEDKDEKSKAEEVIEEEKVVKNKASSKADESEFRLAQLQHQLPTNEPGALMNLVEESTADDADDDDTKDCKGLFKNLKFYLSREVGSPCYL

SEQ ID NO: 159443 - protein, 483 aa, Zea Mays
MVHLFAALPAVDGERVEVKRIHNCRRLSHEWQAYISRTHSLRKTFISVKGIYYQAEVQGQKITWLTPHALQQVLTDDVDFNVMLSFLEFYETLLGFVNFKLYHSINVNYPPILDPRLEALAAELYALCRYMSAGSRRMIGNSQTDEVMEDKDEKSKAEEVIKEEKVVKNKASSKADESELRLAQLQHQLPTNEPGALMNLVEESTADDADDDDTKDCKGLFKNLKFYLSREVPRESLLFIIPAFGGTVSWEGEGAPFKEIDEDITHQIVDRPTQSHVFLSRDYVQPQWVFDCVNARIILPTEGYLVGRVPPPHLSPFVDNDAEGYMPEYAETIKRLQAAARNEVLPLPGIGDEDLDNSLVAAMMDRTASNEAAEKKRKLEMLEKQYIDELKKEIDGVAFSSLSNKEADKSPNAKDDTQSDREEDASKQEEDDDDDIGTALMSRKQRGLYKAMKMGKEKKKEKVELLKKRKKNADSGASSKKRH

SEQ ID NO: 159444 - protein, 617 aa, Zea Mays
MPKHYRPAKKEGNAAKYITRTKAVNYLQVSLAIFRKLCILKGVFPRQPKKKVEGNHKTYYHTKDIAFLAHDPLIEKFREIKVHRRKVKKAVAKKNRDLADRLLNRPPTYKLDRLVLERYPTFVDALRDLDDCLTMVHLFAALPAVDGERVEVKRIHNCRRLSHEWQAYISRTHSLRKTFISVKGIYYQAEVQGQKITWLTPHALQQVLTDDVDFNVMLSFLEFYETLLGFVNFKLYHSINVNYPPILDPRLEALAAELYALCRYMSAGSRRMIGNSQTDEVMEDKDEKSKAEEVIKEEKVVKNKASSKADESELRLAQLQHQLPTNEPGALMNLVEESTADDADDDDTKDCKGLFKNLKFYLSREVPRESLLFIIPAFGGTVSWEGEGAPFKEIDEDITHQIVDRPTQSHVFLSRDYVQPQWVFDCVNARIILPTEGYLVGRVPPPHLSPFVDNDAEGYMPEYAETIKRLQAAARNEVLPLPGIGDEDLDNSLVAAMMDRTASNEAAEKKRKLEMLEKQYIDELKKEIDGVAFSSLSNKEADKSPNAKDDTQSDREEDASKQEEDDDDDIGTALMSRKQRGLYKAMKMGKEKKKEKVELLKKRKKNADSGASSKKRH

SEQ ID NO: 159445 - protein, 617 aa, Zea Mays
MPKHYRPAGKKKEGNAAKYITRTKAVNYLQVSLAIFRKLCILKGVFPRQPKKKVEGNHKTYYHTKDIAFLAHDPLIEKFREIKVHRRKVKKAVAKKNRDLADRLLNRPPTYKLDRLVLERYPTFVDALRDLDDCLTMVHLFAALPAVDGERVEVKRIHNCRRLSHEWQAYISRTHSLRKTFISVKGIYYQAEVQGQKITWLTPHALQQVLTDDVDFNVMLSFLEFYETLLGFVNFKLYHSINVNYPPILDPRLEALAAELYALCRYMSAGSRRMIGNSQTDEVMEDKDEKSKAEEVIKEEKVVKNKASSKADESELRLAQLQHQLPTNEPGALMNLVEESTADDADDDDTKDCKGLFKNLKFYLSREVPRESLLFIIPAFGGTVSWEGEGAPFKEIDEDITHQIVDRPTQSHVFLSRDYVQPQWVFDCVNARIILPTEGYLVGRVPPPHLSPFVDNDAEGYMPEYAETIKRLQAAARNEVLPLPGIGDEDLDNSLVAAMMDRTASNEAAEKKRKMLEKQYIDELKKEIDGVAFSSLSNKEADKSPNAKDDTQSDREEDASKQEEDDDDDIGTALMSRKQRGLYKAMKMGKEKKKEKVELLKKRKKNADSGASSKKRH

SEQ ID NO: 159446 - protein, 158 aa, Zea Mays
MPEYAETIKRLQAAARNEVLPLPGIGDEDLDNSLVAAMMDRTASNEAAEKKRKLEMLEKQYIDELKKEIDGVAFSSLSNKEADKSPNAKDDTQSDREEDASKQEEDDDDDIGTALMSRKQRGLYKAMKMGKEKKKEKVELLKKRKKNADSGASSKKRH

SEQ ID NO: 159447 - protein, 722 aa, Zea Mays
MAMKVSQANQLLTRVPYLQTYLPSQMPAALKPYRDDELRNLRGDDQQGPYQEHDRVYRYDVYNDLGEPDGGNPRPILGGSADHPYPRRCRTGRKPTKTDPNSESRLSLVEQIYVPRDERFGHLKMSDFLGYSIKAITQGIIPAVRTYVDTTPGEFDSFQDIINLYEGGIKLPKIQALEDMRKLFPLQLVKDLLPAGGDYLLKLPIPQIIQEDKNAWRTDEEFAREVLAGVNPMVITRLTEFPPKSTLDPSKYGDHTSTITAEHIEKNLEGLTVQQALDGNRLYILDHHDRFMPFLIDVNNLEGNFIYATRTLFFLRGDGRLAPLAIELSEPYIDGDLTVAKSKVYTPASSGVEAWVWQLAKAYVAVNDSGWHQLVSHWLNTHAVMEPFVIATNRQLSVTHPVHKLLSSHFRDTMTINALARQTLINGGGIFEMTVFPGKYALGMSSVVYKSWNFTEQGLPADLVKRGVAVADPSSPYKVRLLIEDYPYASDGLAIWHAIEQWVGEYLAIYYPDDGALRGDEELQAWWKEVREVGHGDHKDAPWWPKMQAVSELASACTTIIWIASALHAAVNFGQYPYAGYLPNRPTVSRRRMPEPGSKEYEELERDPERGFIHTITSQIQTIIGISLIEILSKHSSDEVYLGQRDTPEWTSDARALAAFKRFSDALVKIEGKVVGENRDPQLRNRNGPAEFPYMLLYPNTSDHSGAAAGLTAKGIPNSISI

SEQ ID NO: 159448 - protein, 460 aa, Zea Mays
MEGLSVQNALKKNRLFILDHHDHFMPYLNKINELEGNFIYASRTLLFLKDDGTLKPLAVELSLPHPDGQQHGAVSKVYTPAHSGAEGHVWQLAKAYACVNDSAWHQLISHWLNTHAVIEPFVIATNRQLSVVHPVHKLLSPHYRDTLNINALARQTLINADGIFERTVFPAKYALGMSSDVYKSWNFNEQALPADLVKRGVAVPDQSSPYGVRLLIKDYPYAVDGLVIWWAIERWVKEYLDVYYPNDGELQRDVELQAWWKEVREEAHGDLKDRDWWPRMDAVQRLARACTTVIWVASALHAAVNFGQYPYAGYLPNRPTVSRRPMPEPGSDDYKKLEAGQKEADAVFIRTITSQFQTILGISLIEILSKHSSDEVYLGQRDEPERWTSDARALDAFRRFGSRLVEIEKRIRTMNDSPTLKNRKGPVEMPYMLLYPNTSDVTGEKGEGLTAMGIPNSISI

SEQ ID NO: 159449 - protein, 266 aa, Zea Mays
MDGVRCMESPAAVEAGSRFGYDLVLLVLLFNLSAILCQYLSSCIGIVTKKNLAEICHQEYDQKICVVLGLQAGLSLLTSEFTMIAGIVVGFNLVFESNNPITVVCFTSVVVNLLPYTLSLLDKRKAGMFNAYASGFTLVCFVLGLLVSHPKTPVNTNVMFPKLSGESAYSLMVLLGTNIIVHNFYTHSSVVQVQRRFQGHTLGTLFHDHLFSVLFAFSGIFLVNYILMSSAVDESKNTMAINFQDARQLMNQVHVIVLFLSVKSFV

SEQ ID NO: 159450 - protein, 438 aa, Zea Mays
MDGVRCMESPAAGDAPHSSFRTLGPTLLVSMGYLDFGKWLVAVEAGSRFGYDLVLLVLLFNLSAILCQYLSSCIGIVTKKNLAEICHQEYDQKICVVLGLQAGLSLLTSEFTMDKRKAGMFNAYASGFTLVCFVLGLLVSHPKTPVNTNVMFPKLSGESAYSLMVLLGTNIIVHNFYTHSSVVQVQRRFQGHTLGTLFHDHLFSVLFAFSGIFLVNYILMSSAVDESKNTMAINFQDARQLMNQVFTSPVAPIVLLVVLLFSGHIVSMTCIIGSDVISEDLFGIKLPLFVHHLLPKVFAMITTIYHAKVVGFEGLYQLLMVCPIIQAMLLPSSVIPVFRISSSRSLMGRYRISRCVEILCFLAFLLTLFTNIIFVAEVLFGDSTWTNDLKGNTENPILLPYIVVVLISCGSIGFALFLAVTPLKSACNEAERALSVHS

SEQ ID NO: 159451 - protein, 285 aa, Zea Mays
MDGVRCMESPAAGDAPHSSFRTLGPTLLVSMGYLDFGKWLVAVEAGSRFGYDLVLLVLLFNLSAILCQYLSSCIGIVTKKNLAEICHQEYDQKICVVLGLQAGLSLLTSEFTMIAGIVVGFNLVFESNNPITVVCFTSVVVNLLPYTLSLLDKRKAGMFNAYASGFTLVCFVLGLLVSHPKTPVNTNVMFPKLSGESAYSLMVLLGTNIIVHNFYTHSSVVQVQRRFQGHTLGTLFHDHLFSVLFAFSGIFLVNYILMSSAVDESKNTMAINFQDARQLMNQANQ

SEQ ID NO: 159452 - protein, 319 aa, Zea Mays
MFNAYASGFTLVCFVLGLLVSHPKTPVNTNVMFPKLSGESAYSLMVLLGTNIIVHNFYTHSSVVQVQRRFQGHTLGTLFHDHLFSVLFAFSGIFLVNYILMSSAVDESKNTMAINFQDARQLMNQVFTSPVAPIVLLVVLLFSGHIVSMTCIIGSDVISEDLFGIKLPLFVHHLLPKVFAMITTIYHAKVVGFEGLYQLLMVCPIIQAMLLPSSVIPVFRISSSRSLMGRYRISRCVEILCFLAFLLTLFTNIIFVAEVLFGDSTWTNDLKGNTENPILLPYIVVVLISCGSIGFALFLAVTPLKSACNEAERALSVHS

SEQ ID NO: 159453 - protein, 1021 aa, Zea Mays
MVPKRTHDPRSGDESTADESSLEASNFEKNTKPGKTGLGSHCEPTPVVNAAKLLSPEARQYVIDCGFGAFLEMKATKIFSLETIIVILNKCDVSSSDESFTIVLSDEHQLKVTTEVVHSIFGLPTGEISIDQKNFTHTEFLKFWKILKAGGHVTESTTRCRGKPVSTKRITLQSLLNYMEAEADKEKQAFAFFTILLSKLLLTTTSNVPTKGHVALCSYIENTQKYDWCKFVCQDLKNKISSWKQKPTSKIPGCLLLLLICSFRIVVPEPKLEEASAGPLIKHYDDNRILELLKAVKDTIKFKEESSRAIAPVPLCIGSHFALQKDRFNGLQPEGSNSQRRKQVLRHKVNLLHGHIPAKIIYTSSEHLIANLKVQRNAKPQPPKEKKPASKRQKGEGQNLGIQIHVEDLLKGYEVDENQRGILLKVIEDEVGSSEIKLMEKLKKIVANRSFFIFYDEIKNRAQIKDKERIQQMEKNLVVDIEDVTISEAVFVKTFKPYGRLHTSIIETLIRIWNKSWDDRIMLSLLAVEQILGKRKDYLERELKDYDKEKKHTIFVPFIIDQHWSLVVVEPGREVITVLDSFYELRLCEKRHENLMAQLQKNLYPFIGLENATHRFITPPVVQNQNNSHDCGFHMLLYIKRYEDQNYHNISEDEVIMCRIETAMLLLNNEDNKCRDKFTESHAITKEQKKEKVRDKVDDKKGDRKDESSDDDYEDKSEEEEEEEEEGTDNWTQNLGNKELRQQLLRKIVDNKDYKSVQFMSPKSDTARRDTDTWNLTGSDIAKSFVDKTLCEDTVATFYVQCLMYDEGQLGADEKTVFSRIFLEPKVAELLLSKEYKLEVVADYMKGQYNAQQICKAMQIFVPICQENHWTLYVVNKKYGQIDILDSSPTAVNDKMKYHQSIAAKVRQRLNAVLLRISKEEHIDFIDFSKWGLPLIPKIRIAHQDRNSMDCGFFVMFFMRHYNPDTHLLEGHKLADDQVEGDQLEATKDIRSKIFWYLLHHKLNASADKLPPGIINRKSET

SEQ ID NO: 159454 - protein, 887 aa, Zea Mays
MDPQSDAGAAVVLGADPAALTALLADLTSPANEARSRAEQQFHAFRRSHPDALALSLAHLLLSPAHPSAPIAAVLLRRLIAPSSQSFVYPALSPATQSSLRALLLSAASAPALPRSVSRKLSDAVAELASFLLPANAWPDLLSFLYKSIDSTSSPPGLQESALNILARLASHLAASFPNLHGLLHAALSHPSSADVRVAGLNAAISLIQSLPSAAARDQFQDLLPAMMRALAESLNCGNEGSAQEALEMMIELAGAEPRFLRRQLPDVVASMLQIAEAPGLEDGTRHLAVEFVVTLAEARERAPGMMRKLPRYVGRLFAVLMSMLLDVQDEPAWHAAVSEEEDAGETGSYVFAQECLDRLSIAVGGNTILSVAAELLPSFFSSEDWKRRHAALVTIAQIAEGSAKMMIKNLEQVVGMVLNSFQDPHPRVRWAAINAIGQLSTDLGPELQNQLHHVVLPSLASAMDDVQNPRVQAHAASAILNFSENCRPDILTPYLDVIVGKLLLLLQTGNQMVQEAALTALASAADSSQEHFQKYYDAVMPYLKAILMNATDKSNRMLRAKSMECISLVGMAVGKQKFKDDAKQVMEVLMTLQGSQMEADDPITSYMLQAWARLCKCLGQDFLPYMSVVMPPLLQSAQLKPDVSVTSAGPEDENGESDDEGVETITLGDKRIGIRTSLLEEKATACNMLCCYADELKEGFFPWIDQVTTTLVPLIKFYFHEEVRKAAISAMPELLRSAKLAIEKGQAQGRDKSYLKQLSDYIVPALVEAMHKEPEPQICASILESLNESIQLSGTLLDQNQVRSAVEGVKEVIVASTNRRIERTERARAEDFDSEEEELLREENEQEDEIFDQIGDCLGTLVKTFKTSFIPFFDELSMYLTPMLVL

SEQ ID NO: 159455 - protein, 835 aa, Zea Mays
MDPQSDAGAAVVLGADPAALTALLADLTSPANEARSRAEQQFHAFRRSHPDALALSLAHLLLSPAHPSAPIAAVLLRRLIAPSSQSFVYPALSPATQSSLRALLLSAASAPALPRSVSRKLSDAVAELASFLLPANAWPDLLSFLYKSIDSTSSPPGLQESALNILARLASHLAASFPNLHGLLHAALSHPSSADVRVAGLNAAISLIQSLPSAAARDQFQDLLPAMMRALAESLNCGNEGSAQEALEMMIELAGAEPRFLRRQLPDVVASMLQIAEAPGLEDGTRHLAVEFVVTLAEARERAPGMMRKLPRYVGRLFAVLMSMLLDVQDEPAWHAAVSEEEDAGETGSYVFAQECLDRLSIAVGGNTILSVAAELLPSFFSSEDWKRRHAALVTIAQIAEGSAKMMIKNLEQVVGMVLNSFQDPHPRVRWAAINAIGQLSTDLGPELQNQLHHVVLPSLASAMDDVQNPRVQAHAASAILNFSENCRPDILTPYLDVIVGKLLLLLQTGNQMVQEAALTALASAADSSQEHFQKYYDAVMPYLKAILMNATDKSNRMLRAKSMECISLVGMAVGKQKFKDDAKQVMEVLMTLQGSQMEADDPITSYMLQAWARLCKCLGQDFLPYMSVVMPPLLQSAQLKPDVSVTSAGPEDENGESDDEGVETITLGDKRIGIRTSLLEEKATACNMLCCYADELKEGFFPWIDQVTTTLVPLIKFYFHEEVRKAAISAMPELLRSAKLAIEKGQAQGRDKSYLKQLSDYIVPALVEAMHKEPEPQICASILESLNESIQLSGTLLDQNQKGQGLRTLILKKRSYSEKKTNRKMKSLTKLVIV

SEQ ID NO: 159456 - protein, 342 aa, Zea Mays
MSVVMPPLLQSAQLKPDVSVTSAGPEDENGESDDEGVETITLGDKRIGIRTSLLEEKATACNMLCCYADELKEGFFPWIDQVTTTLVPLIKFYFHEEVRKAAISAMPELLRSAKLAIEKGQAQGRDKSYLKQLSDYIVPALVEAMHKEPEPQICASILESLNESIQLSGTLLDQNQVRSAVEGVKEVIVASTNRRIERTERARAEDFDSEEEELLREENEQEDEIFDQIGDCLGTLVKTFKTSFIPFFDELSMYLTPMLGKNKSPEERRIAICIFDDVAEHCREAAVRYYDTYLPSLLEACMSENPDVRQAAVYGIGICAECGGSAFRPHTGGMRPYPDYTM

SEQ ID NO: 159457 - protein, 523 aa, Zea Mays
MVQEAALTALASAADSSQEHFQKYYDAVMPYLKAILMNATDKSNRMLRAKSMECISLVGMAVGKQKFKDDAKQVMEVLMTLQGSQMEADDPITSYMLQAWARLCKCLGQDFLPYMSVVMPPLLQSAQLKPDVSVTSAGPEDENGESDDEGVETITLGDKRIGIRTSLLEEKATACNMLCCYADELKEGFFPWIDQVTTTLVPLIKFYFHEEVRKAAISAMPELLRSAKLAIEKGQAQGRDKSYLKQLSDYIVPALVEAMHKEPEPQICASILESLNESIQLSGTLLDQNQVRSAVEGVKEVIVASTNRRIERTERARAEDFDSEEEELLREENEQEDEIFDQIGDCLGTLVKTFKTSFIPFFDELSMYLTPMLGKNKSPEERRIAICIFDDVAEHCREAAVRYYDTYLPSLLEACMSENPDVRQAAVYGIGICAECGGSAFRPHTGEALSRLYNVIKHPNALDLDNAMAYDNAVSALGKICRFHRDIIDVSQVIPAWLSCLPIKNDLIEAKLVHEQLCVMLEQ

SEQ ID NO: 159458 - protein, 119 aa, Zea Mays
MSGRGAIQWPSGASYDGDLCGGFIDGTGSFKGVDGSVYKGSWRMNRKHGMGTMVYANDDTYEGLWNEGLPDGFGKYTWVDGNIYIGLWKSGKMNGRGVMQWTNGDTLDCNWLNGLAHGK

SEQ ID NO: 159459 - protein, 189 aa, Zea Mays
MFLESQSIIDYSMLLGIHFRAPHHLKTSSSHQSSLERCGIPDSDLLQYEEKSSWKGFLLVAHEPGATVGGSHIRGSMVRASEAGYEEVDLVLPGTGRFRVQLGVNMPARARKVHEDTNTELENPDTIEEYDVVLYLGIIDILQEYNMSKRVEHAVKSLKFDPLSISAVDPDLYSKRFVKFLESVFPEQD

SEQ ID NO: 159460 - protein, 97 aa, Zea Mays
MFLESQSIIDYSMLLGIHFRAPHHLKTSSSHQSSLERCGIPDSDLLQYEEKSSWKGFLLVAHEPGATVGGSHIRGSMVRASEAGYEEVDLVLPGTGR

SEQ ID NO: 159461 - protein, 445 aa, Zea Mays
MAAAAAAAEQGVDAARKEEEEEQVVNPWEVSAGKGGIDYDKLVDQFGCQRIDDALVDRIARLTARPPHCFLRRGLFFAHRDLNEILDLYENGQKFYLYTGRGPSSEALHLGHLIPFMFTKYLQEAFKVPLVIQLTDDEKYLWKNLTIQESKRLARENAKDIIACGFDIERTFIFSDFSFVGGAFYENMMQVARCVTMNKAIGIFGFNLEDHIGKVSFPPVQAVPSFPSSFPHLFAGKDQLRCLIPCAIDQADLVMEAPTWTGERDKQGGPFPCKCGDDVSNPRPGDSDPYFRMTRDVAPRIGYQKPSLIESRFFPALQGENTKMSASDANSAIYVTDSAKEIKTKVNKYAFSGGQDSIELHRKLGANLDVDVPIKYLNFFLEDDDELAHIKKEYKEGRMLTGEVKQRLIAVLSEIVARHQRARAQVTEEMVDAFMAVRPLPNMFG

SEQ ID NO: 159462 - protein, 419 aa, Zea Mays
MAAAAAAAEQGVDAARKEEEEEQVVNPWEVSAGKGGIDYDKLVDQFGCQRIDDALVDRIARLTARPPHCFLRRGLFFAHRDLNEILDLYENGQKFYLYTGRGPSSEALHLGHLIPFMFTKYLQEAFKVPLVIQLTDDEKYLWKNLTIQESKRLARENAKDIIACGFDIERTFIFSDFSFVGGAFYENMMQVARCVTMNKAIGIFGFNLEDHIGKVSFPPVQAVPSFPSSFPHLFAGKDQLRCLIPCAIDQDPYFRMTRDVAPRIGYQKPSLIESRFFPALQGENTKMSASDANSAIYVTDSAKEIKTKVNKYAFSGGQDSIELHRKLGANLDFVNGWFFVAMKVDVPIKYLNFFLEDDDELAHIKKEYKEGRMLTGEVKQRLIAVLSEIVARHQRARAQVTEEMVDAFMAVRPLPNMFG

SEQ ID NO: 159463 - protein, 271 aa, Zea Mays
MLKALMPVATFIMAVFCGTDKLRWDLFLNMVLVSVGVVVSSYGEIHFNVIGTLYQVTGIFAEALRLVLTQVLLQKKGLTLNPITSLYYIAPCSFIFLFIPWYLLEKPEMDVTQIQFNYSIFFLNALSAFALNISIFLVIGRTGAVTIRVAGVLKDWILIALSTIIFPESVITSLNIIGYAVALSGVVLYNYLKMKDVRANQLPADNNSDRATKDKKSSSMFRPDNSMDNSDGTVAGGLASEAAAVDEEAPLIPSARLSYVTRTQTGSSSNR

SEQ ID NO: 159464 - protein, 111 aa, Zea Mays
MLNGTTICHCSSVAVRESNHIMLPEATNNTAAAYYSTVLVQKQEYLIYSHSFENVCRNSSFSTKFSSQILLQFLFFWRRPGHCSPCLMSKLMTWTRSWLPNARSTRSLRVK

SEQ ID NO: 159465 - protein, 87 aa, Zea Mays
MLNGTTICHCSSVAVRESNHIMLPEATNNTAAAYYSTVLVQKQEYLIYSHSFENVCRNSSFSTKFSTKMFESDTASIPLFLEEARPL

SEQ ID NO: 159466 - protein, 129 aa, Zea Mays
MLNGTTICHCSSVAVRESNHIMLPEATNNTAAAYYSTVLVQKQEYLIYSHSFENAIVRHAPTRPASGEPRHVDSASRNGLLIPLRLPSSVAATCLSHTSFSAASLSWAPQSELQKLLVDTVLCLPVCKR

SEQ ID NO: 159467 - protein, 372 aa, Zea Mays
MAMPFARRDIEAAGAGASSDDSPAAKKGKPELAGARPALTRSEAFAFAAVLALFTAGIFCVFLTAPRGEFGQILRLPRSLADVRLLKDNLAVYARDYQTNFILGYCSIYIFMQTFMIPGTIFMSLLAGALFGVIKGGILVVFTATAGGSSCYFVSKLIGRPLVSWLWPEKLRYFQSEIAKRKEKLLNYMLFLRITPTLPNTFINMASPIVDIPFHIFFAATLVGLIPASYITVKKGGIGHGGLRIECIRIGGVEIPNHKRVEYSLQYIHGIGRSRSRQILLDLNFDNKITKDLSEEEVITLRKEVGKYMIEGDLKRFNRVAIERLKEIRCYKGIRHKLGLPVRGQRTKNNCRTLKGKRASVAKKKSPASQDE

SEQ ID NO: 159468 - protein, 90 aa, Zea Mays
MATLSMVSVPIAPSSLSLSTRGRSSSASFPAKKRFNRVAIERLKEIRCYKGIRHKLGLPVRGQRTKNNCRTLKGKRASVAKKKSPASQDE

SEQ ID NO: 159469 - protein, 295 aa, Zea Mays
MLCLAGLLLKITRLPPQSHAKIPLELPPSPSASPCGGAGSRRAMAPAFSVSCAPGSSRPLAASPGPSVVVVASSQLPASSRSSERRRAPGLALAAAPGVGGRDGGGRWRAGISSFPFLPPFFTGNKGEKDAEKAMRLKEELLDAIAPLDRGAEATPEDKERVEQIVQQLEAVNQVKEPLKSDLLNGKWELLYTTSTSILQPQRPKYLRPFGKIYQSINADNLRAQNMETWPYFNQVTANLVPLNSRRVAVKFDYFKIFGLIPIKAPGSGKGELEITYLDEELSNAWALLIGFAKL

SEQ ID NO: 159470 - protein, 775 aa, Zea Mays
MENRDSFTRPPAPSYAHGTQTAKGVAVPTGGDTAATNLTSSSGLSSSLTLSPPHFLQQIHAAVKRQRPFGPMQSKLPRATRVLVSGGERANKIGANPSVSKDQERIVTQPQRGMLGPSMLPNVTPDQQKVDSTSKLGSSAPDELMLTAPSMLKSTTDTCAQRVGQQKNKANLLMDTEKSAFDALSSQITSCNALMGESFKKGQLDSVVNPQLTSQRDNFPANQGAQNDHQKNHQELQTVDIAADMDIEYDASNLSRRGIQEARNQNHGKHMIPFSAIGSSVTAMSLHSGPTVQSSQTPQVGGYTSPVQIPESAVESSKGALGHGAQKEHAGATGVGDWNPHNQQVQNLGNGATDKAVSSIGRLRSEGLPANDQSTSARDGGGSRPNKGEKERRKKNYDPNVFFKVNGKLYQKLGKIGSGGSSEVHKVISSDCIIYALKKIKLRGRDYPTAYGFCQEIEYLNKLKGRSNIIQMIDYEVTDKSLLLESTVSPRDGRIKDDHYIYMVLEYGEIDLANMVAQKWKERNNSTMKIDENWLRFYWQGRPRAMVRAVSLSHQVAALKQRSICGGRLQILEAVSTIHEERIVHSDLKPANFMLVRGSLKLIDFGIAKAIMNGTTNIQRDAQVGTLNYMSPEAFMCNDTDSDGNIIKCGLPSDIWSLGCILYQMVYGKTPFADYKTFWDKYKGVTDRNHKIMYEPVDNPWLIDLMQRCLAWDRNERWRTPQLLKHPFLNPPVPRDLPPSDDDPYRLLIERIRVHWDNPMVQKLRSLIEELDGDQ

SEQ ID NO: 159471 - protein, 375 aa, Zea Mays
MENRDSFTRPPAPSYAHGTQTAKGVAVPTGGDTAATNLTSSSGLSSSLTLSPPHFLQQIHAAVKRQRPFGPMQSKLPRATRVLVSGGERANKIGANPSVSKDQERIVTQPQRGMLGPSMLPNVTPDQQKVDSTSKLGSSAPDELMLTAPSMLKSTTDTCAQRVGQQKNKANLLMDTEKSAFDALSSQITSCNALMGESFKKGQLDSVVNPQLTSQRDNFPANQGAQNDHQKNHQELQTVDIAADMDIEYDASNLSRRGIQEARNQNHGKHMIPFSAIGSSVTAMSLHSGPTVQSSQTPQVGGYTSPVQIPESAVESSKGALGHGAQKEHAGATGVGDWNPHNQQVQNLGMVVVPDQTRVRRSAVKRIMILMFSLR

SEQ ID NO: 159472 - protein, 712 aa, Zea Mays
MQLSSGRGLSSKLPRATRVLVSGGERANKIGANPSVSKDQERIVTQPQRGMLGPSMLPNVTPDQQKVDSTSKLGSSAPDELMLTAPSMLKSTTDTCAQRVGQQKNKANLLMDTEKSAFDALSSQITSCNALMGESFKKGQLDSVVNPQLTSQRDNFPANQGAQNDHQKNHQELQTVDIAADMDIEYDASNLSRRGIQEARNQNHGKHMIPFSAIGSSVTAMSLHSGPTVQSSQTPQVGGYTSPVQIPESAVESSKGALGHGAQKEHAGATGVGDWNPHNQQVQNLGNGATDKAVSSIGRLRSEGLPANDQSTSARDGGGSRPNKGEKERRKKNYDPNVFFKVNGKLYQKLGKIGSGGSSEVHKVISSDCIIYALKKIKLRGRDYPTAYGFCQEIEYLNKLKGRSNIIQMIDYEVTDKSLLLESTVSPRDGRIKDDHYIYMVLEYGEIDLANMVAQKWKERNNSTMKIDENWLRFYWQGRPRAMVRAVSLSHQVAALKQRSICGGRLQILEAVSTIHEERIVHSDLKPANFMLVRGSLKLIDFGIAKAIMNGTTNIQRDAQVGTLNYMSPEAFMCNDTDSDGNIIKCGLPSDIWSLGCILYQMVYGKTPFADYKTFWDKYKGVTDRNHKIMYEPVDNPWLIDLMQRCLAWDRNERWRTPQLLKHPFLNPPVPRDLPPSDDDPYRLLIERIRVHWDNPMVQKLRSLIEELDGDQ

SEQ ID NO: 159473 - protein, 782 aa, Zea Mays
MENRDSFTRPPAPSYAHGTQTAKGVAVPTGGDTAATNLTSSSGLSSSLTLSPPHFLQQIHAAVKRQRPFGPMQSKLPRATRVLVSGGERANKIGANPSVSKDQERIVTQPQRGMLGPSMLPNVTPDQQKVDSTSKLGSSAPDELMLTAPSMLKSTTDTCAQRVGQQKNKANLLMDTEKSAFDALSSQITSCNALMGESFKKGQLDSVVNPQLTSQSDNICITVDSRMDSMLSYLHSVSLTAGDNFPANQGAQNDHQKNHQELQTVDIAADMDIEYDASNLSRRGIQEARNQNHGKHMIPFSAIGSSVTAMSLHSGPTVQSSQTPQVGGYTSPVQIPESAVESSKGALGHGAQKEHAGATGVGDWNPHNQQVQNLGNGATDKAVSSIGRLRSEGLPANDQSTSARDGGGSRPNKGEKERRKKNYDPNVFFKVNGKLYQKLGKIGSGGSSEVHKVISSDCIIYALKKIKLRGRDYPTAYGFCQEIEYLNKLKGRSNIIQMIDYEVTDKSLLLESTVSPRDGRIKDDHYIYMVLEYGEIDLANMVAQKWKERNNSTMKIDENWLRFYWQQILEAVSTIHEERIVHSDLKPANFMLVRGSLKLIDFGIAKAIMNGTTNIQRDAQANCGSHCTEQVGTLNYMSPEAFMCNDTDSDGNIIKCGLPSDIWSLGCILYQMVYGKTPFADYKTFWDKYKGVTDRNHKIMYEPVDNPWLIDLMQRCLAWDRNERWRTPQLLKHPFLNPPVPRDLPPSDDDPYRLLIERIRVHWDNPMVQKLRSLIEELDGDQ

SEQ ID NO: 159474 - protein, 304 aa, Zea Mays
MIDYEVTDKSLLLESTVSPRDGRIKDDHYIYMVLEYGEIDLANMVAQKWKERNNSTMKIDENWLRFYWQGRPRAMVRAVSLSHQVAALKQRSICGGRLQILEAVSTIHEERIVHSDLKPANFMLVRGSLKLIDFGIAKAIMNGTTNIQRDAQVGTLNYMSPEAFMCNDTDSDGNIIKCGLPSDIWSLGCILYQMVYGKTPFADYKTFWDKYKGVTDRNHKIMYEPVDNPWLIDLMQRCLAWDRNERWRTPQLLKHPFLNPPVPRDLPPSDDDPYRLLIERIRVHWDNPMVQKLRSLIEELDGDQ

SEQ ID NO: 159475 - protein, 756 aa, Zea Mays
MENRDSFTRPPAPSYAHGTQTAKGVAVPTGGDTAATNLTSSSGLSSSLTLSPPHFLQQIHAAVKRQRPFGPMQSKLPRATRVLVSGGERANKIGANPSVSKDQERIVTQPQRGMLGPSMLPNVTPDQQKVDSTSKLGSSAPDELMLTAPSMLKSTTDTCAQRVGQQKNKANLLMDTEKSAFDALSSQITSCNALMGESFKKGQLDSVVNPQLTSQRDNFPANQGAQNDHQKNHQELQTVDIAADMDIEYDASNLSRRGIQEARNQNHGKHMIPFSAIGSSVTAMSLHSGPTVQSSQTPQVGGYTSPVQIPESAVESSKGALGHGAQKEHAGATGVGDWNPHNQQVQNLGNGATDKAVSSIGRLRSEGLPANDQSTSARDGGGSRPNKGEKERRKKNYDPNVFFKVNGKLYQKLGKIGSGGSSEVHKVISSDCIIYALKKIKLRGRDYPTAYGFCQEIEYLNKLKGRSNIIQMIDYEVTDKSLLLESTVSPRDGRIKDDHYIYMVLEYGEIDLANMVAQKWKERNNSTMKIDENWLRFYWQQILEAVSTIHEERIVHSDLKPANFMLVRGSLKLIDFGIAKAIMNGTTNIQRDAQANCGSHCTEQVGTLNYMSPEAFMCNDTDSDGNIIKCGLPSDIWSLGCILYQMVYGKTPFADYKTFWDKYKGVTDRNHKIMYEPVDNPWLIDLMQRCLAWDRNERWRTPQLLKHPFLNPPVPRDLPPSDDDPYRLLIERIRVHWDNPMVQKLRSLIEELDGDQ

SEQ ID NO: 159476 - protein, 655 aa, Zea Mays
MQLSSGRGLSSKLPRATRVLVSGGERANKIGANPSVSKDQERIVTQPQRGMLGPSMLPNVTPDQQKVDSTSKLGSSAPDELMLTAPSMLKSTTDTCAQRVGQQKNKANLLMDTEKSAFDALSSQITSCNALMGESFKKGQLDSVVNPQLTSQSDNICITVDSRMDSMLSYLHSVSLTAGDNFPANQGAQNDHQKNHQELQTVDIAADMDIEYDASNLSRRGIQEARNQNHGKHMIPFSAIGSSVTAMSLHSGPTVQSSQTPQVGGYTSPVQIPESAVESSKGALGHGAQKEHAGATGVGDWNPHNQQVQNLGNGATDKAVSSIGRLRSEGLPANDQSTSARDGGGSRPNKGEKERRKKNYDPNVFFKVNGKLYQKLGKIGSGGSSEVHKVISSDCIIYALKKIKLRGRDYPTAYGFCQEIEYLNKLKGRSNIIQMIDYEVTDKSLLLESTVSPRDGRIKDDHYIYMVLEYGEIDLANMVAQKWKERNNSTMKIDENWLRFYWQVGTLNYMSPEAFMCNDTDSDGNIIKCGLPSDIWSLGCILYQMVYGKTPFADYKTFWDKYKGVTDRNHKIMYEPVDNPWLIDLMQRCLAWDRNERWRTPQLLKHPFLNPPVPRDLPPSDDDPYRLLIERIRVHWDNPMVQKLRSLIEELDGDQ

SEQ ID NO: 159477 - protein, 692 aa, Zea Mays
MENRDSFTRPPAPSYAHGTQTAKGVAVPTGGDTAATNLTSSSGLSSSLTLSPPHFLQQIHAAVKRQRPFGPMQSKLPRATRVLVSGGERANKIGANPSVSKDQERIVTQPQRGMLGPSMLPNVTPDQQKVDSTSKLGSSAPDELMLTAPSMLKSTTDTCAQRVGQQKNKANLLMDTEKSAFDALSSQITSCNALMGESFKKGQLDSVVNPQLTSQRDNFPANQGAQNDHQKNHQELQTVDIAADMDIEYDASNLSRRGIQEARNQNHGKHMIPFSAIGSSVTAMSLHSGPTVQSSQTPQVGGYTSPVQIPESAVESSKGALGHGAQKEHAGATGVGDWNPHNQQVQNLGNGATDKAVSSIGRLRSEGLPANDQSTSARDGGGSRPNKGEKERRKKNYDPNVFFKVNGKLYQKLGKIGSGGSSEVHKVISSDCIIYALKKIKLRGRDYPTAYGFCQEIEYLNKLKGRSNIIQMIDYEVTDKSLLLESTVSPRDGRIKDDHYIYMVLEYGEIDLANMVAQKWKERNNSTMKIDENWLRFYWQVGTLNYMSPEAFMCNDTDSDGNIIKCGLPSDIWSLGCILYQMVYGKTPFADYKTFWDKYKGVTDRNHKIMYEPVDNPWLIDLMQRCLAWDRNERWRTPQLLKHPFLNPPVPRDLPPSDDDPYRLLIERIRVHWDNPMVQKLRSLIEELDGDQ

SEQ ID NO: 159478 - protein, 745 aa, Zea Mays
MHPFCCAPRWFALHDGVLSYYKIHGPDRIILSRETERGAKVIGDDSLRRLNRPSTSSSSHSNGHHHPRNPIGEIHLKVSTVRESRSDDRRFSIFSGTKTLHLRAETREDRAAWLEALRATKDMFPRMSSSEMVGPGDTAAAVAVSTERLRQRLQQEGVSEAAIADSEMIVRAEFEALHKQLVLSKQKHALLLETLRQLETEKVDLENTLVDESQRQSKEYGSASKPRHEKYSEGSASESDDYNEPQDPAEETDDDENLYFDTRDFLSSSSFKSSGSDFQRSEAGSDDEDDYPMDGIDPSMKSIGISYPYVRRRKKLPDPVEKEKGVSLWSMIKDNIGKDLTKVCLPVYFNEPLSSLQKCFEDLEYSYLIDRASEWGKRGNSLMRILSVAAFAVSGYASTDGRSCKPFNPLLGETYEADYPDKGLRFFSEKVSHHPMVVACHCEGTGWRFWADSNLKSKFWGRSIQLDPVGELTLEFDDGEVFQWSKVTTSIYNLILGKLYCDHYGTMRIQGNREYSCKLKFKEQSIIDRNPHQVQGVVQDRNGRTVATLFGKWDESMHYVMGDCFGKGKGTEQLSEAHLLWKRSKPPKFPTRYNLTQFAITLNELTPGLKEKLPPTDSRLRPDQRCLENGEYERANAEKLRLEQRQRQARKMQESGWKPRWFAKDKATDTYRYVGGYWESREKSSWEGCPDIFGQVPNDLMGFQTPPASVAAPGDGSGQDDTTHSWVNNLFSTHSPAGGGGDGYE

SEQ ID NO: 159479 - protein, 820 aa, Zea Mays
MHPFCCAPLVPVSPVASAAAASSAVAGAPAVMPPPQPPPPPPPPPRSNPASGGERRARAAGVSGGGGGGSSPPEGVKLNEIVGGGISGILYKWVNYGRGWRPRWFALHDGVLSYYKIHGPDRIILSRETERGAKVIGDDSLRRLNRPSTSSSSHSNGHHHPRNPIGEIHLKVSTVRESRSDDRRFSIFSGTKTLHLRAETREDRAAWLEALRATKDMFPRMSSSEMVGPGDTAAAVAVSTERLRQRLQQEGVSEAAIADSEMIVRAEFEALHKQLVLSKQKHALLLETLRQLETEKVDLENTLVDESQRQSKEYGSASKPRHEKYSEGSASESDDYNEPQDPAEETDDDENLYFDTRDFLSSSSFKSSGSDFQRSEAGSDDEDDYPMDGIDPSMKSIGISYPYVRRRKKLPDPVEKEKGVSLWSMIKDNIGKDLTKVCLPVYFNEPLSSLQKCFEDLEYSYLIDRASEWGKRGNSLMRILSVAAFAVSGYASTDGRSCKPFNPLLGETYEADYPDKGLRFFSEKVSHHPMVVACHCEGTGWRFWADSNLKSKFWGRSIQLDPVGELTLEFDDGEVFQWSKVTTSIYNLILGKLYCDHYGTMRIQGNREYSCKLKFKEQSIIDRNPHQVQGVVQDRNGRTVATLFGKWDESMHYVMGDCFGKGKGTEQLSEAHLLWKRSKPPKFPTRYNLTQFAITLNELTPGLKEKLPPTDSRLRPDQRCLENGEYERANAEKLRLEQRQRQCSFLSSCIMLWSSNMIMAITPQARKMQESGWKPRWFAKDKATDTYRYVGGYWESREKSSWEGCPDIFGQVPNDLMVTD

SEQ ID NO: 159480 - protein, 453 aa, Zea Mays
MDGIDPSMKSIGISYPYVRRRKKLPDPVEKEKGVSLWSMIKDNIGKDLTKVCLPVYFNEPLSSLQKCFEDLEYSYLIDRASEWGKRGNSLMRILSVAAFAVSGYASTDGRSCKPFNPLLGETYEADYPDKGLRFFSEKVSHHPMVVACHCEGTGWRFWADSNLKSKFWGRSIQLDPVGELTLEFDDGEVFQWSKVTTSIYNLILGKLYCDHYGTMRIQGNREYSCKLKFKEQSIIDRNPHQVQGVVQDRNGRTVATLFGKWDESMHYVMGDCFGKGKGTEQLSEAHLLWKRSKPPKFPTRYNLTQFAITLNELTPGLKEKLPPTDSRLRPDQRCLENGEYERANAEKLRLEQRQRQARKMQESGWKPRWFAKDKATDTYRYVGGYWESREKSSWEGCPDIFGQVPNDLMGFQTPPASVAAPGDGSGQDDTTHSWVNNLFSTHSPAGGGGDGYE

SEQ ID NO: 159481 - protein, 475 aa, Zea Mays
MDGIDPSMKSIGISYPYVRRRKKLPDPVEKEKGVSLWSMIKDNIGKDLTKVCLPVYFNEPLSSLQKCFEDLEYSYLIDRASEWGKRGNSLMRILSVAAFAVSGYASTDGRSCKPFNPLLGETYEADYPDKGLRFFSEKVSHHPMVVACHCEGTGWRFWADSNLKSKFWGRSIQLDPVGELTLEFDDGEVFQWSKVTTSIYNLILGKLYCDHYGTMRIQGNREYSCKLKFKEQSIIDRNPHQVQGVVQDRNGRTVATLFGKWDESMHYVMGDCFGKGKGTEQLSEAHLLWKRSKPPKFPTRYNLTQFAITLNELTPGLKEKLPPTDSRLRPDQRCLENGEYERANAEKLRLEQRQRQCSFLSSCIMLWSSNMIMAITPQARKMQESGWKPRWFAKDKATDTYRYVGGYWESREKSSWEGCPDIFGQVPNDLMGFQTPPASVAAPGDGSGQDDTTHSWVNNLFSTHSPAGGGGDGYE

SEQ ID NO: 159482 - protein, 367 aa, Zea Mays
MPLLSLRLHRELSPSSPKTDQSSSFYCYPCSPPFAAADASFPLSYQIGSAAAADATPPQAVINSPDLPVQALMDHAPAPATELGACASGAEGSGASLDRAAAAARKDRHSKICTAGGMRDRRMRLSLDVARKFFALQDMLGFDKASKTVQWLLNTSKSAIQEIMADDASSECVEDGSSSLSVDGKHNPAEQLGGGGDQKPKGNCRGEGKKPAKASKAAATPKPPRKSANNAHQVPDKETRAKARERARERTKEKHRMRWVKLASAIDVEAAAASGPSDRPSSNNLSHHSSLSMNMPCAAAELEERERCSSALSNRSAGRMQEITGASDVVLGFGNGGGGYGDGGGNYYCQEQWELGGVVFQQNSRFY

SEQ ID NO: 159483 - protein, 566 aa, Zea Mays
MKREYQDAGGSGGDMGSSKDKMMAAAAGAGEQEEEDVDELLAALGYKVRSSDMADVAQKLEQLEMAMGMGGVGGAGATADDGFVSHLATDTVHYNPSDLSSWVESMLSELNAPPAPLPPATPAPRLASTSSSSSSSMDGGRTRSSVVEAAPPATQASAAANGPAVPVVVVDTQEAGIRLVHALLACAEAVQQENFSAAEALVKQIPMLASSQGGAMRKVAAYFGEALARRVYRFRPPPDSSLLDAAFADLLHAHFYESCPYLKFAHFTANQAILEAFAGCRRVHVVDFGIKQGMQWPALLQALALRPGGPPSFRLTGVGPPQPDETDALQQVGWKLAQFAHTIRVDFQYRGLVAATLADLEPFMLQPEGDDTDDEPEVIAVNSVFELHRLLAQPGALEKVLGTVRAVRPRIVTVVEQEANHNSGTFLDRFTESLHYYSTMFDSLEGAGAGSGQSTDASPAAAGGTDQVMSEVYLGRQICNVVACEGAERTERHETLGQWRSRLGGSGFAPVHLGSNAYKQASTLLALFAGGDGYRVEEKDGCLTLGWHTRPLIATSAWRVAAAAAP

SEQ ID NO: 159484 - protein, 590 aa, Zea Mays
MKREYQDAGGSGGDMGSSKDKMMAAAAGAGEQEEEDVDELLAALGYKVRSSDMADVAQKLEQLEMAMGMGGVGGAGATADDGFVSHLATDTVHYNPSDLSSWVESMLSELNAPPAPLPPATPAPRLASTSSTVTSGAAAGAGYFDLPPAVDSSSSSSSSSMDGGRTRSSVVEAAPPATQASAAANGPAVPVVVVDTQEAGIRLVHALLACAEAVQQENFSAAEALVKQIPMLASSQGGAMRKVAAYFGEALARRVYRFRPPPDSSLLDAAFADLLHAHFYESCPYLKFAHFTANQAILEAFAGCRRVHVVDFGIKQGMQWPALLQALALRPGGPPSFRLTGVGPPQPDETDALQQVGWKLAQFAHTIRVDFQYRGLVAATLADLEPFMLQPEGDDTDDEPEVIAVNSVFELHRLLAQPGALEKVLGTVRAVRPRIVTVVEQEANHNSGTFLDRFTESLHYYSTMFDSLEGAGAGSGQSTDASPAAAGGTDQVMSEVYLGRQICNVVACEGAERTERHETLGQWRSRLGGSGFAPVHLGSNAYKQASTLLALFAGGDGYRVEEKDGCLTLGWHTRPLIATSAWRVAAAAAP

SEQ ID NO: 159485 - protein, 65 aa, Zea Mays
MIKPNTIAENGSGYICLGTSATWMLSRCRARETTKIGKRSNFYLPCLTLRSGGDNCRLAIPKYYL

SEQ ID NO: 159486 - protein, 51 aa, Zea Mays
MIKPNTIAENGSGYICLGTSATWMLSRKRWNETHILVAAQVWILEFIYILS

SEQ ID NO: 159487 - protein, 69 aa, Zea Mays
MIKPNTIAENGSGYICLGTSATWMLSRMKECRMLLQTLFLGSSILLTQMHFFSNVAKNDSLTNCQHACF

SEQ ID NO: 159488 - protein, 77 aa, Zea Mays
MEVLVLDASNLGMIKPNTIAENGSGYICLGTSATWMLSRCRARETTKIGKRSNFYLPCLTLRSGGDNCRLAIPKYYL

SEQ ID NO: 159489 - protein, 53 aa, Zea Mays
MGRLTPPRRSLEEPTLWRNSGARTAVPPTSFTPSSTKTTLFFMFFGYFTLTCL

SEQ ID NO: 159490 - protein, 69 aa, Zea Mays
MIKPNTIAENGSGYICLGTSATWMLSRCRARETTKIGKDGMKLIFWWPHKCGYLNSYIYLVRIEVSANS

SEQ ID NO: 159491 - protein, 127 aa, Zea Mays
MAASSSRQSPLTRSASSSAASQSISTSSLLSCRNLSRGPGAGPGGGLYGGVDGGERREEGLPPAERHHRCAFGLAAACREPMRARQPSMGVWGRTVKLYWLKRNTKPQVSCLYSAKGQAIDMYMIYL

SEQ ID NO: 159492 - protein, 57 aa, Zea Mays
MAVVEACDPARIIHPRDLGPLRKCDILLLCSPPSCLSRASPQLASKPQPAAAVKWRR

SEQ ID NO: 159493 - protein, 66 aa, Zea Mays
MTVGEWWERLSCFVCMILSLSKSSHADDFRECDSLQFGPNLHIVTKNLFLEFKQNSSVIALMFFLT

SEQ ID NO: 159494 - protein, 62 aa, Zea Mays
MCTHPCFTTKHQVVRIVTTAREKAKPWKETSRSSKTTTNSRCGLAATPSQLPVEALSLLRFV

SEQ ID NO: 159495 - protein, 348 aa, Zea Mays
MGRRLDVLLGRTTKQTARLKSLLGLAATRLGVVRGHRQVRCGQARGDVEQLLRLGHADRALARAEHVVREQNALDVLAELEACCNLIAERAALVDDAHRGECPEELREAAAGLVYAAARCGDLPELQEVRAILAAKFGREFVSAASNLRSGCGVNPKKLSTKQPSLESRQLVLQEIAADKGIAVRIYEPPPPYEDSGSSNHSHRKTEHDGERISRTPPVDGRDEDISGHSAQRYKDVEAAAQAAFESAASAAAAAKAAMELSRGEPRGPGDRRRAGRTQMDDPEIEKQDEVLHGNKPEKIGHGRNYSSDVEITPEDDEANHGNVAVDEPKQREPARGKPASVRTKWGF

SEQ ID NO: 159496 - protein, 1119 aa, Zea Mays
MAAVIGSSNLSRGQGQAEPSAASAGVGGRKGVTSWADTSSSSRGKGKTTELPMRSTAGTSLGPVGKSAVKAKPSAQRNHSGDLRTPTHIPEAACAYDPCETPKESESPRFKAIMQATSAPRKRLPADIKSFSHELNSKGVRPFPFLKPRGIYNLKEVIKVIHVRFEKAKEEVNSDLAVFAGDLVSVMEKYADSHPEWKDALEDLLILARTCCVMTPGEFWLQCEGIVQDLDDHRQELSMGVLKKLYTRMLFILTRCTRLLQFHKESGFAEDEVVIDQRDKIIQSADRQILTQSGVGDTTSRASKSEARKSYSQEQHNLKWKRSQEIKPVNLLPPLDTDVKKVADSPTKERISSWKPFPSPVTKVPKESTPTKLESPNKKTDAHSTVSSHVELSSPVESLPQQQLPVKHQHKTSWGHWSDQPNISEEGSIMCRICEEYVPTQYVEDHSRVCAIADRCDKKGVSVDERLIRVAEMLEKMVESYSPKDLPNAAVSPDVAKVSSSSINEESDGPSPKLSDWSRRGSADMLDYLQETDNTISLDDIKNLPSMTCKTRFGPKSDHGMATSSAGSMTPRSPLTPRSNHIDMLLAGKNAINESGDLPQIVELADIARCIANTPLDEESALSQMVTCIEDLQEIVNRRKHEALTVQTFGTRIEKLHREKYLQLCDSVDMDKVDSASTIMDEEDDVVRSLRASPVHPVKDRTSIDDFEIMKPISRGAFGRVFLAKKRTTGDLFAIKVLRKADMIRKNAVESILAERDILITVRNPFVVRFFYSFTSRENLYLVMEYLNGGDLYSLLRNLGCLDEDVARVYLAEVVLALEYLHSMHIVHRDLKPDNLLIAHDGHIKLTDFGLSKVGLINSTDLSGPAVSGASLYGDDEPQMNELEQMDHRARRQNRSAVGTPDYLAPEILLGTGHGCSADWWSVGVILFELIVGIPPFNAEHPEAIFENIMNRKIPWPHVPEEMSFDAQDLIDRLLTEDPHQRLGANGASEVKQHPFFKDISWDTLARQKAAFVPSSDSAFDTSYFTSRYSWNQSDENIYEAYELEDSSDNGSLSGSSSCVSNQDDMGEDSTGLNEFESSANVNYSFSNFSFKNLSQLASINYDLLTKGLKDDPPPRTEM

SEQ ID NO: 159497 - protein, 979 aa, Zea Mays
MAAVIGSSNLSRGQGQAEPSAASAGVGGRKGVTSWADTSSSSRGKGKTTELPMRSTAGTSLGPVGKSAVKAKPSAQRNHSGDLRTPTHIPEAACAYDPCETPKESESPRFKAIMQATSAPRKRLPADIKSFSHELNSKGVRPFPFLKPRGIYNLKEVIKVIHVRFEKAKEEVNSDLAVFAGDLVSVMEKYADSHPEWKDALEDLLILARTCCVMTPGEFWLQCEGIVQDLDDHRQELSMGVLKKLYTRMLFILTRCTRLLQFHKESGFAEDEVVIDQRDKIIQSADRQILTQSGVGDTTSRASKSEARKSYSQEQHNLKWKRSQEIKPVNLLPPLDTDVKKVADSPTKERISSWKPFPSPVTKVPKESTPTKLESPNKKTDAHSTVSSHVELSSPVESLPQQQLPVKHQHKTSWGHWSDQPNISEEGSIMCRICEEYVPTQYVEDHSRVCAIADRCDKKGVSVDERLIRVAEMLEKMVESYSPKDLPNAAVSPDVAKVSSSSINEESDGPSPKLSDWSRRGSADMLDYLQETDNTISLDDIKNLPSMTCKTRFGPKSDHGMATSSAGSMTPRSPLTPRSNHIDMLLAGKNAINESGDLPQIVELADIARCIANTPLDEESALSQMVTCIEDLQEIVNRRKHEALTVQTFGTRIEKLHREKYLQLCDSVDMDKVDSASTIMDEEDDVVRSLRASPVHPVKDRTSIDDFEIMKPISRGAFGRVFLAKKRTTGDLFAIKVLRKADMIRKNAVESILAERDILITVRNPFVVRFFYSFTSRENLYLVMEYLNGGDLYSLLRNLGCLDEDVARVYLAEVVLALEYLHSMHIVHRDLKPDNLLIAHDGHIKLTDFGLSKVGLINSTDLSGPAVSGASLYGDDEPQMNELEQMDHRARRQNRSAVGTPDYLAPEILLGTGHGCSADWWSVGVILFELIVGIPPFNAEHPEAIFENIMNRKIPWPHVPEEMSFDAQDLIDRIRMQSA

SEQ ID NO: 159498 - protein, 1100 aa, Zea Mays
MAAVIGSSNLSRGQGQAEPSAASAGVGGRKGVTSWADTSSSSRGKGKTTELPMRSTAGTSLGPVGKSAVKAKPSAQRNHSGDLRTPTHIPEAACAYDPCETPKESESPRFKAIMQATSAPRKRLPADIKSFSHELNSKGVRPFPFLKPRGIYNLKEVIKVIHVRFEKAKEEVNSDLAVFAGDLVSVMEKYADSHPEWKDALEDLLILARTCCVMTPGEFWLQCEGIVQDLDDHRQELSMGVLKKLYTRMLFILTRCTRLLQFHKESGFAEDEVVIDQRDKIIQSADRQILTQSGVGDTTSRASKSEARKSYSQEQHNLKWKRSQEIKPVNLLPPLDTDVKKVADSPTKERISSWKPFPSPVTKVPKESTPTKLESPNKKTDAHSTVSSHVELSSPVESLPQQQLPVKHQHKTSWGHWSDQPNISEEGSIMCRICEEYVPTQYVEDHSRVCAIADRCDKKGVSVDERLIRVAEMLEKMVESYSPKDLPNAAVSPDVAKVSSSSINEESDGPSPKLSDWSRRGSADMLDYLQETDNTISLDDIKNLPSMTCKTRFGPKSDHGMATSSAGSMTPRSPLTPRSNHIDMLLAGKNAINESGDLPQIVELADIARCIANTPLDEESALSQMVTCIEDLQEIVNRRKHEALTVQTFGTRIEKLHREKYLQLCDSVDMDKVDSASTIMDEEDDVVRSLRASPVHPVKDRTSIDDFEIMKPISRGAFGRVFLAKKRTTGDLFAIKVLRKADMIRKNAVESILAERDILITVRNPFVVRFFYSFTSRENLYLVMEYLNGGDLYSLLRNLGCLDEDVARVYLAEVVLALEYLHSMHIVHRDLKPDNLLIAHDGHIKLTDFGLSKVGLINSTDLSGPAVSGASLYGDDEPQMNELEQMDHRARRQNRSAVGTPDYLAPEILLGTGHGCSADWWSVGVILFELIVGIPPFNAEHPEAIFENIMNRKIPWPHVPEEMSFDAQDLIDRLLTEDPHQRLGANGASEAAFVPSSDSAFDTSYFTSRYSWNQSDENIYEAYELEDSSDNGSLSGSSSCVSNQDDMGEDSTGLNEFESSANVNYSFSNFSFKNLSQLASINYDLLTKGLKDDPPPRTEM

SEQ ID NO: 159499 - protein, 852 aa, Zea Mays
MAAVIGSSNLSRGQGQAEPSAASAGVGGRKGVTSWADTSSSSRGKGKTTELPMRSTAGTSLGPVGKSAVKAKPSAQRNHSGDLRTPTHIPEAACAYDPCETPKESESPRFKAIMQATSAPRKRLPADIKSFSHELNSKGVRPFPFLKPRGIYNLKEVIKVIHVRFEKAKEEVNSDLAVFAGDLVSVMEKYADSHPEWKDALEDLLILARTCCVMTPGEFWLQCEGIVQDLDDHRQELSMGVLKKLYTRMLFILTRCTRLLQFHKESGFAEDEVVIDQRDKIIQSADRQILTQSGVGDTTSRASKSEARKSYSQEQHNLKWKRSQEIKPVNLLPPLDTDVKKVADSPTKERISSWKPFPSPVTKVPKESTPTKLESPNKKTDAHSTVSSHVELSSPVESLPQQQLPVKHQHKTSWGHWSDQPNISEEGSIMCRICEEYVPTQYVEDHSRVCAIADRCDKKGVSVDERLIRVAEMLEKMVESYSPKDLPNAAVSPDVAKVSSSSINEESDGPSPKLSDWSRRGSADMLDYLQETDNTISLDDIKNLPSMTCKTRFGPKSDHGMATSSAGSMTPRSPLTPRSNHIDMLLAGKNAINESGDLPQIVELADIARCIANTPLDEESALSQMVTCIEDLQEIVNRRKHEALTVQTFGTRIEKLHREKYLQLCDSVDMDKVDSASTIMDEEDDVVRSLRASPVHPVKDRTSIDDFEIMKPISRGAFGRVFLAKKRTTGDLFAIKVLRKADMIRKNAVESILAERDILITVRNPFVVRFFYSFTSRENLYLVMEYLNGGDLYSLLRNLGCLDEDVARVYLAEVVLALEYLHSMHIVHRDLKPDNLLIAHDGHIKWGFTVWR

SEQ ID NO: 159500 - protein, 1111 aa, Zea Mays
MAAVIGSSNLSRGQGQAEPSAASAGVGGRKGVTSWADTSSSSRGKGKTTELPMRSTAGTSLGPVGKSAVKAKPSAQRNHSGDLRTPTHIPEAACAYDPCETPKESESPRFKAIMQATSAPRKRLPADIKSFSHELNSKGVRPFPFLKPRGIYNLKEVIKVIHVRFEKAKEEVNSDLAVFAGDLVSVMEKYADSHPEWKDALEDLLILARTCCVMTPGEFWLQCEGIVQDLDDHRQELSMGVLKKLYTRMLFILTRCTRLLQFHKESGFAEDEVVIDQRDKIIQSADRQILTQSGVGDTTSRASKSEARKSYSQEQHNLKWKRSQEIKPVNLLPPLDTDVKKVADSPTKERISSWKPFPSPVTKVPKESTPTKLESPNKKTDAHSTVSSHVELSSPVESLPQQQLPVKHQHKTSWGHWSDQPNISEEGSIMCRICEEYVPTQYVEDHSRVCAIADRCDKKGVSVDERLIRVAEMLEKMVESYSPKDLPNAAVSPDVAKVSSSSINEESDGPSPKLSDWSRRGSADMLDYLQETDNTISLDDIKNLPSMTCKTRFGPKSDHGMATSSAGSMTPRSPLTPRSNHIDMLLAGKNAINESGDLPQIVELADIARCIANTPLDEESALSQMVTCIEDLQEIVNRRKHEALTVQTFGTRIEKLHREKYLQLCDSVDMDKVDSASTIMDEEDDVVRSLRASPVHPVKDRTSIDDFEIMKPISRGAFGRVFLAKKRTTGDLFAIKVLRKADMIRKNAVESILAERDILITVRNPFVVRFFYSFTSRENLYLVMEYLNGGDLYSLLRNLGCLDEDVARVYLAEVVLALEYLHSMHIVHRDLKPDNLLIAHDGHIKVGLINSTDLSGPAVSGASLYGDDEPQMNELEQMDHRARRQNRSAVGTPDYLAPEILLGTGHGCSADWWSVGVILFELIVGIPPFNAEHPEAIFENIMNRKIPWPHVPEEMSFDAQDLIDRLLTEDPHQRLGANGASEVKQHPFFKDISWDTLARQKAAFVPSSDSAFDTSYFTSRYSWNQSDENIYEAYELEDSSDNGSLSGSSSCVSNQDDMGEDSTGLNEFESSANVNYSFSNFSFKNLSQLASINYDLLTKGLKDDPPPRTEM

SEQ ID NO: 159501 - protein, 948 aa, Zea Mays
MAAVIGSSNLSRGQGQAEPSAASAGVGGRKGVTSWADTSSSSRGKGKTTELPMRSTAGTSLGPVGKSAVKAKPSAQRNHSGDLRTPTHIPEAACAYDPCETPKESESPRFKAIMQATSAPRKRLPADIKSFSHELNSKGVRPFPFLKPRGIYNLKEVIKVIHVRFEKAKEEVNSDLAVFAGDLVSVMEKYADSHPEWKDALEDLLILARTCCVMTPGEFWLQCEGIVQDLDDHRQELSMGVLKKLYTRMLFILTRCTRLLQFHKESGFAEDEVVIDQRDKIIQSADRQILTQSGVGDTTSRASKSEARKSYSQEQHNLKWKRSQEIKPVNLLPPLDTDVKKVADSPTKERISSWKPFPSPVTKVPKESTPTKLESPNKKTDAHSTVSSHVELSSPVESLPQQQLPVKHQHKTSWGHWSDQPNISEEGSIMCRICEEYVPTQYVEDHSRVCAIADRCDKKGVSVDERLIRVAEMLEKMVESYSPKDLPNAAVSPDVAKVSSSSINEESDGPSPKLSDWSRRGSADMLDYLQETDNTISLDDIKNLPSMTCKTRFGPKSDHGMATSSAGSMTPRSPLTPRSNHIDMLLAGKNAINESGDLPQIVELADIARCIANTPLDEESALSQMVTCIEDLQEIVNRRKHEALTVQTFGTRIEKLHREKYLQLCDSVDMDKVDSASTIMDEEDDVVRSLRASPVHPVKDRTSIDDFEIMKPISRGAFGRVFLAKKRTTGDLFAIKVLRKADMIRKNAVESILAERDILITVRNPFVVRFFYSFTSRENLYLVMEYLNGGDLYSLLRNLGCLDEDVARVYLAEVVLALEYLHSMHIVHRDLKPDNLLIAHDGHIKLTDFGLSKVGLINSTDLSGPAVSGASLYGDDEPQMNELEQMDHRARRQNRSAVGTPDYLAPEILLGTGHGCSADWWSVGVILFELIVGIPPFNVATCPRRDEF

SEQ ID NO: 159502 - protein, 1112 aa, Zea Mays
MAAVIGSSNLSRGQGQAEPSAASAGVGGRKGVTSWADTSSSSRGKGKTTELPMRSTAGTSLGPVGKSAVKAKPSAQRNHSGDLRTPTHIPEAACAYDPCETPKESESPRFKAIMQATSAPRKRLPADIKSFSHELNSKGVRPFPFLKPRGIYNLKEVIKVIHVRFEKAKEEVNSDLAVFAGDLVSVMEKYADSHPEWKDALEDLLILARTCCVMTPGEFWLQCEGIVQDLDDHRQELSMGVLKKLYTRMLFILTRCTRLLQFHKESGFAEDEVVIDQRDKIIQSADRQILTQSGVGDTTSRASKSEARKSYSQEQHNLKWKRSQEIKPVNLLPPLDTDVKKVADSPTKERISSWKPFPSPVTKVPKESTPTKLESPNKKTDAHSTVSSHVELSSPVESLPQQQLPVKHQHKTSWGHWSDQPNISEEGSIMCRICEEYVPTQYVEDHSRVCAIADRCDKKGVSVDERLIRVAEMLEKMVESYSPKDLPNAAVSPDVAKVSSSSINEESDGPSPKLSDWSRRGSADMLDYLQETDNTISLDDIKNLPSMTCKTRFGPKSDHGMATSSAGSMTPRSPLTPRSNHIDMLLAGKNAINESGDLPQIVELADIARCIANTPLDEESALSQMVTCIEDLQEIVNRRKHEALTVQTFGTRIEKLHREKYLQLCDSVDMDKVDSASTIMDEEDDVVRSLRASPVHPVKDRTSIDDFEIMKPISRGAFGRVFLAKKRTTGDLFAIKVLRKADMIRKNAVESILAERDILITVRNPFVVRFFYSFTSRENLYLVMEYLNGGDLYSLLRNLGCLDEDVARVYLAEVVLALEYLHSMHIVHRDLKPDNLLIAHDGHIKLTDFGLSKVGLINSTDLSGPAVSGASLYGDDEPQMNELEQMDHRARRQNRSAVGTPDYLAPEILLGTGHGCSADWWSVGVILFELIVGIPPFNAEHPEAIFENIMNRKIPWPHVPEEMSFDAQDLIDRLLTEDPHQRLGANGASEVKQHPFFKDISWDTLARQKAAFVPSSDSAFDTSYFTSRYSWNQSDENIYEAYELEDSSDNGSLSGSSSCGEDSTGLNEFESSANVNYSFSNFSFKNLSQLASINYDLLTKGLKDDPPPRTEM

SEQ ID NO: 159503 - protein, 1043 aa, Zea Mays
MAAVIGSSNLSRGQGQAEPSAASAGVGGRKGVTSWADTSSSSRGKGKTTELPMRSTAGTSLGPVGKSAVKAKPSAQRNHSGDLRTPTHIPEAACAYDPCETPKESESPRFKAIMQATSAPRKRLPADIKSFSHELNSKGVRPFPFLKPRGIYNLKEVIKVIHVRFEKAKEEVNSDLAVFAGDLVSVMEKYADSHPEWKDALEDLLILARTCCVMTPGEFWLQCEGIVQDLDDHRQELSMGVLKKLYTRMLFILTRCTRLLQFHKESGFAEDEVVIDQRDKIIQSADRQILTQSGVGDTTSRASKSEARKSYSQEQHNLKWKRSQEIKPVNLLPPLDTDVKKVADSPTKERISSWKPFPSPVTKVPKESTPTKLESPNKKTDAHSTVSSHVELSSPVESLPQQQLPVKHQHKTSWGHWSDQPNISEEGSIMCRICEEYVPTQYVEDHSRVCAIADRCDKKGVSVDERLIRVAEMLEKMVESYSPKDLPNAAVSPDVAKVSSSSINEESDGPSPKLSDWSRRGSADMLDYLQETDNTISLDDIKNLPSMTCKTRFGPKSDHGMATSSAGSMTPRSPLTPRSNHIDMLLAGKNAINESGDLPQIVELADIARCIANTPLDEESALSQMVTCIEDLQEIVNRRKHEALTVQTFGTRIEKLHREKYLQLCDSVDMDKVDSASTIMDEEDDVVRSLRASPVHPVKDRTSIDDFEIMKPISRGAFGRVFLAKKRTTGDLFAIKVLRKADMIRKNAVESILAERDILITVRNPFVVRFFYSFTSRENLYLVMEYLNGGDLYSLLRNLGCLDEDVARVYLAEVVLALEYLHSMHIVHRDLKPDNLLIAHDGHIKLTDFGLSKVGLINSTDLSGPAVSGASLYGDDEPQMNELEQMDHRARRQNRSAVGTPDYLAPEILLGTGHGCSADWWSVGVILFELIVGIPPFNAEHPEAIFENIMNRKIPWPHVPEEMSFDAQDLIDRLLTEDPHQRLGANGASEGEDSTGLNEFESSANVNYSFSNFSFKNLSQLASINYDLLTKGLKDDPPPRTEM

SEQ ID NO: 159504 - protein, 504 aa, Zea Mays
MAAVIGSSNLSRGQGQAEPSAASAGVGGRKGVTSWADTSSSSRGKGKTTELPMRSTAGTSLGPVGKSAVKAKPSAQRNHSGDLRTPTHIPEAACAYDPCETPKESESPRFKAIMQATSAPRKRLPADIKSFSHELNSKGVRPFPFLKPRGIYNLKEVIKVIHVRFEKAKEEVNSDLAVFAGDLVSVMEKYADSHPEWKDALEDLLILARTCCVMTPGEFWLQCEGIVQDLDDHRQELSMGVLKKLYTRMLFILTRCTRLLQFHKESGFAEDEVVIDQRDKIIQSADRQILTQSGVGDTTSRASKSEARKSYSQEQHNLKWKRSQEIKPVNLLPPLDTDVKKVADSPTKERISSWKPFPSPVTKVPKESTPTKLESPNKKTDAHSTVSSHVELSSPVESLPQQQLPVKHQHKTSWGHWSDQPNISEEGSIMCRICEEYVPTQYVEDHSRIVELADIARCIANTPLDEESALSQMVTCIEDLQEIVNRRKHEALTVQTFGTRIEKL

SEQ ID NO: 159505 - protein, 104 aa, Zea Mays
MVKSKIWESRLLFFACWIYHTFSTYIYFKTCFLVFHFVFVIPRDLSHNNLNGPIPDFYVKCHHLHFYISFLADRPTYFNIAQNSSFYVYFLLFCRDLSSNNLNG

SEQ ID NO: 159506 - protein, 78 aa, Zea Mays
MKIIEDDGPGAAFYASAKAMTNGNHTFYGPLKQQPQWIRHIKYIMGENLTVRVQRMLYGMKLVDLTKKKTFLVLWLCV

SEQ ID NO: 159507 - protein, 71 aa, Zea Mays
MKIIEDDGPGAAFYASAKAMTNGNHTFYVSKLIQRLARLSKYDTMYHMHSITSSASWEKILLSGFRGCCTE

SEQ ID NO: 159508 - protein, 704 aa, Zea Mays
MFMQTGPFRMQSTCTKCGGSGKTVKDFCRFLGRASPGRPVMCSQWLPASPSSRRSVAQRLRCWRPKMMARRDVQLLVARGISSSPRLSRRINQTESEIVRMFHPPIRKSEEAIATIAPRYTHSVRVLDERFIRILKIFKWGPDAEKALEVLMLRVDHWLVREVMKTDVGVNVKMQFFRWAAKRRNYEHDTSTYMALIHCLEVVEQYGEMWKMIQEMVRNPICVVTPTELSDVVRMLGNAKMVRQAITIFYQIKTRKCQPIAQAYNSMIIMLMHEGQYEKVHQLYNEMSTEGHCFPDTVTYSALISAFCKLGRRDSAIQLLNEMKEIGMQPTTKIYTMLIALFFKFNDAHGALSLFEEMRHQYCRPDVFTYTELIRGLGKAGRIDEAYHFFCEMQREGCRPDTVFMNNMINFLGKAGRLDDAMKLFQEMETLRCIPSVVTYNTIIKALFESKSRASEVPSWFERMKESGISPSSFTYSILIDGFCKTNRMEKAMMLLEEMDEKGFPPCPAAYCSLIDALGKAKRYDLACELFQELKENCGSSSARVYAVMIKHLGKAGRLDDAINMFDEMNKLGCAPDVYAYNALMSGLARTGMLDEALSTMRRMQEHGCIPDINSYNIILNGLAKTGGPHRAMEMLSNMKQSTVRPDVVSYNTVLGALSHAGMFEEASKLMKEMNTLGFEYDLITYSSILEAIGKVDHEYTDQG

SEQ ID NO: 159509 - protein, 124 aa, Zea Mays
MDDADDIFMRSWTGTIIGPPNTVHEGRIYQLKLFCDTDYPDKPPTVRFQTRINMTCVNQETGLVEPSLFPMLGKWEREHTMEDILTSLKREMSTPQNRRLYQPHEGNEDQRVEQKGVSLRCVIM

SEQ ID NO: 159510 - protein, 74 aa, Zea Mays
MGSEGSSGPVVVPRNFRLLEELERGEKGIGDGTVSYGMDDADDIFMRSWTGTIIGPPNIIQINHRLSDSRLGSI

SEQ ID NO: 159511 - protein, 67 aa, Zea Mays
MLRGDLDGDLCFITWDDKLIPKKVDPMDYCNEVTHNGPCCYTRDAVSCLLFLGDVYVQEKNMELSVE

SEQ ID NO: 159512 - protein, 455 aa, Zea Mays
MAAASTATAASHSASFPAASLRHDARRPSCVAPAAAAATTAAETGLTAVPAPPPTPMLRVVPESLQRDSGCLVAGFRERGAGAADGEGFGDAVGEGGGPGAMEYLTSVLSSKVYDVAIESPLQLATKLSDRLGVNLWIKREDLQPVFSFKLRGAYNMMAKLSREQLERGVICSSAGNHAQGVALSAQRLGCDAVIVMPVTTPEIKWKSVERLGATVVLEGDSYDEAQSYAKLRCQQEGRTFVPPFDHPDVITGQGTIGMEIVRQLQGPLHAIFVPVGGGGLIAGIAAYVKRVRPEVKIIGVEPSDANAMALSLCHGKRVMLEHVGGFADGVAVKAVGEETFRLCRELVDGIVMVSRDAICASIKDMFEEKRSILEPAGALALAGAEAYCKYYNLKGETVVAITSGANMNFDRLRLVTELADVGRKREAVLATFLPERQGSFKKFTELVCHMRLAG

SEQ ID NO: 159513 - protein, 394 aa, Zea Mays
MDKGTNAVDVLEGRQYRLQHPWVGIVNRSQADINKNVDMLSARRKEKEYFESSPEYGHLAHKMGAEYLAKLLSQHLEAVIRAKIPSIIAMINKTIDEIEAQLDRLGRPIGGDAGAQLYTILDMCRAFDRVFKEHLDGGRPGGDRIYGVFDNQLPAALKKLPFDRHLSMQNVRKVISEADGYQPHLIAPEQGYRRLIDSSLSYFKGPAEASVDAVHLVLKELVRRSIAATEELKRFPTLQSDIAAAANDSLERFREDGRKTVLRLVEMEASYLTVEFFRKLPTEPEKAADKNTPVSDRYQDNHLRRIGSNVSSYINMVCETLRNTVPKAIVHCQVKEAKRNLLNRFYAHVGSKEKKQLSAMLDEDPALMEKRDALVKRLELYKSARNEIDSVAWK

SEQ ID NO: 159514 - protein, 445 aa, Zea Mays
MVRAYVDKPNCIILAISPANQDIATSDAIKLARDVDPSGDRTFGVLTKLDLMDKGTNAVDVLEGRQYRLQHPWVGIVNRSQADINKNVDMLSARRKEKEYFESSPEYGHLAHKMGAEYLAKLLSQHLEAVIRAKIPSIIAMINKTIDEIEAQLDRLGRPIGGDAGAQLYTILDMCRAFDRVFKEHLDGGRPGGDRIYGVFDNQLPAALKKLPFDRHLSMQNVRKVISEADGYQPHLIAPEQGYRRLIDSSLSYFKGPAEASVDAVHLVLKELVRRSIAATEELKRFPTLQSDIAAAANDSLERFREDGRKTVLRLVEMEASYLTVEFFRKLPTEPEKAADKNTPVSDRYQDNHLRRIGSNVSSYINMVCETLRNTVPKAIVHCQVKEAKRNLLNRFYAHVGSKEKKQLSAMLDEDPALMEKRDALVKRLELYKSARNEIDSVAWK

SEQ ID NO: 159515 - protein, 65 aa, Zea Mays
MNPLLFKLNSKGIPPHGFPCDSWSPNQPIRKTTLALWRIRLFGLAEDFVSRLKFLFLGQSNGVLS

SEQ ID NO: 159516 - protein, 288 aa, Zea Mays
METTMQDILDALARMEARLTDALVGRCGEQYAREHTSPFDGSAPPPSIFNTQYRDEAILPPLVHDDAAKVASLDSGNDFGLQQTATVLAYLGSDEMPSLTTLLAGSELDGLDEDAASANAADDDSGAVHVHAPLNPDATLDSNVDTSGSPRYPCLPEGATLFRRNPDKKIHDGLIGGISQHIWSIVDEVEHTTSGLVQTLIAVDRHFDLIIKARIKHLDPLPPLVPNTDAEEEEVLTTTSTRCSRMGINRGAYSVPNLLVVCIVGAPKFNEYSTNRVLHRTRLQRPPL

SEQ ID NO: 159517 - protein, 965 aa, Zea Mays
MGVGGGGGGGGEAAAVSAPAPAEEAGKDAEDGSGWTLKAKLIAVAVLVWVLGALALGVFLHSYFRHAALRKAEEGLVSMCEERARMLQDQFAVSVNHVHALAILVATFHYEKRPPALDQNTFADYTARTSFERPLLSGVAYAQRVVHGDRESFERQQGWIIKTMKHEPSPVQDEYAPVVYSQETVSYIEGLDMMSGEEDRENILRSRASGKAVLTRPFRLMSNHLGVVLTFPVYHVDLSSDAKEEDRVAATAGYLGGSFDVESLVENLLRQLAGNQELVVNVYDVTNSSNPLVIYRNKPQLPWSAISSSSGVFVICMLVGYIVGAAWSRYDNVKEDCRKMEELKKQAEAADVAKSQFLATVSHEIRTPMNGVLGMLDMLLDTDLTSTQRDFAQTAQVCGKALISLINEVLDRAKIEAGKLDLESVPFDLRSILDDVISLFSSKSREKGIELAVYVSERVPELLLGDPGRFRQIITNLVGNSIKFTERGHIFVQVHLADHSNLATEPKVESVANGMNGHKDEKTAVATSVSLNTLSGFEAADSRNSWENFKLLLSYEKNEMPYESVSDKVTLVVSVEDTGIGIPLDAQAKVFTPFMQADSSTSRTYGGTGIGLSISKCLVELMGGQINFVSRPHVGSTFTFTAALQRCDRSAIGDSKPVMLHPLPSSFKGLSALLVDRRPVRATVTKYHLQRLGIACDVVATIELALGVLSGRNGSSLTSTKQPCMLLIESDSWGFKIDVPLRSRLLEMKQNGPPGLPKTILLAAAESGKLKAHYAVDSVITKPLKASGLAACLFQTLGITQSSNERRDNSGSLHGLLLGKNILVVDDNKVNLRVAAGTLKKFGAKVECVESGKDALASLQVPHKFHLCLMDIQMPEMDGFEATKQIRAMEAKANEQAVACDDSETDGATRAARWHLPVLAMTADVIQATHEECTKYGMDGYVTKPFEEKQLFQALQKFLDPGMSS

SEQ ID NO: 159518 - protein, 960 aa, Zea Mays
MGVGGGGGGGGEAAAVSAPAPAEEAGKDAEDGSGWTLKAKLIAVAVLVWVLGALALGVFLHSYFRHAALRKAEEGLVSMCEERARMLQDQFAVSVNHVHALAILVATFHYEKRPPALDQNTFADYTARTSFERPLLSGVAYAQRVVHGDRESFERQQGWIIKTMKHEPSPVQDEYAPVVYSQETVSYIEGLDMMSGEEDRENILRSRASGKAVLTRPFRLMSNHLGVVLTFPVYHVDLSSDAKEEDRVAATAGSNPLVMYGSEVSLGNPSPSHICMLDFGDPFRKHHMVCRNKPQLPWSAISSSSGVFVICMLVGYIVGAAWSRYDNVKEDCRKMEELKKQAEAADVAKSQFLATVSHEIRTPMNGVLGMLDMLLDTDLTSTQRDFAQTAQVCGKALISLINEVLDRAKIEAGKLDLESVPFDLRSILDDVISLFSSKSREKGIELAVYVSERVPELLLGDPGRFRQIITNLVGNSIKFTERGHIFVQVHLADHSNLATEPKVESVANGMNGHKDEKTAVATSVSLNTLSGFEAADSRNSWENFKLLLSYEKNEMPYESVSDKVTLVVSVEDTGIGIPLDAQAKVFTPFMQADSSTSRTYGGTGIGLSISKCLVELMGGQINFVSRPHVGSTFTFTAALQRCDRSAIGDSKPVMLHPLPSSFKGLSALLVDRRPVRATVTKYHLQRLGIACDVVATIELALGVLSGRNGSSLTSTKQPCMLLIESDSWGFKIDVPLRSRLLEMKQNGPPGLPKTILLAAAESGKLKAHYAVDSVITKPLKASGLAACLFQTLGITQSSNERRDNSGSLHGLLLGKNILVVDDNKVNLRVAAGTLKKFGAKVECVESGKDALASLQVPHKFHLCLMDIQMPEMDGFEATKQIRAMEAKANEQAVACDDSETDGATRAARWHLPVLAMTADVIQATHEECTKYGMDGYVTKPFEEKQLFQALQKFLDPGMSS

SEQ ID NO: 159519 - protein, 962 aa, Zea Mays
MGVGGGGGGGGEAAAVSAPAPAEEAGKDAEDGSGWTLKAKLIAVAVLVWVLGALALGVFLHSYFRHAALRKAEEGLVSMCEERARMLQDQFAVSVNHVHALAILVATFHYEKRPPALDQNTFADYTARTSFERPLLSGVAYAQRVVHGDRESFERQQGWIIKTMKHEPSPVQDEYAPVVYSQETVSYIEGLDMMSGEEDRENILRSRASGKAVLTRPFRLMSNHLGVVLTFPVYHVDLSSDAKEEDRVAATAGSNPLVMYGSEVSLGNPSPSHICMLDFGDPFRKHHMVCRYRNKPQLPWSAISSSSGVFVICMLVGYIVGAAWSRYDNVKEDCRKMEELKKQAEAADVAKSQFLATVSHEIRTPMNGVLGMLDMLLDTDLTSTQRDFAQTAQVCGKALISLINEVLDRAKIEAGKLDLESVPFDLRSILDDVISLFSSKSREKGIELAVYVSERVPELLLGDPGRFRQIITNLVGNSIKFTERGHIFVQVHLADHSNLATEPKVESVANGMNGHKDEKTAVATSVSLNTLSGFEAADSRNSWENFKLLLSYEKNEMPYESVSDKVTLVVSVEDTGIGIPLDAQAKVFTPFMQADSSTSRTYGGTGIGLSISKCLVELMGGQINFVSRPHVGSTFTFTAALQRCDRSAIGDSKPVMLHPLPSSFKGLSALLVDRRPVRATVTKYHLQRLGIACDVVATIELALGVLSGRNGSSLTSTKQPCMLLIESDSWGFKIDVPLRSRLLEMKQNGPPGLPKTILLAAAESGKLKAHYAVDSVITKPLKASGLAACLFQTLGITQSSNERRDNSGSLHGLLLGKNILVVDDNKVNLRVAAGTLKKFGAKVECVESGKDALASLQVPHKFHLCLMDIQMPEMDGFEATKQIRAMEAKANEQAVACDDSETDGATRAARWHLPVLAMTADVIQATHEECTKYGMDGYVTKPFEEKQLFQALQKFLDPGMSS

SEQ ID NO: 159520 - protein, 334 aa, Zea Mays
MESPAGQLLSQILHTHPHLLSAAAEQQLEQLQTDREADKEKDKESDAGDKLAPTGGDLVLYRRIAEVKEKERRRTLEEILYALVVQKFVEAGVSLVPALSRSTDPSGRVDQWAETVEEKLQRLHSHEAYEMIENHLTLILGQRQGDATIAAISKLRVGQVYAASVMYGYFLKRVDQRFQLEKTMKGLPWGSEEEDSALNQVMMTDLMPSAQTSSSHPEMGSWTAPAFSTGGPSQSIKPCRLRSYVMSFDSDTLQRYATVRSKEAFGIIEKHTEALFGKPEIVITPEGTLDSSKDEHIRISFAGLRRLILEAVTFGSFLWDVESFVDSRYHFVTS

SEQ ID NO: 159521 - protein, 417 aa, Zea Mays
MEAAAVAAALRSPTATTAAAAAGPTWRAAAPGAASLAFDRRRSFAFGSIKLTSRSTRRRSSVVRASWSPSESLPPSSSIAPLRMESPAGQLLSQILHTHPHLLSAAAEQQLEQLQTDREADKEKDKESDAGDKLAPTGGDLVLYRRIAEVKEKERRRTLEEILYALVVQKFVEAGVSLVPALSRSTDPSGRVDQWAETVEEKLQRLHSHEAYEMIENHLTLILGQRQGDATIAAISKLRVGQVYAASVMYGYFLKRVDQRFQLEKTMKGLPWGSEEEDSALNQVMMTDLMPSAQTSSSHPEMGSWTAPAFSTGGPSQSIKPCRLRSYVMSFDSDTLQRYATVRSKEAFGIIEKHTEALFGKPEIVITPEGTLDSSKDEHIRISFAGLRRLILEAVTFGSFLWDVESFVDSRYHFVTS

SEQ ID NO: 159522 - protein, 177 aa, Zea Mays
MDRPLMGGRAYRLGRTFASCRGRKSALLPVAGPRACAGIPSPGPRARGATPQGPRRRLLGRGCAPPGRTGVEPWPGRPLASQGRGACPRALSELCTRAPRHRGQPRHGKARRDRSRQGQGYSRRSTGSRRGRAAVPWLGPATPRLLAPTGRGCASPNRARAHWLSEPAPPLHCACCR

SEQ ID NO: 159523 - protein, 142 aa, Zea Mays
MGAQEAAVEDVLRAAAAEVSTSSAKRRFRLFRHTLPLIIAKVIESPSDTALLVDIIFQTLPIYDDRASRKAVDDMVIQALGEPTFMKPFAAFLVQSMEKNLKLLLPDWPAHKQSYVRSLWTGPSVGAELANSYSFIFYLSLV

SEQ ID NO: 159524 - protein, 306 aa, Zea Mays
MGAQEAAVEDVLRAAAAEVSTSSAKRRFRLFRHTLPLIIAKVIDTALLVDIIFQTLPIYDDRASRKAVDDMVIQALGEPTFMKPFAAFLVQSMEKNLKVINPLTSFKLLRWSHYLLKWSQFATLSKVAFTRLASAQAVLCQVLMDGSFRRRRTCKQLFIHLLSEPSGIYKMYMEELKDLRISMRDSPAFLNLILDFTISSPSLSTEYKSVFLDLYVKTILSSKDRAPKAATEAFKPLLLEIGHEDFKNTVIPSCIKMLKRNPEIILQSIGYLLRTVRLDLSKYFMEFMPIVLHQACHSDEERRIDA

SEQ ID NO: 159525 - protein, 291 aa, Zea Mays
MSICAERSQLPTPWLPLSLLLVLAESPSDTALLVDIIFQTLPIYDDRASRKAVDDMVIQALGEPTFMKPFAAFLVQSMEKNLKVINPLTSFKLLRWSHYLLKWSQFATLSKVAFTRLASAQAVLCQVLMDGSFRRRRTCKQLFIHLLSEPSGIYKMYMEELKDLRISMRDSPAFLNLILDFTISSPSLSTEYKSVFLDLYVKTILSSKDRAPKAATEAFKPLLLEIGHEDFKNTVIPSCIKMLKRNPEIILQSIGYLLRTVRLDLSKYFMEFMPIVLHQACHSDEERRIDA

SEQ ID NO: 159526 - protein, 581 aa, Zea Mays
MALLQHCRKIWKTECLRNLVKELYLGLSACVRSSANYLSLLAVREAAECAARAMMSQLTGPGVKLVLPSLLKGLEDKAWRTKQSSVQLLGAMAYCAPQQLSQCLPKIVPKLTEVLTDTHPKVQASGQTALQEVGSVIKNPEISALVPILLSALMDPNAHTKHSLDILLQTTFINSIDAPSLALLVPIVHRGLRERGVETKKKAAQIVGNMSSLVTEPKDMIPYISLLLPEVKKVLVDPIPEVRAVAARALGSLISGMGEEIFPDLVPWLLDTLKSDNSNVERSGAAQGLSEVLAALGQDYFDHILPDIIRNCSHQKASVRDGHLTLFRYLPRSLGGVFQNYLQAVLPAILDGLADENESVRDAALSAGHVFVEHYATTSLPLLLPAIEDGIFSDNWRIRQSSVELLGDLLFKVAGTSGKAILEGGSDDEGASTEAQGRAIIEVLGREKRNEVLAAIYMVRSDVSLTVRQAALHVWKTIVANTPRTLKEIMPVLMDTLISSLASSSSERRQVAGRSLGELVRKLGERVLPSIIPILSQGLKDPSASRRQGVCIGLSEVMGSAGKHQLLSFMDELIPTIRTAL

SEQ ID NO: 159527 - protein, 490 aa, Zea Mays
MAYCAPQQLSQCLPKIVPKLTEVLTDTHPKVQASGQTALQEVGSVIKNPEISALVPILLSALMDPNAHTKHSLDILLQTTFINSIDAPSLALLVPIVHRGLRERGVETKKKAAQIVGNMSSLVTEPKDMIPYISLLLPEVKKVLVDPIPEVRAVAARALGSLISGMGEEIFPDLVPWLLDTLKSDNSNVERSGAAQGLSEVLAALGQDYFDHILPDIIRNCSHQKASVRDGHLTLFRYLPRSLGGVFQNYLQAVLPAILDGLADENESVRDAALSAGHVFVEHYATTSLPLLLPAIEDGIFSDNWRIRQSSVELLGDLLFKVAGTSGKAILEGGSDDEGASTEAQGRAIIEVLGREKRNEVLAAIYMVRSDVSLTVRQAALHVWKTIVANTPRTLKEIMPVLMDTLISSLASSSSERRQVAGRSLGELVRKLGERVLPSIIPILSQGLKDPSASRRQGVCIGLSEVMGSAGKHQLLSFMDELIPTIRTAL

SEQ ID NO: 159528 - protein, 327 aa, Zea Mays
MRSGPRRRRRRPQSCRWWTRCWRRSDPVALASMWSLPLLADFDLCCVCYNEGKFDPGMAKTDFILMDSAEVSGASGTSWTDEETLLLLEGLEIFGGKWAEIAEHVATKTKAQCMLHFLQMQIEDRFHDGDDINQNIPVSTEQATTEKAIVETPEKMEVGDKVEGRDNADEKASEKTEGSCEETKTEDANVVNKDTQKSGGKDSGASPSTEEAKQSSDDQPIVKENSVDVDTSGEKLSNVAIDILKCAFEAAGHSPEYEGSFADAGNPVIALAAYLAGLVEDGNATTSFRSSLKSISEVPPALQLASRHCFILEDPPNELKDICVSVR

SEQ ID NO: 159529 - protein, 484 aa, Zea Mays
MRSGPRRRRRRPQSCRWWTRCWRRSDPVALASMWSLPLLADFDLCCVCYNEGKFDPGMAKTDFILMDSAEVSGASGTSWTDEETLLLLEGLEIFGGKWAEIAEHVATKTKAQCMLHFLQMQIEDRFHDGDDINQNIPVSTEQATTEKAIVETPEKMEVGDKVEGRDNADEKASEKTEGSCEETKTEDANVVNKDTQKSGGKDSGASPSTEEAKQSSDDQPIVKENSVDVDTSGEKLSNVAIDILKCAFEAAGHSPEYEGSFADAGNPVIALAAYLAGLVEDGNATTSFRSSLKSISEVPPALQLASRHCFILEDPPNELKDICVSVSKKNTDADQTKDEDMISNSIANEKKEINEKEDKSLSVEKTNNSSMSQNDHQESNIKSVSRDDCSSVEPKGNNAKESSDSTGIGDMSAIGTTKDVVAGNSKQVNDSPSVEVEAPDDSSLKSKDELNDTEDAVATPATVQEQKHSQTLENGDKNLTILNV

SEQ ID NO: 159530 - protein, 586 aa, Zea Mays
MMKFHANPQLQLESKDLAELSIGESDARQEVLEFLDHWGLINFHPFPPAGHEESKPEESQDNSNDEKASLIEQLFKFESVQSYMTPLLNKEDVGAPPPLPSLFPEPVLIENMVAAAEPSVEYHCNSCSVDCSRKRYHCRTQADFDLCCVCYNEGKFDPGMAKTDFILMDSAEVSGASGTSWTDEETLLLLEGLEIFGGKWAEIAEHVATKTKAQCMLHFLQMQIEDRFHDGDDINQNIPVSTEQATTEKAIVETPEKMEVGDKVEGRDNADEKASEKTEGSCEETKTEDANVVNKDTQKSGGKDSGASPSTEEAKQSSDDQPIVKENSVDVDTSGEKLSNVAIDILKCAFEAAGHSPEYEGSFADAGNPVIALAAYLAGLVEDGNATTSFRSSLKSISEVPPALQLASRHCFILEDPPNELKDICVSVSKKNTDADQTKDEDMISNSIANEKKEINEKEDKSLSVEKTNNSSMSQNDHQESNIKSVSRDDCSSVEPKGNNAKESSDSTGIGDMSAIGTTKDVVAGNSKQVNDSPSVEVEAPDDSSLKSKDELNDTEDAVATPATVQEQKHSQTLENGDKNLTILNV

SEQ ID NO: 159531 - protein, 726 aa, Zea Mays
MMKFHANPQLQLESKDLAELSIGESDARQEVLEFLDHWGLINFHPFPPAGHEESKPEESQDNSNDEKASLIEQLFKFESVQSYMTPLLNKEDVGAPPPLPSLFPEPVLIENMVAAAEPSVEYHCNSCSVDCSRKRYHCRTQADFDLCCVCYNEGKFDPGMAKTDFILMDSAEVSGASGTSWTDEETLLLLEGLEIFGGKWAEIAEHVATKTKAQCMLHFLQMQIEDRFHDGDDINQNIPVSTEQATTEKAIVETPEKMEVGDKVEGRDNADEKASEKTEGSCEETKTEDANVVNKDTQKSGGKDSGASPSTEEAKQSSDDQPIVKENSVDVDTSGEKLSNVAIDILKCAFEAAGHSPEYEGSFADAGNPVIALAAYLAGLVEDGNATTSFRSSLKSISEVPPALQLASRHCFILEDPPNELKDICVSVSKKNTDADQTKDEDMISNSIANEKKEINEKEDKSLSVEKTNNSSMSQNDHQESNIKSVSRDDCSSVEPKGNNAKESSDSTGIGDMSAIGTTKDVVAGNSKQVNDSPSVEVEAPDDSSLKSKDELNDTEDAVATPATVQEQKHSQTLENGDKAEPNNIERVVVHEKGSIVTANQNDSITRLKRAAATAVSAAAVKAKFLGDQEEYHIRRLTALMIEKLFQKLEVKMSLFSEIEQVVLRTREYTEKTRKKLLMERNAIIAARMGALPSRPNQPGVAGNRLPPGYGNPPLRSPNAMPRPSS

SEQ ID NO: 159532 - protein, 722 aa, Zea Mays
MMKFHANPQLQLESKDLAELSIGESDARQEVLEFLDHWGLINFHPFPPAGHEESKPEESQDNSNDEKASLIEQLFKFESVQSYMTPLLNKEDVGAPPPLPSLFPEPVLIENMVAAAEPSVEYHCNSCSVDCSRKRYHCRTQADFDLCCVCYNEGKFDPGMAKTDFILMDSAEVSGASGTSWTDEETLLLLEGLEIFGGKWAEIAEHVATKTKAQCMLHFLQMQIEDRFHDGDDINQNIPVSTEQATTEKAIVETPEKMEVGDKVEGRDNADEKASEKTEGSCEETKTEDANVVNKDTQKSGGKDSGASPSTEEAKQSSDDQPIVKENSVDVDTSGEKLSNVAIDILKCAFEAAGHSPEYEGSFADAGNPVIALAAYLAGLVEDGNATTSFRSSLKSISEVPPALQLASRHCFILEDPPNELKDICVSVSKKNTDADQTKDEDMISNSIANEKKEINEKEDKSLSVEKTNNSSMSQNDHQESNIKSVSRDDCSSVEPKGNNAKESSDSTGIGDMSAIGTTKGNSKQVNDSPSVEVEAPDDSSLKSKDELNDTEDAVATPATVQEQKHSQTLENGDKAEPNNIERVVVHEKGSIVTANQNDSITRLKRAAATAVSAAAVKAKFLGDQEEYHIRRLTALMIEKLFQKLEVKMSLFSEIEQVVLRTREYTEKTRKKLLMERNAIIAARMGALPSRPNQPGVAGNRLPPGYGNPPLRSPNAMPRPSS

SEQ ID NO: 159533 - protein, 843 aa, Zea Mays
MVEGMVVAVPNGVKADGAAATAAAAKADSPKSVLEDEKISESKNGNASLATEPVKQGDETSDDFVDAMMSLPVDHEIDSADVPPAVEAVKDEDQLLEPAKEEKFDDFLDAGLSIPIDLEAKNGDVSLITEAMKKEEEQLEEARIKAEEEEEARKREEVAKLAFDPESRYSKLDELLTKTQLFSEFLLEKMDKIADEVVEPQGEESPVEKKKRRGRKRKANATPQYNDNYGACSKKAKTAVAAMLTRSREDRLADDSTLSEEERLKKEQANLVPLMTGGKLKSYQIKGVKWLISLWQNGLNGILADQMGLGKTIQTIGFLAHLKGKGMHGPYLIIAPLSTLSNWVNEISRFVPSVSSIIYHGDKVARAEIRRKFMPKTAGPDFPIIVTSYEIAMLDARFLAHYRWTYVVVDEGHRLKNSKCKLLREMKRIPMANKLLLTGTPLQNNLAELWSLLNFILPDIFSSNEEFESWFDFSAKGSEEPEESEEKRRVHVVSKLHAILRPFLLRRMKEDVEQMLPRKKEIIIYANMTEVQKRILYHLVEKTFDVYLMIISFFLLRRPGIKTKLNSLFIQLRKNCAHPDLLEAAFGTTSLYPPVNKLLEQCGKFQLLDRLLTSLLARKHKVLIFSQWTKVLDILEYYLDSKGLGVCRIDGSVNLEERRRQIAEFNDLNSSLNVFILSTRAGGLGINLTSADTCILYDSDWNPQMDQQAMDRCHRIGQTRPVHVYRLATSYSVEERIIKKAFGKLKLEHVVIGKGQFEQERAKPNALEEGELLALLRDEQDEEDRMIQTDISDEDLLKLMDRSDLSGPPGAADAAPLIPLKGPGWEVVVPTKSGGGMLSSLTS

SEQ ID NO: 159534 - protein, 572 aa, Zea Mays
MVEGMVVAVPNGVKADGAAATAAAAKADSPKSVLEDEKISESKNGNASLATEPVKQGDETSDDFVDAMMSLPVDHEIDSADVPPAVEAVKDEDQLLEPAKEEKFDDFLDAGLSIPIDLEAKNGDVSLITEAMKKEEEQLEEARIKAEEEEEARKREEVAKLAFDPESRYSKLDELLTKTQLFSEFLLEKMDKIADEVVEPQGEESPVEKKKRRGRKRKANATPQYNDNYGACSKKAKTAVAAMLTRSREDRLADDSTLSEEERLKKEQANLVPLMTGGKLKSYQIKGVKWLISLWQNGLNGILADQMGLGKTIQTIGFLAHLKGKGMHGPYLIIAPLSTLSNWVNEISRFVPSVSSIIYHGDKVARAEIRRKFMPKTAGPDFPIIVTSYEIAMLDARFLAHYRWTYVVVDEGHRLKNSKCKLLREMKRIPMANKLLLTGTPLQNNLAELWSLLNFILPDIFSSNEEFESWFDFSAKGSEEPEESEEKRRVHVVSKLHAILRPFLLRRMKEDVEQMLPRKKEIIIYANMTEVQKRILYHLVEKTFDVYLMIISFFRGICIYSCLDLHSITSLM

SEQ ID NO: 159535 - protein, 575 aa, Zea Mays
MAYMCADSGNLMAIAQQVIQQQQQQQQHQRHHHHLPPLPLPLPPRQAPPMPPAPAPASPHGQIPAASLPYGGGAWSQADHFFPDAFVGTSPADAVFPDLSAAADFDSDVWMDSLIGDAPVFADSDLERLIFTTPPPPVDAAAQPESATRASLPQPAAVATAAACSSPSSLDASCSAPILQSLLACSRTAAADPGLAAVELVKVRAAASEDGDPAERVAFYFGDALARRLACGGGAQAQPLTAVDARFATDELTLCYKTLNDACPYSKFAHLTANQAILEATGTATKIHIVDFGIVQGIQWAALLQALATRPGEKPSRVRISGLPSPYLGPKPATSLAATSARLRDFAKLLGVEFEFVPLLRSVHELDRSDFLVEPDETVAVNFMLQLYHLLGDSDEPVRRVLRLVKSLDPSVVTLGEYEVSLNRAGFVDRFSNALLYYKPVFESLDVAMPRDSPERVRVERCMFGERIRRAIGPEEGAERTDRMAASREWQTLMEWCGFEPVKLSNYAMSQADLLLWNYDSKYKYSLVELPPAFLSLAWEKRPLLTVSAWRRYGSLPHLSARHHRRPLSFPHLLP

SEQ ID NO: 159536 - protein, 390 aa, Zea Mays
MTTGHMNPNYTLSMIMPLVTKTFNLLSMLEGTKLKRTMVGKIKKQCWALRDLVASVKDKTKAHVRRVDSWSSRGAEEEGGECGGEASSAVAFRFLPVAAAVPPRTLLPVLGLTADPDLSIIQRGRNMFRRKHGADVNSDDAEQREAKISELKAALGTLSARGEKYCSEACLRRYLEARNWNVAKSRKMLEESLKWRAAYKPEDIRWNTSSHEGQIRFLVYTLENAIFSLPEGQEKMVWLIDFTGWTVSHASPIKTCRETANILQNHFPERLAIGFLFNPPKVFEAFYKVIKIFLDPKSVEKVNFVYQKDEESMKVMYKYIDPEVLPVEFGGKSNVVYNHEEYSELMIQDDIKTASFWAVDAKTNHANPAINGTLVPEVAPQSSSLAAKAS

SEQ ID NO: 159537 - protein, 423 aa, Zea Mays
MTTGHMNPNYTLSMIMPLVTKTFNLLSMLEGTKLKRTMVGKIKKQCWALRDLVASVKDKTKAHVRRVDSWSSRGAEEEGGECGGEASSAVAFRFLPVAAAVPPRTLLPVLGLTADPDLSIIQRGRNMFRRKHGADVNSDDAEQREAKISELKAALGTLSARGEKYCSEACLRRYLEARNWNVAKSRKMLEESLKWRAAYKPEDIRWPDVSVEAETGKMYRASFRDREGRTVVVMKPTKQNTSSHEGQIRFLVYTLENAIFSLPEGQEKMVWLIDFTGWTVSHASPIKTCRETANILQNHFPERLAIGFLFNPPKVFEAFYKVIKIFLDPKSVEKVNFVYQKDEESMKVMYKYIDPEVLPVEFGGKSNVVYNHEEYSELMIQDDIKTASFWAVDAKTNHANPAINGTLVPEVAPQSSSLAAKAS

SEQ ID NO: 159538 - protein, 400 aa, Zea Mays
MAPVLTVAPSSNQIRRMAPCPTRDAAAAVWVFAVDSESRRRCSCRRPRAPSAPLLNHPGLSGAQQGRLGRSASKQPRRSRSSPTLLPRIPPPLLVQEALSSQCSPPQPPRNLHDAANIAALAALSTFWRPECTVGGDDGQQVTVHDPEVRDPLPLTIHHMPIAVTFAYFGEGNIVVLDPTYKEEAVMGGRMTAIVNSNGDVCAIQKAGGEGLMSSVTMQCLRIASVKATDITSKIKKAVLIWDVEAQPNRHAVLGSSESRPDLILTGHKENAEFALAMCPAEPYVLSGDVEDEKMAAWKALGAMLLVQLFNTGKACACAECTKDKTGCRDMGDDGDWIGVNKGFNSDAVLAMETIHSLSASKSSYPMADLTQLFMTATQEGKRSESQGQILRVECYSLMP

SEQ ID NO: 159539 - protein, 347 aa, Zea Mays
MAPVLTVAPSSNQIRRMAPCPTRDAAAAVWVFAVDSESRRRCSCRRPRAPSAPLLNHPGLSGAQQGRLGRSASKQPRRSRSSPTLLPRIPPPLLVQEALSSQCSPPQPPRNLHDAANIAALAALSTFWRPECTVGGDDGQQVTVHDPEVRDPLPLTIHHMPIAVTFAYFGEGNIVVLDPTYKEEAVMGGRMTAIVNSNGDVCAIQKAGGEGLMSSVTMQCLRIASVKATDITSKIKKAVLIWDVEAQPNRHAVLGSSESRPDLILTGHKENAEFALAMCPAEPYVLSGDVEDEKMAAWKALGAMLLVQLFNTGKACACAECTKDKTGCRDMGDDGDWIGVLYCSCSS

SEQ ID NO: 159540 - protein, 85 aa, Zea Mays
MATFVALVNYSHRVKGGMEFCVSQEASRLTSLFLVFMPTTQDNTATPMELEDFISFDWIWMRWTLLVRRERVHGLGGAYFCSSFS

SEQ ID NO: 159541 - protein, 58 aa, Zea Mays
MERFHNLNENFYSCLDQQQASSHLYHDQRKGLKVQQGGTDQDHQVPHLLKQQERQGVH

SEQ ID NO: 159542 - protein, 505 aa, Zea Mays
MAVAAPGQLNLDEAPSWGSRSVDCFEKLEQIGEGTYGQVYMAKETGTNEIVALKKIRMDNEREGFPITAIREIKILKKLHHQNVIKLKEIVTSPGPERDEQGKPIDGNKYKGSIYMVFEYMDHDLTGLADRPGMRFTVPQIKLLTGLHYCHVNQVLHRDIKGSNLLIDNEGNLKLADFGLARSFSSDHNGNLTNRVITLWYRPPELLLGSTKYGPAVDMWSVGCIFAELLNGKPILPGKNEPEQLTKIFELCGTPDDTIWPGVTKMPWYNNFKPPRPLKRRVKDFFKHFDRHALDLLEKMLTLDPSQRISAKDALDAEYFWTDPLPCDPKSLPKYEASHEFQTKKKRQQQRQAEEAAKRQKLNHPPPHSRLPPLQQPGQAHPQMRPGQGMHNVPPVAAGPGHHYAKPRGPGGPNRYPQGGNQGGGYNPNRGGQGGGYGSGPYPQQGRGPPYPGAAGPRGSGGSGYGAGGPNYQQGGPYGTSGPGRGPNYSQGSGSRNQQQYGNWQ

SEQ ID NO: 159543 - protein, 399 aa, Zea Mays
MRECISIHIGQAGIQVGNACWELYCLEHGIQADGQMPGDKTIGGGDDAFNTFFSETGAGKHVPRAVFVDLEPTVIDEVRTGTYRQLFHPEQLISGKEDAANNFARGHYTIGKEIVDLCLDRIRKLADNCTGLQGFLVFNAVGGGTGSGLGSLLLERLSVDYGKKSKLGFTVYPSPQVSTSVVEPYNSVLSTHSLLEHTDVNEFQTNLVPYPRIHFMLSSYAPVISAEKAYHEQLSVAEITNSAFEPSSMMAKCDPRHGKYMACCLMYRGDVVPKDVNAAVATIKTKRTIQFVDWCPTGFKCGINYQPPSVVPGGDLAKVQRAVCMISNSTSVVEVFSRIDHKFDLMYAKRAFVHWYVGEGMEEGEFSEAREDLAALEKDYEEVGAEFDEGEEGDDGDEY

SEQ ID NO: 159544 - protein, 181 aa, Zea Mays
MFSSAGKVRVPKQLFVNTDPSSIPAAVRRAGLSLPLVAKPLVAKSHELSLAYDPTSLTKLEPPLVLQEFVNHGGVMFKVYIVGDAIRVVRRFSLPNVDEGDLSNNAGVFRFPRVSCAAASADDADLDPRVAELPPRPLLEILARELRRRLGLRLFNIDMIREHGTRDRFYVIDMNYFPVHC

SEQ ID NO: 159545 - protein, 222 aa, Zea Mays
MLQEVSELDLTDCHGKVRVPKQLFVNTDPSSIPAAVRRAGLSLPLVAKPLVAKSHELSLAYDPTSLTKLEPPLVLQEFVNHGGVMFKVYIVGDAIRVVRRFSLPNVDEGDLSNNAGVFRFPRVSCAAASADDADLDPRVAELPPRPLLEILARELRRRLGLRLFNIDMIREHGTRDRFYVIDMNYFPGMQSDILELAQAIFCFGKADPYMYILELLIKESPV

SEQ ID NO: 159546 - protein, 277 aa, Zea Mays
MVSGVCVGTEGQVDPEAVAPAVAEEAVVPAPAREVVVGYALTSKKAKSFLQPKLRGLARKKGILFVAIDQKRPLSDQGPFDIVLHKLTGRGWQQLLEEYREAHPEVTVLDPPGAIANLLDRQSMLQEVSELDLTDCHGKVRVPKQLFVNTDPSSIPAAVRRAGLSLPLGGVMFKVYIVGDAIRVVRRFSLPNVDEGDLSNNAGVFRFPRVSCAAASADDADLDPRVAELPPRPLLEILARELRRRLGLRLFNIDMIREHGTRDRFYVIDMNYFPVHC

SEQ ID NO: 159547 - protein, 215 aa, Zea Mays
MFSSAGKVRVPKQLFVNTDPSSIPAAVRRAGLSLPLVAKPLVAKSHELSLAYDPTSLTKLEPPLVLQEFVNHGGVMFKVYIVGDAIRVVRRFSLPNVDEGDLSNNAGVFRFPRVSCAAASADDADLDPRVAELPPRPLLEILARELRRRLGLRLFNIDMIREHGTRDRFYVIDMNYFPGILLDGCTERTRCLCCDTCSTLSVLLFLKTVWSPKSG

SEQ ID NO: 159548 - protein, 313 aa, Zea Mays
MVSGVCVGTEGQVDPEAVAPAVAEEAVVPAPAREVVVGYALTSKKAKSFLQPKLRGLARKKGILFVAIDQKRPLSDQGPFDIVLHKLTGRGWQQLLEEYREAHPEVTVLDPPGAIANLLDRQSMLQEVSELDLTDCHGKVRVPKQLFVNTDPSSIPAAVRRAGLSLPLVAKPLVAKSHELSLAYDPTSLTKLEPPLVLQEFVNHGGVMFKVYIVGDAIRVVRRFSLPNVDEGDLSNNAGVFRFPRVSCAAASADDADLDPRVAELPPRPLLEILARELRRRLGLRLFNIDMIREHGTRDRFYVIDMNYFPVHC

SEQ ID NO: 159549 - protein, 178 aa, Zea Mays
MVAKPLVAKSHELSLAYDPTSLTKLEPPLVLQEFVNHGGVMFKVYIVGDAIRVVRRFSLPNVDEGDLSNNAGVFRFPRVSCAAASADDADLDPRVAELPPRPLLEILARELRRRLGLRLFNIDMIREHGTRDRFYVIDMNYFPGMQSDILELAQAIFCFGKADPYMYILELLIKESPV

SEQ ID NO: 159550 - protein, 268 aa, Zea Mays
MYPWQQVWARSETRHLVWPVEPFASRLHPSPAAAPGQLRRFPAAVLRLSPTALELRLMGASESLLSRQQLQQPRPQWADEITTVSEGRRDDADADPLVRRIRSLTIAPPLLSSQSEAEAESSLTDILVGKPSNSSATSGNLNPNVLAELFAMYREWQEENAKKISRKQEEIENKIETADALAVKLLQRFNYCLTYMRSTSHNLAEVHPLQIEVGESKGRLTEVISNCDALCKRIAAEGPESLRSSVQPFMAARAEAEGSGSLDPKQES

SEQ ID NO: 159551 - protein, 206 aa, Zea Mays
MYPWQQVWARSETRHLVWPGKLTFRPNSIDTIVQAKRPNLIGCHLPVEPFASRLHPSPAAAPGQLRRFPAAVLRLSPTALELRLMGASESLLSRQQLQQPRPQWADEITTVSEGRRDDADADPLVRRIRSLTIAPPLLSSQSEAEAESSLTDILVGKPSNSSATSGNLNPNVLAELFAMYREWQEENAKKISRKQIQHGTSWCRRR

SEQ ID NO: 159552 - protein, 435 aa, Zea Mays
MRCTLSAPLRRCLSSTGAADPSLVSSAEHAYRLLRRHHSDPQRLSAALSASGLDASSPHLLDAVLRRCGAASSLALHFFHWCSPSLPSPLPSSLALLAKSFSRASSAPSPSLLAPLPSQLLGPSLLCPVLRRLPQPRLLPFALSLLSARPDHDQPALFLSLLESLSKAGHVLTAEQLVEELQPRLPLSLRHYTALLYGWCRQGKLDEAKHVLARMKAADVALDVVVFNTLLAGFVAEGRFEDAFELAGQMEQRGCPPNAVSYTTLIQGLGARGRVDEAMRVFVEMRRKGCAPDAVTYGTLVNTFCKAGKISQGYEFLDAMSRDGLRVDAAVYHGFFVAHEKKEQLEECLELMERMRECRCPPDLKIYNVVIRLACRLGETKQAMTLWNEMESAGLSPVVDTFAIVVSGLVGQGLLIEACSYFKDMLALRCIRDVG

SEQ ID NO: 159553 - protein, 593 aa, Zea Mays
MRCTLSAPLRRCLSSTGAADPSLVSSAEHAYRLLRRHHSDPQRLSAALSASGLDASSPHLLDAVLRRCGAASSLALHFFHWCSPSLPSPLPSSLALLAKSFSRASSAPSPSLLAPLPSQLLGPSLLCPVLRRLPQPRLLPFALSLLSARPDHDQPALFLSLLESLSKAGHVLTAEQLVEELQPRLPLSLRHYTALLYGWCRQGKLDEAKHVLARMKAADVALDVVVFNTLLAGFVAEGRFEDAFELAGQMEQRGCPPNAVSYTTLIQGLGARGRVDEAMRVFVEMRRKGCAPDAVTYGTLVNTFCKAGKISQGYEFLDAMSRDGLRVDAAVYHGFFVAHEKKEQLEECLELMERMRECRCPPDLKIYNVVIRLACRLGETKQAMTLWNEMESAGLSPVVDTFAIVVSGLVGQGLLIEACSYFKDMVGRGLFVVPQYGVLKDLLNALVRDEKLELAKDVWKCIVSKGCELNVSAWTIWIHALFAKKHVKEACLYCLDMLEAGLMPQPDTFAKLMKGLKKLYNRQIAAEITEKVRKMAEERHVSFKMYKRRGVRDLEEKLKAKRRGQKKRHLRQPGHGKSQVVHRLHVKLCAKSY

SEQ ID NO: 159554 - protein, 64 aa, Zea Mays
MEVAKMDLANFMVDTRDVHQEETHVGSAKSLSQGVARDNFYSMFHITQRGGNSQKRNTKHSRER

SEQ ID NO: 159555 - protein, 64 aa, Zea Mays
MEVAKMDLANFMVDTRDVHQEETHAQQSHCRKVLLGTTSIQCFTLPREEEILKRGIQSIHERDE

SEQ ID NO: 159556 - protein, 510 aa, Zea Mays
MNARKKVSRIQWSLAIQVHCRDPTVWSLVGLLWTSPINLCCLSGLSSVSLSTSMQGAMARVRAPFTPSQWIELEHQALIYKYLAANSPIPHSLLIPIRRSLAASPYPPSYFGTSTLGWGSFQLGYSGNADLEPGRCRRTDGKKWRCSRDAVADQKYCERHMNRGRHRSRKHVEGQPGHAAKAMSAVAAAAAAAAQPAALAGAGAPAAGLTVNQHQLPAKSYATGATDPCSLQYNRELVNKQNESENMQDSDNLSMLTSMNTGNTGSVFPFSKQNTNPFEVTSSRLEFGLVSSDSLMSSPHSSLENVNLLGSQSMNEHQNPASLQHFVDWPRTPAQGGLSWPEAEDMQAQRSQLSISAPMASSELSSASTSPIHEKLMLSPLKLSREYSPTGLGIAANRDEASQLEATWATMFRDSSMGGPLGEVLAKNGNVEARNYLSAPLNLLTDYWDSSHGMESSPVGVLQKTTAFGSVSSSTGSSPRVENHGAYDGFGNLRDDLGSIVVRHPSIRLV

SEQ ID NO: 159557 - protein, 264 aa, Zea Mays
MQDSDNLSMLTSMNTGNTGSVFPFSKQNTNPFEVTSSRLEFGLVSSDSLMSSPHSSLENVNLLGSQSMNEHQNPASLQHFVDWPRTPAQGGLSWPEAEDMQAQRSQLSISAPMASSELSSASTSPIHEKLMLSPLKLSREYSPTGLGIAANRDEASQLEATWATMFRDSSMGGPLGEVLAKNGNVEARNYLSAPLNLLTDYWDSSHGMESSPVGVLQKTTAFGSVSSSTGSSPRVENHGAYDGFGNLRDDLGSIVVRHPSIRLV

SEQ ID NO: 159558 - protein, 229 aa, Zea Mays
MPTSPLNPSSIGAKFPVAEWGQMTMCDAERRLLANALLDISNEWFVLVSESCIPIFDFNTTYRYFRNSNQSFLMAFDDPGPYGRGRYNWNMTPEVELDQWRKGSQWFEVHRELAIEIVKDTVYYPKFKEFCRPHCYVDEHYFPTMLTIEAPNRLANRSVTWVDWSRGGAHPATFGRGDITLEFLRRVREGRTCLHNNQNSTMCFLFARKFAPSTLEPLLELAPTVLGFG

SEQ ID NO: 159559 - protein, 245 aa, Zea Mays
MRCYPKDITDTNLAFVESVSDFARDWFLCYVYVAEWGQMTMCDAERRLLANALLDISNEWFVLVSESCIPIFDFNTTYRYFRNSNQSFLMAFDDPGPYGRGRYNWNMTPEVELDQWRKGSQWFEVHRELAIEIVKDTVYYPKFKEFCRPHCYVDEHYFPTMLTIEAPNRLANRSVTWVDWSRGGAHPATFGRGDITLEFLRRVREGRTCLHNNQNSTMCFLFARKFAPSTLEPLLELAPTVLGFG

SEQ ID NO: 159560 - protein, 207 aa, Zea Mays
MTMCDAERRLLANALLDISNEWFVLVSESCIPIFDFNTTYQYFLNSSQSFVMAIDDPGPYGRGRYDWNMTPEVDVTQWRKGSQWFEVNREVGIEIVKDTVYYPKFKEFCRPSCYSDEHYIQTMLSIETPQSLANRSVTWVDWSRIAAHPARFGRVDITEEFLREVREGQTCLYNEKNSTLCFLFARKFAPSALEPLLELAPTVLGFG

SEQ ID NO: 159561 - protein, 179 aa, Zea Mays
MENDAKEARQGQHRVFPWGMLKVFLLLGLGLSAAGVLMARHGHEVAAATLFRPWLGVSPTAAAAEGLEHSMTDEELLWRASFAPGVRRYPFRRVPKVAFMFLTRGPLPLAPLWERFFRGNEGRYSIYVHALPSYRANFTSESVFYRRQIPSKVAEWGQMTMCDAERRLLANALLDISNE

SEQ ID NO: 159562 - protein, 163 aa, Zea Mays
MENDAKEARQGQHRVFPWGMLKVFLLLGLGLSAAGVLMARHGHEVAAATLFRPWLGVSPTAAAAEGLEHSMTDEELLWRASFAPGVRRYPFRRVPKVAFMFLTRGPLPLAPLWERFFRGNEGRYSIYVHALPSYRANFTSESVFYRRQIPMPGLHIELNCTLR

SEQ ID NO: 159563 - protein, 417 aa, Zea Mays
MPQVYHESREDAERVRGRHLLGMSSWRAPHENARKPIRIYLNYDAVGHSPDRDCKNVGDIVKLGEPPVSSAPGTPICDPHGDPPLVGDCWYNCTLEDIAGKDKRQRLRKALGQTVEWFRKALAVEPVKGNLRLSGYSACGQDGGVQLPHAYVEDGVANADLVLLVTTRPTTGNTLAWAVACERDQWGRAIAGHVNVAPRHLTAEAETLLSATLIHEVMHVLGFDPHAFTHFRDERKRRRGQVTAQSLDKKLGRMVTRVVLPRVVMHARHHYGAFSQNFTGLELEDGGGRGTSGSHWEKRLLMNEIMTGSVDTRSVVSRMTLALLEDSGWYQANYSMAEHLDWGQNQGTEFVISPCNSWKGAYHCNTTQLSGCTYNREAEGYCPIVNYSGDLPKWAQYFPQANKGMPKCSINYYVYDI

SEQ ID NO: 159564 - protein, 367 aa, Zea Mays
MPQVYHESREDAERVRGRHLLGMSSWRAPHENARKPIRIYLNYDAVGHSPDRDCKNVGDIVKLGEPPVSSAPGTPICDPHGDPPLVGDCWYNCTLEDIAGKDKRQRLRKALGQTVEWFRKALAVEPVKGNLRLSGYSACGQDGGVQLPHAYVEDGVANADLVLLVTTRPTTGFDPHAFTHFRDERKRRRGQVTAQSLDKKLGRMVTRVVLPRVVMHARHHYGAFSQNFTGLELEDGGGRGTSGSHWEKRLLMNEIMTGSVDTRSVVSRMTLALLEDSGWYQANYSMAEHLDWGQNQGTEFVISPCNSWKGAYHCNTTQLSGCTYNREAEGYCPIVNYSGDLPKWAQYFPQANKGMPKCSINYYVYDI

SEQ ID NO: 159565 - protein, 287 aa, Zea Mays
MSRCMASTLVRTGFVRGSMTQGNGCYQHRCTNNSLEVAVDGIWKSCPQSGGPVQFPGFNGELICPMYHELCTTVPVPMIGQCPKSCSFNGDCIDGTCHCFPGFHGHDCSRRSCPDKCSNHGTCKANGICECQSGWTGIDCSTDYAGYTCQKGSAILPSLSMCHDVLVRDSDGQHCAPSELSILQQLETVVLVPNYNRLMPSGRTFLNFFNNANCAAAAKRLACWISIQRCDEDGDNRLRVCYSACELYNTACGAGLDCSDQTLFSKREEEEKGVPCTGYGEKKSFWL

SEQ ID NO: 159566 - protein, 150 aa, Zea Mays
MSRCMASTLVRTGFVRGSMTQGNGCYQHRCTNNSLEVAVDGIWKSCPQSGGPVQFPGFNGELICPMYHELCTTVPVPMIGQCPKSCSFNGDCIDGTCHCFPGFHGHDCSRRSCPDKCSNHGTCKANGICECQSGWTGIDCSTVVMLGQWI

SEQ ID NO: 159567 - protein, 295 aa, Zea Mays
MSRCMASTLVRTGFVRGSMTQGNGCYQHRCTNNSLEVAVDGIWKSCPQSGGPVQFPGFNVPMIGQCPKSCSFNGDCIDGTCHCFPGFHGHDCSRRSCPDKCSNHGTCKANGICECQSGWTGIDCSTAVCDEQCSLHGGVCDNGKCEFRCSDYAGYTCQKGSAILPSLSMCHDVLVRDSDGQHCAPSELSILQQLETVVLVPNYNRLMPSGRTFLNFFNNANCAAAAKRLACWISIQRCDEDGDNRLRVCYSACELYNTACGAGLDCSDQTLFSKREEEEKGVPCTGYGEKKSFWL

SEQ ID NO: 159568 - protein, 284 aa, Zea Mays
MSRCMASTLVRTGFVRGSMTQGNGCYQHRCTNNSLEVAVDGIWKSCPQSGGPVQFPGFNGELICPMYHELCTTVPVPMIGQCPKSCSFNGDCIDGTCHCFPGFHGHDCSRRSCPDKCSNHGTCKANGICECQSGWTGIDCSTGYTCQKGSAILPSLSMCHDVLVRDSDGQHCAPSELSILQQLETVVLVPNYNRLMPSGRTFLNFFNNANCAAAAKRLACWISIQRCDEDGDNRLRVCYSACELYNTACGAGLDCSDQTLFSKREEEEKGVPCTGYGEKKSFWL

SEQ ID NO: 159569 - protein, 246 aa, Zea Mays
MYHELCTTVPVPMIGQCPKSCSFNGDCIDGTCHCFPGFHGHDCSRRSCPDKCSNHGTCKANGICECQSGWTGIDCSTAVCDEQCSLHGGVCDNGKCEFRCSDYAGYTCQKGSAILPSLSMCHDVLVRDSDGQHCAPSELSILQQLETVVLVPNYNRLMPSGRTFLNFFNNANCAAAAKRLACWISIQRCDEDGDNRLRVCYSACELYNTACGAGLDCSDQTLFSKREEEEKGVPCTGYGEKKSFWL

SEQ ID NO: 159570 - protein, 99 aa, Zea Mays
MAAAPPIQWCARGTWNRLGFALATFNVATARLTSWLLVRLGLQSSCDRGPRKIITRPGARTNERRWIWMVSTANLRRSCLVVRSRASTWLIDLHRGNGK

SEQ ID NO: 159571 - protein, 52 aa, Zea Mays
MALTNFIVTVAVVGAGVLLFTTDMRRSGALFRRNARQLQQWLQEDTASAASK

SEQ ID NO: 159572 - protein, 59 aa, Zea Mays
MAADCSTLRCIQGGYITCDNYPGKQLDGCDCVCAPDNGRNCVLHLQSGSTYNCSRSNKG

SEQ ID NO: 159573 - protein, 790 aa, Zea Mays
MDKLRVHRCTGDAVEWSPSPIVALAASPCASQTIQGNDESRVTSLVWGRRGGEATGRLLSSSVDGSVCEWDLFYLQQKIVLDTVGIPIWQMAIEPSVDAKNTENNSSEFAVNGHPNQNDSSDSDLSNIDDGDNSEDEDGSTNTISSYHVNDFQRLALACDDGSVRLYNVPESGALTYYRSLPRVSGRTLSVAWSSNAKFVFSGSSDGLIRCWDSTSFHEMYRITVGLGGASNSPELCVWSLLFLRCGTIVSGDSTGSVQFWDSRHGTLLQAHSYHKGDVNALTTVPSGNRVFSAGSDGQVILYKISKDEFGASKNVIKEQVQKWVYVGYLRAHTHDIRALTMAVPICREDALPEEKVVKIRRREKHEFSYHRWAHLGVPMLISGGDDAKLFAYSAREFTQFSPHNFCPAPQHPLIKLARNSTVNGDYVMLVQSSNFLDVLLVTVQNKLTTPSTSSSRGDATVRQLVRLKSKGSRKIISSAACANGTLLAYSDGVRPCLFALRHKGGKKYTLDKLELPKGLPCSQSMLFTVDSSNLILAGRNGKIYIIDIATREISNVFHPTRRADGAKISREPPVTKMFLSADGQWLAAVNCYGDIYVFNLEVQRQHWFISRMNGGSVTSGGFCPKNNTLIITTSKNEVYVFDVETKQLGEWSKRYTHQLPRSFQEFPGEVIGLSFSPQSSSSVIVYSTRAMCYIDFGLPVVEDVDLPNGSAGAAEKSDTKKIKKARQKRKAHDEESKQEKRNNLSFFAFKEPVLFVGHLLDSSILIVEKRWMDVVEGFGAPVHRHIYGT

SEQ ID NO: 159574 - protein, 571 aa, Zea Mays
MYRITVGLGGASNSPELCVWSLLFLRCGTIVSGDSTGSVQFWDSRHGTLLQAHSYHKGDVNALTTVPSGNRVFSAGSDGQVILYKISKDEFGASKNVIKEQVQKWVYVGYLRAHTHDIRALTMAVPICREDALPEEKVVKIRRREKHEFSYHRWAHLGVPMLISGGDDAKLFAYSAREFTQFSPHNFCPAPQHPLIKLARNSTVNGDYVMLVQSSNFLDVLLVTVQNKLTTPSTSSSRGDATVRQLVRLKSKGSRKIISSAACANGTLLAYSDGVRPCLFALRHKGGKKYTLDKLELPKGLPCSQSMLFTVDSSNLILAGRNGKIYIIDIATREISNVFHPTRRADGAKISREPPVTKMFLSADGQWLAAVNCYGDIYVFNLEVQRQHWFISRMNGGSVTSGGFCPKNNTLIITTSKNEVYVFDVETKQLGEWSKRYTHQLPRSFQEFPGEVIGLSFSPQSSSSVIVYSTRAMCYIDFGLPVVEDVDLPNGSAGAAEKSDTKKIKKARQKRKAHDEESKQEKRNNLSFFAFKEPVLFVGHLLDSSILIVEKRWMDVVEGFGAPVHRHIYGT

SEQ ID NO: 159575 - protein, 482 aa, Zea Mays
MYRITVGLGGASNSPELCVWSLLFLRCGTIVSGDSTGSVQFWDSRHGTLLQAHSYHKGDVNALTTVPSGNRVFSAGSDGQVILYKISKDEFGASKNVIKEQVQKWVYVGYLRAHTHDIRALTMAVPICREDALPEEKVVKIRRREKHEFSYHRWAHLGVPMLISGGDDAKLFAYSAREFTQFSPHNFCPAPQHPLIKLARNSTVNGDYVMLVQSSNFLDVLLVTVQNKLTTPSTSSSRGDATVRQLVRLKSKGSRKIISSAACANGTLLAYSDGVRPCLFALRHKGGKKYTLDKLELPKGLPCSQSMLFTVDSSNLILAGRNGKIYIIDIATREISNVFHPTRRADGAKISREPPVTKMFLSADGQWLAAVNCYGDIYVFNLEVQRQHWFISRMNGGSVTSGGFCPKNNTLIITTSKNEVYVFDVETKQLGEWSKRYTHQLPRSFQEFPGEVIGLSFSPQSSSSVIVYSTSWSCREVGHKKN

SEQ ID NO: 159576 - protein, 90 aa, Zea Mays
MKKLHILRTLSCCGLLSHFMNSRPKLSFSHLFDLSQTSDSGLSHLGQRMSDTGPYLGHPCPPSEEPLARDMRESMLLNTNTVNYWVFSLS

SEQ ID NO: 159577 - protein, 147 aa, Zea Mays
MEGGHADLRYSSGAKEVPQQRGVRRRQPPQQSGCKAREKTVSGASRVHLYGGERRNVRLPTVPVQPAAVPPLRDDHTALPPRRFHPNVWRLLRRRLNERHSGQKPRVRGIAKRHVTDGAVTVERPDQRLRVHEHRAAEPDHLLERLR

SEQ ID NO: 159578 - protein, 293 aa, Zea Mays
MAAAQEEAAAAPPSTESDATETEEAPPGGAESDATAMEAAAEYSWLQLRFDRPPRRLYHFARQFRSATSSGSNSSGENFLKGVKWSPDGSSFLTSSDDNSLRLFYLPEEAYIAAEPVAEAAVESEDSYGAFIQANEGEPVYDFCWYPCMSLSDPATCVFASTSRDHPIHLWDATSGELRCTYRAYDAMDEITAALSISFNSSGSKLFAGYNKAIRVFDVHRPGRDFDQYSLLKGGEGPTGIISSISFSPQNGMLAVGSYSQTTAVYAENNMEPLYVLHGQLGGVTQVVKVLYI

SEQ ID NO: 159579 - protein, 445 aa, Zea Mays
MAAAQEEAAAAPPSTESDATETEEAPPGGAESDATAMEAAAEYSWLQLRFDRPPRRLYHFARQFRSATSSGSNSSGENFLKGVKWSPDGSSFLTSSDDNSLRLFYLPEEAYIAAEPVAEAAVESEDSYGAFIQANEGEPVYDFCWYPCMSLSDPATCVFASTSRDHPIHLWDATSGELRCTYRAYDAMDEITAALSISFNSSGSKLFAGYNKAIRVFDVHRPGRDFDQYSLLKGGEGPTGIISSISFSPQNGMLAVGSYSQTTAVYAENNMEPLYVLHGQLGGVTQVLFSKDGNYLYTGGRKDPYILCWDIRNTVDIVYKLYRSADTTNQRIHFDIEPCGRHLATGGQDGMVHVYDLQGGQWVTGYQAAAGMSLLNMCFQRRFNSVFGCEPGKRCCSRWLPRPSISSSWWLDRPAWASAPGQSPSQACLSLSLFLYYIHFNLIST

SEQ ID NO: 159580 - protein, 405 aa, Zea Mays
MAAAQEEAAAAPPSTESDATETEEAPPGGAESDATAMEAAAEYSWLQLRFDRPPRRLYHFARQFRSATSSGSNSSGENFLKGVKWSPDGSSFLTSSDDNSLRLFYLPEEAYIAAEPVAEAAVESEDSYGAFIQANEGEPVYDFCWYPCMSLSDPATCVFASTSRDHPIHLWDATSGELRCTYRAYDAMDEITAALSISFNSSGSKLFAGYNKAIRVFDVHRPGRDFDQYSLLKGGEGPTGIISSISFSPQNGMLAVGSYSQTTAVYAENNMEPLYVLHGQLGGVTQVLFSKDGNYLYTGGRKDPYILCWDIRNTVDIVYKSADTTNQRIHFDIEPCGRHLATGGQDGMVHVYDLQGGQWVTGYQAAADTVNGFSFHPYLPFAVTSSGHRRFGMQDEFEDELNLAG

SEQ ID NO: 159581 - protein, 276 aa, Zea Mays
MSLSDPATCVFASTSRDHPIHLWDATSGELRCTYRAYDAMDEITAALSISFNSSGSKLFAGYNKAIRVFDVHRPGRDFDQYSLLKGGEGPTGIISSISFSPQNGMLAVGSYSQTTAVYAENNMEPLYVLHGQLGGVTQVLFSKDGNYLYTGGRKDPYILCWDIRNTVDIVYKLYRSADTTNQRIHFDIEPCGRHLATGGQDGMVHVYDLQGGQWVTGYQAAADTVNGFSFHPYLPFAVTSSGHRRFGMQDEFEDELNLAGDENSCSVWMFSSSQEA

SEQ ID NO: 159582 - protein, 2959 aa, Zea Mays
MSNHCMNWRHVLAVKQQPRKLHWQQLVSVLSYLSLRLKLPLSSWVQRLVFSYRGKKDTRYGQIDMFGDADGNELPKGPGVDRNTIDIIYSVNNHAAVWWGIHEAARHCINLRLRTHLGGPTQTFAALERMLLDVTNVLMVEAKEAEGRYIGPADICLLPMRLLLDFVEALKKYAYNAYEGSFVLSPPPKASSVFFHANKRVCEEWFSRICDPMLNAGLAMHCSDAVIHYCSLRLVDLRNLAASSLRGNSHMGGATESHAFRERLEADVMKVLRHASLALCRCHETDALVGLQKWAASTFYSYFEQDNQLVRGVSDRDNRFSWISGLIYQSQGQYEKAAAHYSHLLQSEEALISMKSDGIQYIIERVIECYTSLSDWKCLESWLAELQVLRAVHAGKPFSGALTSAGNELNAIHAMACFDEGDFHSAWGYLDLTPKSSNELTLDPKVALERSELMLLRGMLRCNSKLEGITEELHKAKLMLDEALTVVPLNGLPQAAACAGQLHCIFALEEALGLTSQNGLNQSQSIMDSLLKALHDPVDKMHQDCNMWLKVFKVYRNTRPSSLSTLLLCQKLASLSRKQSNFMLATRLNQYLIDHPLKSSDEMDKEILELNIKYEGALLKHANGNNEEALSDLWSLVRASVLSRVSCSSGIGTSHSLVARACLKLSTWMEQANSSPLNSIIPMVVKDFSDSDGFQDGAEKLLSGDSVSVSTLDYHALAQEIIGTARKISWQLCPTMGKAWLAYASWCFAHGSYSLSGTDSNLQNSLSPVLQSELSPSRCHLTDDEKSEVGEIIRSICADEHANHVGCEYPMTPGCYNSAPEHPISLLVEQAISLIETAAGAPGFESREGDDPSAVLASELVVLCKCDSGKDTAPLIGKLTEIWWSLRKRRVSLFGHAAHAYFQYLSHSSTELQSSYHHDALKGKTRSYTMRAMLYLLHIMLNYGVELKETLESGLSTVPLLPWQEIIPQLFARLSSHPEKIVRELLESILLKLGKLSPCSIVYPTLVDISACEGEPSEELQRISDFMVKLYPNLIKDVKLAIEELGMITVLWEEQWLSTLQDLHSDVLRRINILKDEAVRVAANSTLSSAEKNKINAAKYSAVMTPIVVALERRLVSTSREPKTPHEMWFHKEYNAKLKSAVTTLKMPPGSPAALGEIWQPFDSIAASLATHQRRSHIMLSEIAPQLAVLSTSDIPMPGFEKILGSSESFSGNHGIVTISSFCKEVTILSTKTRPKKLILQGSDGQRYTYLLKGREDLRLDSRIMQLLEAINSLLYSSSDTRSRNITLRFYSVTPVSGRAGLIQWVENVSSIYNVYKSWQKRSQLAHAHAEAQVSSVSTGNIHNPVAPVPRPSDMFYGKIIPALKEKGIKRVVSRRDWPLDVKRKVLLELMNETPKQILWQEMWCASEGFRNFNSKVNRFSRSVAAMSIVGHILGLGDRHLDNILMDFSNGDVVHIDYNICFDKGKRLKIPEIVPFRLTQTIESALGLTGVEGVFRVTCEEVMGVLLKNKDIILMLLEVFIWDPLIEWTRGNIQDEAGIAGEEKKGMELAVSLSLFSSRIQEIRVPLQEHKDLFLTNLPATVSSLKKFLDILDQYEVASAIFYHAEKERSSVLQHEMSAKLVLADATSGAEKSRTSFEIHAHELAEAKAAAVDEANKLAIWVEKHALVLEAIRENSVACIESCMQLNCKDKTLSLISAVLESGVPLTVVPEPTRAQCSELDREISQLLSELQGGLSSALDSLGEYSLVLKQVLPVNYITTSPVTSWAQVLQRSVRSTSQDMLSLAKIQAAEVIAKVQGEGINLVQQRYQDLVNQMESYVSCVEKLARECSELMNSIGLNNEVQSKERILSVFMNSVQLPSQKKDGDSTHLSHSGSPQQGEIKTPAKGDVQETTGKVLSILGIAVSQLYGDIRAKVSELSIKAIGKAKFRTDDSGLQADAGMSLQVFEQHIEKCALISGVVDEVHEVIGRTLAETSAAYAKPSPRHWASTFQAALHSSINLIEQMTEAFLPEFIRSVVPHNSEVKETVRSISEVRGSVDNALEKLIEVELERTSLAELEQNYSVKVGRITEQQIALEEAAARGREHLSWEEAEELASQEEICRAQLEQLHETWRQKDMRILSLMKVEDNIMNSLLSSKQYVSSLVDHDQESEFHYGQIKALLSIFAKPFADLESLDHMLSSSGMFPHIDNPISNIKDALSLGSSLSDVVWPLAGILKDHAFFVWELNLLDSVLVLCMREISSSLEHGINANQLYMTLKKKLAIYVEKQVFRYVTERIAPALTLKLDEEISALLQLSQGIRASDQPKRDSAAVGRVALMLEEYCNAYETARAAGTAVSLMKRQLNELTEALRKIILEIVQVEWLHDISSSHAQKVKVLSQNILSDDKFISLMLNLSRSNLLDKIQSSVSLITRSIEVLQACESISVSAEGQLERAMGWACAGPNTSSAGGSTAKGSGIPPEFHGHLLKRRKLLRVVQKEASDLVKVCTSVLEFEASRDGLYFVPEDKASEQSSDKGRAWHQTFLNLLARLDAAFHSFTCAEQEWKLGQLSLEAAGKGLFSANNQVSVVSVKANSALVNLQDVLGAMYGHACEASALLSGFKHVSQDCTALTSECGSLLEEVLAIADGLHDVYTLGKEAAAAHSSLMTNLSKANTILFPLEVCLCADVTVMSEAISNEREKNNASMPLIHGKALYQSYNIKVREACKTLEPLVGPLSDNAKELHSMVMKLGHLSSLHAGNLHKALEVPGERESMRSQDLLSTHPDLLQSDSSTEKDRASLGMDSGSPDLELNTDICLQDRCWISPPEHSYTSSSGCTTGLTQINPYDNLEKIDALMDDGAEIDGSGSTDLETKDSNQEVETDLVVGRIESVDNNSAAAFRQVRGQECDNSDPKSYGDSTTRVTRGKNPFALSILKQVEHKLHGQNIDGTRSLNISEQVDYLLKQATSIDNLCNMYEGWTPWI

SEQ ID NO: 159583 - protein, 3691 aa, Zea Mays
MQTPRPSYAHHQLQQHLSSLLSAAAADPPHPSDDASRTAALSNLRLSFLHPPNRPLLPALAPFLAPPLSVLLADDASYAVRRAAVSAYAALCAVLCSHEAPGGLPDGFVAWALPLLGDPSSAALVAEGLRELLSTGDVSPVERFVPPLLAACRDVLEDERMSPAVLRCLLSLLMLVAAKFPHCFRPQFVDIMDLLLGWAFVQDLADADRSMIIDSFPQFQWHWLGNLQFSLGLLPKFLADMEGLVHDLNLGGSHNPGRLRSLFACFSTVLQIMSSGVAERNNLRELVAGPLEGLAPQLLRCASVIASNLGWSERMEDASKCLVLLAEILQERFADFYVHFVDVLVQSLEVASSAQLAAALKTNLQVLSLQNLGLHAASVGALLDFSSILSKSRLHPNHSVVANSAATYIFCLQHGLEDVVDQAIASVMNELELIKSLLAEGQASCPDIHSPPLELNSERKNESNSGVHCWPQYSEDQLLCLMKFDLKILLATIALDTKKRNERTTNLIQFILKKLDPFGAPFHNFLEMQFQIFSTLHKLSNMELSSNMPASEPFERDSGGYKTQPVVLEKKISCECKKKFVHKYGKYIVQGLNASSSLTLKLEALDWIGSFEKLIHGLERGVDNFSFSYEVIWDATLSSDILFAVLDCAYDRESKVRYHVAITLELLFLGRLINPMNFYVVAQVLLDKLSDPDSNVKDAFLRLFSITLPITTYAFGLFADEHNYRNSSDIVNMSNHCMNWRHVLAVKQQPRKLHWQQLVSVLSYLSLRLKLPLSSWVQRLVFSYRGKKDTRYGQIDMFGDADGNELPKGPGVDRNTIDIIYSVNNHAAVWWGIHEAARHCINLRLRTHLGGPTQTFAALERMLLDVTNVLMVEAKEAEGRYIGPADICLLPMRLLLDFVEALKKYAYNAYEGSFVLSPPPKASSVFFHANKRVCEEWFSRICDPMLNAGLAMHCSDAVIHYCSLRLVDLRNLAASSLRGNSHMGGATESHAFRERLEADVMKVLRHASLALCRCHETDALVGLQKWAASTFYSYFEQDNQLVRGVSDRDNRFSWISGLIYQSQGQYEKAAAHYSHLLQSEEALISMKSDGIQYIIERVIECYTSLSDWKCLESWLAELQVLRAVHAGKPFSGALTSAGNELNAIHAMACFDEGDFHSAWGYLDLTPKSSNELTLDPKVALERSELMLLRGMLRCNSKLEGITEELHKAKLMLDEALTVVPLNGLPQAAACAGQLHCIFALEEALGLTSQNGLNQSQSIMDSLLKALHDPVDKMHQDCNMWLKVFKVYRNTRPSSLSTLLLCQKLASLSRKQSNFMLATRLNQYLIDHPLKSSDEMDKEILELNIKYEGALLKHANGNNEEALSDLWSLVRASVLSRVSCSSGIGTSHSLVARACLKLSTWMEQANSSPLNSIIPMVVKDFSDSDGFQDGAEKLLSGDSVSVSTLDYHALAQEIIGTARKISWQLCPTMGKAWLAYASWCFAHGSYSLSGTDSNLQNSLSPVLQSELSPSRCHLTDDEKSEVGEIIRSICADEHANHVGCEYPMTPGCYNSAPEHPISLLVEQAISLIETAAGAPGFESREGDDPSAVLASELVVLCKCDSGKDTAPLIGKLTEIWWSLRKRRVSLFGHAAHAYFQYLSHSSTELQSSYHHDALKGKTRSYTMRAMLYLLHIMLNYGVELKETLESGLSTVPLLPWQEIIPQLFARLSSHPEKIVRELLESILLKLGKLSPCSIVYPTLVDISACEGEPSEELQRISDFMVKLYPNLIKDVKLAIEELGMITVLWEEQWLSTLQDLHSDVLRRINILKDEAVRVAANSTLSSAEKNKINAAKYSAVMTPIVVALERRLVSTSREPKTPHEMWFHKEYNAKLKSAVTTLKMPPGSPAALGEIWQPFDSIAASLATHQRRSHIMLSEIAPQLAVLSTSDIPMPGFEKILGSSESFSGNHGIVTISSFCKEVTILSTKTRPKKLILQGSDGQRYTYLLKGREDLRLDSRIMQLLEAINSLLYSSSDTRSRNITLRFYSVTPVSGRAGLIQWVENVSSIYNVYKSWQKRSQLAHAHAEAQVSSVSTGNIHNPVAPVPRPSDMFYGKIIPALKEKGIKRVVSRRDWPLDVKRKVLLELMNETPKQILWQEMWCASEGFRNFNSKVNRFSRSVAAMSIVGHILGLGDRHLDNILMDFSNGDVVHIDYNICFDKGKRLKIPEIVPFRLTQTIESALGLTGVEGVFRVTCEEVMGVLLKNKDIILMLLEVFIWDPLIEWTRGNIQDEAGIAGEEKKGMELAVSLSLFSSRIQEIRVPLQEHKDLFLTNLPATVSSLKKFLDILDQYEVASAIFYHAEKERSSVLQHEMSAKLVLADATSGAEKSRTSFEIHAHELAEAKAAAVDEANKLAIWVEKHALVLEAIRENSVACIESCMQLNCKDKTLSLISAVLESGVPLTVVPEPTRAQCSELDREISQLLSELQGGLSSALDSLGEYSLVLKQVLPVNYITTSPVTSWAQVLQRSVRSTSQDMLSLAKIQAAEVIAKVQGEGINLVQQRYQDLVNQMESYVSCVEKLARECSELMNSIGLNNEVQSKERILSVFMNSVQLPSQKKDGDSTHLSHSGSPQQGEIKTPAKGDVQETTGKVLSILGIAVSQLYGDIRAKVSELSIKAIGKAKFRTDDSGLQADAGMSLQVFEQHIEKCALISGVVDEVHEVIGRTLAETSAAYAKPSPRHWASTFQAALHSSINLIEQMTEAFLPEFIRSVVPHNSEVKETVRSISEVRGSVDNALEKLIEVELERTSLAELEQNYSVKVGRITEQQIALEEAAARGREHLSWEEAEELASQEEICRAQLEQLHETWRQKDMRILSLMKVEDNIMNSLLSSKQYVSSLVDHDQESEFHYGQIKALLSIFAKPFADLESLDHMLSSSGMFPHIDNPISNIKDALSLGSSLSDVVWPLAGILKDHAFFVWELNLLDSVLVLCMREISSSLEHGINANQLYMTLKKKLAIYVEKQVFRYVTERIAPALTLKLDEEISALLQLSQGIRASDQPKRDSAAVGRVALMLEEYCNAYETARAAGTAVSLMKRQLNELTEALRKIILEIVQVEWLHDISSSHAQKVKVLSQNILSDDKFISLMLNLSRSNLLDKIQSSVSLITRSIEVLQACESISVSAEGQLERAMGWACAGPNTSSAGGSTAKGSGIPPEFHGHLLKRRKLLRVVQKEASDLVKVCTSVLEFEASRDGLYFVPEDKASEQSSDKGRAWHQTFLNLLARLDAAFHSFTCAEQEWKLGQLSLEAAGKGLFSANNQVSVVSVKANSALVNLQDVLGAMYGHACEASALLSGFKHVSQDCTALTSECGSLLEEVLAIADGLHDVYTLGKEAAAAHSSLMTNLSKANTILFPLEVCLCADVTVMSEAISNEREKNNASMPLIHGKALYQSYNIKVREACKTLEPLVGPLSDNAKELHSMVMKLGHLSSLHAGNLHKALEVPGERESMRSQDLLSTHPDLLQSDSSTEKDRASLGMDSGSPDLELNTDICLQDRCWISPPEHSYTSSSGCTTGLTQINPYDNLEKIDALMDDGAEIDGSGSTDLETKDSNQEVETDLVVGRIESVDNNSAAAFRQVRGQECDNSDPKSYGDSTTRVTRGKNPFALSILKQVEHKLHGQNIDGTRSLNISEQVDYLLKQATSIDNLCNMYEGWTPWI

SEQ ID NO: 159584 - protein, 1533 aa, Zea Mays
MSIVGHILGLGDRHLDNILMDFSNGDVVHIDYNICFDKGKRLKIPEIVPFRLTQTIESALGLTGVEGVFRVTCEEVMGVLLKNKDIILMLLEVFIWDPLIEWTRGNIQDEAGIAGEEKKGMELAVSLSLFSSRIQEIRVPLQEHKDLFLTNLPATVSSLKKFLDILDQYEVASAIFYHAEKERSSVLQHEMSAKLVLADATSGAEKSRTSFEIHAHELAEAKAAAVDEANKLAIWVEKHALVLEAIRENSVACIESCMQLNCKDKTLSLISAVLESGVPLTVVPEPTRAQCSELDREISQLLSELQGGLSSALDSLGEYSLVLKQVLPVNYITTSPVTSWAQVLQRSVRSTSQDMLSLAKIQAAEVIAKVQGEGINLVQQRYQDLVNQMESYVSCVEKLARECSELMNSIGLNNEVQSKERILSVFMNSVQLPSQKKDGDSTHLSHSGSPQQGEIKTPAKGDVQETTGKVLSILGIAVSQLYGDIRAKVSELSIKAIGKAKFRTDDSGLQADAGMSLQVFEQHIEKCALISGVVDEVHEVIGRTLAETSAAYAKPSPRHWASTFQAALHSSINLIEQMTEAFLPEFIRSVVPHNSEVKETVRSISEVRGSVDNALEKLIEVELERTSLAELEQNYSVKVGRITEQQIALEEAAARGREHLSWEEAEELASQEEICRAQLEQLHETWRQKDMRILSLMKVEDNIMNSLLSSKQYVSSLVDHDQESEFHYGQIKALLSIFAKPFADLESLDHMLSSSGMFPHIDNPISNIKDALSLGSSLSDVVWPLAGILKDHAFFVWELNLLDSVLVLCMREISSSLEHGINANQLYMTLKKKLAIYVEKQVFRYVTERIAPALTLKLDEEISALLQLSQGIRASDQPKRDSAAVGRVALMLEEYCNAYETARAAGTAVSLMKRQLNELTEALRKIILEIVQVEWLHDISSSHAQKVKVLSQNILSDDKFISLMLNLSRSNLLDKIQSSVSLITRSIEVLQACESISVSAEGQLERAMGWACAGPNTSSAGGSTAKGSGIPPEFHGHLLKRRKLLRVVQKEASDLVKVCTSVLEFEASRDGLYFVPEDKASEQSSDKGRAWHQTFLNLLARLDAAFHSFTCAEQEWKLGQLSLEAAGKGLFSANNQVSVVSVKANSALVNLQDVLGAMYGHACEASALLSGFKHVSQDCTALTSECGSLLEEVLAIADGLHDVYTLGKEAAAAHSSLMTNLSKANTILFPLEVCLCADVTVMSEAISNEREKNNASMPLIHGKALYQSYNIKVREACKTLEPLVGPLSDNAKELHSMVMKLGHLSSLHAGNLHKALEVPGERESMRSQDLLSTHPDLLQSDSSTEKDRASLGMDSGSPDLELNTDICLQDRCWISPPEHSYTSSSGCTTGLTQINPYDNLEKIDALMDDGAEIDGSGSTDLETKDSNQEVETDLVVGRIESVDNNSAAAFRQVRGQECDNSDPKSYGDSTTRVTRGKNPFALSILKQVEHKLHGQNIDGTRSLNISEQVDYLLKQATSIDNLCNMYEGWTPWI

SEQ ID NO: 159585 - protein, 398 aa, Zea Mays
MAMATALRKLSANALRRQPLSRITPLYYMASLPATEERSGITWTKQLNAPLEEVDPEIADIIEHEKARQWKGLELIPSENFTSVSVMQAVGSVMTNKYSEGYPGARYYGGNEFIDMAESLCQKRALEAFRLDPAKWGVNVQPLSGSPANFHVYTALLKPHERIMALDLPHGGHLSHGYQTDTKKISATSIFFETMPYRLDESTGLIDYDQLEKSAVLFRPKLIIAGASAYARLYDYDRMRKICNKQKAILLADMAHISGLVAAGVVPSPFDYADVVTTTTHKSLRGPRGAMIFYRKGVKEINKQGKEVMYDFEDKINAAVFPGLQGGPHNHTITGLAVALKQATTPEYRAYQEQVISNCAKFAQSLISKGYELVSGGTDNHLVLVNLKNKMVQGWRRF

SEQ ID NO: 159586 - protein, 478 aa, Zea Mays
MTEDHAEDNLAARAEAYLDQAVLRHPGDATKALKSCEELLPLAEDLGIVSRCVEAIAARSSSASRSWFDDLAVLGLRMYKRVMAAMAARGDVRAEARESCLVSYARGTIPGLSRSMRRRLASAPVSSEVEQKELLEAVVASLPADKCSGRVVTAKFLFALLRTAHILRASDAARAALERKAATQLQQAALEDVLIPSYSGTAETLYDVDCVQRIVRYFLAEEELGGEASSSAAIEEEEAVAVARPSAVVMVQVGKLVDNYLAEVASDANLKPAKFCDLALSLPDHARIYDDGVYRAVDIYLKAHPRLTAEERDRVVGVVDCRKLTVEACTHAAQNERLPLRAVLQVLFFEQLQLRRAIAGTLLAPSAGAAPREAAAWRGATALAQDSQVLRLDMDSMASRVQDLERECSSMRRAIKKIDGRGGSGSGSRSPGGRSADGSRPAAGGWRARHGCKFSTQVCDSHARNVVASRASRMGMSP

SEQ ID NO: 159587 - protein, 440 aa, Zea Mays
MRKPKPDSVPWKKRRQNISSEDQALISSAVASLNKFSDDGSFMEKISNVESKNTNVSTASASADEQRDNGQKTPKESSNKVQLVSTQKLNANQMAAKILQLRMKGKHQEAEQLSREMEALLENQDTAHEKPGHGKERSSIRPTLKPTAADHRRREDDADLHLANKIMHNKQYNMSKSIEDEYDFGDAPTKKDKRKNKEARDERKSTDRRMLTQKERCMYCFENPSRPKHLVVAIGNFSYLMLPQFEPVVPGHCIILPLQHESGTRTVDQNVWGEIRNFKKCLLKMFAQQDKDVLFMETVISLARQRRHCMIECIPVPCEVSSNAPMYFKKAIDEAEEEWTQHEMKKVIPTSASRNLRQVIPENFAYFHVEFGLDRGFVHVIDDESKFSAGFGLNVIRGMLQLPEEDMHRRRRHESMDNQRQAVASFMKDWEPFDWTKQLD

SEQ ID NO: 159588 - protein, 664 aa, Zea Mays
MMSVGASVAGRTGGGDATSLTTMIPNPANLTGEETEGDGLRASEVVRREMGLEWMLKPASSSQTEGTGVRKVDNVEKDESAHEEIMRPNPKELNPYLKDNGTGYPEESTPSNAGSQLLASSVVGDGGASWRLKALKRAKEQAAREGRKLEEVVEERWSSLGDLAVSVSASRAAHSHAHLHAIRGRKSGNADNSEERVKRNPEGQLDGSSGRREYLRDVSSQHHAMRKPKPDSVPWKKRRQNISSEDQALISSAVASLNKFSDDGSFMEKISNVESKNTNVSTASASADEQRDNGQKTPKESSNKVQLVSTQKLNANQMAAKILQLRMKGKHQEAEQLSREMEALLENQDTAHEKPGHGKERSSIRPTLKPTAADHRRREDDADLHLANKIMHNKQYNMSKSIEDEYDFGDAPTKKDKRKNKEARDERKSTDRRMLTQKERCMYCFENPSRPKHLVVAIGNFSYLMLPQFEPVVPGHCIILPLQHESGTRTVDQNVWGEIRNFKKCLLKMFAQQDKDVLFMETVISLARQRRHCMIECIPVPCEVSSNAPMYFKKAIDEAEEEWTQHEMKKVIPTSASRNLRQVIPENFAYFHVEFGLDRGFVHVIDDESKFSAGFGLNVIRGMLQLPEEDMHRRRRHESMDNQRQAVASFMKDWEPFDWTKQLD

SEQ ID NO: 159589 - protein, 112 aa, Zea Mays
MEEEGAPCKHKHRAQLIDIPSDGERRKRKKRTPRAGRDSRDLGRCTPRSIRCYSRRFPFGTAVDWLLWSRARGEANGPRPGRGRGTSTREADRTRQSRRRQSSPRPHATQDS

SEQ ID NO: 159590 - protein, 247 aa, Zea Mays
MAAASSAAPARHSCAKLSVPVEDPKAVTAGGGTVFVKATWLPSRFSLAVTDGAGAWVADASDHELAWTFERQGTKLEWRWKLQPSPNTQQTISEILDFLMDANIRLSEEVVRKTQSFDKLKQEAEKCLQQSERFNNEKAEFEQAAFSKFVAVLNSKKAKLRQLRDKVVELEPAVKPPKEEAGQEQEEEEENSTDRTELFEGENDKEASAKDEHSGETGSGNVPSSPGESAATSRGRGRGRGRKKARR

SEQ ID NO: 159591 - protein, 178 aa, Zea Mays
MLGPSVPDGGRRGGKGRGGGSAAGSGEEAAAAAWSWERRPWFSRPVIARAKRVLTRDPPPQQEAKKKHEPRASFLDSFFFKNRMRKTSIRVPGSIDLFLSRNRCCLCTSVVAASKWDFEHVYKVIGLVFLQHTHTKKKRDVRTVRTEDMWAGIKWAGGSGREMGSRDRHVPVVPCGDS

SEQ ID NO: 159592 - protein, 146 aa, Zea Mays
MSLSTCNVSCPGRAIATICRPLKTPVLLPSPARPTNCHGATASHLIGPGRCALWSGQGVERPSSNGWRGGGAQGDQGPPRRGRGDPQGSGEGAAEVGLRRRGAARGGDGRRGGAARAGWRRRRRLRPHHHRLEDARHGRPRGDAAD

SEQ ID NO: 159593 - protein, 140 aa, Zea Mays
MAGAAAERKVIRVLLVEDEEIHRVLARALLRSACGGVELHEAGTGAEAVRRVRDGGAAAAYDLIITDWKMPVMDGHEVRHAVCATRQIRAMGVTTPIVGLSSDTLPPDVDAFIKAGADDFTPKPLSKEKLVRILTKFHLA

SEQ ID NO: 159594 - protein, 445 aa, Zea Mays
MDFAELEAVEGLRWPWHSWPPTTPAAASLVVPTSVLCSPLQHPTAPDLLPLLPYAPLRCASPGCGAALNPFSRVHHGSARWSCAFCGAAANPFPRLLAPDALPAELFPTHSSVEYLLPPDPAEPGGPGPPALVFVIDAATAAEELTVLKDEVRRLMQGLPEGIRVALVTFAASVWVHDLGFEGCARVVVLNGERELESDKIQKLLGIHRSQYKNLAMPRSTEVQRFLLPVSECEFNITSAIEDLSSMPACPRGHRPLRATGAAISTAIALLEGCCSPSTGGRIMIFTSGPATVGPGCVVETDLGKTIRSHRDIFNSNAPLTDKARDFYKKVAKRLTDHALVLDLFACSLDQVGAAELRNPIEVTGGLMVHTESFEYEQFKSCFRHMFRREGTNYLNMNFNATIEIVTSKEVKICGALGPCISLRRKNNSVSDKEIGEVYDKVPTW

SEQ ID NO: 159595 - protein, 550 aa, Zea Mays
MAASAAAGRSWDPAVSLRLGHPALVLLERCRGARPFRAILAHLLRLGLAMETFPMSRLLHYAIVVSSPRLTREAELLFQHFTPRPNLYIYNLMLSAAAARDSSSSTQAAALYRSMLASSVLPDQQTFLALLRSVERLSAGRQVHAHVVVSGLHSRVYLRNSLIKMYIDAGDVETAELMFRSALVLDTVSCNIMLSGYVNEGCTLKALWFFRDMASRGIVVDQYTAVALLTCCGRLKNELIGRSVHGVIVRRMDAGDHGLILVNALLDMYAKCGRMNAAKTIFGETGEKDAISWNTMVSGFVNAGMLDLASRFFSEAPSRDLISWNALLAGYARYKSFNEVMKLFHDMVASCVNLDKVTAVTLISAATGKGSLNHAKSVHGWVVKEFDHQDAFLASALVDMYCKCGNVKTAYYVFEKALDKDVTLWTAMISGLAFNGHGTEALELFCKMQTEVVAPNGVTLLAVLSACSHSGLLDEGCKIFDAMKQRYSIEPGIEHFGCMVDLLARSEEGGYVLLSNLHAAGGHWNHSDKVRQIMERKGLRKLAGASNFGS

SEQ ID NO: 159596 - protein, 59 aa, Zea Mays
MQVLYRCSLRCKQARSLRPNYPLMGRKGSRTKIMDIFYNEKKSIFDYFCTLDCRFSCTM

SEQ ID NO: 159597 - protein, 105 aa, Zea Mays
MSCAFEKFPVGRIHRQLKQRTQANGRVGATAAVYSAAILEYLTAEVLELAGNASKDLKVKRITPRHLQLAIRGDEELDTLIKGTIAGGGVIPHIHKSLINKSSKE

SEQ ID NO: 159598 - protein, 114 aa, Zea Mays
MDGLTDEQRLAFQEAFSLFDKNGDGCITMEELAAVTRSLGLDPSDQELNDMMSEVDTDGNGIIDFQEFLSLIARKMKDGDGDEELKEAFEVLDKDQNGFISPVESRGEDDRRGG

SEQ ID NO: 159599 - protein, 131 aa, Zea Mays
MDIEDSGLEIEGLGSLGGTSLKFKVHSFEIRECILWLSIVFVTILCTPQLTVIRWSPNPPVSADVLHQWKGFCALIANAYYVKGMAWLPVKTLQLEQMAVTGSSEKPSVVASRMQLVFSTLEVVSPQWPRV

SEQ ID NO: 159600 - protein, 184 aa, Zea Mays
MLLMLHETLPFVRPTSSCRDPKLSEKSASAFHGKLGCSAVCSSAEGYRVQKPHIVHSYKVSFTRTSHHLCKSLNERTTRHCLHRFHVNASPDDDDFRSSRNIAISLFKRYKNVIDRGGGENLNEFVSAGVTAYALGCTDEGLRKELMDIEDSGLEIEGLGSLGGTSLKFKVHSFEVVSPQWPRV

SEQ ID NO: 159601 - protein, 115 aa, Zea Mays
MDIEDSGLEIEGLGSLGGTSLKFKVHSFEIRECILWLSIVFVTILCTPQLTVIRWSPNPPVSADVLHQWKGFCALIANAYYVKGMAWLPVKTLQLEQMAVTGSSEKPSVVASRMQ

SEQ ID NO: 159602 - protein, 116 aa, Zea Mays
MDRLCRHCYTTTPVHPARAAGVSAGFVPPLPSPAARPPSTLKLAPSRRLELVVLASAVATAKHEEASWDHWLAECGGYSQPVGTGRGEYGQGRDRCHEEAATWDGPITAREICLQA

SEQ ID NO: 159603 - protein, 617 aa, Zea Mays
MRRRPGITGLQNVAATLNQLGLVGENMAKVGTDVMKKQRLGMVRSQLEKFACKHKKTSFSTVGFDLPDWFRNPKDGYPCSRLDGNGDDDFVLPAKSDFSEQQGCSATGGGSSPLSILASCPASHEDAEFEADMDEVSRILRSRFASPEAIVITMDCCPVRVSARLVSKVLSRFSNDWVAAFGFFMWAGTQEGYCHCADSYDMMVDILGKFKQFDLMCGLIGQMHEIGGLVSLATMTKVMRRLCGANRWSDAIDAFHKMDRFGVAKDTKAMNVLLDTLCKERSVKRARGAFQALKGTIPPDESSFNTLVHGWCKARMLKEARETMKEMERHGFSPSVTTYTCLIEAYCMEKDFQTVDGILDEMHTKGCTPNIITYTIVMHALGKAGRTQEALDTFDKVKQDGCALDASFYNCLIYILCRAGRLQDANFVVEEMHRTGISPNLTTFNTLISAACDHSLAENALKLLVQMEEQSCNPDIKTYTPLLKLCCRRKWVKTLLFLICHMFRKDITPDFSTYTLLVCWLCRNGRLTQSCLFLEEMVLKGFTPQQATFDLVLEKLKNMHMLSAVRKIQLLRMHTEGTRCRSGVPSYLREDGHDRHCYAVLSNTSEAESSIDGKELL

SEQ ID NO: 159604 - protein, 626 aa, Zea Mays
MRRRPGITGLQNVAATLNQLGLVGENMAKVGTDVMKKQRLGMVRSQLEKFACKHKKTSFSTVGFDLPDWFRNPKDGYPCSRLDGNGDDDFVLPAKSDFSEQQGCSATGGGSSPLSILASCPASHEDAEFEADMDEVSRILRSRFASPEAIVITMDCCPVRVSARLVSKVLSRFSNDWVAAFGFFMWAGTQEGYCHCADSYDMMVDILGKFKQFDLMCGLIGQMHEIGGLVSLATMTKVMRRLCGANRWSDAIDAFHKMDRFGVAKDTKAMNVLLDTLCKERSVKRARGAFQALKGTIPPDESSFNTLVHGWCKARMLKEARETMKEMERHGFSPSVTTYTCLIEAYCMEKDFQTVDGILDEMHTKGCTPNIITYTIVMHALGKAGRTQEALDTFDKVKQDGCALDASFYNCLIYILCRAGRLQDANFVVEEMHRTGISPNLTTFNTLISAACDHSLAENALKLLVQMEEQSCNPDIKTYTPLLKLCCRRKWVKTLLFLICHMFRKDITPDFSTYTLLVCWLCRNGRLTQSCLFLEEMVLKGFTPQQATFDLVLEKLKNMHMLSAVRKIQLLRMHTEGTRCRSGVPSYLREDGHDRHCYAVLSNTSEAESSIDGKEVDIQGHHLLPT

SEQ ID NO: 159605 - protein, 71 aa, Zea Mays
MDIFHSSSCQWSAWTAYKSQAWVATSCSETSIFLCAINGCLAQIASTYHMINQYWAYSILFRRFLYHWTVI

SEQ ID NO: 159606 - protein, 493 aa, Zea Mays
MDEVSRILRSRFASPEAIVITMDCCPVRVSARLVSKVLSRFSNDWVAAFGFFMWAGTQEGYCHCADSYDMMVDILGKFKQFDLMCGLIGQMHEIGGLVSLATMTKVMRRLCGANRWSDAIDAFHKMDRFGVAKDTKAMNVLLDTLCKERSVKRARGAFQALKGTIPPDESSFNTLVHGWCKARMLKEARETMKEMERHGFSPSVTTYTCLIEAYCMEKDFQTVDGILDEMHTKGCTPNIITYTIVMHALGKAGRTQEALDTFDKVKQDGCALDASFYNCLIYILCRAGRLQDANFVVEEMHRTGISPNLTTFNTLISAACDHSLAENALKLLVQMEEQSCNPDIKTYTPLLKLCCRRKWVKTLLFLICHMFRKDITPDFSTYTLLVCWLCRNGRLTQSCLFLEEMVLKGFTPQQATFDLVLEKLKNMHMLSAVRKIQLLRMHTEGTRCRSGVPSYLREDGHDRHCYAVLSNTSEAESSIDGKEDIQGHHLLPT

SEQ ID NO: 159607 - protein, 485 aa, Zea Mays
MDEVSRILRSRFASPEAIVITMDCCPVRVSARLVSKVLSRFSNDWVAAFGFFMWAGTQEGYCHCADSYDMMVDILGKFKQFDLMCGLIGQMHEIGGLVSLATMTKVMRRLCGANRWSDAIDAFHKMDRFGVAKDTKAMNVLLDTLCKERSVKRARGAFQALKGTIPPDESSFNTLVHGWCKARMLKEARETMKEMERHGFSPSVTTYTCLIEAYCMEKDFQTVDGILDEMHTKGCTPNIITYTIVMHALGKAGRTQEALDTFDKVKQDGCALDASFYNCLIYILCRAGRLQDANFVVEEMHRTGISPNLTTFNTLISAACDHSLAENALKLLVQMEEQSCNPDIKTYTPLLKLCCRRKWVKTLLFLICHMFRKDITPDFSTYTLLVCWLCRNGRLTQSCLFLEEMVLKGFTPQQATFDLVLEKLKNMHMLSAVRKIQLLRMHTEGTRCRSGVPSYLREDGHDRHCYAVLSNTSEAESSIDGKELL

SEQ ID NO: 159608 - protein, 615 aa, Zea Mays
MWRLLSNFQNQLGLVGENMAKVGTDVMKKQRLGMVRSQLEKFACKHKKTSFSTVGFDLPDWFRNPKDGYPCSRLDGNGDDDFVLPAKSDFSEQQGCSATGGGSSPLSILASCPASHEDAEFEADMDEVSRILRSRFASPEAIVITMDCCPVRVSARLVSKVLSRFSNDWVAAFGFFMWAGTQEGYCHCADSYDMMVDILGKFKQFDLMCGLIGQMHEIGGLVSLATMTKVMRRLCGANRWSDAIDAFHKMDRFGVAKDTKAMNVLLDTLCKERSVKRARGAFQALKGTIPPDESSFNTLVHGWCKARMLKEARETMKEMERHGFSPSVTTYTCLIEAYCMEKDFQTVDGILDEMHTKGCTPNIITYTIVMHALGKAGRTQEALDTFDKVKQDGCALDASFYNCLIYILCRAGRLQDANFVVEEMHRTGISPNLTTFNTLISAACDHSLAENALKLLVQMEEQSCNPDIKTYTPLLKLCCRRKWVKTLLFLICHMFRKDITPDFSTYTLLVCWLCRNGRLTQSCLFLEEMVLKGFTPQQATFDLVLEKLKNMHMLSAVRKIQLLRMHTEGTRCRSGVPSYLREDGHDRHCYAVLSNTSEAESSIDGKEVPRAVHIL

SEQ ID NO: 159609 - protein, 58 aa, Zea Mays
MWRLLSNFQNQLGLVGENMAKVGTDVMKKQRLGMVRSQLEKFACKHKVFIPLDSHMNL

SEQ ID NO: 159610 - protein, 526 aa, Zea Mays
MVILVPGWMAMAMMTLCSRPNQTSQNNKVALPPVEDPVHCRSLPAALHPMKMPNLRPTWMRVSARLVSKVLSRFSNDWVAAFGFFMWAGTQEGYCHCADSYDMMVDILGKFKQFDLMCGLIGQMHEIGGLVSLATMTKVMRRLCGANRWSDAIDAFHKMDRFGVAKDTKAMNVLLDTLCKERSVKRARGAFQALKGTIPPDESSFNTLVHGWCKARMLKEARETMKEMERHGFSPSVTTYTCLIEAYCMEKDFQTVDGILDEMHTKGCTPNIITYTIVMHALGKAGRTQEALDTFDKVKQDGCALDASFYNCLIYILCRAGRLQDANFVVEEMHRTGISPNLTTFNTLISAACDHSLAENALKLLVQMEEQSCNPDIKTYTPLLKLCCRRKWVKTLLFLICHMFRKDITPDFSTYTLLVCWLCRNGRLTQSCLFLEEMVLKGFTPQQATFDLVLEKLKNMHMLSAVRKIQLLRMHTEGTRCRSGVPSYLREDGHDRHCYAVLSNTSEAESSIDGKEDIQGHHLLPT

SEQ ID NO: 159611 - protein, 66 aa, Zea Mays
MRRRPGITGLQNVAATLNQLGLVGENMAKVGTDVMKKQRLGMVRSQLEKFACKHKVFIPLDSHMNL

SEQ ID NO: 159612 - protein, 626 aa, Zea Mays
MRRRPGITGLQNVAATLNQLGLVGENMAKVGTDVMKKQRLGMVRSQLEKFACKHKKTSFSTVGFDLPDWFRNPKDGYPCSRLDGNGDDDFVLPAKSDFSEQQGCSATGGGSSPLSILASCPASHEDAEFEADMDEVSRILRSRFASPEAIVITMDCCPVRVSARLVSKVLSRFSNDWVAAFGFFMWAGTQEGYCHCADSYDMMVDILGKFKQFDLMCGLIGQMHEIGGLVSLATMTKVMRRLCGANRWSDAIDAFHKMDRFGVAKDTKAMNVLLDTLCKERSVKRARGAFQALKGTIPPDESSFNTLVHGWCKARMLKEARETMKEMERHGFSPSVTTYTCLIEAYCMEKDFQTVDGILDEMHTKGCTPNIITYTIVMHALGKAGRTQEALDTFDKVKQDGCALDASFYNCLIYILCRAGRLQDANFVVEEMHRTGISPNLTTFNTLISAACDHSLAENALKLLVQMEEQSCNPDIKTYTPLLKLCCRRKWVKTLLFLICHMFRKDITPDFSTYTLLVCWLCRNGRLTQSCLFLEEMVLKGFTPQQATFDLVLEKLKNMHMLSAVRKIQLLRMHTEGTRCRSGVPSYLREDGHDRHCYAVLSNTSEAESSIDGKEVFIPLDSHMNL

SEQ ID NO: 159613 - protein, 588 aa, Zea Mays
MRRRPGITGLQNVAATLKTSFSTVGFDLPDWFRNPKDGYPCSRLDGNGDDDFVLPAKSDFSEQQGCSATGGGSSPLSILASCPASHEDAEFEADMDEVSRILRSRFASPEAIVITMDCCPVRVSARLVSKVLSRFSNDWVAAFGFFMWAGTQEGYCHCADSYDMMVDILGKFKQFDLMCGLIGQMHEIGGLVSLATMTKVMRRLCGANRWSDAIDAFHKMDRFGVAKDTKAMNVLLDTLCKERSVKRARGAFQALKGTIPPDESSFNTLVHGWCKARMLKEARETMKEMERHGFSPSVTTYTCLIEAYCMEKDFQTVDGILDEMHTKGCTPNIITYTIVMHALGKAGRTQEALDTFDKVKQDGCALDASFYNCLIYILCRAGRLQDANFVVEEMHRTGISPNLTTFNTLISAACDHSLAENALKLLVQMEEQSCNPDIKTYTPLLKLCCRRKWVKTLLFLICHMFRKDITPDFSTYTLLVCWLCRNGRLTQSCLFLEEMVLKGFTPQQATFDLVLEKLKNMHMLSAVRKIQLLRMHTEGTRCRSGVPSYLREDGHDRHCYAVLSNTSEAESSIDGKEVFIPLDSHMNL

SEQ ID NO: 159614 - protein, 63 aa, Zea Mays
MRRRPGITGLQNVAATLNQLGLVGENMAKVGTDVMKKQRLGMVRSQLEKFACKHKHRSLPHIT

SEQ ID NO: 159615 - protein, 585 aa, Zea Mays
MRRRPGITGLQNVAATLKTSFSTVGFDLPDWFRNPKDGYPCSRLDGNGDDDFVLPAKSDFSEQQGCSATGGGSSPLSILASCPASHEDAEFEADMDEVSRILRSRFASPEAIVITMDCCPVRVSARLVSKVLSRFSNDWVAAFGFFMWAGTQEGYCHCADSYDMMVDILGKFKQFDLMCGLIGQMHEIGGLVSLATMTKVMRRLCGANRWSDAIDAFHKMDRFGVAKDTKAMNVLLDTLCKERSVKRARGAFQALKGTIPPDESSFNTLVHGWCKARMLKEARETMKEMERHGFSPSVTTYTCLIEAYCMEKDFQTVDGILDEMHTKGCTPNIITYTIVMHALGKAGRTQEALDTFDKVKQDGCALDASFYNCLIYILCRAGRLQDANFVVEEMHRTGISPNLTTFNTLISAACDHSLAENALKLLVQMEEQSCNPDIKTYTPLLKLCCRRKWVKTLLFLICHMFRKDITPDFSTYTLLVCWLCRNGRLTQSCLFLEEMVLKGFTPQQATFDLVLEKLKNMHMLSAVRKIQLLRMHTEGTRCRSGVPSYLREDGHDRHCYAVLSNTSEAESSIDGKEVPRAVHIL

SEQ ID NO: 159616 - protein, 57 aa, Zea Mays
MRRRPGITGLQNVAATLELSEPVGTGRGEYGQGRDRCHEEAATWDGPITAREICLQA

SEQ ID NO: 159617 - protein, 491 aa, Zea Mays
MDEVSRILRSRFASPEAIVITMDCCPVRVSARLVSKVLSRFSNDWVAAFGFFMWAGTQEGYCHCADSYDMMVDILGKFKQFDLMCGLIGQMHEIGGLVSLATMTKVMRRLCGANRWSDAIDAFHKMDRFGVAKDTKAMNVLLDTLCKERSVKRARGAFQALKGTIPPDESSFNTLVHGWCKARMLKEARETMKEMERHGFSPSVTTYTCLIEAYCMEKDFQTVDGILDEMHTKGCTPNIITYTIVMHALGKAGRTQEALDTFDKVKQDGCALDASFYNCLIYILCRAGRLQDANFVVEEMHRTGISPNLTTFNTLISAACDHSLAENALKLLVQMEEQSCNPDIKTYTPLLKLCCRRKWVKTLLFLICHMFRKDITPDFSTYTLLVCWLCRNGRLTQSCLFLEEMVLKGFTPQQATFDLVLEKLKNMHMLSAVRKIQLLRMHTEGTRCRSGVPSYLREDGHDRHCYAVLSNTSEAESSIDGKEVPRAVHIL

SEQ ID NO: 159618 - protein, 61 aa, Zea Mays
MLETHGNWDLGGFLGPADELFRFSAKPTGVLPSGLSFYGARNFWILKNSTGTYSIRAKLLS

SEQ ID NO: 159619 - protein, 98 aa, Zea Mays
MCYMSGNMQMDNNYLPENDGGVWQWIFGKRVSSTIFFNSGSDDGYVGIAAPFPGRILPVSILLLFYVLIFLLASSFLVQCGINHCCRYSSYANKFKIC

SEQ ID NO: 159620 - protein, 344 aa, Zea Mays
MPDATVLPSDYWCCANCSCKFCHEHSSDGAEDTADVDYSLHTCSQCEEQYHEACSPETDSITNLSSQTGNLFCQQSCRLLFEELQNLLAVKKDLEPEYSCRVVQRIHEDVPEEVLALDKRVECNSRIAVALSLMDECFLPIIDQRTGINLIRNVVYSCGSNFARLDFRGFYIFILERGDEIIAAASVRIHGTKLAEMPFIGTRNMYRRQGMCRRLVDGIEMILSSLNVEKLIIPAITELVDTWTSKFGFSPLEDSEKQEVKSISMLVFPGTGLLQKPLLKALPNEEQCSQGDKTEKASDVVNEDSPCSDASADPLGLGVKEHEDSSKDADGTCNGDVSQECPHS

SEQ ID NO: 159621 - protein, 143 aa, Zea Mays
MDHLALMMELLGMMPRKIALGGRYSRDFFNRYGDLRHIRRLRFWPLNKVLMEKYEFTEINAHGMADFLVPILDFVPEKRPTAAQLLQHPWLDVGPLRQQPKTLPDSAQNSDDGVSEKQKKESEEREAMALELGNIAIDGAGGK

SEQ ID NO: 159622 - protein, 223 aa, Zea Mays
MAWVWVAVPESAIQWSPRAQHTTQKGSQVNQRPHGVQPYPSRHKSQRRQAQVSARGDGAAGATAWRRAAARQGRRRRLPSSTATVPGGELQELRQGSAVRGGDDGPLRAARHQPQARPRGPAGAARRGRQGRRGARQLRPQRGPRRLRPRLEAADRHRARRARDPSRAARGHGETGRQAAVQRRCRWYGDSQGHLHLRRQDRARVCVSLPARWIAHVPAGGDP

SEQ ID NO: 159623 - protein, 147 aa, Zea Mays
MAASRSASCLFRFGFPTNCIPLNSTTALNSFVLRCFVLYLGGVWPARISSVCSRLLGFIPSFMRLLLPSSSGLRSRARLVSRPNTNLPSHRSPAASSCTANRMYLPSLWMSKFGSSSWTRTNKLSDHAKSITVRLLTETKHISLLKD

SEQ ID NO: 159624 - protein, 59 aa, Zea Mays
MTDRSRRESCCSSRFAFSVMSEPFFVLPPHLFSGKNARSRCSCTSPSTLLCKPSGITTC

SEQ ID NO: 159625 - protein, 625 aa, Zea Mays
MASVHKATTLVLMFCLLALGRAEYLKYKDPKQPVAVRIKDLLGRMTLAEKIGQMTQIERENATADALAKYFIGSVLSGGGSVPAPQASAQAWAAMVTEMQKGALSTRLGIPIIYGIDAVHGHNNVYKATIFPHNVGLGATRDPDLVKRIGEATALEVRATGIPYAFAPCIAVCRDPRWGRCYESYSEDPKVVQSLTSLISGLQGDAPADSAGRPYVGGSKKVAACAKHYVGDGGTHNGINENNTIIDTHGLLSIHMPPYYNSIIRGVSTVMVSYSSWNGVKMHANHFLVTDFLKNKLKFRGFVISDWEGIDRITTPPHANYSYSIEAGVGAGIDMIMVPFRYTEFIDDLTTQVQNKVIPMSRIDDAVYRILRVKFTMGLFENPYPDSSLAGELGKQEHRELAREAVRKSLVLLKNGKSSYAPLLPLPKKAGKILVAGSHANDLGNQCGGWTITWQGSSGNTTAGTTILSGIEATVDPSTQVVYSESPDSGVLADKYDYAIVVVGEPPYAETFGDNLNLTIPAPGPSVIQSVCGAAKCVVVLISGRPLVVEPYLGDMDALVAAWLPGSEGQGVADVLFGDYGFTGKLPRTWCSRRAPTPSSSGAAASRTRSWPWASTRTRRPRATA

SEQ ID NO: 159626 - protein, 472 aa, Zea Mays
MASVHKATTLVLMFCLLALGRAEYLKYKDPKQPVAVRIKDLLGRMTLAEKIGQMTQIERENATADALAKYFIGSVLSGGGSVPAPQASAQAWAAMVTEMQKGALSTRLGIPIIYGIDAVHGHNNVYKATIFPHNVGLGATRDPDLVKRIGEATALEVRATGIPYAFAPCIAVCRDPRWGRCYESYSEDPKVVQSLTSLISGLQGDAPADSAGRPYVGGSKKVAACAKHYVGDGGTHNGINENNTIIDTHGLLSIHMPPYYNSIIRGVSTVMVSYSSWNGVKMHANHFLVTDFLKNKLKFRGFVISDWEGIDRITTPPHANYSYSIEAGVGAGIDMIMVPFRYTEFIDDLTTQVQNKVIPMSRIDDAVYRILRVKFTMGLFENPYPDSSLAGELGKQEHRELAREAVRKSLVLLKNGKSSYAPLLPLPKKAGKILVAGSHANDLGNQCGGWTITWQGSSGNTTAGFVSNDRPG

SEQ ID NO: 159627 - protein, 378 aa, Zea Mays
MVTEMQKGALSTRLGIPIIYGIDAVHGHNNVYKATIFPHNVGLGATRDPDLVKRIGEATALEVRATGIPYAFAPCIAVCRDPRWGRCYESYSEDPKVVQSLTSLISGLQGDAPADSAGRPYVGGSKKVAACAKHYVGDGGTHNGINENNTIIDTHGLLSIHMPPYYNSIIRGVSTVMVSYSSWNGVKMHANHFLVTDFLKNKLKFRGFVISDWEGIDRITTPPHANYSYSIEAGVGAGIDMIMVPFRYTEFIDDLTTQVQNKVIPMSRIDDAVYRILRVKFTMGLFENPYPDSSLAGELGKQEHRELAREAVRKSLVLLKNGKSSYAPLLPLPKKAGKILVAGSHANDLGNQCGGWTITWQGSSGNTTAGFVSNDRPG

SEQ ID NO: 159628 - protein, 641 aa, Zea Mays
MGVAMKLLARVRRRLVPLLRRHRMALLTAPAVAALLLLFWSAAYGGDAQDQGVPPPYQDASKDVEVRVRDLLARMTLAEKVGQMTQIERIVASPQALRDYYIGSLLSGGGSVPRKQATAAEWVTMVSDFQKACLSTRLGIPMIYGIDAVHGHNNVDPNLVKRIGAATALEVRATGIQYAFAPCIAVCRDPRWGRCYESYSEDHRIVQAMTELIPGLQGDVPQNFTSGMPFAAGKDKVAACAKHFVGDGGTQNGINENNTIIDQQGLMSIHMPAYLDALRKGVSTVMISYSSWNGLKMHANHDLITGFLKGRLNFQGFTISDWEGIDRITSPPGANYSYSVQASILAGIDMIMVPNNYQNFITILTGHVNSGLIPMSRIDDAVTRILRVKFTMGLFENPMPDPSLADQLGKQEHRDLAREAVRKSLVLLKNGKPGDAPLLPLPKKAARILVAGSHADNLGYQCGGWTIEWQGDTGRTTVGTTVLDAVKAAVDPSTEVVFAESPDAEFVRSGGFSYAIVAVGEHPYTETKGDSMNLTIPDPGPSTVQTVCAAVRCVTVLISGRPVVIQPFLGAMDAVVAAWLPGTEGQGVTDVLFGDYGFTGKLPRTWFRSVDQLPMNYGDAHYDPLFPLGFGLTTQGKMYQN

SEQ ID NO: 159629 - protein, 315 aa, Zea Mays
MALLTAPAVAALLLLFWSAAYGGDAQDQGVPPPYQDASKDVEVRVRDLLARMTLAEKVGQMTQIERIVASPQALRDYYIGSLLSGGGSVPRKQATAAEWVTMVSDFQKACLSTRLGIPMIYGIDAVHGHNNVYGATIFPHNVGLGATRDPNLVKRIGAATALEVRATGIQYAFAPCIAVCRDPRWGRCYESYSEDHRIVQAMTELIPGLQGDVPQNFTSGMPFAAGKDKVAACAKHFVGDGGTQNGINENNTIIDQQGLMSIHMPAYLDALRKGVSTVMISYSSWNGLKMHANHDLITGFLKGRLNFQVRRRRSR

SEQ ID NO: 159630 - protein, 624 aa, Zea Mays
MALLTAPAVAALLLLFWSAAYGGDAQDQGVPPPYQDASKDVEVRVRDLLARMTLAEKVGQMTQIERIVASPQALRDYYIGSLLSGGGSVPRKQATAAEWVTMVSDFQKACLSTRLGIPMIYGIDAVHGHNNVYGATIFPHNVGLGATRDPNLVKRIGAATALEVRATGIQYAFAPCIAVCRDPRWGRCYESYSEDHRIVQAMTELIPGLQGDVPQNFTSGMPFAAGKDKVAACAKHFVGDGGTQNGINENNTIIDQQGLMSIHMPAYLDALRKGVSTVMISYSSWNGLKMHANHDLITGFLKGRLNFQGFTISDWEGIDRITSPPGANYSYSVQASILAGIDMRPDPDEQDRRRRDSDSARQVHHGPVREPHAGPQPRGPAGEAGAQGPGAGGGAQVAGAPQERQAGRRAAAAPAQEGRQDPGRREPRRQPGVPVRRVDDRVAGRHGAHHRRHHGPGRREGGRGPVDGGGVRGEPRRRVRQERRLLVRDRGRGRAPVHGDQGRQHEPDDPGPRAEHRTDGVRRRAVRDRAHQRPPRGDTAVPGRHGRGRGGLAAGDRGPGCHRRAVRGLRVHGEAAADVVQVGGPAADELRRRALRPAVPARVRAHHTGQDVPELEEGGARGKG

SEQ ID NO: 159631 - protein, 67 aa, Zea Mays
MPQSKAKLQSISARILASGNDERPKKAIISHHIWSSRSTPLLCDLRQDRRHRRAMGQNQHQNSQNKQ

SEQ ID NO: 159632 - protein, 1251 aa, Zea Mays
MHLDGVDDELGGGSCAPSPARFELQEDPSFWKDNNVQVAIRIRPLSGSEVSMQGQKRCVRQDSSQSLTWIGHPESRFTFDLVADEHVTQEGMFNVAGVPMVENCIAGYNSCMFAYGQTGSGKTHTMLGDIENGTRRNNVNCGITPRVFEHLFVRIQKEKELRRDEKLMFTCKCSFLEIYNEQILDLLNPNSVNLQIREDARKGIHVENLTEHEISNAREALQQLIEGAANRKVAATNMNRASSRSHSVFTCLIESKWESQGIKHHRFSRLNLVDLAGSERQKSSGAEGERLKEATNINKSLSTLGLVITNLIAVSNKKSQHVPYRDSKLTFLLQDSLGGNSKTTIIANISPSSCCAAETLSTLKFAQRAKYIRNNAIINEDASGDVLSMRLQIQNLKKVISRLQGQLGSDKTESIASHGFVCESPSTFKWDQGHGMFTPLTFDKRATQRNDCDAALVAAFRREQEKEAQLKAVIDAKQTAEQLVAQKTEEVRSFKMRLKFREERIKRLEQVASGKLSAEAHLLQEKENLVKELEVLRGQLDRNPEITKFAMENLQLKEELRRLQSFVDEGEREMMHEQIIVLQDKLLEALDWKLMNEKEPINKGLSLFGESAGDEENEFLRLQAIQNEREIESLRKKMTFCLEAKDNLERHVNELTTELELTKKHNNTYKEFKAAQLQEQGEADLHNLSDAQMELKTLVDAIASASQREAEAHETAIGLAKENEELRLQLKVLIEDNKRLVELYEHTVVNVEANQDGNPVDDLLNAQPAATSDFHAHNSSSVAQESKIVDEKCTNEDNFSRVTSVELRLQLEEMHEENDRLMGLYEKAMQERDEFKRKILEQSDSEAVKHIQLDEKDVEMSEAAENPEVKHIHDSTIAALKEVLQIVRSKLELVQDKVVSAQDAVKYFKALEIASGKAEELSARIELQRLGAQRGQEEITFLKSVLSESQKKKNAFEGKYFLPAASCWNLVLKTKSLAESKFDASFGSMNQKKEQLNHLQTRKIELSAARTRARESETELKSKIDGLKAKLRAHEAQRKEEEKVLFAIDNLDTSTTLMHKPKNYGKATDLLKSEEDRMKLLCELQKAREQRSMVHKEIRSMNECDYIDREIGVLEAEIEDSCISILETDIEKFVRDNTLAEIWEGSAKDLEALLVDYQDCVFQVNLKEEEIKVCSESLQYQARDMDKLQSKLNQAIRELGELLQDRRSLTACSLDEPTLPVGEKVAADLEAVRIHVDEAKQLLILDNQANS

SEQ ID NO: 159633 - protein, 1246 aa, Zea Mays
MHLDGVDDELGGGSCAPSPARFELQEDPSFWKDNNVQVAIRIRPLSGSEVSMQGQKRCVRQDSSQSLTWIGHPESRFTFDLVADEHVTQEGMFNVAGVPMVENCIAGYNSCMFAYGQTGSGKTHTMLGDIENGTRRNNVNCGITPRVFEHLFEKELRRDEKLMFTCKCSFLEIYNEQILDLLNPNSVNLQIREDARKGIHVENLTEHEISNAREALQQLIEGAANRKVAATNMNRASSRSHSVFTCLIESKWESQGIKHHRFSRLNLVDLAGSERQKSSGAEGERLKEATNINKSLSTLGLVITNLIAVSNKKSQHVPYRDSKLTFLLQDSLGGNSKTTIIANISPSSCCAAETLSTLKFAQRAKYIRNNAIINEDASGDVLSMRLQIQNLKKVISRLQGQLGSDKTESIASHGFVCESPSTFKWDQGHGMFTPLTFDKRATQRNDCDAALVAAFRREQEKEAQLKAVIDAKQTAEQLVAQKTEEVRSFKMRLKFREERIKRLEQVASGKLSAEAHLLQEKENLVKELEVLRGQLDRNPEITKFAMENLQLKEELRRLQSFVDEGEREMMHEQIIVLQDKLLEALDWKLMNEKEPINKGLSLFGESAGDEENEFLRLQAIQNEREIESLRKKMTFCLEAKDNLERHVNELTTELELTKKHNNTYKEFKAAQLQEQGEADLHNLSDAQMELKTLVDAIASASQREAEAHETAIGLAKENEELRLQLKVLIEDNKRLVELYEHTVVNVEANQDGNPVDDLLNAQPAATSDFHAHNSSSVAQESKIVDEKCTNEDNFSRVTSVELRLQLEEMHEENDRLMGLYEKAMQERDEFKRKILEQSDSEAVKHIQLDEKDVEMSEAAENPEVKHIHDSTIAALKEVLQIVRSKLELVQDKVVSAQDAVKYFKALEIASGKAEELSARIELQRLGAQRGQEEITFLKSVLSESQKKKNAFEGKYFLPAASCWNLVLKTKSLAESKFDASFGSMNQKKEQLNHLQTRKIELSAARTRARESETELKSKIDGLKAKLRAHEAQRKEEEKVLFAIDNLDTSTTLMHKPKNYGKATDLLKSEEDRMKLLCELQKAREQRSMVHKEIRSMNECDYIDREIGVLEAEIEDSCISILETDIEKFVRDNTLAEIWEGSAKDLEALLVDYQDCVFQVNLKEEEIKVCSESLQYQARDMDKLQSKLNQAIRELGELLQDRRSLTACSLDEPTLPVGEKVAADLEAVRIHVDEAKQLLILDNQANS

SEQ ID NO: 159634 - protein, 1211 aa, Zea Mays
MHLDGVDDELGGGSCAPSPARFELQEDPSFWKDNNVQVAIRIRPLSGSEVSMQGQKRCVRQDSSQSLTWIGHPESRFTFDLVADEHVTQEGMFNVAGVPMVENCIAGYNSCMFAYGQEKELRRDEKLMFTCKCSFLEIYNEQILDLLNPNSVNLQIREDARKGIHVENLTEHEISNAREALQQLIEGAANRKVAATNMNRASSRSHSVFTCLIESKWESQGIKHHRFSRLNLVDLAGSERQKSSGAEGERLKEATNINKSLSTLGLVITNLIAVSNKKSQHVPYRDSKLTFLLQDSLGGNSKTTIIANISPSSCCAAETLSTLKFAQRAKYIRNNAIINEDASGDVLSMRLQIQNLKKVISRLQGQLGSDKTESIASHGFVCESPSTFKWDQGHGMFTPLTFDKRATQRNDCDAALVAAFRREQEKEAQLKAVIDAKQTAEQLVAQKTEEVRSFKMRLKFREERIKRLEQVASGKLSAEAHLLQEKENLVKELEVLRGQLDRNPEITKFAMENLQLKEELRRLQSFVDEGEREMMHEQIIVLQDKLLEALDWKLMNEKEPINKGLSLFGESAGDEENEFLRLQAIQNEREIESLRKKMTFCLEAKDNLERHVNELTTELELTKKHNNTYKEFKAAQLQEQGEADLHNLSDAQMELKTLVDAIASASQREAEAHETAIGLAKENEELRLQLKVLIEDNKRLVELYEHTVVNVEANQDGNPVDDLLNAQPAATSDFHAHNSSSVAQESKIVDEKCTNEDNFSRVTSVELRLQLEEMHEENDRLMGLYEKAMQERDEFKRKILEQSDSEAVKHIQLDEKDVEMSEAAENPEVKHIHDSTIAALKEVLQIVRSKLELVQDKVVSAQDAVKYFKALEIASGKAEELSARIELQRLGAQRGQEEITFLKSVLSESQKKKNAFEGKYFLPAASCWNLVLKTKSLAESKFDASFGSMNQKKEQLNHLQTRKIELSAARTRARESETELKSKIDGLKAKLRAHEAQRKEEEKVLFAIDNLDTSTTLMHKPKNYGKATDLLKSEEDRMKLLCELQKAREQRSMVHKEIRSMNECDYIDREIGVLEAEIEDSCISILETDIEKFVRDNTLAEIWEGSAKDLEALLVDYQDCVFQVNLKEEEIKVCSESLQYQARDMDKLQSKLNQAIRELGELLQDRRSLTACSLDEPTLPVGEKVAADLEAVRIHVDEAKQLLILDNQANS

SEQ ID NO: 159635 - protein, 1261 aa, Zea Mays
MHLDGVDDELGGGSCAPSPARFELQEDPSFWKDNNVQVAIRIRPLSGSEVSMQGQKRCVRQDSSQSLTWIGHPESRFTFDLVADEHVTQEGMFNVAGVPMVENCIAGYNSCMFAYGQTGSGKTHTMLGDIENGTRRNNVNCGITPRVFEHLFVRIQKEKELRRDEKLMFTCKCSFLEIYNEQILDLLNPNSVNLQIREDARKGIHVENLTEHEISNAREALQQLIEGAANRKVAATNMNRASSRSHSVFTCLIESKWESQGIKHHRFSRLNLVDLAGSERQKSSGAEGERLKEATNINKSLSTLGLVITNLIAVSNKKSQHVPYRDSKLTFLLQLPFHFESYTFDISRFLSSCAAETLSTLKFAQRAKYIRNNAIINEDASGDVLSMRLQIQNLKIIIHLKLTCFCRKVISRLQGQLGSDKTESIASHGFVCESPSTFKWDQGHGMFTPLTFDKRATQRNDCDAALVAAFRREQEKEAQLKAVIDAKQTAEQLVAQKTEEVRSFKMRLKFREERIKRLEQVASGKLSAEAHLLQEKENLVKELEVLRGQLDRNPEITKFAMENLQLKEELRRLQSFVDEGEREMMHEQIIVLQDKLLEALDWKLMNEKEPINKGLSLFGESAGDEENEFLRLQAIQNEREIESLRKKMTFCLEAKDNLERHVNELTTELELTKKHNNTYKEFKAAQLQEQGEADLHNLSDAQMELKTLVDAIASASQREAEAHETAIGLAKENEELRLQLKVLIEDNKRLVELYEHTVVNVEANQDGNPVDDLLNAQPAATSDFHAHNSSSVAQESKIVDEKCTNEDNFSRVTSVELRLQLEEMHEENDRLMGLYEKAMQERDEFKRKILEQSDSEAVKHIQLDEKDVEMSEAAENPEVKHIHDSTIAALKEVLQIVRSKLELVQDKVVSAQDAVKYFKALEIASGKAEELSARIELQRLGAQRGQEEITFLKSVLSESQKKKNAFEGKYFLPAASCWNLVLKTKSLAESKFDASFGSMNQKKEQLNHLQTRKIELSAARTRARESETELKSKIDGLKAKLRAHEAQRKEEEKVLFAIDNLDTSTTLMHKPKNYGKATDLLKSEEDRMKLLCELQKAREQRSMVHKEIRSMNECDYIDREIGVLEAEIEDSCISILETDIEKFVRDNTLAEIWEGSAKDLEALLVDYQDCVFQVNLKEEEIKVCSESLQYQARDMDKLQSKLNQAIRELGELLQDRRSLTACSLDEPTLPVGEKVAADLEAVRIHVDEAKQLLILDNQANS

SEQ ID NO: 159636 - protein, 1028 aa, Zea Mays
MRMLLVMFLACVYRSRTLRKVISRLQGQLGSDKTESIASHGFVCESPSTFKWDQGHGMFTPLTFDKRATQRNDCDAALVAAFRREQEKEAQLKAVIDAKQTAEQLVAQKTEEVRSFKMRLKFREERIKRLEQVASGKLSAEAHLLQEKENLVKELEVLRGQLDRNPEITKFAMENLQLKEELRRLQSFVDEGEREMMHEQIIVLQDKLLEALDWKLMNEKEPINKGLSLFGESAGDEENEFLRLQAIQNEREIESLRKKMTFCLEAKDNLERHVNELTTELELTKKHNNTYKEFKAAQLQEQGEADLHNLSDAQMELKTLVDAIASASQREAEAHETAIGLAKENEELRLQLKVLIEDNKRLVELYEHTVVNVEANQDGNPVDDLLNAQPAATSDFHAHNSSSVAQESKIVDEKCTNEDNFSRVTSVELRLQLEEMHEENDRLMGLYEKAMQERDEFKRKILEQSDSEAVKHIQLDEKDVEMSEAAENPEVKHIHDSTIAALKEVLQIVRSKLELVQDKVVSAQDAVKYFKALEIASGKAEELSARIELQRLGAQRGQEEITFLKSVLSESQKKKNAFEGKYFLPAASCWNLVLKTKSLAESKFDASFGSMNQKKEQLNHLQTRKIELSAARTRARESETELKSKIDGLKAKLRAHEAQRKEEEKVLFAIDNLDTSTTLMHKPKNYGKATDLLKSEEDRMKLLCELQKAREQRSMVHKEIRSMNECDYIDREIGVLEAEIEDSCISILETDIEKFVRDNTLAEIWEGSAKDLEALLVDYQDCVFQVNLKEEEIKVCSESLQYQARDMDKLQSKLNQAIRELGELLQDRRSLTACSLDEPTLPVGEKVCQPAATCAGSAKGSRKESAAGSRSGRGAGRMREHWHGDGDGDGEDEHEPQPGCGEGAGQAAANCAAVCCCCPLALLDVLLLVTVRLPAGVMRRVRRRRRRRRGHGGAGANRKRPAPASPSGSSGKAMIGAATLDIDEEARGEVESAAAAELEREIMSSHFYGAGFWRSVSSNSSSSSRRYQ

SEQ ID NO: 159637 - protein, 87 aa, Zea Mays
MFRPKNPAYKEVWHTASLYHLVHTAALLGAPITKAPPTFSEGSSLLELCSSLERATPWLILKTGSFLHRHHWGALRLLLLGPASSSD

SEQ ID NO: 159638 - protein, 746 aa, Zea Mays
MWSGISSVTIVLTHYDKVAHLPEGLQPIATLVQRLREEFHSYAEIYPTVFAVDARSLVSVSRLTHHLRMTIKTILQQVPQVYEVCNDLVRVLHDWRLKNNKAVIKWSEFREICQLNIPELRLRSRRDNVEKVDTRRRTVAKSLHNLGEIIFFEDLGVLILDCDWFCRYVLNQLATLKSIKTERSGFIRKQELEKILQEKLCNQIQGSNWRAGASFQGNDVINLLLKLELCYEQEPGNPDTLLLVPSILEESKEGAQQWHLAMPECRYVGRCLKCTDIHMFLTGDFFPRLQVRLQNKIMCMGQQQGALYILEKNLIYTVVNSIHVRVVLGSTLESSVDVLACSSKSVTDMVRIFHKLIIPTILNLSSSLMFEESIIRPDCVKYLIPHRFLQTQQLPLKRMKQILLSLPAESMYDYEHTWSAIESNKRIILQSGSDHARELLSDDDFHEVLHRRYYDLQHLATELAVNPDNQQQHEIIPETDVVDPSILGIAKGVEMVLQRLKRVEQGIRDLKEEIASLRYYEYHLLTELHRKMDYMMNYNTQLEERKVPQMFYLVSLDNRSKQLVTRILPGMRSLRVHMLCEFRREMHVVEDQLGCDLIQVDNQTVKSLLPYMSKFMKLLTFALKIGAHFIVGMGEMIPDLSREVVRLLDSSALYGTTASAMSVGALGAAALYGKSRNGSTSDMGEDMTAARQWLVDFLKGQGVLTGMDIAQRFGLWRVRYRDDGHIAWICRKHIAAREEEIFELPL

SEQ ID NO: 159639 - protein, 361 aa, Zea Mays
MCLQHSRARLSPDEQLAAEKSFALYCKPVELYNIIQRRAIKNPPFVQRSLLYKIQARRKKRIQITVSLSASTNTQAQNIFPLYVLLARPTSNISLEGHSPIYRFSRACLLTNFSEFGNKDKTEATFIIPDVKNLSTSRACNLNIIFISRGQVGQIIGEDSCSGNDVEGSSLQKLEGKCSWGKMPTNLLAPSLEKCVTLSTGNAVDLTSTVTMNPSFLEPKFLEQDSCLTFCSHKVDATGSYQLQVCISAEEAGARELLLSPYYCNYSYNNVPPSLLPEIIRLRAGNVLFNYKYYNNTMQKTEVTEDFSCPFCLVPCGSFKGLGCHLNSSHDLFHYELWISEECQAVNVSLKADAWKTEVNW

SEQ ID NO: 159640 - protein, 337 aa, Zea Mays
MCLQHSRARLSPDEQLAAEKSFALYCKPVELYNIIQRRAIKNPPFVQRSLLYKIQARRKKRIQITVSLSASTNTQAQNIFPLYVLLARPTSNISLEGHSPIYRFSRACLLTNFSEFGNKDKTEATFIIPDVKNLSTSRACNLNIIFISRGQVGQIIGEDSCSGNDVEGSSLQKLEGKCSWGKMPTNLLAPSLEKCVTLSTGNAVDLTSTVTMNPSFLEPKFLEQDSCLTFCSHKVDATGSYQLQVCISAEEAGARELLLSPYYCNYSYNNVPPSLLPEIIRLRAGNVLFNYKYYNNTMQKTEGHLSLSLFAPSLLPPSASVASTLAVARLHHAFSYF

SEQ ID NO: 159641 - protein, 343 aa, Zea Mays
MSNLLQKKVLPCIASQLNCTILSRGELLKIHLLFKDPFFIRYRIQITVSLSASTNTQAQNIFPLYVLLARPTSNISLEGHSPIYRFSRACLLTNFSEFGNKDKTEATFIIPDVKNLSTSRACNLNIIFISRGQVGQIIGEDSCSGNDVEGSSLQKLEGKCSWGKMPTNLLAPSLEKCVTLSTGNAVDLTSTVTMNPSFLEPKFLEQDSCLTFCSHKVDATGSYQLQVCISAEEAGARELLLSPYYCNYSYNNVPPSLLPEIIRLRAGNVLFNYKYYNNTMQKTEVTEDFSCPFCLVPCGSFKGLGCHLNSSHDLFHYELWISEECQAVNVSLKADAWKTEVNW

SEQ ID NO: 159642 - protein, 367 aa, Zea Mays
MCLQHSRARLSPDEQLAAEKSFALYCKPVELYNIIQRRAIKNPPFVQRSLLYKIQARRKKRIQITVSLSASTNTQAQNIFPLYVLLARPTSNISLEGHSPIYRFSRACLLTNFSEFGNKDKTEATFIIPDVKNLSTSRACNLNIIFISRGQVGQIIGEDSCSGNDVEGSSLQKLEGKCSWGKMPTNLLAPSLEKCVTLSTGNAVDLTSTVTMNPSFLEPKFLEQDSCLTFCSHKVDATGSYQLQVCISAEEAGARELLLSPYYCNYSYNNVPPSLLPEIIRLRAGNVLFNYKYYNNTMQKTEVTEDFSCPFCLVPCGSFKGLGCHLNSSHDLFHYELWISEECQAVNVSLKADAWKTELYLVCGRGS

SEQ ID NO: 159643 - protein, 373 aa, Zea Mays
MCLQHSRARLSPDEQLAAEKSFALYCKPVELYNIIQRRAIKNPPFVQRSLLYKIQARRKKRIQITVSLSASTNTQAQNIFPLYVLLARPTSNISLEGHSPIYRFSRACLLTNFSEFGNKDKTEATFIIPDVKNLSTSRACNLNIIFISRGKMCILWQVGQIIGEDSCSGNDVEGSSLQKLEGKCSWGKMPTNLLAPSLEKCVTLSTGNAVDLTSTVTMNPSFLEPKFLEQDSCLTFCSHKVDATGSYQLQVCISAEEAGARELLLSPYYCNYSYNNVPPSLLPEIIRLRAGNVLFNYKYYNNTMQKTEVTEDFSCPFCLVPCGSFKGLGCHLNSSHDLFHYELWISEECQAVNVSLKADAWKTELYLVCGRGS

SEQ ID NO: 159644 - protein, 109 aa, Zea Mays
MLKSWLLGEWSYFGHQMQEFHYYMCHLKLLCQNNMVKTSVYWDLFFILQMIFLKETAFVPFITANDRDLETRQRPSTLSPPSPCWFHQWSTTRMWSAKTSSNGGSEARW

SEQ ID NO: 159645 - protein, 74 aa, Zea Mays
MPTLTKLYSMEEAALHNTPDDCWVIVDGKIYDVTKYLEDHPGGADVLLEATGKDATVQFDDAGHSKSAKDNESS

SEQ ID NO: 159646 - protein, 59 aa, Zea Mays
MVCGSFAHFNIKFIFRGIFCGEVYRTSLLSRSSVALLVEHGPSQSIPSNIIVTSFMRRV

SEQ ID NO: 159647 - protein, 271 aa, Zea Mays
MDTTSRAAKIPSLHQTEINWDNLDKTKLYVVGAGMFSGVTVALYPVSVVKTRMQVASGDAMGRNALATFKNILKVDGVPGLYRGFPTVIIGAVPTRIIFLTALETTKAASLKLVEPFKLSEPVQAAFANGLAGLSASTCSQAIFVPIDVISQKLMVQGYSGNVRYKGGIDVARKVIKADGIRGLYRGFGLSVMTYAPSSAVWWASYGSSQRIIWSALGHLHNKEEAPSQLKIVGVQASGGIFAGAVTSFVTTPIDTIKTRLQVLCDILFAD

SEQ ID NO: 159648 - protein, 169 aa, Zea Mays
MVQGYSGNVRYKGGIDVARKVIKADGIRGLYRGFGLSVMTYAPSSAVWWASYGSSQRIIWSALGHLHNKEEAPSQLKIVGVQASGGIFAGAVTSFVTTPIDTIKTRLQVMDNENKPKAGEVVKRLIAEDGWKGLYRGLGPRFFSSSAWGTSMIVCYEYLKRLCAKVEEV

SEQ ID NO: 159649 - protein, 317 aa, Zea Mays
MTQGGASASMVELISSLDKTKLYVVGAGMFSGVTVALYPVSVVKTRMQVASGDAMGRNALATFKNILKVDGVPGLYRGFPTVIIGAVPTRIIFLTALETTKAASLKLVEPFKLSEPVQAAFANGLAGLSASTCSQAIFVPIDVISQKLMVQGYSGNVRYKGGIDVARKVIKADGIRGLYRGFGLSVMTYAPSSAVWWASYGSSQRIIWSALGHLHNKEEAPSQLKIVGVQASGGIFAGAVTSFVTTPIDTIKTRLQVMDNENKPKAGEVVKRLIAEDGWKGLYRGLGPRFFSSSAWGTSMIVCYEYLKRLCAKVEEV

SEQ ID NO: 159650 - protein, 244 aa, Zea Mays
MNEAVQEAKLLRQVNALIVAHLRSQNLGQAAAAVAAATMTPISAAESVPANHLLRLVAKGLAAEHGGGDAASAFDSAGFGVAVQPPGSSAVDFSIQDVKGSSKSFPKHEVKHVSDHKNAARCVKFSPDGKYFATGSADTSIKFFEVAKIKQTMVGDSKDGPARPVVRTFYDHTQAINDLDFHPESPILISAAKDSTIRFFDFSKTNARKAFRVIQDTHNVRSVCFHPCGDYLLAGLRIWISFLD

SEQ ID NO: 159651 - protein, 318 aa, Zea Mays
MNEAVQEAKLLRQVNALIVAHLRSQNLGQAAAAVAAATMTPISAAESVPANHLLRLVAKGLAAEHGGGDAASAFDSAGFGVAVQPPGSSAVDFSIQDVKGSSKSFPKHEVKHVSDHKNAARCVKFSPDGKYFATGSADTSIKFFEVAKIKQTMVGDSKDGPARPVVRTFYDHTQAINDLDFHPESPILISAAKDSTIRFFDFSKTNARKAFRVIQDTHNVRSVCFHPCGDYLLAGTDHPVAHLYDINTFTCYLSANAQDSSSPINQVRYSCTGSLYVTASKDGSLRIWDGVSAECVRPIIGAHGSSEAISAIFTKDER

SEQ ID NO: 159652 - protein, 226 aa, Zea Mays
MNEAVQEAKLLRQVNALIVAHLRSQNLGQAAAAVAAATMTPISAAESVPANHLLRLVAKGLAAEHGGGDAASAFDSAGFGVAVQPPGSSAVDFSIQDVKGSSKSFPKHEVKHVSDHKNAARCVKFSPDGKYFATGSADTSIKFFEVAKIKQTMVGDSKDGPARPVVRTFYDHTQAINDLDFHPESPILISAAKDSTIRFFDFSKTNARKAFRVIQGLITQLLIYMI

SEQ ID NO: 159653 - protein, 600 aa, Zea Mays
MAFSPRSPWSRAKKTDVYSTFVVHGDDDEDDARGGRGPSTRAEEDEEEDPSSLPPLLQRLPKDFGGASFDDDEDPYSSDPDDASLSATAAFKSGVPASGRSPFLDLRRSSPRATDDDPYSTFVVHSTTRSGRTSSSPRGSASGTFIRRSGGSSSPRESVSGTFIRRTGSPSSPGKSASGTFIRRPGSPSSPRGSFSGTFIRHTSGGSSSHESASGGGGGFGSSFWTPAVEQSEELRQPSPLMQQQQQQHSRRKPSVSSVPDSVTREDPSTKYELLHELGKGSYGAVYKARDLRTQELVAVKIISLTEGEEGYEDIRGEIEMLQQCSHPNVVRYFGSYQGEEYLWIIMEYCGGGSVADLIGITEEPLDESQIAYICREALKGLAYLHSIFKVHRDIKGGNILLTEQGEVKLGDFGVAAQLTRTMSKRNTFIGTPHWMAPEVIQESRYDGKVDVWALGVSAIEMAEGMPPRSTVHPMRVIFMISSEPAPMLEDKEKWSLLFHDFIAKCLTKDPRLRPAAIEMLKHKFIEKCNSGASKMLAKIKVAKKIRATLAVQNELSDPDNTTQDVPFRINEDYGETVPTSSQQHMKHGTYNDCQVILVL

SEQ ID NO: 159654 - protein, 389 aa, Zea Mays
MAFSPRSPWSRAKKTDVYSTFVVHGDDDEDDARGGRGPSTRAEEDEEEDPSSLPPLLQRLPKDFGGASFDDDEDPYSSDPDDASLSATAAFKSGVPASGRSPFLDLRRSSPRATDDDPYSTFVVHSTTRSGRTSSSPRGSASGTFIRRSGGSSSPRESVSGTFIRRTGSPSSPGKSASGTFIRRPGSPSSPRGSFSGTFIRHTSGGSSSHESASGGGGGFGSSFWTPAVEQSEELRQPSPLMQQQQQQHSRRKPSVSSVPDSVTREDPSTKYELLHELGKGSYGAVYKARDLRTQELVAVKIISLTEGEEGYEDIRGEIEMLQQCSHPNVVRYFGSYQGEEYLWIIMEYCGGGSVADLIGITEEPLDESQIAYICREALKVLTPHLWGN

SEQ ID NO: 159655 - protein, 453 aa, Zea Mays
MAFSPRSPWSRAKKTDVYSTFVVHGDDDEDDARGGRGPSTRAEEDEEEDPSSLPPLLQRLPKDFGGASFDDDEDPYSSDPDDASLSATAAFKSGVPASGRSPFLDLRRSSPRATDDDPYSTFVVHSTTRSGRTSSSPRGSASGTFIRRSGGSSSPRESVSGTFIRRTGSPSSPGKSASGTFIRRPGSPSSPRGSFSGTFIRHTSGGSSSHESASGGGGGFGSSFWTPAVEQSEELRQPSPLMQQQQQQHSRRKPSVSSVPDSVTREDPSTKYELLHELGKGSYGAVYKARDLRTQELVAVKIISLTEGEEGYEDIRGEIEMLQQCSHPNVVRYFGSYQGEEYLWIIMEYCGGGSVADLIGITEEPLDESQIAYICREALKGLAYLHSIFKVHRDIKGGNILLTEQGEVKLGDFGVAAQLTRTMSKRNTFIGTPHWMAPEVIQESRYDGKTFGH

SEQ ID NO: 159656 - protein, 654 aa, Zea Mays
MAFSPRSPWSRAKKTDVYSTFVVHGDDDEDDARGGRGPSTRAEEDEEEDPSSLPPLLQRLPKDFGGASFDDDEDPYSSDPDDASLSATAAFKSGVPASGRSPFLDLRRSSPRATDDDPYSTFVVHSTTRSGRTSSSPRGSASGTFIRRSGGSSSPRESVSGTFIRRTGSPSSPGKSASGTFIRRPGSPSSPRGSFSGTFIRHTSGGSSSHESASGGGGGFGSSFWTPAVEQSEELRQPSPLMQQQQQQHSRRKPSVSSVPDSVTREDPSTKYELLHELGKGSYGAVYKARDLRTQELVAVKIISLTEGEEGYEDIRGEIEMLQQCSHPNVVRYFGSYQGEEYLWIIMEYCGGGSVADLIGITEEPLDESQIAYICREALKGLAYLHSIFKVHRDIKGGNILLTEQGEVKLGDFGVAAQLTRTMSKRNTFIGTPHWMAPEVIQESRYDGKVDVWALGVSAIEMAEGMPPRSTVHPMRVIFMISSEPAPMLEDKEKWSLLFHDFIAKCLTKDPRLRPAAIEMLKHKFIEKCNSGASKMLAKIKVAKKIRATLAVQNELSDPDNTTQDVPFRINEDYGETVPTSSQQHMKHGTYNDCQAGDFGTMIVHTEDGDEVTESPIFPRTEFIPGLGSINSFTHDPKRAELISSFCFLIGRRT

SEQ ID NO: 159657 - protein, 392 aa, Zea Mays
MAEGMPPRSTVHPMRVIFMISSEPAPMLEDKEKWSLLFHDFIAKCLTKDPRLRPAAIEMLKHKFIEKCNSGASKMLAKIKVAKKIRATLAVQNELSDPDNTTQDVPFRINEDYGETVPTSSQQHMKHGTYNDCQAGDFGTMIVHTEDGDEVTESPIFPRTEFIPGLGSINSFTHDPKRAELISSFWAENIGDSDANKDRDTDYGPDMQESKVISPLTGTVKKNIGAEGTIRCHDNQINLSPGLANTTTKLNNSPSRKAFSVQDKLWSIYAAGNTVPIPFLKAIDISPLALVSENESGNGLAGSSTNDALEAVRELFSGDGQAKKGRKGQNEVPLPPGVHHRLTTSPTLMNLAQALAYHKTCYEDMPLQDSQATQEQQTIQNLCDTLRTILRL

SEQ ID NO: 159658 - protein, 185 aa, Zea Mays
MQESKVISPLTGTVKKNIGAEGTIRCHDNQINLSPGLANTTTKLNNSPSRKAFSVQDKLWSIYAAGNTVPIPFLKAIDISPLALVSENESGNGLAGSSTNDALEAVRELFSGDGQAKKGRKGQNEVPLPPGVHHRLTTSPTLMNLAQALAYHKTCYEDMPLQDSQATQEQQTIQNLCDTLRTILG

SEQ ID NO: 159659 - protein, 174 aa, Zea Mays
MVSGSGVCAKRIVVDARHHMLGRLSSIIAKELLNGQKVVVVRCEEICMSGGLVRQKMKYLRFLRKRMNTKPSHGPIHFRAPAKILWRTIRGMIPHKTKRGEAALARLKTYEGVPPPYDKTKRMVIPDALKVLRLQPGHKYCLLGELSKEVGWNYHDTIRNPVAIAMKLDVALSD

SEQ ID NO: 159660 - protein, 92 aa, Zea Mays
MKDGTSSGGGAFAAGSDPRQPSTAKPYAPPKLSPQDLPIDYAGFLAVAFGVLGVMLRYKVCSWIAIIFCAQSLANMKNFENDLKQLSMAFIF

SEQ ID NO: 159661 - protein, 120 aa, Zea Mays
MALLSYAFEAARTAICLFQITKSNICRNLGLSEFWQSIFGHQPVMVFSKTITAHKIQTGSSHMKGPRILSSEEVVFSRRIGILTRSQLARYRPSAKIHWTGLHETRSIWRLRACRMFNWD

SEQ ID NO: 159662 - protein, 424 aa, Zea Mays
MLCHFQIAGGCWYVLAIQRIASCLQEECKRNNSCDLISLACSKEICFHPPWSSNVNGFACDTNMTSFSQQNVSTCLSGKGSFAYGIYLGALPVISSNSLAVKILYPIFWGLMTLSTFGNDLAPTSNGIEVIFSIINVLSGLMLFTLLIGNIQVFLHAVLARKRKMQLRFRDMEWWMRRRQLPSRLRQRVRKYERERWAAVTGDEEMEMIKDLPEGLRRDIKRYLCLELVKQVPLFHGMDDLILDNICDRLRPLVLSSGEKVIREGDPVQRMVFILQGKLRSTQPLTKGVVATCMLGAGSFLGDELLSWCLRRPFVDRLPASSATFECVEAAQAFCLGAPDLRFITEHFRYNFANEKLKRTARYYSSNWRTWAAVNIQLAWRRYRARTSADLAAPPLVGGPDDGDRRLRHYAAMFMSLRPHDHLE

SEQ ID NO: 159663 - protein, 491 aa, Zea Mays
MVIFWLVIPKLIREEQVKLIMTILLLMFIFQFLPKVYHSIHIMRKMQKVTGYIFGSIWWGFGLNLFAYFIASHIAGGCWYVLAIQRIASCLQEECKRNNSCDLISLACSKEICFHPPWSSNVNGFACDTNMTSFSQQNVSTCLSGKGSFAYGIYLGALPVISSNSLAVKILYPIFWGLMTLSTFGNDLAPTSNGIEVIFSIINVLSGLMLFTLLIGNIQVFLHAVLARKRKMQLRFRDMEWWMRRRQLPSRLRQRVRKYERERWAAVTGDEEMEMIKDLPEGLRRDIKRYLCLELVKQVPLFHGMDDLILDNICDRLRPLVLSSGEKVIREGDPVQRMVFILQGKLRSTQPLTKGVVATCMLGAGSFLGDELLSWCLRRPFVDRLPASSATFECVEAAQAFCLGAPDLRFITEHFRYNFANEKLKRTARYYSSNWRTWAAVNIQLAWRRYRARTSADLAAPPLVGGPDDGDRRLRHYAAMFMSLRPHDHLE

SEQ ID NO: 159664 - protein, 532 aa, Zea Mays
MEIQVLDSLGTSQDRKDLTDSIKGLQRQIDMISQRKELKDHRWPDLQVASWPLREIDMGYAKQTDSSSCGLFLLNYIEYWTGDELSDSFTQDDMSHFRKKMAAILLSSDLNKRRGCLLYKNEKEVDSGSSSDVEILENPKDSNKRKLLHVLDDSEVVYEDEEGPITQADLQRWFVDDWDKKAPVKVSTDGCTNDFLMVGLSTKDMPVTKADSIDVLCDYIMAIEDDTTLECFDMAVRLLANKESRRPKEEIINNRKHYMDMRFWVLMPWKFNGCYALFVIDHVKKHVTFIDFTPTQDWCKHMPYKRFEEAIIMASKKYKIAYSKKHSGWAEDIFKWEHTIQTGVPIDLKGFNTSYLVLQAMAMWGNDRRLKFVGIKSVYVWAGFDDKPMVKRAVIVTPTSLVSNWESEIIKWLKGRVQVLALCESTRADVLSGIESFLKPLSRLQPPENWNGGVGFVSKEMIQSHCPAPAEYIQAMDAHLDELNYTKEMQFQFTDAYSRACSFLKPQRQLHQKLYQKWFRVLFLWRSMLLTW

SEQ ID NO: 159665 - protein, 957 aa, Zea Mays
MGAKVEGESYMPGYYATGDLNVEASGRWSPYYEEMTSNGQLCNGFATKPTSGYSEFDKEILKHQILEHEAVFRQQVYELHRVYKIQKDMMKQHQRKEVYSYPTLAGASHTNSPSQVPPNGAKMMWQMPVPPVSTTYRKAIGEHNDTNQSCMKFLREGSVQSSPNGFLSSDAAPRTRQGTFDLQLPADHYIDDDDTSDNKPIDFLGLASDAKPQNDAELTLVSAERLGKFSDNSSSSGLRTTNNLGSRQVTNLNESNTGFFMGRANGSVSRGLPHTLENSWHQPILRSSTTTFNFSKEYSKEKHTNEGKQVSSITFLAPRYNDADPPKYFKAADGRPASYNQFLYQGQNSSAGWIARSPLEPSVINNFARVDRPHHSNLGTFTVPISIPQIDNPSIVSPMGSCTADPRSSIVNNPALIPRFNGSSTVNSYASLSAVTQSIGTSIPKLKNVDNLDKRYPGFPLDSFSVSHSRHQVAISSNLEQKNSQKFEDSDQQSHGKGMKNFNLNETLSDCQEDGLVEQDGRCAASFQHGKDGGSVFGISWLKNKAVSADPTALEKAGKIFGHSFGTTMELKNAKDQNEPAVTIRNLSDSASTSLGCGIKKDGPSEDIATGTLLVCNKAQEDATCLPLSCQKHVPKDGQDADGVIKISGASIRNFIDLNDAVPNDDNSEESVVSHECQAEPSRNNHPKRAFVIDLEVPACEEDAAWDFDQECAQPKPDAHQEVDGRSDTSALAAAENIVALSRIIPTALEASDDMLQWFADLAVLNIKDLAEQAELQACTNDSSNDESDSFESLTLKLEETKIDEYWSRPLEPEITTDEQLISTAHLLTKPRRGQQRRRRQKRDFQKDILPGLSSLSRPEIIEDVQLLEGLVQASGGSWESSLTRRGRYGGRTRGRKPRKTVVTVIVEEEVEVSPPPKPVGTGDLEADGRGMVGWGRTTRRCRRARCPSGNNLAAAS

SEQ ID NO: 159666 - protein, 543 aa, Zea Mays
MMLIPQNTSKLLMGGLPVITNFFTKVRIVQLDGLHEVLWNLLLSIILLELTVHIIRIWVAISSNLEQKNSQKFEDSDQQSHGKGMKNFNLNETLSDCQEDGLVEQDGRCAASFQHGKDGGSVFGISWLKNKAVSADPTALEKAGKIFGHSFGTTMELKNAKDQNEPAVTIRNLSDSASTSLGCGIKKDGPSEDIATGTLLVCNKAQEDATCLPLSCQKHVPKDGQDADGVIKISGASIRNFIDLNDAVPNDDNSEESVVSHECQAEPSRNNHPKRAFVIDLEVPACEEDAAWDFDQECAQPKPDAHQEVDGRSDTSALAAAENIVALSRIIPTALEASDDMLQWFADLAVLNIKDLAEQAELQACTNDSSNDESDSFESLTLKLEETKIDEYWSRPLEPEITTDEQLISTAHLLTKPRRGQQRRRRQKRDFQKDILPGLSSLSRPEIIEDVQLLEGLVQASGGSWESSLTRRGRYGGRTRGRKPRKTVVTVIVEEEVEVSPPPKPVGTGDLEADGRGMVGWGRTTRRCRRARCPSGNNLAAAS

SEQ ID NO: 159667 - protein, 954 aa, Zea Mays
MTSNGQLCNGFATKPTSGYSEFDKEILKHQILEHEAVFRQQPHNPLAIQVYELHRVYKIQKDMMKQHQRKEVYSYPTLAGASHTNSPSQVPPNGAKMMWQMPVPPVSTTYRKAIGEHNDTNQSCMKFLREGSVQSSPNGFLSSDAAPRTRQGTFDLQLPADHYIDDDDTSDNKPIDFLGLASDAKPQNDAELTLVSAERLGKFSDNSSSSGLRTTNNLGSRQVTNLNESNTGFFMGRANGSVSRGLPHTLENSWHQPILRSSTTTFNFSKEYSKEKHTNEGTSSNFFDTSAKLTHDDKPTINKGKQVSSITFLAPRYNDADPPKYFKAADGRPASYNQFLYQGQNSSAGWIARSPLEPSVINNFARVDRPHHSNLGTFTVPISIPQIDNPSIVSPMGSCTADPRSSIVNNPALIPRFNGSSTVNSYASLSAVTQSIGTSIPKLKNVDNLDKRYPGFPLDSFSVSHSRHQVAISSNLEQKNSQKFEDSDQQSHGKGMKNFNLNETLSDCQEDGLVEQDGRCAASFQHGKDGGSVFGISWLKNKAVSADPTALEKAGKIFGHSFGTTMELKNAKDQNEPAVTIRNLSDSASTSLGCGIKKDGPSEDIATGTLLVCNKAQEDATCLPLSCQKHVPKDGQDADGVIKISGASIRNFIDLNDAVPNDDNSEESVVSHECQAEPSRNNHPKRAFVIDLEVPACEEDAAWDFDQECAQPKPDAHQEVDGRSDTSALAAAENIVALSRIIPTALEASDDMLQWFADLAVLNIKDLAEQAELQACTNDSSNDESDSFESLTLKLEETKIDEYWSRPLEPEITTDEQLISTAHLLTKPRRGQQRRRRQKRDFQKDILPGLSSLSRPEIIEDVQLLEGLVQASGGSWESSLTRRGRYGGRTRGRKPRKTVVTVIVEEEVEVSPPPKPVGTGDLEADGRGMVGWGRTTRRCRRARCPSGNNLAAAS

SEQ ID NO: 159668 - protein, 160 aa, Zea Mays
MNLTRPVDEKDCPLDYQIRCLHTSLEWNAYVAGSVDGVVALKYLDRGTDRDLGYAFRCHPNSRNGKWNLVPVNCISVHPCNRTFVTGDDKGCTIVWDAQLKKKLIELPMYLGSVASVAYNHNGQLLAVASNYFLEVDKEEQHHQVFIETVENFKGKSRVG

SEQ ID NO: 159669 - protein, 276 aa, Zea Mays
MARRSLAVDATAGAASRVRFAPTSNNLLVSSWDSGLRLYDADEGTLRVNVESEAAFLDCCFEDESAAFACGSDGSVRRYDFHSGSQDTVGLHEDALACIEFSSLTGQIMTGSLDKKLKLWDSKTRNVSPSGTITLNSDVASISICGIYILAAVERNVYLYDMRNLTRPVDEKDCPLDYQIRCLHTSLEWNAYVAGSVDGVVALKYLDRGTDRDLGYAFRCHPNSRNGKWNLVPVNCISVHPCNRTFVTGDDKGCTIVWDAQLKKKLIEGATPPGIH

SEQ ID NO: 159670 - protein, 168 aa, Zea Mays
MTGSLDKKLKLWDSKTRNVSPSGTITLNSDVASISICGIYILAAVERNVYLYDMRNLTRPVDEKDCPLDYQIRCLHTSLEWNAYVAGSVDGVVALKYLDRGTDRDLGYAFRCHPNSRNGKWNLVPVNCISVHPCNRTFVTGDDKGCTIVWDAQLKKKLIEGATPPGIH

SEQ ID NO: 159671 - protein, 258 aa, Zea Mays
MFTVDKYQQIGFFPEQKAFALRYQTAGMLETVLRIGVLGEDDTGEESPKNLKIPSRKPSIVCENCLYSLEGNGRIRAFHIMDPKGVLDTLLVFHEKRQGSKVPQPLTNYSVGTKSASSDRINALLGRWEGHSVTKRSGVYGATLVEADTAIVLKMDSNGQLIQDTLSTKFGTGTTTVNWTGSANDNLLQFDGGYEITLLPGGMYMGYPSDISKSVAQLDSFHLEFCWMESPGKRQRLVRTYDSAGLAVSSTYFSETKV

SEQ ID NO: 159672 - protein, 409 aa, Zea Mays
METANVVILSFFFIFAIHRLFNRLHSRSTKMKPLPPGPLAIPVLGHLYLLLEKNMHHLFTRLAARYGPVLYLRLGSRNAVVVSSVDCARECFTEHDVTFANRPTFPTLHLMTYGGTTVGTCAYGPYWRHIRRVITVHLLSALRVRSMVPAIEAEVRAMARSMYRAAAAAPCGTGAAKVELRGRLFEVALSALMETVAQSKTSRSSMGGAADTGMSPEAQEFKESMDVMIPLLGTANMWDFLPVLQRFDVFGVKNKMAAAVSGRDAFFRRLIDEERRRLDDGVESENKSMMAVLLTLQKSEPENYSDDMIMSLCFSMFSAGTETTATTAEWAMSLLLNNPEVLKKAQGEIDAHVGNSRLLGADDMPHLPYLQCVPKVDMTEASGLTLPRAVPLEAMCKPRQAMLDVLQNL

SEQ ID NO: 159673 - protein, 462 aa, Zea Mays
MGGFHFHHTWFKARKVFVRMLSNGGGASMACDISVDASDLSKRLCKLIISCRKASALEHELDHSGVRVTPEIAESVLKHLDNAGMLAYRFFEWARKQKRGVCAHTVRSYHTVVTSLAKIRQYQLMWDVVAIMRKEGVANVETFGIIMRKYARAQKLDEAVYTFNVMEKYGVAHNLAAFNSLLSALCKSKNVRKAQEIFDKMNNRFSPDAKTYSILLEGWGRAPSLPKMREVYSDMLAAGCQPDIVTYGIMVDALCKTGRVEEAVCVVQDMSSRGCQPTTFIYSILVHTYGVDMRIEDAVAAFLDMEKDGIMPDVVVYNALITAFCKVKKFENAFRVMDDMQGHGISPNSRTWNIILNTLISLGKDDEAYRVFRSMIKRCKPDSDTYTMMIKMFCENDKIEMALKGEVSQACVLLEDMIEKGIRPPGSTFGKLRQLLLKEGRKDVLDFLVEKMKILAQEPLFD

SEQ ID NO: 159674 - protein, 72 aa, Zea Mays
MDVLPDCFEAEERSSEFTPNVSINVNKDSISMNPVDMNMQEMRYENDIPAKDAKCLQGHLVADIWEISCYCD

SEQ ID NO: 159675 - protein, 206 aa, Zea Mays
MMLVYLKSNVGQRVLGQIEEREREREEMQRLTGRDMWDVEECQSPRMGSVILGVGGTSNTVCVCIPAAMPFNDPLPVLSRTVAGYSNHNSVGEDRARETLERVMSQALLKARRRRSNVCAVCLAVAGVNHPVDQQRMLDWLRDIFPSHVKLFVENDAVAALASGTMGKLHGCVLIAGTGTIAYGFTSDGREARAAGAGPVLGDWAS

SEQ ID NO: 159676 - protein, 179 aa, Zea Mays
MQRLTGRDMWDVEECQSPRMGSVILGVGGTSNTVCVCIPAAMPFNDPLPVLSRTVAGYSNHNSVGEDRARETLERVMSQALLKARRRRSNVCAVCLAVAGVNHPVDQQRMLDWLRDIFPSHVKLFVENDAVAALASGTMGKLHGCVLIAGTGTIAYGFTSDGREARAAGAGPVLGDWAS

SEQ ID NO: 159677 - protein, 196 aa, Zea Mays
MMLVYLKSNVGQRVLGQIEEREREREEMQRLTGRDMWDVEECQSPRMGSVILGVGGTSNTVCVCIPAAMPFNDPLPVLSRTVAGYSNHNSVGEDRARETLERVMSQALLKARRRRSNVCAVCLAVAGVNHPVDQQRMLDWLRDIFPSHVKLFVENDAVAALASGTMGKLHGCVLIAGTGTIAYGFTSDVNEVEHLN

SEQ ID NO: 159678 - protein, 54 aa, Zea Mays
MLSRMVNHVHFIIAVRIPQHRKNCVSASTQLVAVLRLLSCGELSRAQRFLHTRW

SEQ ID NO: 159679 - protein, 158 aa, Zea Mays
MPNSSGTFLSANEDPTETLAEIEKKIARATMLPRNHGEPFNVLRYNIGQRYASHYDAFDPAQYGPQKNQRVASFLLYLTDVEEGGETMFPYENSENMDIGYDYEKCIGLKVKPRKGDGLLFYSLMVNGTIDRTSLHGSCPVIKGEKWVATKWIRDNIV

SEQ ID NO: 159680 - protein, 228 aa, Zea Mays
MKGGGVIRAAGGGAGGAGLLRTRLRLPVVLLSCSLFFLAGFFGSLLFTQDPEEADMPVPRERLLEAAWPEMPYGESGEAAPSLIPYQILSWQPRALYFPQFATSEQCENIVKTAKERLKPSTLALRKGETAESTKGIRTSSGTFLSANEDPTETLAEIEKKIARATMLPRNHGEPFNVLRYNIGQRYASHYDAFDPAQYGPQKNQRVASFLLYLTDVEEGGETMFPYE

SEQ ID NO: 159681 - protein, 293 aa, Zea Mays
MGAGIRVLAALLAALAAATAGVTAQLRQDYYAAVCPDLESIVRAAVSKKVQAQPVAVGATIRLFFHDCFVEVRASSSSSSTTACVSDGPGRLAMLQLPACMQGCDASVILVSTGNNTAEKDHPSNLSLAGDGFDTVIQAKAAVDAVPACANQVSCADILALATRDVIELAGGPSYAVELGRLDGLVSMSTNVDGKLPPPSFNLDQLTSIFALNNLSQADMIALSGEQITTAPVRSSFFPLQQLLYQRQRSTQARFRSMSFKSSKGPAQRTKANAPSAAINCKRFIISGLSKHP

SEQ ID NO: 159682 - protein, 314 aa, Zea Mays
MQDAAVSRSQRFTDPGTPYLAYTSGLAASPRTAPVKKSLQNGFVSSPLNRSVRQSSPSKLTGNPSRRVSSPSRSRNCVGSGTSSWDHQGRNSSGSGYALNGEVRRRWHGGSKVDCEHLLRILSNRHLQWRCVNAQAEAALSAQKMTAEKYLSDAWITTLGMRKSVALKRFQLQLYRNNWKLMTVLKGQMGYLEEWSLLERDYVDSLSVTVDALTASILCLPVTDGAKADIQDVKNAVGSAVDIMQTIGSSICSLLAKLAGTSILVSDLSKVATQERTLMEQSRELLSTLATMHVKYCSLQGQRVQATDRSSMHP

SEQ ID NO: 159683 - protein, 153 aa, Zea Mays
MAWGALRSRVLPLPAPAATAAPHGLFLRFLLSTAVPHHGHHHRRRRLAPTAYAAAAAAAAEAPLPMTPRFGRATRQPGGAASVARVYADANAQRPKEYWDYESLDIQWGKQDGYEVLRKVGRGKYSEVFEGFRAGSDERCVIKILKPVKKKKR

SEQ ID NO: 159684 - protein, 150 aa, Zea Mays
MNLDRPRVIQPRSAPDPNPLIPLPILSFSLALDSPATPSRLHPDADRTPLPVHHPSVMAGRTAPAPSPPSLSRPTPSPPLHPRSRHGRYHDQQFGGAGAARYAMGRSPSPPDTDHLHPEPVREVSDFHFFDWMACGRASAPPCPPPLLRR

SEQ ID NO: 159685 - protein, 202 aa, Zea Mays
MGGTCGSSTSWLSGLAAIRPRKRGTAPLQQQEAVTSPKAGRYLMALDKKPIATKGHHLCCPHPSRGPHLPGNQLPVPLVPIISKGVLEEEVMVSFVATNGEPTTTATSKLVWWNLVEQMTMTPTSCTSAATLPTRTRAPPSRALYKSGSIIVLGKTDFLRPDMLQEALVPWTRSLDRTIVASTPRSCCPLASSSYNSPTSPT

SEQ ID NO: 159686 - protein, 153 aa, Zea Mays
MVSFVATNGEPTTTATSKLVWWNLVEQMTMTPTSCTSAATLPTRTRAPPSRALYKSGSIIVLGKTDFLRPDMLQEALVPWTRSLDRTIVASTPRSCCPLASSSYNSPTSPTLFFKQEMELSLVGLQNARKTSLAAARSDTPASSSWKLQEHFE

SEQ ID NO: 159687 - protein, 125 aa, Zea Mays
MSFRKIVSPMWAMTLLSLYVRVHVTILGTHLYLDFAQCTNGAQLQAESDAFNVNGHKTFVAMDDYLVTDKITAFIVQTQHAATEVLKEKQPKDCMKWTKYCRQYYKYWTRSWLFLKILMEKLSCT

SEQ ID NO: 159688 - protein, 408 aa, Zea Mays
METEKATVDSRPGHVSDGVFGRPNARKLPHFSPRKPSQAKTRHRCASPATGSQTDRAAMVLVSDSELVERLQEVLRSSDLNTTTTAALRRRLEEDFGADLSHKKAFIREQVDLFLAEVAAKAEPQEPKEEEPEEAPVPKEEEPEELEGVEEEGEGEDEEEEEEEEEEEECEDENSSGARKKQRGNDGKKRGGGFTKLCSLSPALQEFVGASELARTEVVKKLWAYIRENNLQDQNNRRKILPDERLKKIFNVNSIDMFQMNKALTKHIWPLNSEGPVSPDRSTPKEKPQKRDRSEGKKQKGGSSGAGSGFLVPLQLSDDLVKFIGTGESMLSRSDVVKKMWDYIKGNNLQALLFQSPSRNRLYAYPLWPIARVLNCSSNQPITVSNWKNSRALLTCYVGLLENRRERK

SEQ ID NO: 159689 - protein, 139 aa, Zea Mays
MMTMTPTSCTSAATLPTRTRAPPSRALYKSGSIIVLGKTDFLRPDMLQEALVPWTRSLDRTIVASTPRSCCPLASSSYNSPTSPTLFFKQEMELSLVGLQNARKTSLAAARSDTPASSSWKLYLFQNKQVSYLVNQLVF

SEQ ID NO: 159690 - protein, 170 aa, Zea Mays
MVSFVATNGEPTTTATSKLVWWNLVEQMTMTPTSCTSAATLPTRTRAPPSRALYKSGSIIVLGKTDFLRPDMDPITRWTATKKSGLISYKKLLFHGLDLWTALSLPQPLGRAALWPPHRTIHQHLQLSSSSKRWSFPWSGSKMLGKHHLQQLAATPPPPHHGSYKNTLSR

SEQ ID NO: 159691 - protein, 365 aa, Zea Mays
MVLVSDSELVERLQEVLRSSDLNTTTTAALRRRLEEDFGADLSHKKAFIREQVDLFLAEVAAKAEPQEPKEEEPEEAPVPKEEEPEELEGVEEEGEGEDEEEEEEEEEEEECEDENSSGARKKQRGNDGKKRGGGFTKLCSLSPALQEFVGASELARTEVVKKLWAYIRENNLQDQNNRRKILPDERLKKIFNVNSIDMFQMNKALTKHIWPLNSEGPVSPDRSTPKEKPQKRDRSEGKKQKGGSSGAGSGFLVPLQLSDDLVKFIGTGESMLSRSDVVKKMWDYIKGNNLQALLFQSPSRNRLYAYPLWPIARVLNCSSNQPITDPSDRRKIICDEKLKDLFGVETFTGFTVSKLLAPHFTKTK

SEQ ID NO: 159692 - protein, 350 aa, Zea Mays
MVLVSDSELVERLQEVLRSSDLNTTTTAALRRRLEEDFGADLSHKKAFIREQVDLFLAEVAAKAEPQEPKEEEPEEAPVPKEEEPEELEGVEEEGEGEDEEEEEEEEEEEECEDENSSGARKKQRGNDGKKRGGGFTKLCSLSPALQEFVGASELARTEVVKKLWAYIRENNLQDQNNRRKILPDERLKKIFNVNSIDMFQMNKALTKHIWPLNSEGPVSPDRSTPKEKPQKRDRSEGKKQKGGSSGAGSGFLVPLQLSDDLVKFIGTGESMLSRSDVVKKMWDYIKGNNLQALLFQSPSRNRLYAYPLWPIARVLNCSSNQPITVSNWKNSRALLTCYVGLLENRRERK

SEQ ID NO: 159693 - protein, 348 aa, Zea Mays
MVLVSDSELVERLQEVLRSSDLNTTTTAALRRRLEEDFGADLSHKKAFIREQVDLFLAEVAAKAEPQEPKEEEPEEAPVPKEEEPEELEGVEEEGEGEDEEEEEEEEEEEECEDENSSGARKKQRGNDGKKRGGGFTKLCSLSPALQEFVGASELARTEVVKKLWAYIRENNLQDQNNRRKILPDERLKKIFNVNSIDMFQMNKALTKHIWPLNSEGPVSPDRSTPKEKPQKRDRSEGKKQKGGSSGAGSGFLVPLQLSDDLVKFIGTGESMLSRSDVVKKMWDYIKGNNLQNYLEFIVIETDPVEIVDPSDRRKIICDEKLKDLFGVETFTGFTVSKLLAPHFTKTK

SEQ ID NO: 159694 - protein, 134 aa, Zea Mays
MFQMNKALTKHIWPLNSEGPVSPDRSTPKEKPQKRDRSEGKKQKGGSSGAGSGFLVPLQLSDDLVKFIGTGESMLSRSDVVKKMWDYIKGNNLQDPSDRRKIICDEKLKDLFGVETFTGFTVSKLLAPHFTKTK

SEQ ID NO: 159695 - protein, 55 aa, Zea Mays
MKFVALAQPPFAVPSHSLGTGCSEDASLYLYGPPKLKLFCHVGGMAKWVDIATVL

SEQ ID NO: 159696 - protein, 259 aa, Zea Mays
MEYASGGELFERICKNVRFSEDELISGVSYCHSMQVCHRDLKLENTLLDGSDAPRLKICDFGYSKSSVLHSQPKSTVGTPAYIAPEVLLKKEYDGKIADVWSCGVTLYVMVVGAYPFEDPEEPKNFRKTIQRILNVQYAIPDNVNISPECRHLISRIFVGDPATRITIPEIRNHSWFLKNLPADLMDDDSMSNQYEEPDQPMQTMDQIMQILTEATIPPACSRSINVLADGLDMDDDMDDLDSDSDLDVDSSGEIVYAM

SEQ ID NO: 159697 - protein, 286 aa, Zea Mays
MPTSEVWSLSDFEISKYIAEGRFGKVYLAREKQSGYVVALKVIFKAKLKKHRFHAHLRREIEIQQSLDHPNVLRLFTWFHDEERVVLVLEYAARGELYKVLRAAGRFTERTSATYVASLAGALAYCHKKQVIHRDIKPENLLIDIEGRLKIADFGWAARSNAKRHTLCGTIDYLAPEMVEKRAHDHAVDNWTLGILCYEFLYGSPPFEADEQDDTLRRIVRVDLAFPSSPCVSSEAKDLISKLLVKDSSKRLCLEDIMKHPWIKKNADPSGSCIKQKDVTRSKVKR

SEQ ID NO: 159698 - protein, 832 aa, Zea Mays
MEGTVRRRRPWGGPARWRGSTRSGTSCARRPWPQSARSSRRTRSRCWRRRWPGSSPCTPATRPPRTWTASAPTSTRTWTSNHALYGAAEKGTAEHDIKNRIMDYLNIPESEYCLVFTVSRGSAFRLLAECYPFGTNMRLLTMFDHESQSVNWMTQAARDKGAKAYSAWFKWPTLKICTTELRKLISTKKRRRKDSATGLFVFPVQSRVTGAKYSYQWMALAQQNHWHVLLDAGALGPKDMDSLGLSLFRPDFIITSFYRVFGAEPTGFGCLLIKKSVMACLQSPSGGTGAGMVRIVPVFPQYLSDSVDGFEGVLDGLEDDNIIQIEEGSVLNSHHAPHLPAFSGAYSSAQVREVIESEMDQDSSDRDGASTIYEESESVSVGEVMKSPVFSEDESSENSFWVDLGQSPLGSDHSEQSSKGKLGSPLPASWFSGRKSAKKASPKVPSKLSRSPIHDNHVMSFDAAVRSVSQEPGPEKGDLDEDNSHINIKNTPISEIEEDNKDAKVNKRFVKFSCANDTAEGEGCATSVFGSCTTRENGSTSEIFSESQAETKDSAIRRENEGDFRLLGRREAYNGRFNGGRFFGVEESERVPSMGHNVSFTLDDSKLCRNADAGETSGYGMADDDDDDDDAYSDYDEALDGRKEPEIICKHLDHVNMLGLSKTTLRLRYLINWLVTSLLQLRLPDSGDGEGVPLVYIYGPKIKYDRGAAVAFNIKDCNTGTSLINPETVQKLAEKEGLSLGVGFLSHIRLIDNQKHGAVDVGLSSSWPAANGRREKKNSKNAIIGTEVVTASLGFLTNFEDVYRLWAFAAKFLDSSFLEQERLSSIPEDAER

SEQ ID NO: 159699 - protein, 87 aa, Zea Mays
MTINDYYASLPFAALFSACKAKGLKVSCVLCYCSEGDNMPESFQLAEAICKLLGHGPEKFHGNGSNGWIVPLSWKSVYGPPPDMSIF

SEQ ID NO: 159700 - protein, 155 aa, Zea Mays
MDNGDRSGAGAGAVGSAGSLGLRVGQAVFSSASLLFMSVGVEFFSYTAFCFLVTIMGLVIPWSCTLAMIDVYSVFVGCPLRVPGVMVIVVALSIVSFAAACSSAAVIDLLLQLHGSHSSPTFCGRYQLSAMMAFLSWLLMAASATFNLWFVASRW

SEQ ID NO: 159701 - protein, 145 aa, Zea Mays
MDNGDRSGAGAGAVGSAGSLGLRVGQAVFSSASLLFMSVGVEFFSYTAFCFLVTIMGLVIPWSCTLAMIDVYSVFVGCPLRVPGVMVIVVVGDCALSIVSFAAACSSAAVIDLLLQLHGSHSSPTFCGRMGPFTASDLIHHTQAA

SEQ ID NO: 159702 - protein, 369 aa, Zea Mays
MTSNSSQNMSSCSTGGSDAAVGGGSWLGFSLSPHMAATMDGAADGVPVQHHHHEGLFYPPVVSSSPAPFCYALGGGQDGLATAAANGGGGFYPGLSSMPLKSDGSLCILEALHRSEQERHGVVVSSSSPKLEDFLGASASTAMALSLDSSSFYYGCGHGHGHDQGGYLQPMQCAVMPGSGGHDVYGGGHAQMVDEQSAAAMAASWFSARGNGGYDVDGAGAGAIVPLQGHPHPLALSMSSGTGSQSSSVTMQVGSAHADAVTEYIAMDGSKKRGAGNGASAGQKQPTIHRKTIDTFGQRTSQYRGVTRHRWTGRYEAHLWDNSCRKEGQTRKGRQVYLGGYDVEEKAARAYDLAALKYWGTSTHVNFPS

SEQ ID NO: 159703 - protein, 366 aa, Zea Mays
MTSNSSQNMSSCSTGGSDAAVGGGSWLGFSLSPHMAATMDGAADGVPVQHHHHEGLFYPPVVSSSPAPFCYALGGGQDGLATAAANGGGGFYPGLSSMPLKSDGSLCILEALHRSEQERHGVVVSSSSPKLEDFLGASASTAMALSLDSSSFYYGCGHGHGHDQGGYLQPMQCAVMPGSGGHDVYGGGHAQMVDEQSAAAMAASWFSARGNGGYDVDGAGAGAIVPLQGHPHPLALSMSSGTGSQSSSVTMQVGSAHADAVTEYIAMDGSKKRGAGNGASAGQKQPTIHRKTIDTFGQRTSQYRGVTRHRWTGRYEAHLWDNSCRKEGQTRKGRQGTRHCRHGSLRHSISVTSPRSSSSSSSNFLS

SEQ ID NO: 159704 - protein, 639 aa, Zea Mays
MTSNSSQNMSSCSTGGSDAAVGGGSWLGFSLSPHMAATMDGAADGVPVQHHHHEGLFYPPVVSSSPAPFCYALGGGQDGLATAAANGGGGFYPGLSSMPLKSDGSLCILEALHRSEQERHGVVVSSSSPKLEDFLGASASTAMALSLDSSSFYYGCGHGHGHDQGGYLQPMQCAVMPGSGGHDVYGGGHAQMVDEQSAAAMAASWFSARGNGGYDVDGAGAGAIVPLQGHPHPLALSMSSGTGSQSSSVTMQVGSAHADAVTEYIAMDGSKKRGAGNGASAGQKQPTIHRKTIDTFGQRTSQYRGVTSRHRWTGRYEAHLWDNSCRKEGQTRKGRQVYLGGYDVEEKAARAYDLAALKYWGTSTHVNFPVEDYREELEEMKNMTRQEYVAHLRRKSSGFSRGASIYRGVTRHHQHGRWQARIGRVSGNKDLYLGTFSTQEEAAEAYDVAAIKFRGLSAVTNFDITRYDVDKIMESSTLLPGEQVRRRKEGADAAVSEAAAALVQAGNCMTDTWKIQAALPAAARADERGAGQQQRQDLLSSEAFSLLHDIVSVDAAAGTGTGGMSNASSSLAPSVSNSREQSPDRGGASLAMLFAKPAAAPKLACPLPLGSWVSPSAVSARPPGVSIAHLPVFAAWTDA

SEQ ID NO: 159705 - protein, 318 aa, Zea Mays
MDSFGDLGGGGSSSSRAASAPFLQLPLPASTSSAQQQVLFPLPDGPQQQHHHHSSRIPLRQLLLLADPSSAAQHSASHRTKDMATVQGEMSSPAVDGDADAIKARIMSHPQYSALLAAYLDCQKEAYCNMLVKFHEEMARPIQEATEFFNSMERQLGSTISDSNCEVAGSSEDEQDASWPEEIDPCAEDKELKHQLLRKYGGYLGGLRQEFSKRKKKGKLPKEARQKLLHWWELHYKWPYPSETEKMALAETTGLDPKQINNWFINQRKRHWKPASEDMPFAVMEGGFHVAQGTAALYMDRPAVPPFMADGGMYRLGS

SEQ ID NO: 159706 - protein, 208 aa, Zea Mays
MDSFGDLGGGGSSSSRAASAPFLQLPLPASTSSAQQQVLFPLPDGPQQQHHHHSSRIPLRQLLLLADPSSAAQHSASHRTKDMATVQGEMSSPAVDGDADAIKARIMSHPQYSALLAAYLDCQKVGAPPDVSDRLSAMAAANLDAQPGPISRRRGPTTTRADDPELDQFMEAYCNMLVKFHEEMARPIQEATEFFNSMERQLGSTISD

SEQ ID NO: 159707 - protein, 100 aa, Zea Mays
MRLPQHTERAGSPKTCSIFQAWLPRHLRCPGPVSQLLVLCAVPGCPRRRCHGHLIEFEEHAPVCSTVPKRYKSTCTGLHQASTSDTNIYTQSQSQWRPEG

SEQ ID NO: 159708 - protein, 168 aa, Zea Mays
MRGVRCYAREDGAECECPCPGLLVSVRTPSRLGTANGAGRDGTHVARTSTAVQVVRHRPPARIPATARAGPSQSRRLDGSRRAGWRAHVPCRCAGAGERQWCARQAEQRQARASRAEPCRRSKALQLCRAPGLAASICLRVAASACERRSFFLFKTPAHGWRSGVLFY

SEQ ID NO: 159709 - protein, 392 aa, Zea Mays
MVATISPADDQYHHTTNTLKYADRAKEIKTHVHKNIGTLDTHVEDYQRMIDNLQVEVSQLKKELAEKEHQLSVKPTEKTADSELSWLNVLSQETGENVQERINLQKALFELEETNKRNRMELQHLDDSIARHQVKEMDSTILQALTSRRQVILDNIRDNDEAGSGYRKDIEMNESRRRQLQDMIEEAISNNGNKTYLHILSQYRLLGMTNAELQIEMAMRDQVIHNQREALRSLWNILYGTGLNQKQILKLAAKQGLTVEGCPLPSSSPDVTTPPSCQPHRFPSFMPFPGPQSEPYSPSACFFQHGFSTMSLLKNQHETPTICRQEHLSSYYMMSGCSPYSGDGKQWSSGRPTAFFSTPEKPKEAQSQHNKEHSGSHDFSLHRKDLWSTERK

SEQ ID NO: 159710 - protein, 712 aa, Zea Mays
MPSIRAPASKQTATLQVAVKCRPLTDTEQRRSRHIIQVIDDKTVVVLDPDLSKDYLDLIQNRTKERSYTFDHVYAPGCSNSDVYKNISSTIAGVVQGLNATVFAYGSTGSGKTYTMVGTHSDPGLMVLSFRTIFELIKKDDSKDTFEVSCSYLEVYNEVIYDLLERSSGHLELREDPEHGIIVAGLRSIKVHSADRILELLNIGNSRRKTESTEANATSSRSHAVLEITVKRKQKGQYGNQVLRGKLALVDLAGSERASETNNFGQKLRDGANINRSLLALANCINALGKQNKKGLAYVPYRNSKLTRILKDGLSGNSRTVMVATISPADDQYHHTTNTLKYADRAKEIKTHVHKNIGTLDTHVEDYQRMIDNLQVEVSQLKKELAEKEHQLSVKPTEKTADSELSWLNVLSQETGENVQERINLQKALFELEETNKRNRMELQHLDDSIARHQVKEMDSTILQALTSRRQVILDNIRDNDEAGSGYRKDIEMNESRRRQLQDMIEEAISNNGNKTYLHILSQYRLLGMTNAELQIEMAMRDQVIHNQREALRSLWNILYGTGLNQKQILKLAAKQGLTVEGCPLPSSSPDVTTPPSCQPHRFPSFMPFPGPQSEPYSPSACFFQHGFSTMSLLKNQHETPTICRQEHLSSYYMMSGCSPYSGDGKQWSSGRPTAFFSTPEKPKEAQSQHNKEHSGSHDFSLHRKGSSEYTY

SEQ ID NO: 159711 - protein, 185 aa, Zea Mays
MAPDIDWGKNIRIILDVGCKSAGFGIALLEKDVITLSLGLTNDQTDLAQVALERGIPATVGSLGSRRLPFPSGAFDAIHCGECNIPWHSNGGKLLLEINRILRPGGYFIISSRSADLESEEGISASMTALCWNAIAYNSDDVSEAGVKIFQRPVSNEVYDLRAKKDPPFCKEEQNKASAWLTLPF

SEQ ID NO: 159712 - protein, 536 aa, Zea Mays
MPPFPAATTTSHLALLVLFSSSSLFFLYKSLRLRRKPSPARTATPTLLFASVTGTSKTLAARLSARLTADAGFPVRATDAATFDPDDLPSVHLLLLVIPTHDGGATPPSAAFLSRWLEESAADFRAGALLLSGLRFAVFGVGSRAYGETFNAAARNFSRWLRALGAVEVVPLGEGDIDSGDLEAVFEEWNRRVLRVVKGEEVGYGANEKNNGLDELELEGEDWDDDDEEMVDAEVDMEDIAGKAPARRKNGNLEGVLANGVHNGVKDMVTPIIRTSLEKQGYKIIGSHSGVKICRWTKSQLRGRGGCYKHSFYGIESHRCMEATPSLACANKCVFCWRHHTNPVGKSWKWKMDDPLDIVNAAIDQHTKMVKQMKGVPGVKPEKLDEGLSPRHCALSLVGEPIMYPEINALVDELHRRHISTFLVTNAQFPEKIKALKPITQLYVSVDAATKESLKAVDRPLFSDFWERFLDSLKSLHEKDQRTVYRLTLVKGWNAEEIDAYAKLLDLGQPDFIEIKGVTYCGSNFKVDYGKCTLAL

SEQ ID NO: 159713 - protein, 254 aa, Zea Mays
MGDGVAFEAARKIIMHPLYTPRSSPWLDLKVFYVRVSNCVVDESTPDHLTLNHIPLSPDTVIEVNGQRSSLHTEFISSSLRRDRVDKKTEEATFVSTDNIRMTGSARFQVFDKNDLLLTGDLDLCNANGVVGESKNSSKKWNMKCQSSTSCNGFLKGKLSNGSEYVQPMIEVYVAGTSSGTPIILTKTIQLISRRKSEMKLKLDSIPENETTEQQKEESAEDTLKVSEFQDSKSETDVDVDYNSLYSRQDFLEG

SEQ ID NO: 159714 - protein, 236 aa, Zea Mays
MGDGVAFEAARKIIMHPLYTPRSSPWLDLKVFYVRVSNCVVDESTPDHLTLNHIPLSPDTVIEVNGQRSSLHTEFISSSLRRDRVDKKTEEATFVSTDNIRMTGSARFQVFDKNDLLLTGDLDLCNANGVVGESKNSSKKWNMKCQSSTSCNGFLKGKLSNGSEYVQPMIEVYVAGTSSGTPIILTKTIQLISRRKSEMKLKLDSIPENETTEQQKEESAEDTLKFVLKAGLSRRR

SEQ ID NO: 159715 - protein, 112 aa, Zea Mays
MKCQSSTSCNGFLKGKLSNGSEYVQPMIEVYVAGTSSGTPIILTKTIQLISRRKSEMKLKLDSIPENETTEQQKEESAEDTLKVSEFQDSKSETDVDVDYNSLYSRQDFLEG

SEQ ID NO: 159716 - protein, 150 aa, Zea Mays
MSCKGAASHAYTVATQLLLLPACYWCGSRDSSPSLPIVEGRPTAPLYTVGACLIRSTPCVYGPGALALYEAAAAVPNAMLCPGRTPSLSLRSSSEMSPSSALTICTQNAIAIHCQPSLRGCSTHRWCGGKETRREHLPPNTYLTHLGALL

SEQ ID NO: 159717 - protein, 1298 aa, Zea Mays
MAAEDKGTGDRENADPNLCSIADASLSHENTEDKSDLDTKSAPSIQLLQPKPGENKEPGSHDIHFNSANTTGNSEEGNNTGKKRDVFRPSVFDRISGHRDQWCNEDTRLNSDSHRNQWREMEKEHSDMNKVEQHCDDPKQYLGSQRSRKERWVSNERNYDQHHENNWNSRWGASSKDSQNWREKSTDSDIKDDYSCEKVFSYSTCHGKEKDGTNHEKVNERDSNISRSWNSSYFANRGAGGTSDHLFTDPQKLSASFGYSSYRQESDSPNSTSSRRRFTSVTSRVNSRSSRPFHLGVLSERPVGPSSNSVRYSRIKLFEIYRTTDVRNFTMPINDIGNNEISSLWQEDPMDPLALIAPNAEEAVILKGIEKGDITNSLAQACKDGSDDKNIPGVAALEQMKLSGREDQTGNNEEFNGKMTIDIRGILGAADLREHLKSDKSPPKESESGGGGIHGPCAEFGHQRNALDQGTKVGDGENVNPENLSLYYKDPKGCIQGPFPGYDIIGWFEAGYFGIDLLVRVASAPCDSPFLLLGDVMPHLRAKVRVPPGFSNTKPRSMTDASHLGSVYLGTSDYGSINKNGCVTEAENYFLEAPVSSKIQNPRAATNVVTGGMNEWRFVSGEKVNSINHLEVQKVQLETENTFQIEGDVISVGESQKKESVQSTSHSTFFPQMVDPSSEALQPQNINLLSMLLPAEKGQAPTATSGLSLRSNNADSGNLHAGMCGIDVTQEILNVHQNLHNSQQIGIDAQQHYVLTQNQPTLACLNSQITQPEKFLGGIYHDPQLNINQQQYLLSELHLQPLIPGVPEPQSSLLNNMLQLRQQEQQQQYISQSIPHDRSMQQLYDSSHGTIHTSLSSGDRMKLCLQRTEEILDLALKLPGHGKHNLQLHASVKLRDTGNIGLSESCATALPLPHEMMGHAAWKECSASLTQGSAVVDALSQKESIVDSPSKKTPSYGSNDYSKMTVFEVTGFPQPFQGLQKPKSVASHISNEVHEMDISSVHPHSWKPTPGVRAKSVLEIQAEERLETQREIALENTKVTTTTASGLSIHWVDLVETSGQQFGDQARPMCDKKNDNISQSNRSHLHDLSAREELIKSNAKAGVIINSADDTSFPPLAPSITQSDAHIHDGADFIEFKGTRKISNRGKKPKGSAVKTPASHANVIPGPATDPAQVREPCSLRNIQVEEEQESANLQQLVPASSHAKGPMDQHIHGNNSSWQGSESPPSRGNEFLKMTSHVSSHSTPNSEEYLFWEPREHAKQDKYVLNYGLNFVSFSSFFLLMKKWTFLLSLYPLEAKL

SEQ ID NO: 159718 - protein, 115 aa, Zea Mays
MLFPATPLVAGLSVAAAALSGRYMIRAWQAFRTQAAMPRVRRFYPGGFQGEMNRREAALILGVRERATVDKIKEAHRRVMVANHPDAGGSHYVASKINEAKDMLMGKGKSGSSIF

SEQ ID NO: 159719 - protein, 101 aa, Zea Mays
MARITNQTDNAACTLRWTCAPLNALLHIEMTSLSFMIPLRTNHLYFRPTVTLPRGAISTLRGIDKQSTERISHSVNSCPTMLGTFGIRRSSKTGFNSISGV

SEQ ID NO: 159720 - protein, 76 aa, Zea Mays
MTSPLTLARVTRRRTGRRRGASRRSSTMTTTNLLLHQETTTTILRRRKERVNQNYSFDYSRMPFNSNAHLLSITLG

SEQ ID NO: 159721 - protein, 270 aa, Zea Mays
MDSRGFDSAGRIFSSATEMWTEELGSSITASTAGEAEAAPAPAAAAEASEEVGGDGKRKEWYSKAIAYWQGVEASTEGVLGGYGCVNDADVKGSDAFLRPLLADRFGTAKRHLVALARENLTGCMDQGEDSHKAANFYCVPLQDFTPEEGRYDVIWIQWCIGQLPDDDFISFFNRAKAGLKPDGFFVLKENIARNGFVLDKVDNSVTRSDAYFRDLFKRSGLYILSVKDQKELPKELFAVKMYALVTSQPKIQNSGKRRRPRNSPRMIRS

SEQ ID NO: 159722 - protein, 81 aa, Zea Mays
MEQTLAKKKKRTTESNLGLQTVRHSLHNSLDGCCRDNKASKPLHFSSFLPAPHRFRAKKSRRQSPSSLPCSLSINPSSMIK

SEQ ID NO: 159723 - protein, 71 aa, Zea Mays
MEQTLAKKKKRTTESNLGLQTVRHSLHNSLDGCCRDNKATFEFPFSSSAVCTKEIHSACGGGWIARCQRGM

SEQ ID NO: 159724 - protein, 91 aa, Zea Mays
MLLSLSLTAATSMAETFSSVLSLVGSISSELVLSSSTATAIAHISSPICFNLESTLLFGGKPWGLWNRCSNFLIKSMITLGTSDILSSVTT

SEQ ID NO: 159725 - protein, 63 aa, Zea Mays
MGHNGSEDTCLHQTDAQGLQSRRTRRTRSLGRQLLIFDSSKCGNKSRSNRNAKRRRTSTSKQT

SEQ ID NO: 159726 - protein, 84 aa, Zea Mays
MIDYLFTAVCHVAARTIRSKNEPSEWDHPYQDENLNSDWIGAPNASHRRGVDATGQWMVASSGPPRATAAAIIFLIAYFNSLQH

SEQ ID NO: 159727 - protein, 89 aa, Zea Mays
MTNNLSTVIIRHRALRNFFETFKLQRLTLCIGGIVNIELLERIQKQFTDDRYYIWQMRQLAMAYMLLRPVQFMDEDEADLQIIETSGVV

SEQ ID NO: 159728 - protein, 83 aa, Zea Mays
MVASSGPPRATAAGIPRRDSSQEKTKWLSFFSSPTSIAYSISSTVLFTSQEKVGRGPCSSARISTATIATHTGTFLKPSSFNA

SEQ ID NO: 159729 - protein, 82 aa, Zea Mays
MTNNLSTVIIRHRALRNFFETFKLQRLTLCIGGIVNIELLERIQKQFTDDRYYIWQMRQLAMAYMLLRPVQFMDEDEADLQM

SEQ ID NO: 159730 - protein, 103 aa, Zea Mays
MPQLLLSGVVAVPLAPVTSRSDLGAQLRVPMRRNLRCARTCPSQSPWSSSPSSPSLDWIGAPNASHRRGVDATGQWMVASSGPPRATAAAIIFLIAYFNSLQH

SEQ ID NO: 159731 - protein, 325 aa, Zea Mays
MEDGSELRFDHGAPYFTVTNGEVARVVGGWEARGIVAEWKATFACFDLATGKFTDFEKEGTAKKYVGVPAMNSICKSLCLEDGVVAKFGVTVGKMDWLQDRSSWSLASLDGKDLGYFDYVVATDKNIASPAFSGLTGRPPPLDLSSFPRLPTALQDIPVRPCFALMVAFSEPLATVPVHGFSFNNSNSLSWAFCNSSKPGRACVPPNRQSWVLHSTTEYASKVINNIGPRKPSAEALAKVAEELFREFQATGLSIPRPIFLKAHRWGAAFPAIAISGDDKCVWDKSTNLAICGDFCTSPSVEGAVLSATRGVSEILECLRCPSSI

SEQ ID NO: 159732 - protein, 134 aa, Zea Mays
MSSAAAAANVAVIGGGISGSVCASLLAARGVAVTLFDSGRGAGGRMAQRREVMEDGSELRFDHGAPYFTVTNGEVARVVGGWEARGIVAEWKATFACFDLATGKFTDFEKICRHFHACLQHFKISQFVHVLLLW

SEQ ID NO: 159733 - protein, 246 aa, Zea Mays
MSSAAAAANVAVIGGGISGSVCASLLAARGVAVTLFDSGRGAGGRMAQRREVMEDGSELRFDHGAPYFTVTNGEVARVVGGWEARGIVAEWKATFACFDLATGKFTDFEKEGTAKKYVGVPAMNSICKSLCLEDGVVAKFGVTVGKMDWLQDRSSWSLASLDGKDLGYFDYVVATDKNIASPAFSGLTGRPPPLDLSSFPRLPTALQDIPVRPCFALMVAFSEPLATVCAIFNNIRSHSSSLSQLL

SEQ ID NO: 159734 - protein, 233 aa, Zea Mays
MRAPIYVYYELENFYQNHRRYVKSRSDKQLRFGAKYTADSCSPVEWDNNGSPIVPCGLIAWSLFNDTYGFTRGSKEIKVNRKNISWKSDREHKFGKHVFPSNFQNGTLIGGGKLDPTVPLSEQEDLIVWMRTSALPKFRKLYGVIEDDLHADETIAIFVGNNYNTYTFGGKKSIVLSTASWLGGKNDFLGHAYIVTGSLSIIISILFALIHVKYPRPQGDPNCLSWNRKNSNS

SEQ ID NO: 159735 - protein, 151 aa, Zea Mays
MAFVFSLTLDQAEHYSSPILSFWMMAASTPWRRNLPLLCGGFGPERGGRPTRIRSISPPTRPNSRTLRRRKHSRRCTPSRHRKNNPHCRRCSSSPHPTSLIQSIDAALKSSSPPIAAPSQSTDLDVLHQDSWGARSPMEETGDAQRPTGRS

SEQ ID NO: 159736 - protein, 540 aa, Zea Mays
MHSLGQPKLPKNFEEDTWTILKDAITAIFLKQKLSCDVEKLYQAAGDLCLHKLGANLYERIKKECEIHIAEKISALVGQSPDLVVFLSLVQRTWQDFCDQMLIIRGIALLLDVKYVKNVANICSVWDMGLQLFRKHLSLSPEIEHKTVTGLLRLIESERLGEAIDRTLLSHLLKMLTALGMYSESFEKPFLECTSEFYATEGVKYMQQSDIPDYLKHVESRLQEEHERCILYLEANTRKPLIATTETQLLDRHTSAIIEKGFAMLMDANRINDLLRMYNLFQRVNAVELLKQALSSYIRATGQGIIMDEEKDRELVPFLLDFKASLDKILEESFAKNEAFSNTMKDSFEHLINLRQNRPAELIAKFLDEKLRAGNKGTSEEELEGILDKVLVMFRFIQGKDVFEAFYKKDLAKRLLLGKSASIDAEKSMITKLKTECGSQFTNKLEGMFKDIELSKEINDSFRQSSQARTKLPSGIEMSVHVLTTGYWPTYPPMDVKLPHELNVYQDIFKEFYLSKYSGRRLMWHAYQLKLSEINNYVFP

SEQ ID NO: 159737 - protein, 948 aa, Zea Mays
MYTFTSIESQIRVLGDFAFMLRDYELALSNYRLLATDYKLDKAWKRFAGVQEMSGLCYFILDQSRKDAEYCMENAFSTYLRIGSSGQRNATRCGLWWAEMLKTRGQYREASNVYFRVSNEEPSLHSAVLLEQAACCYLLCNPPMLRKYGFHLILAGNSYFVSDQKQHAVRVYRNALFVYKQNPWSYINNHVHFNIGRWYGVLGILDVAIKHLLEVIACSHQSLTTQNMFLNDFFHYVQSMGKKFDVYKLQLPVFNMSSLKVLHEDHRTYASHADVGVSESTWQELEEELIPSSSIVKTNWLDTQPMRKYKDSCICVAGEAVKLSVELKNPLQIPVAVSGISIICQLSSTLDALSSDVSGLDLDGGEDKVNTEPSISMLETDGDKFTLSKLDIVLGGGESKRVQLDVTPKVEGILKLVGIRWTLSESVVGYQYFEFNAQKKIKKGKRGPHRSWNNSLVVIKGLPKLTGSIDRMPTKAFAGDLKLLTLNLRNHSEYAVKGIKMKLSNPRFLIPGDSSDIGLKFPHCLKRHVQSESSVVSAKTMKDNFKSLLFAFPQDIEIQAGAALSWPIWFHAATPGNVSLYISLYYEMGSSSDIKYRTLRMHFNLEVLPSLDVSFSVSTSSSRLQEYIVRMDVMNKTPSESFVLHQLSCVGDKWAVSALAACSSINSVETVSENQAVSYFFKIKDCEADSCKEAESDSCTSDMALCPGSSTDLFDIARSPFVDFHHQERCRQVKMAKGPCSLLDFVLISKAVDNSSKPTPDFELLSHHTCHCSALSQNPIWWLMEGPRTISHDFSKSYCEANLQLVIHNSEAHKILVRVVTFDVIPEKTVHPHDSTSAQGGWYDVSLESDVKAISSSKSTHQEKRSSKSIPPYVWCSLSCAQIELQPDSCARVPLKVCIFAPGTYNFSNYELQWKVHLSEGPHVGENENRLSGGGLGYPFYVTVLQGV

SEQ ID NO: 159738 - protein, 909 aa, Zea Mays
MRTLSFSEHETFDHPVACLLVVSSMDKEPVNKFVDLFNTNQLPSLLNEGIMDPQILKHYLVLHDQQEGPQDIAVNVLAEMRSTLGLNDCKLLCINSSTEAGGSNADNSWLPYKALVLNNHDGSCILSVDDLNEIKDFMQDFVSNHIIPYMEQKIRVLNQQVATTRKGFRNQIKNLWWRKRDDVPEAPNGPMYTFTSIESQIRVLGDFAFMLRDYELALSNYRLLATDYKLDKAWKRFAGVQEMSGLCYFILDQSRKDAEYCMENAFSTYLRIGSSGQRNATRCGLWWAEMLKTRGQYREASNVYFRVSNEEPSLHSAVLLEQAACCYLLCNPPMLRKYGFHLILAGNSYFVSDQKQHAVRVYRNALFVYKQNPWSYINNHVHFNIGRWYGVLGILDVAIKHLLEVIACSHQSLTTQNMFLNDFFHYVQSMGKKFDVYKLQLPVFNMSSLKVLHEDHRTYASHADVGVSESTWQELEEELIPSSSIVKTNWLDTQPMRKYKDSCICVAGEAVKLSVELKNPLQIPVAVSGISIICQLSSTLDALSSDVSGLDLDGGEDKVNTEPSISMLETDGDKFTLSKLDIVLGGGESKRVQLDVTPKVEGILKLVGIRWTLSESVVGYQYFEFNAQKKIKKGKRGPHRSWNNSLVVIKGLPKLTGSIDRMPTKAFAGDLKLLTLNLRNHSEYAVKGIKMKLSNPRFLIPGDSSDIGLKFPHCLKRHVQSESSVVSAKTMKDNFKSLLFAFPQDIEIQAGAALSWPIWFHAATPGNVSLYISLYYEMGSSSDIKYRTLRMHFNLEVLPSLDVSFSVSTSSSRLQEYIVRMDVMNKTPSESFVLHQLSCVGDKWAVSALAACSSINSVETVSENQAVSYFFKIKVEGTFFNELPDTEHFDGFHCLIQCSCFISLVNSRL

SEQ ID NO: 159739 - protein, 1168 aa, Zea Mays
MVGLNAAEVTRREPEAELCPLWIKKFNRELMRTLSFSEHETFDHPVACLLVVSSMDKEPVNKFVDLFNTNQLPSLLNEGIMDPQILKHYLVLHDQQEGPQDIAVNVLAEMRSTLGLNDCKLLCINSSTEAGGSNADNSWLPYKALVLNNHDGSCILSVDDLNEIKDFMQDFVSNHIIPYMEQKIRVLNQQVATTRKGFRNQIKNLWWRKRDDVPEAPNGPMYTFTSIESQIRVLGDFAFMLRDYELALSNYRLLATDYKLDKAWKRFAGVQEMSGLCYFILDQSRKDAEYCMENAFSTYLRIGSSGQRNATRCGLWWAEMLKTRGQYREASNVYFRVSNEEPSLHSAVLLEQAACCYLLCNPPMLRKYGFHLILAGNSYFVSDQKQHAVRVYRNALFVYKQNPWSYINNHVHFNIGRWYGVLGILDVAIKHLLEVIACSHQSLTTQNMFLNDFFHYVQSMGKKFDVYKLQLPVFNMSSLKVLHEDHRTYASHADVGVSESTWQELEEELIPSSSIVKTNWLDTQPMRKYKDSCICVAGEAVKLSVELKNPLQIPVAVSGISIICQLSSTLDALSSDVSGLDLDGGEDKVNTEPSISMLETDGDKFTLSKLDIVLGGGESKRVQLDVTPKVEGILKLVGIRWTLSESVVGYQYFEFNAQKKIKKGKRGPHRSWNNSLVVIKGLPKLTGSIDRMPTKAFAGDLKLLTLNLRNHSEYAVKGIKMKLSNPRFLIPGDSSDIGLKFPHCLKRHVQSESSVVSAKTMKDNFKSLLFAFPQDIEIQAGAALSWPIWFHAATPGNVSLYISLYYEMGSSSDIKYRTLRMHFNLEVLPSLDVSFSVSTSSSRLQEYIVRMDVMNKTPSESFVLHQLSCVGDKWAVSALAACSSINSVETVSENQAVSYFFKIKDCEADSCKEAESDSCTSDMALCPGSSTDLFDIARSPFVDFHHQERCRQVKMAKGPCSLLDFVLISKAVDNSSKPTPDFELLSHHTCHCSALSQNPIWWLMEGPRTISHDFSKSYCEANLQLVIHNSEAHKILVRVVTFDVIPEKTVHPHDSTSAQGGWYDVSLESDVKAISSSKSTHQEKRSSKSIPPYVWCSLSCAQIELQPDSCARVPLKVCIFAPGTYNFSNYELQWKVHLSEGPHVGENENRLSGGGLGYPFYVTVLQGV

SEQ ID NO: 159740 - protein, 1001 aa, Zea Mays
MQDFVSNHIIPYMEQKIRVLNQQVATTRKGFRNQIKNLWWRKRDDVPEAPNGPMYTFTSIESQIRVLGDFAFMLRDYELALSNYRLLATDYKLDKAWKRFAGVQEMSGLCYFILDQSRKDAEYCMENAFSTYLRIGSSGQRNATRCGLWWAEMLKTRGQYREASNVYFRVSNEEPSLHSAVLLEQAACCYLLCNPPMLRKYGFHLILAGNSYFVSDQKQHAVRVYRNALFVYKQNPWSYINNHVHFNIGRWYGVLGILDVAIKHLLEVIACSHQSLTTQNMFLNDFFHYVQSMGKKFDVYKLQLPVFNMSSLKVLHEDHRTYASHADVGVSESTWQELEEELIPSSSIVKTNWLDTQPMRKYKDSCICVAGEAVKLSVELKNPLQIPVAVSGISIICQLSSTLDALSSDVSGLDLDGGEDKVNTEPSISMLETDGDKFTLSKLDIVLGGGESKRVQLDVTPKVEGILKLVGIRWTLSESVVGYQYFEFNAQKKIKKGKRGPHRSWNNSLVVIKGLPKLTGSIDRMPTKAFAGDLKLLTLNLRNHSEYAVKGIKMKLSNPRFLIPGDSSDIGLKFPHCLKRHVQSESSVVSAKTMKDNFKSLLFAFPQDIEIQAGAALSWPIWFHAATPGNVSLYISLYYEMGSSSDIKYRTLRMHFNLEVLPSLDVSFSVSTSSSRLQEYIVRMDVMNKTPSESFVLHQLSCVGDKWAVSALAACSSINSVETVSENQAVSYFFKIKDCEADSCKEAESDSCTSDMALCPGSSTDLFDIARSPFVDFHHQERCRQVKMAKGPCSLLDFVLISKAVDNSSKPTPDFELLSHHTCHCSALSQNPIWWLMEGPRTISHDFSKSYCEANLQLVIHNSEAHKILVRVVTFDVIPEKTVHPHDSTSAQGGWYDVSLESDVKAISSSKSTHQEKRSSKSIPPYVWCSLSCAQIELQPDSCARVPLKVCIFAPGTYNFSNYELQWKVHLSEGPHVGENENRLSGGGLGYPFYVTVLQGV

SEQ ID NO: 159741 - protein, 606 aa, Zea Mays
MRKYKDSCICVAGEAVKLSVELKNPLQIPVAVSGISIICQLSSTLDALSSDVSGLDLDGGEDKVNTEPSISMLETDGDKFTLSKLDIVLGGGESKRVQLDVTPKVEGILKLVGIRWTLSESVVGYQYFEFNAQKKIKKGKRGPHRSWNNSLVVIKGIKMKLSNPRFLIPGDSSDIGLKFPHCLKRHVQSESSVVSAKTMKDNFKSLLFAFPQDIEIQAGAALSWPIWFHAATPGNVSLYISLYYEMGSSSDIKYRTLRMHFNLEVLPSLDVSFSVSTSSSRLQEYIVRMDVMNKTPSESFVLHQLSCVGDKWAVSALAACSSINSVETVSENQAVSYFFKIKDCEADSCKEAESDSCTSDMALCPGSSTDLFDIARSPFVDFHHQERCRQVKMAKGPCSLLDFVLISKAVDNSSKPTPDFELLSHHTCHCSALSQNPIWWLMEGPRTISHDFSKSYCEANLQLVIHNSEAHKILVRVVTFDVIPEKTVHPHDSTSAQGGWYDVSLESDVKAISSSKSTHQEKRSSKSIPPYVWCSLSCAQIELQPDSCARVPLKVCIFAPGTYNFSNYELQWKVHLSEGPHVGENENRLSGGGLGYPFYVTVLQGV

SEQ ID NO: 159742 - protein, 655 aa, Zea Mays
MLHPVAPVLTQSSACIPGANLIFAHEAVKLSVELKNPLQIPVAVSGISIICQLSSTLDALSSDVSGLDLDGGEDKVNTEPSISMLETDGDKFTLSKLDIVLGGGESKRVQLDVTPKVEGILKLVGIRWTLSESVVGYQYFEFNAQKKIKKGKRGPHRSWNNSLVVIKGLPKLTGSIDRMPTKAFAGDLKLLTLNLRNHSEYAVKGIKMKLSNPRFLIPGDSSDIGLKFPHCLKRHVQSESSVVSAKTMKDNFKSLLFAFPQDIEIQAGAALSWPIWFHAATPGNVSLYISLYYEMGSSSDIKYRTLRMHFNLEVLPSLDVSFSVSTSSSRLQEYIVRMDVMNKTPSESFVLHQLSCVGDKWAVSALAACSSINSVETVSENQAVSYFFKIKDCEADSCKEAESDSCTSDMALCPGSSTDLFDIARSPFVDFHHQERCRQVKMAKGPCSLLDFVLISKAVDNSSKPTPDFELLSHHTCHCSALSQNPIWWLMEGPRTISHDFSKSYCEANLQLVIHNSEAHKILVRVVTFDVIPEKTVHPHDSTSAQGGWYDVSLESDVKAISSSKSTHQEKRSSKSIPPYVWCSLSCAQIELQPDSCARVPLKVCIFAPGTYNFSNYELQWKVHLSEGPHVGENENRLSGGGLGYPFYVTVLQGV

SEQ ID NO: 159743 - protein, 397 aa, Zea Mays
MAPKHLNLFAAALLLLLLPSGSSATAVEYCKKGWDYPVKVSSVEVVPDPVVRGQPATFKISASTDKNITKGKLTIDVAYFIFHVHSETHNLCDETSCPVTGEFVLASQQTLPSFTPPGSYTLTMKLLGDSNEELTCISFGFSIGHWMLERKLADADVSEEEQNNILKDLEKKEAEYMRLRRHKMGVDDFELLTIIGRGAFGEVRLCREKTTSNVYAMKKLKKSKMLRRGQHIYLEPFCLLFMVAGLYFFDHSVDSQLAQQKEYNLKKPSAYHYNILVLGFVVLLCGLLGIPPSNGVLHQSPMHTKSLVVLKRQLLSKKMVDTAKESIGGSATSLELYGKMEEVFIKMDSEENIDSVDRELKNFNDAVLQEGNEEGRLAREFDSRKHIEAHLPVRVNE

SEQ ID NO: 159744 - protein, 526 aa, Zea Mays
MDVLYMNLVVQHSPWSQGIPRHIFPELFSFAKNSKMTIKEVKDQEQFHDLFHLPVSDQAFDQFLVLKGSWEQIILNNVHDRWKYIWGSDKFSSQKAYRSFMGQMQTHPIYKLVWKSWYVASILQSPRSGSGNEQSAPPSAISVFPQPQPSPPLAPMPPALAISTFASIRLDQNLTWRAESPLQSAFASTRPDAPAPVFPQLQPSPRQRTHGRYARPARGDPLPPPDSHRRTQIHFPQPSTPFSKKQSNDSRVDEIDPVAGSICGRGGERLLQGTEALAVEVEQEQRVQDLHGVLLELHNGGEAVHLDLHLLALHGELPLPGGEAKELVLGGVHVDGDVGSSARMAAAAGEEAQSSATKQKVAAAKQYIENHYKSQMKSLQELKERHWMLERKLADADVSEEEQNNILKDLEKKEAEYMRLRRHKMGVDDFELLTIIGRGAFGEVRLCREKTTSNVYAMKKLKKSKMLRRGQHIYLEPFCLLFMVAGLYFFDHSVDSQLAQQKEYNLKKPSAYHYNILVLGFVVCGT

SEQ ID NO: 159745 - protein, 72 aa, Zea Mays
MAPKHLNLFAAALLLLLLPSGSSATAVEYCKKGWDYPVKVSSVEVVPDPVVRGQPATFKISASTVWIMKDAL

SEQ ID NO: 159746 - protein, 179 aa, Zea Mays
MAPKHLNLFAAALLLLLLPSGSSATAVEYCKKGWDYPVKVSSVEVVPDPVVRGQPATFKISASTGFLHPHDEVAGGQQRGTDLHLFRVQHRVCCAESRHLNPVSNVMDVLYMNLVVQHSPVRLGTPRLGAWNWLIRSSQPYQCSSCARSRFLKPSLRKLIFSESTACGEEMTSTPRGHL

SEQ ID NO: 159747 - protein, 285 aa, Zea Mays
MAPKHLNLFAAALLLLLLPSGSSATAVEYCKKGWDYPVKVSSVEVVPDPVVRGQPATFKISASTDKNITKGKLTIDVAYFIFHVHSETHNLCDETSCPVTGEFVLASQQTLPSFTPPGSYTLTMKLLGDSNEELTCISFGFSIGHWMLERKLADADVSEEEQNNILKDLEKKEAEYMRLRRHKMGVDDFELLTIIGRGAFGEVRLCREKTTSNVYAMKKLKKSKMLRRGQHIYLEPFCLLFMVAGLYFFDHSVDSQLAQQKEYNLKKPSAYHYNILVLGFVVCGT

SEQ ID NO: 159748 - protein, 364 aa, Zea Mays
MPPALAISTFASIRLDQNLTWRAESPLQSAFASTRPDAPAPVFPQLQPSPRQRTHGRYARPARGDPLPPPDSHRRTQIHFPQPSTPFSKKQSNDSRVDEIDPVAGSICGRGGERLLQGTEALAVEVEQEQRVQDLHGVLLELHNGGEAVHLDLHLLALHGELPLPGGEAKELVLGGVHVDGDVGSSARMAAAAGEEAQSSATKQKVAAAKQYIENHYKSQMKSLQELKERHWMLERKLADADVSEEEQNNILKDLEKKEAEYMRLRRHKMGVDDFELLTIIGRGAFGEVRLCREKTTSNVYAMKKLKKSKMLRRGQVFHDVYSCQETMYPSKKKLSPFYCFASMYYLASRDACIYISQELLLEH

SEQ ID NO: 159749 - protein, 155 aa, Zea Mays
MKLLGDSNEELTCISFGFSIGHWMLERKLADADVSEEEQNNILKDLEKKEAEYMRLRRHKMGVDDFELLTIIGRGAFGEVRLCREKTTSNVYAMKKLKKSKMLRRGQVFHDVYSCQETMYPSKKKLSPFYCFASMYYLASRDACIYISQELLLEH

SEQ ID NO: 159750 - protein, 1112 aa, Zea Mays
MDLDDSPAVKVHNHGASSPAELAKQYMSSRYLREPQSSSLRSRLFLENKGEASNTVNDRRSVPPIVQTPLELRNENPGLPVNGYVTSGLRGRSAIYRMSRSPYFKGQNYSSDLNTSSLSQRSQSLHVGGRQVLKRSGAELENELGSIGPIRRIRQKSNMMSSFRDSRANPKGNLLTSHISSTDFTEDGASIQSPSSKKLLVGSSQSLRPLESQKNEGDGKSSDSIPPIPAQSNKMAEKIFEQLNIIAPSPKQQQSVTLNASNSMSKKPVFQDAGSSSMYNQSSSLKFQDLDGANGPHDTNLNGSLLKKDKLNIIKDGSPKAAFSDRPALLGNSVSASKSWTPAFKMAVIEDLPELDDDLEVLIQSSKIEVETTEQKIDSNRKEQKVEQNILEQRVEPNLKNIAGSTISEQPVASLSKTVTSSGGLFLSNDPGKAVPKASVDNNTEFAFSNGPPGTRPATGVSAMPLASVNNDKQTGASNFIFGIKQPITSDFETSTAKNKSTLGQSVTKPTTLASTSSERGDKTEKAEDVANPSEKVLPSAASTTLNAPLHFTSVASTSSLSNGLSYSPPKLTTPPPTDKPAISSAVSTSIFAVSSSSPAISSSPAFTGFSFSSSAPVGLSLVTSAKSDGTTAENKAASTLSFGIGGTKAEVKSVAPDASSKASSELFISPVSSSIASFSSSPATSTPTFTAVAPSSDAAGISVAAPSSTSTAPGLQSASTPSFTFPSSGNNLFGFSSPAQSTGLSTSSLAGSTSQPPAASTLFGSKPTQSDGTIQQTSQSSKPQSGSPFPVMTPGVGASSSGPGTLSFGLGASSTGSGTASFGVGASSSAPGTLSTFGAAAHSSGPGVFSFGAGTSSSGPSTASFGAATSTSGTGFGNSPFGTGATFANPFSSSSSTGFTFSSPSSSAGASTAASTSVFASTSTASSASAFSNPFGSSSSPPSTFTFGQSGSSGNTFAFGAQPAPTFPSQPSLFSFSSANTSMNSSPQPAFGMINTNTAFSMASPGNDQMNEDSMADDTSQAAPAPAPVFGSSFGQQNNSSAAPVFGAPAVQPGGVFQFGGQQGSAQQNPSFPAVGSLEFQGGNFSLGSGGGGGDKSNRRVIKVKRTPKKR

SEQ ID NO: 159751 - protein, 954 aa, Zea Mays
MMSSFRDSRANPKGNLLTSHISSTDFTEDGASIQSPSSKKLLVGSSQSLRPLESQKNEGDGKSSDSIPPIPAQSNKMAEKIFEQLNIIAPSPKQQQSVTLNASNSMSKKPVFQDAGSSSMYNQSSSLKFQDLDGANGPHDTNLNGSLLKKDKLNIIKDGSPKAAFSDRPALLGNSVSASKSWTPAFKMAVIEDLPELDDDLEVLIQSSKIEVETTEQKIDSNRKEQKVEQNILEQRVEPNLKNIAGSTISEQPVASLSKTVTSSGGLFLSNDPGKAVPKASVDNNTEFAFSNGPPGTRPATGVSAMPLASVNNDKQTGASNFIFGIKQPITSDFETSTAKNKSTLGQSVTKPTTLASTSSERGDKTEKAEDVANPSEKVLPSAASTTLNAPLHFTSVASTSSLSNGLSYSPPKLTTPPPTDKPAISSAVSTSIFAVSSSSPAISSSPAFTGFSFSSSAPVGLSLVTSAKSDGTTAENKAASTLSFGIGGTKAEVKSVAPDASSKASSELFISPVSSSIASFSSSPATSTPTFTAVAPSSDAAGISVAAPSSTSTAPGLQSASTPSFTFPSSGNNLFGFSSPAQSTGLSTSSLAGSTSQPPAASTLFGSKPTQSDGTIQQTSQSSKPQSGSPFPVMTPGVGASSSGPGTLSFGLGASSTGSGTASFGVGASSSAPGTLSTFGAAAHSSGPGVFSFGAGTSSSGPSTASFGAATSTSGTGFGNSPFGTGATFANPFSSSSSTGFTFSSPSSSAGASTAASTSVFASTSTASSASAFSNPFGSSSSPPSTFTFGQSGSSGNTFAFGAQPAPTFPSQPSLFSFSSANTSMNSSPQPAFGMINTNTAFSMASPGNDQMNEDSMADDTSQAAPAPAPVFGSSFGQQNNSSAAPVFGAPAVQPGGVFQFGGQQGSAQQNPSFPAVGSLEFQGGNFSLGSGGGGGDKSNRRVIKVKRTPKKR

SEQ ID NO: 159752 - protein, 1086 aa, Zea Mays
MSSRYLREPQSSSLRSRLFLENKGEASNTVNDRRSVPPIVQTPLELRNENPGLPVNGYVTSGLRGRSAIYRMSRSPYFKGQNYSSDLNTSSLSQRSQSLHVGGRQVLKRSGAELENELGSIGPIRRIRQKSNMMSSFRDSRANPKGNLLTSHISSTDFTEDGASIQSPSSKKLLVGSSQSLRPLESQKNEGDGKSSDSIPPIPAQSNKMAEKIFEQLNIIAPSPKQQQSVTLNASNSMSKKPVFQDAGSSSMYNQSSSLKFQDLDGANGPHDTNLNGSLLKKDKLNIIKDGSPKAAFSDRPALLGNSVSASKSWTPAFKMAVIEDLPELDDDLEVLIQSSKIEVETTEQKIDSNRKEQKVEQNILEQRVEPNLKNIAGSTISEQPVASLSKTVTSSGGLFLSNDPGKAVPKASVDNNTEFAFSNGPPGTRPATGVSAMPLASVNNDKQTGASNFIFGIKQPITSDFETSTAKNKSTLGQSVTKPTTLASTSSERGDKTEKAEDVANPSEKVLPSAASTTLNAPLHFTSVASTSSLSNGLSYSPPKLTTPPPTDKPAISSAVSTSIFAVSSSSPAISSSPAFTGFSFSSSAPVGLSLVTSAKSDGTTAENKAASTLSFGIGGTKAEVKSVAPDASSKASSELFISPVSSSIASFSSSPATSTPTFTAVAPSSDAAGISVAAPSSTSTAPGLQSASTPSFTFPSSGNNLFGFSSPAQSTGLSTSSLAGSTSQPPAASTLFGSKPTQSDGTIQQTSQSSKPQSGSPFPVMTPGVGASSSGPGTLSFGLGASSTGSGTASFGVGASSSAPGTLSTFGAAAHSSGPGVFSFGAGTSSSGPSTASFGAATSTSGTGFGNSPFGTGATFANPFSSSSSTGFTFSSPSSSAGASTAASTSVFASTSTASSASAFSNPFGSSSSPPSTFTFGQSGSSGNTFAFGAQPAPTFPSQPSLFSFSSANTSMNSSPQPAFGMINTNTAFSMASPGNDQMNEDSMADDTSQAAPAPAPVFGSSFGQQNNSSAAPVFGAPAVQPGGVFQFGGQQGSAQQNPSFPAVGSLEFQGGNFSLGSGGGGGDKSNRRVIKVKRTPKKR

SEQ ID NO: 159753 - protein, 402 aa, Zea Mays
MGNTCVGPSITKNGFFQSVSTVLWKTSQDGDALPAAGSDANGPGRSQSTPPPALPKPASDVHVAVQSKAPEPVKIAASHSEPAPKAAAPVAANASPSSSPNSSAEALPTRPRPKAPPVKRVSSAGLLVGSVLKRRTENLKDKYSLGRRLGQGQFGTTYLCVERATGKEFACKSILKRKLVTDDDVEDVRREIQIMHHLAGHPNVISIRGAYEDAVAVHLVMELCGGGELFDRIVQKGHYTERKAAELARVIVGVVEACHSMGVMHRDLKPENFLFADQKEEAALKTIDFGLSIFFHPGQIFTDVVGSPYYVAPEVLKKKYGPEADVWSAGVIIYILLSGVPPFWAENEQGIFEEVLHGRLDFESEPWPSVSEGAKDLVRRMLIRDPRKRLTAHEVLRWWFGS

SEQ ID NO: 159754 - protein, 719 aa, Zea Mays
MPHSVLARLPPGSVRLVAAFGLLLLVSLLVLHRRPGRPHVAAAAASDRLTDPSRSRLFLSQSPGANASIAADLRALTAGPHLAGTPASAGAAAHVLARLRAAGLQTLTREYEPLLSYPGHASLALLRPDGSLLARLSLEEPADEGRRVVPPYHAYAPSGGAVAEAVFVNLGREEDYVVLERLGVGVRGRVAVARRGGGYRGGVVARAADKGAVAVLIAGNADGGVERGVVLLGGPGDPLTPGWAATSGAERLKFDDKAVKQRFPSIPSMPVSAKTAAAIIRSLGGPAIPAEWKDGLGVDTGGLGPGPTLVNFTYQEDRKFYKIRDIFGIIKGQEEPDRYVILGNHRDAWTYGAVDPNSGTAALLDIARRLGIMLQSGWKPRRSIILCSWDGEEFGMALFRPQIGSTEWVEDNLEDLHSKAVAYLNVDCAVQGVGFFAGSTPQLDKLLVDITRQVRDPDVTGKMVHDTWNEMSGGIKIERLARTDSDFAPFLHHAGIPSVDLYYGEEFPGYHTALDTYNWMEKHGDPFFLRHLAITEIWGLLALRLANDPVLPFDYQAYTSQLQEHIKTLSALTSNGHAVNLMNGCVNDLSGAAMEVLKEMKKLQQMDLYDEHARMRRRLLNDRLLLAERSFLQPEGLQGRGWFKHLLYSPPEDYESKLSFFPGIADAISRSANLSDKEQEVAMQHEVWKVCRAIQRAASVLRGEFSEQKPTNFSSLVTP

SEQ ID NO: 159755 - protein, 341 aa, Zea Mays
MLQSGWKPRRSIILCSWDGEEFGMIGSTEWVEDNLEDLHSKAVAYLNVDCAVQGVGFFAGSTPQLDKLLVDITRQVRDPDVTGKMVHDTWNEMSGGIKIERLARTDSDFAPFLHHAGIPSVDLYYGEEFPGYHTALDTYNWMEKHGDPFFLRHLAITEIWGLLALRLANDPVLPFDYQAYTSQLQEHIKTLSALTSNGHAVNLMNGCVNDLSGAAMEVLKEMKKLQQMDLYDEHARMRRRLLNDRLLLAERSFLQPEGLQGRGWFKHLLYSPPEDYESKLSFFPGIADAISRSANLSDKEQEVAMQHEVWKVCRAIQRAASVLRGEFSEQKPTNFSSLVTP

SEQ ID NO: 159756 - protein, 557 aa, Zea Mays
MPHSVLARLPPGSVRLVAAFGLLLLVSLLVLHRRPGRPHVAAAAASDRLTDPSRSRLFLSQSPGANASIAADLRALTAGPHLAGTPASAGAAAHVLARLRAAGLQTLTREYEPLLSYPGHASLALLRPDGSLLARLSLEEPADEGRRVVPPYHAYAPSGGAVAEAVFVNLGREEDYVVLERLGVGVRGRVAVARRGGGYRGGVVARAADKGAVAVLIAGNADGGVERGVVLLGGPGDPLTPGWAATSGAERLKFDDKAVKQRFPSIPSMPVSAKTAAAIIRSLGGPAIPAEWKDGLGVDTGGLGPGPTLVNFTYQEDRKFYKIRDIFGIIKGQEEPDRYVILGNHRDAWTYGAVDPNSGTAALLDIARRLGIMLQSGWKPRRSIILCSWDGEEFGMALFRPQIGSTEWVEDNLEDLHSKAVAYLNVDCAVQGVGFFAGSTPQLDKLLVDITRQVRDPDVTGKMVHDTWNEMSGGIKIERLARTDSDFAPFLHHAGIPSVDLYYGEEFPGYHTALDTYNWMEKHGDPFFLRHLARAYKNIVCPDEQWPCSKFDEWVRQ

SEQ ID NO: 159757 - protein, 361 aa, Zea Mays
MLQSGWKPRRSIILCSWDGEEFGMIGSTEWVEDNLEDLHSKAVAYLNVDCAVQGVGFFAGSTPQLDKLLVDITRQVRDPDVTGKMVHDTWNEMSGGIKIERLARTDSDFAPFLHHAGIPSVDLYYGEEFPGYHTALDTYNWMEKHGDPFFLRHLAITEIWGLLALRLANDPVLPFDYQAYTSQLQEHIKTLSALTSNGHAVNLMNGCVNDLSGAAMEVLKEMKKWCLKLADDVLLCMFGFKIQKLQQMDLYDEHARMRRRLLNDRLLLAERSFLQPEGLQGRGWFKHLLYSPPEDYESKLSFFPGIADAISRSANLSDKEQEVAMQHEVWKVCRAIQRAASVLRGEFSEQKPTNFSSLVTP

SEQ ID NO: 159758 - protein, 499 aa, Zea Mays
MPHSVLARLPPGSVRLVAAFGLLLLVSLLVLHRRPGRPHVAAAAASDRLTDPSRSRLFLSQSPGANASIAADLRALTAGPHLAGTPASAGAAAHVLARLRAAGLQTLTREYEPLLSYPGHASLALLRPDGSLLARLSLEEPADEGRRVVPPYHAYAPSGGAVAEAVFVNLGREEDYVVLERLGVGVRGRVAVARRGGGYRGGVVARAADKGAVAVLIAGNADGGVERGVVLLGGPGDPLTPGWAATSGAERLKFDDKAVKQRFPSIPSMPVSAKTAAAIIRSLGGPAIPAEWKDGLGVDTGGLGPGPTLVNFTYQEDRKFYKIRDIFGIIKGQEEPDRYVILGNHRDAWTYGAVDPNSGTAALLDIARRLGIMLQSGWKPRRSIILCSWDGEEFGMIGSTEWVEDNLEDLHSKAVAYLNVDCAVQGVGFFAGSTPQLDKLLVDITRQVRDPDVTGKMVHDTWNEMSGGIKGKMRTPGPSQDIACLIFVCPISKECQICR

SEQ ID NO: 159759 - protein, 76 aa, Zea Mays
MKNPLYVSEGQIHKKLRCHFCKKIGHFKKDCLNRKKWFKKKHIHHYVFVCLESNFVEVYGNTLRLFCGATNVSHIT

SEQ ID NO: 159760 - protein, 110 aa, Zea Mays
MLVVCHMAKDHVTEDLVHTSPADYNFLLMVIASLRDRGCLVFFLTLFRGKCRSTGILHSLLTPVLCHLLTPGVTIDAGRRLGEHVAHGYRLFVPHDRKLKMVLQPRPRDW

SEQ ID NO: 159761 - protein, 178 aa, Zea Mays
MARLNEGLSLFDAILIVPMFQITWTFFSICIGFVYFQEYQVFDTLRIIMFVLGMTFVFVGISLLAPDDSKADTKDGSSTAEDSIIDIDRNGKMLMEETDIDDSISFVTSVKVNAKRVLSKAKSACSMSLGLGESTISASSMLAMPMVSSRTTGFRGIENDRPNCCLYGASSVASTSGW

SEQ ID NO: 159762 - protein, 279 aa, Zea Mays
MLWVDKYRPKTLDKVTVHDQVAQNLRKFVSEQDCPHLLFYGPSGSGKKTLILALIKQMFGAGAEKVKLENKTWKIDTGTRTFEIELAMLSSAHHVEMTPSDAGFQDRYVVQEVIKEMAKNRPIDAKGKRAFKVLVLNEVDKLSREAQHSLRRTMEKYSSSCRLILCCNSSSKVTEAVRSRCLNVRVNAPSEDQIVQVLEFIGKKENLHLPAGFAARIAAQSNRNLRRAILFFETCKVQQYPFTSNQVAPPLDWEQYVSEIATDILTEQSPKRFSHAYVC

SEQ ID NO: 159763 - protein, 248 aa, Zea Mays
MLAFRTGMLFRRSSKRWRRTGQLMPKAREHLKVDKLSREAQHSLRRTMEKYSSSCRLILCCNSSSKVTEAVRSRCLNVRVNAPSEDQIVQVLEFIGKKENLHLPAGFAARIAAQSNRNLRRAILFFETCKVQQYPFTSNQVAPPLDWEQYVSEIATDILTEQSPKRLFAVRQKFYELLVNCIPPESILKKLLAELLRKLDADLKHEICHWAAHYEHKMRLGSKAIFHLEAFVAKFMSVYKEFLVATFG

SEQ ID NO: 159764 - protein, 150 aa, Zea Mays
MGGRLRDGARSACPTGVRSRGHAPSFRARRRRRDAGVGVGPRGDGVHGVGRLHVPGRPPGVPARRGAAAPVVPRRLPRRRRTLPPRGRGVRDAHRRRLPRRAPRRAGARAPGEGCGHSGGEAVLRSYRVVKGRLRDVAVYSFISTDPVVE

SEQ ID NO: 159765 - protein, 303 aa, Zea Mays
MGFSVLLSPPPLPLPSATAAADLYLIFGGHDRRRRRPLEHGCRCGRPPETALGGSSGRRGSYDDDGTAPGSLGLDGSSTSSSVRRTGSAKPRYQVTSKEEDTQNADREGWQYSTEGLSKSMSKSRYIKVFGVDLSPDNVAVAIVYFVQGVLGLSRLAVSFYLKDNLHLEPAETAVISGFSALPWLVKPLYGFISDSIPLFGYRRRSYLFLSGILGALSWSLMAAVVDDKYSAALSIILGSLAVAISDVVVDSMVVERARGESQSTSGSLQSLCWGSSAFGGVICFWCYSTSATDDICCCSSCK

SEQ ID NO: 159766 - protein, 218 aa, Zea Mays
MGFSVLLSPPPLPLPSATAAADLYLIFGGHDRRRRRPLEHGCRCGRPPETALGGSSGRRGSYDDDGTAPGSLGLDGSSTSSSVRRTGSAKPRYQVTSKEEDTQNADREGWQYSTEGLSKSMSKSRYIKVFGVDLSPDNVAVAIVYFVQGVLGLSRLAVSFYLKDNLHLEPAELYLGSQPCHGWSSPSTVLSVIPSLSLDIEEGRTYFYQASLEHFHGV

SEQ ID NO: 159767 - protein, 200 aa, Zea Mays
MGFSVLLSPPPLPLPSATAAADLYLIFGGHDRRRRRPLEHGCRCGRPPETALGGSSGRRGSYDDDGTAPGSLGLDGSSTSSSVRRTGSAKPRYQVTSKEEDTQNADREGWQYSTEGLSKSMSKSRYIKVFGVDLSPDNVAVAIVYFVQGVLGLSRLAVSFYLKDNLHLEPAETAVISGFSALPWLVKPLYGFIRFHQNTE

SEQ ID NO: 159768 - protein, 301 aa, Zea Mays
MGFSVLLSPPPLPLPSATAAADLYLIFGGHDRRRRRPLEHGCRCGRPPETALGGSSGRRGSYDDDGTAPGSLGLDGSSTSSSVRRTGSAKPRYQVTSKEEDTQNADREGWQYSTEGLSKSMSKSRYIKVFGVDLSPDNVAVAIVYFVQGVLGLSRLAVSFYLKDNLHLEPAETAVISGFSALPWLVKPLYGFISDSIPLFGYRRRSYLFLSGILGALSWSLMAAVVDDKYSAALSIILGSLAVAISDVVVDSMVVERARGESQSTSGSLQSLCWGSSAFGGVVSAYFSGSLVDTYGVRLCC

SEQ ID NO: 159769 - protein, 343 aa, Zea Mays
MAAVVDDKYSAALSIILGSLAVAISDVVVDSMVVERARGESQSTSGSLQSLCWGSSAFGGVVSAYFSGSLVDTYGVRFVFGVTALLPLMTSAVAVLVNEERLPLGKSSVSLSVSGSELIESSKQRIMQIWDSVKQPSILLPTLFIFLWQATPQSDSAMFFFITNKLGFTPEFLGRVTLVTSVASLLGIGVYNLFLKEVPLRKIFLVTTVLGSALGMTQVLLVTGLNRKLGISDEWFSIGDSLIITVLGQASFMPVLVLAAKLCPVGAEATLFATLMSISNAGGVAGGLVGAGLTQLLGVSRDNFENLALLIAICNLSSLLPLPLLGLLPDESRNADGAQTKND

SEQ ID NO: 159770 - protein, 183 aa, Zea Mays
MSKSRYIKVFGVDLSPDNVAVAIVYFVQGVLGLSRLAVSFYLKDNLHLEPAETAVISGFSALPWLVKPLYGFISDSIPLFGYRRRSYLFLSGILGALSWSLMAAVVDDKYSAALSIILGSLAVAISDVVVDSMVVERARGESQSTSGSLQSLCWGSSAFGGVICFWCYSTSATDDICCCSSCK

SEQ ID NO: 159771 - protein, 119 aa, Zea Mays
MNMAGRHISVVIVQGTCASHTWTISKQISANRSEGGTWKRNWSIASRLHLSHVRLLEMLSRVRTCMIILNSDIFLNAWSFFLCCNDAFQRLHFRAVQTSQSMATRACSVLALIVGKGLA

SEQ ID NO: 159772 - protein, 681 aa, Zea Mays
MALKVAYRIRFARWHLLSGRLMYCSCPDSPSARASAERASSSEFDSAIRSLKDSLRPESLARILDSTSDSSLALRIFRWASHQRYNIQTVDTYSCMISRLTVVENRDEMDSLLSEMVRLRVPALEQALNKLVESLSSKNRCDEALLVIQHARSAKLKLSVSACNGVLHGMVRQGRGLRLFMLAYTEIIKAGVLPDVEALNFLIQALCESGRLDLALIQFDRMNKKRCTPNSHTFEILITALCFHSRADEAVKLFDKMLQLRCSPDSSFHAQVMPLFCKFSKVKEVITLHRIMKEGNIQLSLQLYSALVRCLCENELLDDATIVFKEMVASGHAPMAITYVDMINCYCTKSKFHNAMIFLEENGVTELEPYNVLLTWLCRNDRLQDSVNYLEKLHSRGFVDCESWNIVITQFCNEGNIRRAFELIGRMVVSSFAPELVEVLCHSKRIKEAIEVFKYHYNRGCSLTNKSLDMLIQGSCLSGKIQEAVKLRTLAVSVCTGTFCTFSTYDIIIQALFHLKEGKHVLALFAQMLMEGCPLDGYAYNILLRSFLTKETIIEAAILFNRMVNHSFFPDQETFELLVNDMALFSFLNMVAQSLLKVVDASGTVSPRMYNIIIYGLIKEGFKSEACKFLDQMLEKGWVPDSRTHRVLVGSSDLVEARELVEAYQTVDGDNVANILLEGLD

SEQ ID NO: 159773 - protein, 199 aa, Zea Mays
MDPDISRSCAITMAVTLLFGAVDGVFCMFQGTIANVAVLKQQYGLSKGANEVSIIIEAYRTLRDRGPYPADQVVRDISGKFAFVLYDCSTKSVFMAADTDGNVPFYWGVDTDGRLVVSDDAELVKSACGKSCAPFPKGFFFTTSGGLRSYEHPMHEVKPVPRVDSKGEVCGTTYTVDASARKETTIPRVGSAADWSSQY

SEQ ID NO: 159774 - protein, 294 aa, Zea Mays
MATAARSLHLPGPTPPKSSTPSSHRLPVPCHLRPQRRRLAASSSDLTSFPEPPPATEAELRENGFRSTRRTKLVCTVGPATCGAAELEALAVGGMNVARVNMCHGDREWHREVIRAVRRLNDEKGFAVAVMMDTEGSEIHMGDLGGAPSAKAEDGEVWTFSVRSSDTSLPDRIIHVNYDGFAEDVKAGDELFADGGMARFEVIEKLGPDVKCRCTDPGLLLPRANLTIWRDGSVVRERNAMLPTISSKDWIDIDFGIAEGVDFIAVSFVKSAEVINHLKSYIAARSRGRGHCKD

SEQ ID NO: 159775 - protein, 308 aa, Zea Mays
MLPTISSKDWIDIDFGIAEGVDFIAVSFVKSAEVINHLKSYIAARSRGSDIGVIAKIESIDALKNLEEIIRASDGVMVARGDLGAQIPLEQVPSIQQRIVRMCRQLNKPVIVASQLLESMIEYPTPTRAEVADVSEAVRQRADALMLSGESAMGRYPEKALSVLRSVSLRIERWWREEKRQEALELQGVSSSFSDKISEEICNSAAKMANNLGVDAVFVYTKDGYMGSLLSRCRPDCPIFAFTSSTSVRRRLNLQWGLIPFRLSESDDMESNLNRTFSLLKARGMVQSGDLVIALSDMLQSIQVVNVP

SEQ ID NO: 159776 - protein, 241 aa, Zea Mays
MGRGRWASGIRAAALVLLAVAAAAGAAAGDPDPDELERAFPIVEPDHGHTKLRLSEQGLEAIRRIETPIAVVGVIGPYRSGKSFLLNQLLSLSCDKGFGVGHMRDTKTKGIWIWGTPVEMDVDGSKVSVIYLDTEGFESVGKSNVYDDRIFALATVLSSVLIYNLPETVREADISRLSFAIEIAEEFYGRFVHGQDVAFEPAKLLWLIQRDFLQGKSVQQMVNEALQRVPNDNGDKYIDEV

SEQ ID NO: 159777 - protein, 241 aa, Zea Mays
MRWQMVMLEFSLISSTLANIMLLSQLSSLKMILKRNLLLANEYQSSKLCEARFSECEDKMDHLQVLKLPSMAKFNAGFTHCNQSFVKECVGPAKESYERRMSKMLAKSRALFIKEYNNKLFNWLVTFSLVMVVIGRFVIKFFLLEIAAWVMFIFLETYTRMFWSAESLYYNPAWHIIVSSWETIVYSPILDLDRWAVPIVIMLLFGVLYWRCFGGRRKRGRGSLLPLYKNSYNSSRRSRSD

SEQ ID NO: 159778 - protein, 281 aa, Zea Mays
MGRGRWASGIRAAALVLLAVAAAAGAAAGDPDPDELERAFPIVEPDHGHTKLRLSEQGLEAIRRIETPIAVVGVIGPYRSGKSFLLNQLLSLSCDKGFGVGHMRDTKTKGIWIWGTPVEMDVDGSKVSVIYLDTEGFESVGKSNVYDDRIFALATVLSSVLIYNLPETVPPPPTFSPLNGCRLVNFIVGHCRGKMLLLSQQSFSGLSRGISSKENLFNKWSMKPFNGCLMIMVTNILMRSIKYEIRWQLWGTTALLLACLSRIFKEQNYVIWRTKNLNPYM

SEQ ID NO: 159779 - protein, 408 aa, Zea Mays
MGRGRWASGIRAAALVLLAVAAAAGAAAGDPDPDELERAFPIVEPDHGHTKLRLSEQGLEAIRRIETPIAVVGVIGPYRSGKSFLLNQLLSLSCDKGFGVGHMRDTKTKGIWIWGTPVEMDVDGSKVSVIYLDTEGFESVGKSNVYDDRIFALATVLSSVLIYNLPETVREADISRLSFAIEIAEEFYGRFEGQDVAFEPAKLLWLIQRDFLQGKSVQQMVNEALQRVPNDNGDKYIDEVNQIRDSLAVMGNNSTAFSLPQPHLQRTKLCDMEDKELEPLYVKRREQLKQLVSSIVKPKIVQGRTLNGKDFVSFLQQILEALNKGEIPSTGSLVEIFNKAILDRCLKAYREKMDGLGLPVPVDKLQKLHEMANGDARILFDKQHFGKHHAAQSALKLEDDIKKKLTSS

SEQ ID NO: 159780 - protein, 540 aa, Zea Mays
MGRGRWASGIRAAALVLLAVAAAAGAAAGDPDPDELERAFPIVEPDHGHTKLRLSEQGLEAIRRIETPIAVVGVIGPYRSGKSFLLNQLLSLSCDKGFGVGHMRDTKTKGIWIWGTPVEMDVDGSKVSVIYLDTEGFESVGKSNVYDDRIFALATVLSSVLIYNLPETVREADISRLSFAIEIAEEFYGRFVHGQDVAFEPAKLLWLIQRDFLQGKSVQQMVNEALQRVPNDNGDKYIDEVNQIRDSLAVMGNNSTAFSLPQPHLQRTKLCDMEDKELEPLYVKRREQLKQLVSSIVKPKIVQGRTLNGKDFVSFLQQILEALNKGEIPSTGSLVEIFNKAILDRCLKAYREKMDGLGLPVPVDKLQKLHEMANGDARILFDKQHFGKHHAAQSALKLEDDIKKVYRNLLLANEYQSSKLCEARFSECEDKMDHLQVLKLPSMAKFNAGFTHCNQSFVKECVGPAKESYERRMSKVCLLILNTVVMSVTKGLPVIMHLQPSFQRQTSLLLFLFLVAVILNFVSFHLSTTPHDEIQLLLYW

SEQ ID NO: 159781 - protein, 305 aa, Zea Mays
MGRGRWASGIRAAALVLLAVAAAAGAAAGDPDPDELERAFPIVEPDHGHTKLRLSEQGLEAIRRIETPIAVVGVIGPYRSGKSFLLNQLLSLSCDKGFGVGHMRDTKTKGIWIWGTPVEMDVDGSKVSVIYLDTEGFESVGKSNVYDDRIFALATVLSSVLIYNLPETVPPPPTFSPLNGCRLVNFIVGHCRYVKLIYLGFHLPLKLLKNSMEGLRGKMLLLSQQSFSGLSRGISSKENLFNKWSMKPFNGCLMIMVTNILMRSIKYEIRWQLWGTTALLLACLSRIFKEQNYVIWRTKNLNPYM

SEQ ID NO: 159782 - protein, 539 aa, Zea Mays
MGRGRWASGIRAAALVLLAVAAAAGAAAGDPDPDELERAFPIVEPDHGHTKLRLSEQGLEAIRRIETPIAVVGVIGPYRSGKSFLLNQLLSLSCDKGFGVGHMRDTKTKGIWIWGTPVEMDVDGSKVSVIYLDTEGFESVGKSNVYDDRIFALATVLSSVLIYNLPETVREADISRLSFAIEIAEEFYGRFEGQDVAFEPAKLLWLIQRDFLQGKSVQQMVNEALQRVPNDNGDKYIDEVNQIRDSLAVMGNNSTAFSLPQPHLQRTKLCDMEDKELEPLYVKRREQLKQLVSSIVKPKIVQGRTLNGKDFVSFLQQILEALNKGEIPSTGSLVEIFNKAILDRCLKAYREKMDGLGLPVPVDKLQKLHEMANGDARILFDKQHFGKHHAAQSALKLEDDIKKVYRNLLLANEYQSSKLCEARFSECEDKMDHLQVLKLPSMAKFNAGFTHCNQSFVKECVGPAKESYERRMSKVCLLILNTVVMSVTKGLPVIMHLQPSFQRQTSLLLFLFLVAVILNFVSFHLSTTPHDEIQLLLYW

SEQ ID NO: 159783 - protein, 414 aa, Zea Mays
MGRGRWASGIRAAALVLLAVAAAAGAAAGDPDPDELERAFPIVEPDHGHTKLRLSEQGLEAIRRIETPIAVVGVIGPYRSGKSFLLNQLLSLSCDKGFGVGHMRDTKTKGIWIWGTPVEMDVDGSKVSVIYLDTEGFESVGKSNVYDDRIFALATVLSSVLIYNLPETVREADISRLSFAIEIAEEFYGRFEGQDVAFEPAKLLWLIQRDFLQGKSVQQMVNEALQRVPNDNGDKYIDEVNQIRDSLAVMGNNSTAFSLPQPHLQRTKLCDMEDKELEPLYVKRREQLKQLVSSIVKPKIVQGRTLNGKDFVSFLQQILEALNKGEIPSTGSLVEIFNKAILDRCLKAYREKMDGLGLPVPVDKLQKLHEMANGDARILFDKQHFGKHHAAQSALKLEDDIKKDVLCRCTETYF

SEQ ID NO: 159784 - protein, 378 aa, Zea Mays
MSGNKMDKFPIVEPDHGHTKLRLSEQGLEAIRRIETPIAVVGVIGPYRSGKSFLLNQLLSLSCDKGFGVGHMRDTKTKGIWIWGTPVEMDVDGSKVSVIYLDTEGFESVGKSNVYDDRIFALATVLSSVLIYNLPETVREADISRLSFAIEIAEEFYGRFVHGQDVAFEPAKLLWLIQRDFLQGKSVQQMVNEALQRVPNDNGDKYIDEVNQIRDSLAVMGNNSTAFSLPQPHLQRTKLCDMEDKELEPLYVKRREQLKQLVSSIVKPKIVQGRTLNGKDFVSFLQQILEALNKGEIPSTGSLVEIFNKAILDRCLKAYREKMDGLGLPVPVDKLQKLHEMANGDARILFDKQHFGKHHAAQSALKLEDDIKKKLTSS

SEQ ID NO: 159785 - protein, 393 aa, Zea Mays
MVNEALQRVPNDNGDKYIDEVNQIRDSLAVMGNNSTAFSLPQPHLQRTKLCDMEDKELEPLYVKRREQLKQLVSSIVKPKIVQGRTLNGKDFVSFLQQILEALNKGEIPSTGSLVEIFNKAILDRCLKAYREKMDGLGLPVPVDKLQKLHEMANGDARILFDKQHFGKHHAAQSALKLEDDIKKVYRNLLLANEYQSSKLCEARFSECEDKMDHLQVLKLPSMAKFNAGFTHCNQSFVKECVGPAKESYERRMSKMLAKSRALFIKEYNNKLFNWLVTFSLVMVVIGRFVIKFFLLEIAAWVMFIFLETYTRMFWSAESLYYNPAWHIIVSSWETIVYSPILDLDRWAVPIVIMLLFGVLYWRCFGGRRKRGRGSLLPLYKNSYNSSRRSRSD

SEQ ID NO: 159786 - protein, 330 aa, Zea Mays
MDPKGRNPNWDRWGPKEVPQGSQSWNKNRNLSWRLKPNLGKSDIKEDIVTFLAMGPIRYSQNPSPALKKEIDNVRRPFCQKCGVEGHHARDCFKSLWCDICRKETHVNARCVLPKQNKPCMPIVGMAADGLRFYSSHFAKSLSRKPKRSFIGLGKVVEGLISAEDLEKDFGFHFPWGKTWKATKCHAGFLMQFPSQEKLDEMINFPGLKMKMSGAKISVSYWSSQAKPKSKLHFVWIVAENVPEELQNYQAICELGSTIGSVEEVDILSLDTKDIVRFKVHVKSVAMIPPIIEVGVKPFLYDIYFKIDDITNEGWNDESINLGDSRLEGG

SEQ ID NO: 159787 - protein, 64 aa, Zea Mays
MVMVSAIICQNCEKILNMSDSSQRMKNMSRFSLEGIAQILFKRGINGVNISRRISWLLQQTKKI

SEQ ID NO: 159788 - protein, 313 aa, Zea Mays
MNHDCASVTNPTNINPCLQGLGWIFCRKCISEEFVNKEVCCCPVCSIDLGCAPLEKLRIDHSLQYVRSKVFPSKKRKVEDPEVTSPITSPIKTKHSTLRGSSNITKKSGGWRPLGCHFRAAKKKRSLRPKSDDIKTAGKRTDDPVDVTLASQAKTRKQITRRGNLEKRTGTKKVLILKGKQKNTKTKNTPNKRRLPALWFYLLAAFDQKGHPPLPQIPSKFLRIKDVNLPASFIQKYLAQKLNLSSETEVEIFCGGRPVSPGITLHDLADHWIGKRSKGRVRSSVGTPAAEFVLKVFYARSGAPLPKTESNQD

SEQ ID NO: 159789 - protein, 306 aa, Zea Mays
MWMERTGQVQRGGVDGSDPRRGRVDQSARCVGLCSSSCRRHYLSTASSTPAYSPSTAELSSSLSLSFSRSLCFLVEVQVPALMATEVAETPAPLAEAVPETPAEAPAAPAAEAKPTKAKKASAPKKRANPTHPPYAEMISEAVTSLKERTGSSQYAIAKFVEDKHKDKLPPNFRKLLLGQLKKLVAGGKLTKVKNSYKLPARAPAAAKPKPKSKTAVKKPKAGAKKPKAATKPKPKPKAKSPAKTSAKDTPGKKAAPAKKPAAAAKKAPAKKAAPAKKAATPSRKAPATMTNQCVLLLLEDNVVFL

SEQ ID NO: 159790 - protein, 269 aa, Zea Mays
MATEVAETPAPLAEAVPETPAEAPAAPAAEAKPTKAKKASAPKKRANPTHPPYAEMISEAVTSLKERTGSSQYAIAKFVEDKHKDKLPPNFRKLLLGQLKKLVAGGKLTKVKNSYKLPARAPAAAKPKPKSKTAVKKPKAGAKKPKAATKPKPKPKAKSPAKAKPAAKPKAAAKPKAKPAAKAKPKAAAAKPKPAAKKAGRPAKAAKTSAKDTPGKKAAPAKKPAAAAKKAPAKKAAPAKKAATPSRKAPATMTNQCVLLLLEDNVVFL

SEQ ID NO: 159791 - protein, 93 aa, Zea Mays
MTKKCTPLAPRKTLQPEQAFHPLEEDSCSVTSSTTTSSRAGRTKTTVPVAPSFVCANRADKRKEFYTKLEEKHKALEAEKDEAEARKKSKTLL

SEQ ID NO: 159792 - protein, 200 aa, Zea Mays
MTKKCTPLAPRKTLQPEQAFHPLEEDSCSVTSSTTTSSRAGRTKTTVPVAPSFVCANRADKRKEFYTKLEEKHKALEAEKDEAEARKKEEQDVAIKQLRKSLVIRAKPMPSFYQEGPPPKAELKKVPPTRAKSPKFTSSRRKSCNDTPQTPEGKNTNATSTTRPHRHSIGASKDASRVQCSPKSGVATKTRSVKPELKAL

SEQ ID NO: 159793 - protein, 187 aa, Zea Mays
MAGTGGEGAVGKVTCAAWIRRRDDYGGPPGVSRLLVAFGRRSTASSPPLVDLLEFDAKASALASESEPLARVTVGEDAADTPRAIAVHPGGRELVCATAKGCRLFNLVYKDFGVHLISRDASPLQSVGPQKCLAFSTDGAKFAVGGEDGHLRIFHWPSLITILDEPKAHKSFRDMDIRLKVFSFIIH

SEQ ID NO: 159794 - protein, 148 aa, Zea Mays
MAGTGGEGAVGKVTCAAWIRRRDDYGGPPGVSRLLVAFGRRSTASSPPLVDLLEFDAKASALASESEPLARVTVGEDAADTPRAIAVHPGGRELVCATAKGCRLFNLVYKDFGVHLISRDASPLQSVGPQKCLAFSTDGAKFAVGGEV

SEQ ID NO: 159795 - protein, 292 aa, Zea Mays
MPACLNFTRSLKLFSPMLNYTFFRLFNLVYKDFGVHLISRDASPLQSVGPQKCLAFSTDGAKFAVGGEDGHLRIFHWPSLITILDEPKAHKSFRDMDISLDSKFLVSSSTDGSARIWNIDEGSPLTNLTRASDEKIEYCRFSRDGAKPFLFCTLVKGHDVLTMAVDISNWKRIGYKRFSAKPISTLAISLDGKYLALGNRDGDFCAVEVKKMEVAHWSKKVHLGFPVSSIEFCPSERVVISTSHQWGAEITKLDVPPEWKVWQIWLALLSLFVSSAVLFYAFFTHARLNLRP

SEQ ID NO: 159796 - protein, 130 aa, Zea Mays
MAVDISNWKRIGYKRFSAKPISTLAISLDGKYLALGNRDGDFCAVEVKKMEVAHWSKKVHLGFPVSSIEFCPSERVVISTSHQWGAEITKLDVPPEWKVWQIWLALLSLFVSSAVLFYAFFTHARLNLRP

SEQ ID NO: 159797 - protein, 570 aa, Zea Mays
MAKKAQKKAEKVAKKLKANSVSGYSNDSNPFGDPNLTEKFVWRKKIEHDVSQGQKVDFSVKSEKKKQLERMAEIEKVKKRREERAIEKAQHEEEMALIARERARAEFQDWEKKEEEFHFDQSKVRSEIRLREGRTKPIDVLLKNLSFSDEFDIELNEPYLVFKGLTVKEMEELCDDIKMHLDLDRESQTNVKYWEALMVVCEWELGEARKRDALDRARVRGEEPPPEVLAEERGLHASIEGDVKSLLDGKTSTELEDMQSQIESQMRSGTAKVVEYWEAILKRLHIYKAKACLREIHASILRKHLHRLEHPGAAEQDVDSEKEVDNKLEDEMHEDEDDKRYSPEPMPQQTDNEFEEADGSFSPQLMHGNEDEDAIDPEEDKAELDRKREAVVLEHQRKVQEAMKTKARVPDEMEMKAIKTMGAMEEGDAVFGAGAEVNLDSQVYWWHDKYRPRKPKYFNRVHTGYEWNKYNQTHYDHDNPPPKIVQGYKFNIFYPDLVDKSKAPTYSIEKDGSAGETCFIRFHAGPPYEDIAFRIVNKEWEYSHKKGFKCTFERGILHLYFNFKRYRYRR

SEQ ID NO: 159798 - protein, 559 aa, Zea Mays
MAKKLKANSVSGYSNDSNPFGDPNLTEKFVWRKKIEHDVSQGQKVDFSVKSEKKKQLERMAEIEKVKKRREERAIEKAQHEEEMALIARERARAEFQDWEKKEEEFHFDQSKVRSEIRLREGRTKPIDVLLKNLSFSDEFDIELNEPYLVFKGLTVKEMEELCDDIKMHLDLDRESQTNVKYWEALMVVCEWELGEARKRDALDRARVRGEEPPPEVLAEERGLHASIEGDVKSLLDGKTSTELEDMQSQIESQMRSGTAKVVEYWEAILKRLHIYKAKACLREIHASILRKHLHRLEHPGAAEQDVDSEKEVDNKLEDEMHEDEDDKRYSPEPMPQQTDNEFEEADGSFSPQLMHGNEDEDAIDPEEDKAELDRKREAVVLEHQRKVQEAMKTKARVPDEMEMKAIKTMGAMEEGDAVFGAGAEVNLDSQVYWWHDKYRPRKPKYFNRVHTGYEWNKYNQTHYDHDNPPPKIVQGYKFNIFYPDLVDKSKAPTYSIEKDGSAGETCFIRFHAGPPYEDIAFRIVNKEWEYSHKKGFKCTFERGILHLYFNFKRYRYRR

SEQ ID NO: 159799 - protein, 560 aa, Zea Mays
MYKETVLPRILEQVVNCKDDLAQFYLMDCIIQVFPDEYHLQTLETLLNAFPQLQPSVDIKTVLSQLMDRLSNYAASSPEVLPEFLQVEAFAKFSNAIGKVIEAQPDMPVVGAVTLYVSLLTFTLRVHPDRLDYVDQVLGACVKKLSGKAKLEDSRATKQIVALLSAPLEKYSNIVTALELSNYPRVMDYLDNATTKVMAVVIIQSIMKNTTCISTSDKIEALFDLIKGLIKDMDGAQDDELDEEDFKEEQNSVARLIHMLHNDEPEEMLKILCTVQKHILQGGPKRLTFTVPSLVFSALKLVRRLQSQDGDVTGEDVPATPKKIFQILHQTIDALSCVPSPELALRLYLHCAEAANDCDLEPVAYEFFTQAFILYEEEIADSKAQITAIHLIIGTLQRMNIFGVENRDTLTHKTTGYSAKLLKKPDQCRAVYACSHLFWADDQDGIMDGERVLLCLKRALRIANAAQQMASATRGSSGSVTLFIEILNKYLYFFEKGIPQITNTVIQDLIELIRTEKQSDNSVADPSTEAFFSSTLRYIEFQKQKGGSIGEKYEQIKTSS

SEQ ID NO: 159800 - protein, 505 aa, Zea Mays
MRAFDEMKKLEMFFREETRRGSCSVVDMYELVQHAGNVLPRLYLLCTVGSVYIKSKEAPAKDVLKDLVEMCRGIQHPLRGLFLRSYLSQISRDKLPDIGSEYEGDAETINDAVEFVLQNFIEMNKLWVRMQHLGPAREKEKRGKERNELRDLVGKNLHVLSQIEGVDLDMYKETVLPRILEQVVNCKDDLAQFYLMDCIIQVFPDEYHLQTLETLLNAFPQLQVIEAQPDMPVVGAVTLYVSLLTFTLRVHPDRLDYVDQVLGACVKKLSGKAKLEDSRATKQIVALLSAPLEKYSNIVTALELSNYPRVMDYLDNATTKVMAVVIIQSIMKNTTCISTSDKIEALFDLIKGLIKDMDGAQDDELDEEDFKEEQNSVARLIHMLHNDEPEEMLKILCTVQKHILQGGPKRLTFTVPSLVFSALKLVRRLQSQDGDVTGEDVPATPKKIFQILHQTIDALSCVPSPELALRLYLHCAELLMSSLLKRSYYMKKKLRIQRLKSLQFT

SEQ ID NO: 159801 - protein, 342 aa, Zea Mays
MASASTAVRMLPDGGADDEERWLAEGIAGVQQNAFYMHRALDSNNLKDALKYSAQMLSELRTSRLSPHKYYELYMRAFDEMKKLEMFFREETRRGSCSVVDMYELVQHAGNVLPRLYLLCTVGSVYIKSKEAPAKDVLKDLVEMCRGIQHPLRGLFLRSYLSQISRDKLPDIGSEYEGDAETINDAVEFVLQNFIEMNKLWVRMQHLGPAREKEKRGKERNELRDLVGKNLHVLSQIEGVDLDMYKETVLPRILEQVVNCKDDLAQFYLMDCIIQVFPDEYHLQTLETLLNAFPQLQQVLISKQYSLNLWTDCLTMLPQVLKCYQSSCKLKLLLSSVMLLER

SEQ ID NO: 159802 - protein, 311 aa, Zea Mays
MELFARAKVVRLKSHHDKFLYADEDEAHVTQERDGSSANARWAVEPAPHNPGAIRLRSRYGHYLTASGEPFLLGMTGRKVTQTAPAAPRPANASVDWEPVRDGFQARLRTRAGHFLRANGGLPPWRNSVTHDVPHRTATQDWVLWDVEVVQLLTPAPPDRAGSAPLAKLPDSPPAPELANPPQPHHRPSKSYAAPPPPPTLEPEAPPPRLSKLESSDSFSAPLHKVEGRAIHYHIADDLGNVQDGTVGHSFTFNGSNLEELAHKLQEETGLDNIIICTRSPINGKLTPLRLQLPPNNAAMHIVLVQESSKV

SEQ ID NO: 159803 - protein, 74 aa, Zea Mays
MSPDAPEAEIFKEYAKKHESNNGTTIPAAATGAAAATGKSTSAAPTADGAGRQPGTVFFYVVSALLVSVAVLLC

SEQ ID NO: 159804 - protein, 116 aa, Zea Mays
MAIGTCALCYNNVHVFRGVVKMRRGLTARIIDETNSMSDVYTAFYEFSSLIESKIDDNDPNAALTRRHVNSIKQTCKSSGLVKRRGYHLDTSPYRPMLIMIVLLLVAILFGALYTK

SEQ ID NO: 159805 - protein, 80 aa, Zea Mays
MSDVYTAFYEFSSLIESKIDDNDPNAALTRRHVNSIKQTCKSSGLVKRRGYHLDTSPYRPMLIMIVLLLVAILFGALYTK

SEQ ID NO: 159806 - protein, 68 aa, Zea Mays
MESELPIDDNDPNAALTRRHVNSIKQTCKSSGLVKRRGYHLDTSPYRPMLIMIVLLLVAILFGALYTK

SEQ ID NO: 159807 - protein, 160 aa, Zea Mays
MSSPHGGLDDQIERLMQCKPLAEPEVRALCEKAKEILMEESNVQPVKSPVTICGDIHGQFHDLAELFRIGGKCPDTNYLFMGDYVDRGYYSVETVTLLVSLKVRYPQRITILRGNHESRQITQVYGFYDECLRKYGNANVWKTFTDLFDYFPLTALFVCS

SEQ ID NO: 159808 - protein, 205 aa, Zea Mays
MNILTIMKGWLILSICQHGLVVIISQQYRNVKLEDFVDDSYSVEKFRKAYEGRVEQLRDKFFWPRVDFANKVSAPFGKRGVGRQWKNRIKGCLEGGSGRKHKGNETEKDRKVIRRKYKCPNCGELGHRKNSPKCPQNGTKKKPRKPRKNTTKGWIPPALREDVGSSQTPLALSHALEDAGSSQPSARVAESPPRQTRIVVRKMTP

SEQ ID NO: 159809 - protein, 92 aa, Zea Mays
MLLVARGRTTGAWCTGHHSVLLAIICTAGRMTIPELLVQETGVSDPPIMHVSFFLSFSWNVCVERYQSNQLPAPLSLSLSPMTADRPLAGVV

SEQ ID NO: 159810 - protein, 286 aa, Zea Mays
MDAARWVVCLLVTVICLSCAAANPMSVSPTMLNEGGHQHAIAYVQGDKYYGAKATINVWAPKIEQPNEFSLSQLWILGGSFGEDLNSIEAGWQVSPDLYGDNNTRLFTYWTSDAYQATGCYNMLCSGFIQINNQIAMGASIFPTSSYSGSQYDISILIWKDPKEGNWWMQFGKDYVLGYWPSFLFSYLADSASMVEWGGEVVNSQADGVHTSTQMGSGHFPEEGFGRASYFKGVQVVDSSNNLGAPRGGLGTFTEQSSCYDVQSGSNADWGTYFYYGGPGRSSSCQ

SEQ ID NO: 159811 - protein, 165 aa, Zea Mays
MIDCVHISHQPAFDHPYLKNHTIQMRPNYHPEGLYEESKASSSGGERPMAQLWHQNGRCPEGTVPIRRTRKDDLLRASSMRRYGRKRRAAANPMSVSPTMLNEGGHQHAIAYVQGDKYYGAKATINVWAPKIEQPNEFSLSQLWILGGSFGEDLNSIEAGWQVQS

SEQ ID NO: 159812 - protein, 84 aa, Zea Mays
MGKLNGNLVERHELNHPIHSKQEGKGELTCASRAAHGASLSSAEAPGRQPSRRRRIRQLGFPPPPREYLGFTHTLSWLLNKMPI

SEQ ID NO: 159813 - protein, 169 aa, Zea Mays
MPGADVGADEQQEPAAARAEEMPEPAPAPAAPPPLTIFYGGTVVVFEDFPAEKTAEVMRLAAGDDLPIARKASLPWFLAKRKDRLVERAPYARPSSPAKEPEKKTFTFCLRIHMTGMAYDPLRTHLERRAAEQLDIFKEMVSLRVFERYMISVMVSRCLQILFGYSLDE

SEQ ID NO: 159814 - protein, 228 aa, Zea Mays
MAMAMGHRQSGSCAKVRPGGIGIGIGMGMVSKQHQRTPPPSSYCLHLHHILYLRPVASSHHLTRHSVDVTKDDKPLEPLPPAAAETESTQQQEDEDGGPKLDPRRFEEKFAVLNTGVHECQSCGYRYDQAAGDPSYPVPPGLPFAQLPDDWRCPTCGAAQSFFESKSVEIAGFAQNQQFGLGGNSLTSGQKGLLIYEYFVRACTPPHSQGTTFIINRVETLGFRFFLI

SEQ ID NO: 159815 - protein, 218 aa, Zea Mays
MAMAMGHRQSGSCAKVRPGGIGIGIGMGMVSKQHQRTPPPSSYCLHLHHILYLRPVASSHHLTRHSVDVTKDDKPLEPLPPAAAETESTQQQEDEDGGPKLDPRRFEEKFAVLNTGVHECQSCGYRYDQAAGDPSYPVPPGLPFAQLPDDWRCPTCGAAQSFFESKSVEIAGFAQNQQFGLGGNSLTSGQKGLLIYEYFVRACTPPHSQGTTFIINRL

SEQ ID NO: 159816 - protein, 203 aa, Zea Mays
MAMAMGHRQSGSCAKVRPGGIGIGIGMGMVSKQHQRTPPPSSYCLHLHHILYLRPVASSHHLTRHSVDVTKDDKPLEPLPPAAAETESTQQQEDEDGGPKLDPRRFEEKFAVLNTGVHECQSCGYRYDQAAGDPSYPVPPGLPFAQLPDDWRCPTCGAAQSFFESKSVEIAGFAQNQQFGLGGNSLTSGQKGLLIYEYFVRAC

SEQ ID NO: 159817 - protein, 287 aa, Zea Mays
MTTRPRWRCVDAQTPGISKSALPIGRPHIPLSASPPAVSPTTRSGRLLAACSRRPPLHHPVLSPLAIRSLDPSFPSKKRSAHGHGHASLRRHAPPAGRRLGAGGEAAAAELAARAAVVVLPRAGPAPRVHRGGGGGAQGVRGPAAGPQHAVPDLRRQHGRAAPQGAGVRDAHRRRRHHAGGPQPLEAGAQGAVPGARHQVALQVQDHLPVLPRLPQRRGAVPPPQGRRLPGEGQPRQGGRRPELPQHRQERQPHRRQVHRQGHLRLITLHVRRTPQPGSKLKNFFFY

SEQ ID NO: 159818 - protein, 377 aa, Zea Mays
MSRQMRCNRIVYASDRHQKLRFLLTHPWWWHTRRHAHQRQLRDGAAEAEQDPHRGAPLAAGVDGAGARGVRLGRSPARGHVLRGAARRARAAPRQPRVGVAERDGAAGGAVRAHVRGDADVRAGRGPARGGGAVALGARRRRRAHALQRRVRRHLGLGLPRLLPRRAGHVRQPRRAGGPRVRPAAGRRRHQGAARAVPDQRQPDQERRLRDRSPGAQELDGRRAAAPQAEGRDVAAARLDHRVAQGGAVHRRGSLLCPRGAVCGGAGGRAGERHRAGHPHRSQPRLQPVVRRRRRPERLPRLHAGGGVRGQRHAEGAVRFRRERRVQDGGVQVRGRRRPHPPHLLQLLLPHQGHRRRLALRPRAGPGQGCACQGVVK

SEQ ID NO: 159819 - protein, 110 aa, Zea Mays
MDQAVSLAARSRRFESSFYPCKVNLNTRRGKALRPHTHQPSPSIPWQQIRAHRLGVQCLTDPDCRRAVTALVPTITGMGDHVSGRVRGYVCGQVHSGTRLTDLPYFSVCV

SEQ ID NO: 159820 - protein, 1210 aa, Zea Mays
MAVLPTPRRINNLALASTVLPKRVPLHLLQKITNDFSKDRELGSGAYGKVYKGVHKNGETMAVKLLHSMAGLDDKLFEEEFHNIARLQHKNIVRLVGFCHETQRQFIPHDGKMIFADSKYMALCFEYMHNGSLDKFIIDENSVHDWSTRYAIIKGICEGLKYLHEELNPPIYHLDLKPANILLDDNMMPKLADFGLSKIFEQERTRITQSCVGTHGYLPPEYIDRKVISNKLDIFSLGVIIIKIISGPTGYTQCAEMPSKQFVELVHEKWRNKLQTTMDAAALETYCEQVVRCIEMALSCVETDRHKRPSIGAIIDELNKMETNTDQVFSVDICSTPAQTQPPPLPDSSHSTEETSNTKGVSRLGPREYVQSTMRDLVIGITKSVVEGVISKAQSVMEEENMLLISMQHDLHFITDEFQMIYSFLSITDEERINNAVVRIWVMQTRGLAYDLEDYMDAFSCLDKTRKWWSRLFRACLAPPGSPYMSVTSLAVELKHLKARVEDVSHRNTRYNLISDAGSKPGLVRQQPVPPGAVAYENDTRRKHILGDLTQLITNKDDADLQLISMWGAGGGTGTTSIIRKCYSDPEIIQNFICRAWVNLSHPFNPHEFVRSLMAHFYANSCQERQGGIIGVDVLTSMDATATQGDLLSEFVQLVDKNRYLVVLEDLPTMAEWDSIRTFLPDRKNGSWIIVSSQKYEIASLCVGHPYQILDLKQSSPTEHSVCAFLREEVTLKEKKGGNRKEKIYVGDESEVNNGSTSTNSKVISTEYDLSHNHRMVANSKWKEARDWMQNSSLVGRRLQMYQIHRCIAEAQRNHSHVMSVWGIVGVGKSAIVRNFYCDRILENQQFQEYGWVDLSHSQPFNLKDFSQNLLTNFQSDSLQANETTPSRGILGTVRKCCEFLSTRHCLVVIDGLQSKEEWDLIQSSLVSRYSKSNTIIIVITTEASIAAYCADKDDLVFNVKTLETDAAFDLFENEISKKAPLWTTSLCDRGNSVTQELVSKCGGLPMVIVAIAGILATKVVSWMDTATSINLRFMFELEINPDLQDLFSWVHSCFRTCPDFIKPCIFYLSFFPRDHNIRRRRLVRRWIAEGYCRDSDDKSAEENGEFFFSKLLGMSIIQPESSDARMVSCQINGFFRECILSRSGEMEDLVIELADRCNLTTQRSGRHLVISESWDRDKILFESIDFSRLRSMTVFGMWKSFFISKSMKL

SEQ ID NO: 159821 - protein, 1059 aa, Zea Mays
MAVLPTPRRINNLALASTVLPKRVPLHLLQKITNDFSKDRELGSGAYGKVYKGVHKNGETMAVKLLHSMAGLDDKLFEEEFHNIARLQHKNIVRLVGFCHETQRQFIPHDGKMIFADSKYMALCFEYMHNGSLDKFIIDENSVHDWSTRYAIIKGICEGLKYLHEELNPPIYHLDLKPANILLDDNMMPKLADFGLSKIFEQERTRITQSCVGTHGYLPPEYIDRKVISNKLDIFSLGVIIIKIISGPTGYTQCAEMPSKQFVELVHEKWRNKLQTTMDAAALETYCEQVVRCIEMALSCVETDRHKRPSIGAIIDELNKMETNTDQVFSVDICSTPAQTQPPPLPDSSHSTEETSNTKGVSRLGPREYVQSTMRDLVIGITKSVVEGVISKAQSVMEEENMLLISMQHDLHFITDEFQMIYSFLSITDEERINNAVVRIWVMQTRGLAYDLEDYMDAFSCLDKTRKWWSRLFRACLAPPGSPYMSVTSLAVELKHLKARVEDVSHRNTRYNLISDAGSKPGLVRQQPVPPGAVAYENDTRRKHILGDLTQLITNKDDADLQLISMWGAGGGTGTTSIIRKCYSDPEIIQNFICRAWVNLSHPFNPHEFVRSLMAHFYANSCQERQGGIIGVDVLTSMDATATQGDLLSEFVQLVDKNRYLVVLEDLPTMAEWDSIRTFLPDRKNGSWIIVSSQKYEIASLCVGHPYQILDLKQSSPTEHSVCAFLREEVTLKEKKGGNRKEKIYVGDESEVNNGSTSTNSKVISTEYDLSHNHRMVANSKWKEARDWMQNSSLVGRRLQMYQIHRCIAEAQRNHSHVMSVWGIVGVGKSAIVRNFYCDRILENQQFQEYGWVDLSHSQPFNLKDFSQNLLTNFQSDSLQANETTPSRGILGTVRKCCEFLSTRHCLVVIDGLQSKEEWDLIQSSLVSRYSKSNTIIIVITTEASIAAYCADKDDLVFNVKTLETDAAFDLFENEISKKAPLWTTSLCDRGNSVTQELVSKCGGLPMVIVAIAGILATKTCRICLAGCIPASVLVQISSSHVSSTYHFFQETTTFDEGV

SEQ ID NO: 159822 - protein, 1024 aa, Zea Mays
MMPKLADFGLSKIFEQERTRITQSCVGTHGYLPPEYIDRKVISNKLDIFSLGVIIIKIISGPTGYTQCAEMPSKQFVELVHEKWRNKLQTTMDAAALETYCEQVVRCIEMALSCVETDRHKRPSIGAIIDELNKMETNTDQVFSVDICSTPAQTQPPPLPDSSHSTEETSNTKGVSRLGPREYVQSTMRDLVIGITKSVVEGVISKAQSVMEEENMLLISMQHDLHFITDEFQMIYSFLSITDEERINNAVVRIWVMQTRGLAYDLEDYMDAFSCLDKTRKWWSRLFRACLAPPGSPYMSVTSLAVELKHLKARVEDVSHRNTRYNLISDAGSKPGLVRQQPVPPGAVAYENDTRRKHILGDLTQLITNKDDADLQLISMWGAGGGTGTTSIIRKCYSDPEIIQNFICRAWVNLSHPFNPHEFVRSLMAHFYANSCQERQGGIIGVDVLTSMDATATQGDLLSEFVQLVDKNRYLVVLEDLPTMAEWDSIRTFLPDRKNGSWIIVSSQKYEIASLCVGHPYQILDLKQSSPTEHSVCAFLREEVTLKEKKGGNRKEKIYVGDESEVNNGSTSTNSKVISTEYDLSHNHRMVANSKWKEARDWMQNSSLVGRRLQMYQIHRCIAEAQRNHSHVMSVWGIVGVGKSAIVRNFYCDRILENQQFQEYGWVDLSHSQPFNLKDFSQNLLTNFQSDSLQANETTPSRGILGTVRKCCEFLSTRHCLVVIDGLQSKEEWDLIQSSLVSRYSKSNTIIIVITTEASIAAYCADKDDLVFNVKTLETDAAFDLFENEISKKAPLWTTSLCDRGNSVTQELVSKCGGLPMVIVAIAGILATKVVSWMDTATSINLRFMFELEINPDLQDLFSWVHSCFRTCPDFIKPCIFYLSFFPRDHNIRRRRLVRRWIAEGYCRDSDDKSAEENGEFFFSKLLGMSIIQPESSDARMVSCQINGFFRECILSRSGEMEDLVIELADRCNLTTQRSGRHLVISESWDRDKILFESIDFSRLRSMTVFGMWKSFFISKSMKL

SEQ ID NO: 159823 - protein, 809 aa, Zea Mays
MAVLPTPRRINNLALASTVLPKRVPLHLLQKITNDFSKDRELGSGAYGKVYKGVHKNGETMAVKLLHSMAGLDDKLFEEEFHNIARLQHKNIVRLVGFCHETQRQFIPHDGKMIFADSKYMALCFEYMHNGSLDKFIIDENSVHDWSTRYAIIKGICEGLKYLHEELNPPIYHLDLKPANILLDDNMMPKLADFGLSKIFEQERTRITQSCVGTHGYLPPEYIDRKVISNKLDIFSLGVIIIKIISGPTGYTQCAEMPSKQFVELVHEKWRNKLQTTMDAAALETYCEQVVRCIEMALSCVETDRHKRPSIGAIIDELNKMETNTDQEVTLKEKKGGNRKEKIYVGDESEVNNGSTSTNSKVISTEYDLSHNHRMVANSKWKEARDWMQNSSLVGRRLQMYQIHRCIAEAQRNHSHVMSVWGIVGVGKSAIVRNFYCDRILENQQFQEYGWVDLSHSQPFNLKDFSQNLLTNFQSDSLQANETTPSRGILGTVRKCCEFLSTRHCLVVIDGLQSKEEWDLIQSSLVSRYSKSNTIIIVITTEASIAAYCADKDDLVFNVKTLETDAAFDLFENEISKKAPLWTTSLCDRGNSVTQELVSKCGGLPMVIVAIAGILATKVVSWMDTATSINLRFMFELEINPDLQDLFSWVHSCFRTCPDFIKPCIFYLSFFPRDHNIRRRRLVRRWIAEGYCRDSDDKSAEENGEFFFSKLLGMSIIQPESSDARMVSCQINGFFRECILSRSGEMEDLVIELADRCNLTTQRSGRHLVISESWDRDKILFESIDFSRLRSMTVFGMWKSFFISKSMKL

SEQ ID NO: 159824 - protein, 595 aa, Zea Mays
MAVLPTRQDPLLNIPAAPSPLPAGRLEHEHDGPTPFLFPARRINNLALASTVLPKRVPLHLLQKITNDFSKDRELGSGAYGKVYKGVHKNGETMAVKLLHSMAGLDDKLFEEEFHNIARLQHKNIVRLVGFCHETQRQFIPHDGKMIFADSKYMALCFEYMHNGSLDKFIIDENSVHDWSTRYAIIKGICEGLKYLHEELNPPIYHLDLKPANILLDDNMMPKLADFGLSKIFEQERTRITQSCVGTHGYLPPEYIDRKVISNKLDIFSLGVIIIKIISGPTGYTQCAEMPSKQFVELVHEKWRNKLQTTMDAAALETYCEQVVRCIEMALSCVETDRHKRPSIGAIIDELNKMETNTDQISKKAPLWTTSLCDRGNSVTQELVSKCGGLPMVIVAIAGILATKVVSWMDTATSINLRFMFELEINPDLQDLFSWVHSCFRTCPDFIKPCIFYLSFFPRDHNIRRRRLVRRWIAEGYCRDSDDKSAEENGEFFFSKLLGMSIIQPESSDARMVSCQINGFFRECILSRSGEMEDLVIELADRCNLTTQRSGRHLVISESWDRDKILFESIDFSRLRSMTVFGMWKSFFISKSMKL

SEQ ID NO: 159825 - protein, 932 aa, Zea Mays
MDAAALETYCEQVVRCIEMALSCVETDRHKRPSIGAIIDELNKMETNTDQVFSVDICSTPAQTQPPPLPDSSHSTEETSNTKGVSRLGPREYVQSTMRDLVIGITKSVVEGVISKAQSVMEEENMLLISMQHDLHFITDEFQMIYSFLSITDEERINNAVVRIWVMQTRGLAYDLEDYMDAFSCLDKTRKWWSRLFRACLAPPGSPYMSVTSLAVELKHLKARVEDVSHRNTRYNLISDAGSKPGLVRQQPVPPGAVAYENDTRRKHILGDLTQLITNKDDADLQLISMWGAGGGTGTTSIIRKCYSDPEIIQNFICRAWVNLSHPFNPHEFVRSLMAHFYANSCQERQGGIIGVDVLTSMDATATQGDLLSEFVQLVDKNRYLVVLEDLPTMAEWDSIRTFLPDRKNGSWIIVSSQKYEIASLCVGHPYQILDLKQSSPTEHSVCAFLREVTLKEKKGGNRKEKIYVGDESEVNNGSTSTNSKVISTEYDLSHNHRMVANSKWKEARDWMQNSSLVGRRLQMYQIHRCIAEAQRNHSHVMSVWGIVGVGKSAIVRNFYCDRILENQQFQEYGWVDLSHSQPFNLKDFSQNLLTNFQSDSLQANETTPSRGILGTVRKCCEFLSTRHCLVVIDGLQSKEEWDLIQSSLVSRYSKSNTIIIVITTEASIAAYCADKDDLVFNVKTLETDAAFDLFENEISKKAPLWTTSLCDRGNSVTQELVSKCGGLPMVIVAIAGILATKVVSWMDTATSINLRFMFELEINPDLQDLFSWVHSCFRTCPDFIKPCIFYLSFFPRDHNIRRRRLVRRWIAEGYCRDSDDKSAEENGEFFFSKLLGMSIIQPESSDARMVSCQINGFFRECILSRSGEMEDLVIELADRCNLTTQRSGRHLVISESWDRDKILFESIDFSRLRSMTVFGMWKSFFISKSMKL

SEQ ID NO: 159826 - protein, 1150 aa, Zea Mays
MAVKLLHSMAGLDDKLFEEEFHNIARLQHKNIVRLVGFCHETQRQFIPHDGKMIFADSKYMALCFEYMHNGSLDKFIIDENSVHDWSTRYAIIKGICEGLKYLHEELNPPIYHLDLKPANILLDDNMMPKLADFGLSKIFEQERTRITQSCVGTHGYLPPEYIDRKVISNKLDIFSLGVIIIKIISGPTGYTQCAEMPSKQFVELVHEKWRNKLQTTMDAAALETYCEQVVRCIEMALSCVETDRHKRPSIGAIIDELNKMETNTDQVFSVDICSTPAQTQPPPLPDSSHSTEETSNTKGVSRLGPREYVQSTMRDLVIGITKSVVEGVISKAQSVMEEENMLLISMQHDLHFITDEFQMIYSFLSITDEERINNAVVRIWVMQTRGLAYDLEDYMDAFSCLDKTRKWWSRLFRACLAPPGSPYMSVTSLAVELKHLKARVEDVSHRNTRYNLISDAGSKPGLVRQQPVPPGAVAYENDTRRKHILGDLTQLITNKDDADLQLISMWGAGGGTGTTSIIRKCYSDPEIIQNFICRAWVNLSHPFNPHEFVRSLMAHFYANSCQERQGGIIGVDVLTSMDATATQGDLLSEFVQLVDKNRYLVVLEDLPTMAEWDSIRTFLPDRKNGSWIIVSSQKYEIASLCVGHPYQILDLKQSSPTEHSVCAFLREEVTLKEKKGGNRKEKIYVGDESEVNNGSTSTNSKVISTEYDLSHNHRMVANSKWKEARDWMQNSSLVGRRLQMYQIHRCIAEAQRNHSHVMSVWGIVGVGKSAIVRNFYCDRILENQQFQEYGWVDLSHSQPFNLKDFSQNLLTNFQSDSLQANETTPSRGILGTVRKCCEFLSTRHCLVVIDGLQSKEEWDLIQSSLVSRYSKSNTIIIVITTEASIAAYCADKDDLVFNVKTLETDAAFDLFENEISKKAPLWTTSLCDRGNSVTQELVSKCGGLPMVIVAIAGILATKVVSWMDTATSINLRFMFELEINPDLQDLFSWVHSCFRTCPDFIKPCIFYLSFFPRDHNIRRRRLVRRWIAEGYCRDSDDKSAEENGEFFFSKLLGMSIIQPESSDARMVSCQINGFFRECILSRSGEMEDLVIELADRCNLTTQRSGRHLVISESWDRDKILFESIDFSRLRSMTVFGMWKSFFISKSMKL

SEQ ID NO: 159827 - protein, 837 aa, Zea Mays
MRDLVIGITKSVVEGVISKAQSVMEEENMLLISMQHDLHFITDEFQMIYSFLSITDEERINNAVVRIWVMQTRGLAYDLEDYMDAFSCLDKTRKWWSRLFRACLAPPGSPYMSVTSLAVELKHLKARVEDVSHRNTRYNLISDAGSKPGLVRQQPVPPGAVAYENDTRRKHILGDLTQLITNKDDADLQLISMWGAGGGTGTTSIIRKCYSDPEIIQNFICRAWVNLSHPFNPHEFVRSLMAHFYANSCQERQGGIIGVDVLTSMDATATQGDLLSEFVQLVDKNRYLVVLEDLPTMAEWDSIRTFLPDRKNGSWIIVSSQKYEIASLCVGHPYQILDLKQSSPTEHSVCAFLREEVTLKEKKGGNRKEKIYVGDESEVNNGSTSTNSKVISTEYDLSHNHRMVANSKWKEARDWMQNSSLVGRRLQMYQIHRCIAEAQRNHSHVMSVWGIVGVGKSAIVRNFYCDRILENQQFQEYGWVDLSHSQPFNLKDFSQNLLTNFQSDSLQANETTPSRGILGTVRKCCEFLSTRHCLVVIDGLQSKEEWDLIQSSLVSRYSKSNTIIIVITTEASIAAYCADKDDLVFNVKTLETDAAFDLFENEISKKAPLWTTSLCDRGNSVTQELVSKCGGLPMVIVAIAGILATKVVSWMDTATSINLRFMFELEINPDLQDLFSWVHSCFRTCPDFIKPCIFYLSFFPRDHNIRRRRLVRRWIAEGYCRDSDDKSAEENGEFFFSKLLGMSIIQPESSDARMVSCQINGFFRECILSRSGEMEDLVIELADRCNLTTQRSGRHLVISESWDRDKILFESIDFSRLRSMTVFGMWKSFFISKSMKL

SEQ ID NO: 159828 - protein, 131 aa, Zea Mays
MAARVVGEAGVVLDPADGVELAPELAQPPLQILDGECGPRGRVELGADGRPVVRGEVAHAHAAAARAPLQQVQELGVVLGRPHVHVQPRQDLAERPPRHRRPRRRGLDHGLLVAVAVAVFEAHHRLLVNHQ

SEQ ID NO: 159829 - protein, 523 aa, Zea Mays
MGNCCATPSTTEESGKSRQKKPKQKANPYNVAYNRGAAPAAARPGLVVLRDPTGRDLGAQYELGGELGRGEFGVTYLCTESATGARYACKSISKRKLRTPVDVEDVRREVDIMRHMPPHPNIVSLRAAYEDEDAVHLVMELCEGGELFDRIVARGHYTERAAAAVTRTIVEVVQMCHRHGVMHRDLKPENFLYASKKESSPLKAIDFGLSVFFRPGERFTEIVGSPYYMAPEVLKRNYGPEVDVWSAGVILYILLCGVPPFWAETEQGVAQAIIRSVVDFKREPWPRVSEPAKDLVRRMLDPNPLTRFTAAQVLDISLGDTVRARLQQFAAMNKLKKKALRVIAEHLSVEEVADIKQMFEKMDVSKNGKLTFEEFKAGLRKLGNQMPDSDLQIMMDAADIDKNGTLDYEEFVTVSVHVRKIGNDEHIQKAFTYFDRNKSGYIEIEELREALADELEGTDEDIINGIIRDVDTDKDGKISYDEFAAMMKAGTDWRKASRQYSRQRFSNLSLKLQKDGSLGAETR

SEQ ID NO: 159830 - protein, 170 aa, Zea Mays
MATSVPYPTPEPVAVAEAKIKRKSSGALSGGCTSGSAGGSEGSSDKRDATHHKVLPSVRRRKSSGANVQGEPSQAATAQHAAAESRVTAKKRPATELSVSTPEIAGTSNVIVRPNLNIGMDLWTDSPVKAETSGQGEINAATHSHHGSTLSMMVWLSYIREYIVAIVANK

SEQ ID NO: 159831 - protein, 124 aa, Zea Mays
MTSASAISGLGTVWNAAILLELEAVQFHMAKNPRNRKKNPAFQTGLQNSGGPRDVPDPVVSGGALASGVWLFARCPLVLAIGIRCIWILAYGHLADWLGGTCSCQLVGPSRVSKVATIANGHGL

SEQ ID NO: 159832 - protein, 323 aa, Zea Mays
MRLQAIEELHFEVPNRYESLLLFSQCDKLPGGDVILETLASSIASRTSDRTNQPGTSRGMHAVLSNLGMVSPVNSGERLFVGEIVVGEISALQKAVTDSMNNYKKVELAQASVDGVKVDGLDTNLAVMKELLSPVSELWRVLLLLTSWDEPMKSMLFCFLFSYIIIRGWVIYFIVTVLLFSATFMFLTRLTNQGKQMSEVKVVSPPPLNTMEQLLAVQNAISKIEELVQDANIVLLKIRALLLAFPSQATDRAILALVLMALSLAIVPTKVLLLLVFLEVSTNNSPLRRASTERCTRRLREWWFSIPAAPVVVEKEKEDKKTR

SEQ ID NO: 159833 - protein, 89 aa, Zea Mays
MEANRTGSCTSTMHKSADQNEENTALVYELFAEQAKAHNRYGTHLNKIGYKNVMDKFKENTRLSYTKMQFKNKWDNMRIEYTNWKRLSR

SEQ ID NO: 159834 - protein, 94 aa, Zea Mays
MEANRTGSCTSTMHKSIMGDSADQNEENTALVYELFAEQAKAHNRYGTHLNKIGYKNVMDKFKENTRLSYTKMQFKNKWDNMRIEYTNWKRLSR

SEQ ID NO: 159835 - protein, 77 aa, Zea Mays
MGDSADQNEENTALVYELFAEQAKAHNRYGTHLNKIGYKNVMDKFKENTRLSYTKMQFKNKWDNMRIEYTNWKRLSR

SEQ ID NO: 159836 - protein, 966 aa, Zea Mays
MSICGYHSPRFSENCAFVGHPSQEHQDCQNATDGYSGFILHLSGDEDTVVSSPVSSNVLPFSLRVSSESAAQPSLAEGSGNPQIPNSGTCNGLSESLCADGEEQEVNAVSQNQFEANDPQVDMPTKVARKEISIQPDTIRHRRHGFNGGKVDVRKLRNVDVNDAIELSIAASEAMVIAEMILDDSQPDKSAAAAIEAALHVKEARKQFYFEEPQHACGSSEGGLDEIDWLAELDESEMVDAYQDVALSLIHIACSSQDHNTGDLKQQNSHPTCPPCDADTHILWDSSSERQNKKWNSQNADSDDHVSDSFPNNQSAGVPPNEPTPCSASVKQAALCKTISCSRNKKTVLQASTQNNAAFHGTLGALATYQNVHKKVAGVAAQTNVGMKKRVKGLFEEENSYISDSISTDRRCPTSRASSMEIVASSRASLYCKAEGLLEENHHPGTEELCCQVVCSSLSQVDPLCSIVPCSISCDEGPSSQAPVCKQSEGHEGPSNQAPSCKKNEGNEGPTCLTPEREHSKKKEEEFMHTKEFPMMQYLDEEAGPSCVPLVKPADSNVPFRRRKYSSLRPFSTIATKSNIFGSTSNSNADVPVCQLERFTPIVLNKNVQRVQAAKEFIENSAGAENLEDFSAVRKQTYYPQDGSEDQIRELQVPREVFPPTENLVVKQHLKRKRVQFSEAKRSSRRTKNNRRILTKSRFSRSDSRTGEMLETREYTDNKEDTFQGVEFLLTGFPKQKEKEIESLIRKSGGYVLSKVSPFPLDKRKNMAEFPSWNPPIVLSPKKVSTAKFLYGCAIDAWILNPIWLFDSLQAGIMLPPGKYLIRQRNAQKHNSSFDRPLHPKCNTLIFDGVGFLIHGKISFCSKFSNIVKHGGGQVFISLQGLVQSLKDGSTSRGIILIANAASASRHLTHCGLEHDINTATASWIIASLFSGKLIPLKKDRCASFRRIKMPLFQQKQHVFYMSQEI

SEQ ID NO: 159837 - protein, 84 aa, Zea Mays
MDGDGALTFSLFAFAYLFLLPAHPSIASHLSSLSVSLSLSPSIKSASSSRLQSNQVLGITPRRNNSHHHRRAVASYHTSCTPQC

SEQ ID NO: 159838 - protein, 262 aa, Zea Mays
MFTMAIGRVLRTITFIATILPSARPWCAVARYQIPQHPHPWAQKYYVPYASDSNAIRRVITQDMAYAAVQAYPDEYKPDWGRMSFLVDILRPTPGEGPSWYHLLKKASGGCNDLMYSGHMLVAVLTAMAWTEAYGGWISVAIWLLVLHSAQREVRERHHYSVDCVAAIYVGVLLWRMTGFIWSARDLARARRLAKLEEVQSRLVHAAKDSDIDEIRGLLKEVELSGQERQGFSQRAILAFAAGTIIFTLSCVLIAFTATSDG

SEQ ID NO: 159839 - protein, 338 aa, Zea Mays
MEGWRVFSLHGTAAPLPDTGQWLLLSLNEKLPQSVVDLLRAHVITLHHYLMLFIMLGFSVLFDCIKAPGLGIATRYMFTMAIGRVLRTITFIATILPSARPWCAVARYQIPQHPHPWAQKYYVPYASDSNAIRRVITQDMAYAAVQAYPDEYKPDWGRMSFLVDILRPTPGEGPSWYHLLKKASGGCNDLMYSGHMLVAVLTAMAWTEAYGGWISVAIWLLVLHSAQREVRERHHYSVDCVAAIYVGVLLWRMTGFIWSARDLARARRLAKLEEVQSRLVHAAKDSDIDEIRGLLKEVELSGQERQGFSQRAILAFAAGTIIFTLSCVLIAFTATSDG

SEQ ID NO: 159840 - protein, 126 aa, Zea Mays
MTFKRRNGGRNKHGRGHVKYIRCSNCAKCCPKDKAIKRFLVRNIVEQAAVRDVQEACVHDGYVLPKLYAKVHHCVSCAIHAHIVRVRSRENRRNREPPQRFRRRLLGTCLAMKDHMSGLVSNALRL

SEQ ID NO: 159841 - protein, 2059 aa, Zea Mays
MIRHQIRNEYGLADPEVYAAPGEEDDPEALLEGVAMAGLVGVLRQLGDLAEFAAEIFHDLHEEAMATASRGHGLMLRLQQLEAEFPAVEKAIISQTEHSNYPHDDGAEWHSNVQLKQNVITQGDMPRFIMDSYEECRGPPQLFTLDKFDVAGAGASLKRYSDPSFFKTEHASNMIEADVLIENKPRRIKKKAMRWRKGATLESLLTANSESQITPKDRTSRKVPPRTTKLKSRQPRSPDHKTTSRILREHLQEVILSQKKIISRYSVRHYYVKFGSPDSSETAPPFGEMDSFGALVQSSGDKRNLGKQHEPFQQNGMVHSSEKLPDCPYLDIGESNNRSHLTCEEKPRLAEVPADQKDVDGRRPDDIVSDQDNFIGASNDTDMENKEGLQMKTECDPSASVELVELNRHNKEGDKVLYAEPPEVGPAIDSSLGLDNASSGEEPTCVDLPLSSDSAPTVSATNGPNSGSQSGRQMNGVDWSTDEESSNDVDLIDVSSSSSVVSENGDVQNNDCLVSCLQHEEAIHSLSDDHAGAIHNSDEQSPNTSSNWDDMAIGCNNYTEKVHHPVEHVQDVVLDDISMILSKPNDVSEDEDKISSGNADDLSLHPTKLNQEEIQELKTESEEGRSLESGSSPSKASLPNKDHVSMNDVEADTVTIPKETVADTAPTGLDPDGIDERQDGVAPKYSSIHNSVLYESYDDKIAEDTHSLLDDGLSTTFDDDKHVAEDHQFVVLEQRTCPTSLNTCKDDSMQGCAVARDFTDAEKLPGVVSGVLASQLETESHVGETLASTSYAFSDDTEALEIGVPLAPGTSFLPNTSSSLVEKHELTETEEIAEVGEFVVAKESTTSVFAVDVVPPKEFIDANIHPEKVEVLATSLTEEATRLDLQLQSPSREVLETTEAIHRNFGAVDESREDISKKSMLQTDNSPLIVETTSEKCSDRDGDTQFLVKSDYQEELLKEGSHNAEDRSLCDLNKDGAVTLKSNAVEKQPVNAGQDLAWGMHAQDSSSTNPFLDPAYLMSHTQIYSSSSMSSQPCFPEEEDFLSELVIQHDNMGVTADALWEPATPPDDAPLPSEIMTEDDFRSFCQEYHEIDFSSVTNCSHSEPASDSNKIPNAFLIRESDFPCYNSALPVKLDQEACIHSKFCSECVEYSCAVERQGTTSMVVSGKEDRVGKDETPGVDFHLNFLEFSNDNRSPELNMLSVPVDLRQELHGLPEVDSRDSSPLLHKEKTSEECCFSLSNNVVEVKQELEIRADLVPHSSINEKVDGLDEAVPVEPEAHACALDEYDNQDVPHISTSEKNETLTLGKPVLVQGPEVCAFGGFECDPPIIPSPSVDETKDNLEVRMNMILQSFHHSLRTSFQAEQKSECYTSGEHDSQTVPFPLHDENINELDDPPLSNADELDRESKACVPHECDAQIAPCSTDEDIHELDHPPLSSPALVDLESEDHVSDDRDSEVTPCLVKDKIDESVDAQPNLLPGELEQETHAPPELDFRVAPQSAKESDCSTEFDSQAAPCSSNIPVLANTTVSTCISAMPSSEETYQLSPVPPPTVQFQNDSYKDPQALLADSYKDPQAPPPLPPLQWRLGKPRLGLLSRKGCMTEPARVIDPVLQISSQEMDIRPGLLDPTDRSIEPVSCQEIKEDRCESSLIDHNDQNVDFDRLSTRVAVTDVARTEHRLSLETSEDIKQQGHISSSATGVGEHLDAGFTSTMADEEHLDDSGMTHGTALYLSDPLFPLPTYELQDPQPDTRENSEHPSQTHGAASGDDKSMDAVGSMESTLTKGHVSGNRCYQQPQHGESSSETSDHKEHITNASEDGVKHQSGTSEAPSDTAKHSAPGTLLKGNVQESQILQEHNVGSSEDDQPGGLLYSLEPVAPQGENKNQVNNPGLLLEWPGDTSELVTGLEKSCYAHAEQPPVMGWTVGPQMLHPKYGILEEESQFEPNIADNHLIRKPISIKNIPRNPLVDAVAAHDRSSMRKVSELAPPTDKPKPNERNMLLEQIRNKTFSLKPVAPAQQTAMRSPARTSTRNLKVAAIIEKANAIRQAVGSDDEDADSWSDT

SEQ ID NO: 159842 - protein, 1918 aa, Zea Mays
MIEADVLIENKPRRIKKKAMRWRKGATLESLLTANSESQITPKDRTSRKVPPRTTKLKSRQPRSPDHKTTSRILREHLQEVILSQKKIISRYSVRHYYVKFGSPDSSETAPPFGEMDSFGALVQSSGKLDLTKVVPVNESDAVDTKSEPIDGSAYLELGDKRNLGKQHEPFQQNGMVHSSEKLPDCPYLDIGESNNRSHLTCEEKPRLAEVPADQKDVDGRRPDDIVSDQDNFIGASNDTDMENKEGLQMKTECDPSASVELVELNRHNKEGDKVLYAEPPEVGPAIDSSLGLDNASSGEEPTCVDLPLSSDSAPTVSATNGPNSGSQSGRQMNGVDWSTDEESSNDVDLIDVSSSSSVVSENGDVQNNDCLVSCLQHEEAIHSLSDDHAGAIHNSDEQSPNTSSNWDDMAIGCNNYTEKVHHPVEHVQDVVLDDISMILSKPNDVSEDEDKISSGNADDLSLHPTKLNQEEIQELKTESEEGRSLESGSSPSKASLPNKDHVSMNDVEADTVTIPKETVADTAPTGLDPDGIDERQDGVAPKYSSIHNSVLYESYDDKIAEDTHSLLDDGLSTTFDDDKHVAEDHQFVVLEQRTCPTSLNTCKDDSMQGCAVARDFTDAEKLPGVVSGVLASQLETESHVGETLASTSYAFSDDTEALEIGVPLAPGTSFLPNTSSSLVEKHELTETEEIAEVGEFVVAKESTTSVFAVDVVPPKEFIDANIHPEKVEVLATSLTEEATRLDLQLQSPSREVLETTEAIHRNFGAVDESREDISKKSMLQTDNSPLIVETTSEKCSDRDGDTQFLVKSDYQEELLKEGSHNAEDRSLCDLNKDGAVTLKSNAVEKQPVNAGQDLAWGMHAQDSSSTNPFLDPAYLMSHTQIYSSSSMSSQPCFPEEEDFLSELVIQHDNMGVTADALWEPATPPDDAPLPSEIMTEDDFRSFCQEYHEIDFSSVTNCSHSEPASDSNKIPNAFLIRESDFPCYNSALPVKLDQEACIHSKFCSECVEYSCAVERQGTTSMVVSGKEDRVGKDETPGVDFHLNFLEFSNDNRSPELNMLSVPVDLRQELHGLPEVDSRDSSPLLHKEKTSEECCFSLSNNVVEVKQELEIRADLVPHSSINEKVDGLDEAVPVEPEAHACALDEYDNQDVPHISTSEKNETLTLGKPVLVQGPEVCAFGGFECDPPIIPSPSVDETKDNLEVRMNMILQSFHHSLRTSFQAEQKSECYTSGEHDSQTVPFPLHDENINELDDPPLSNADELDRESKACVPHECDAQIAPCSTDEDIHELDHPPLSSPALVDLESEDHVSDDRDSEVTPCLVKDKIDESVDAQPNLLPGELEQETHAPPELDFRVAPQSAKESDCSTEFDSQAAPCSSNIPVLANTTVSTCISAMPSSEETYQLSPVPPPTVQFQNDSYKDPQALLADSYKDPQAPPPLPPLQWRLGKPRLGLLSRKGCMTEPARVIDPVLQISSQEMDIRPGLLDPTDRSIEPVSCQEIKEDRCESSLIDHNDQNVDFDRLSTRVAVTDVARTEHRLSLETSEDIKQQGHISSSATGVGEHLDAGFTSTMADEEHLDDSGMTHGTALYLSDPLFPLPTYELQDPQPDTRENSEHPSQTHGAASGDDKSMDAVGSMESTLTKGHVSGNRCYQQPQHGESSSETSDHKEHITNASEDGVKHQSGTSEAPSDTAKHSAPGTLLKGNVQESQILQEHNVGSSEDDQPGGLLYSLEPVAPQGENKNQVNNPGLLLEWPGDTSELVTGLEKSCYAHAEQPPVMGWTVGPQMLHPKYGILEEESQFEPNIADNHLIRKPISIKNIPRNPLVDAVAAHDRSSMRKVSELAPPTDKPKPNERNMLLEQIRNKTFSLKPVAPAQQTAMRSPARTSTRNLKVAAIIEKANAIRQAVGSDDEDADSWSDT

SEQ ID NO: 159843 - protein, 2051 aa, Zea Mays
MIRHQIRNEYGLADPEVYAAPGEEDDPEALLEGVAMAGLVGVLRQLGDLAEFAAEIFHDLHEEAMATASRGHGLMLRLQQLEAEFPAVEKAIISQTEHSNYPHDDGAEWHSNVQLKQNVITQGDMPRFIMDSYEECRGPPQLFTLDKFDVAGAGASLKRYSDPSFFKTEHASNMIEADVLIENKPRRIKKKAMRWRKGATLESLLTANSESQITPKDRTSRKVPPRTTKLKSRQPRSPDHKTTSRILREHLQEVILSQKKIISRYSVRHYYVKFGSPDSSETAPPFGEMDSFGALVQSSGKLDLTKVVPVNESDAVDTKSEPIDGSAYLELGDKRNLGKQHEPFQQNGMVHSSEKLPDCPYLDIGESNNRSHLTCEEKPRLAEVPADQKDVDGRRPDDIVSDQDNFIGASNDTDMENKEGLQMKTECDPSASVELVELNRHNKEGDKVLYAEPPEVGPAIDSSLGLDNASSGEEPTCVDLPLSSDSAPTVSATNGPNSGSQSGRQMNGVDWSTDEESSNDVDLIDVSSSSSVVSENGDVQNNDCLVSCLQHEEAIHSLSDDHAGAIHNSDEQSPNTSSNWDDEDKISSGNADDLSLHPTKLNQEEIQELKTESEEGRSLESGSSPSKASLPNKDHVSMNDVEADTVTIPKETVADTAPTGLDPDGIDERQDGVAPKYSSIHNSVLYESYDDKIAEDTHSLLDDGLSTTFDDDKHVAEDHQFVVLEQRTCPTSLNTCKDDSMQGCAVARDFTDAEKLPGVVSGVLASQLETESHVGETLASTSYAFSDDTEALEIGVPLAPGTSFLPNTSSSLVEKHELTETEEIAEVGEFVVAKESTTSVFAVDVVPPKEFIDANIHPEKVEVLATSLTEEATRLDLQLQSPSREVLETTEAIHRNFGAVDESREDISKKSMLQTDNSPLIVETTSEKCSDRDGDTQFLVKSDYQEELLKEGSHNAEDRSLCDLNKDGAVTLKSNAVEKQPVNAGQDLAWGMHAQDSSSTNPFLDPAYLMSHTQIYSSSSMSSQPCFPEEEDFLSELVIQHDNMGVTADALWEPATPPDDAPLPSEIMTEDDFRSFCQEYHEIDFSSVTNCSHSEPASDSNKIPNAFLIRESDFPCYNSALPVKLDQEACIHSKFCSECVEYSCAVERQGTTSMVVSGKEDRVGKDETPGVDFHLNFLEFSNDNRSPELNMLSVPVDLRQELHGLPEVDSRDSSPLLHKEKTSEECCFSLSNNVVEVKQELEIRADLVPHSSINEKVDGLDEAVPVEPEAHACALDEYDNQDVPHISTSEKNETLTLGKPVLVQGPEVCAFGGFECDPPIIPSPSVDETKDNLEVRMNMILQSFHHSLRTSFQAEQKSECYTSGEHDSQTVPFPLHDENINELDDPPLSNADELDRESKACVPHECDAQIAPCSTDEDIHELDHPPLSSPALVDLESEDHVSDDRDSEVTPCLVKDKIDESVDAQPNLLPGELEQETHAPPELDFRVAPQSAKESDCSTEFDSQAAPCSSNIPVLANTTVSTCISAMPSSEETYQLSPVPPPTVQFQNDSYKDPQALLADSYKDPQAPPPLPPLQWRLGKPRLGLLSRKGCMTEPARVIDPVLQISSQEMDIRPGLLDPTDRSIEPVSCQEIKEDRCESSLIDHNDQNVDFDRLSTRVAVTDVARTEHRLSLETSEDIKQQGHISSSATGVGEHLDAGFTSTMADEEHLDDSGMTHGTALYLSDPLFPLPTYELQDPQPDTRENSEHPSQTHGAASGDDKSMDAVGSMESTLTKGHVSGNRCYQQPQHGESSSETSDHKEHITNASEDGVKHQSGTSEAPSDTAKHSAPGTLLKGNVQESQILQEHNVGSSEDDQPGGLLYSLEPVAPQGENKNQVNNPGLLLEWPGDTSELVTGLEKSCYAHAEQPPVMGWTVGPQMLHPKYGILEEESQFEPNIADNHLIRKPISIKNIPRNPLVDAVAAHDRSSMRKVSELAPPTDKPKPNERNMLLEQIRNKTFSLKPVAPAQQTAMRSPARTSTRNLKVAAIIEKANAIRQAVGSDDEDADSWSDT

SEQ ID NO: 159844 - protein, 128 aa, Zea Mays
MNRMIMNTTQKANLVEQDAKVFVKQAPQFKRWGRKHPFVRYGLPLISLTVFGAVGLAHLIQGSKEVTKEKEDMEWEVVETTKALSRTGPVEGAYKPKKLSLEDELKALQQKVDINSYDYKPIPRPSEK

SEQ ID NO: 159845 - protein, 89 aa, Zea Mays
MIMNTTQKANLVEQDAKVFVKQAPQFKRWGRKHPFVRYGLPLISLTVFGAVGLAHLIQGRSDQGKGGYGMGGCRDNKSSKSNRASGRSL

SEQ ID NO: 159846 - protein, 84 aa, Zea Mays
MPPSCSQSQALIDGGQKQYTDLVLLVRVFNVFLLVLYHVLLLEHKYCRVILIRILLILIEIQCTLPPKSSMFCSTRLAEEHLLP

SEQ ID NO: 159847 - protein, 382 aa, Zea Mays
MVLDLNVASPADSGTSSSSVLNSADGGFRFGLLGSPVDDDDCSGEMAPGASTGFMTRQLFPSPTPPAEPEPEPVAAPVPVWQPQRAEDLGMAQRPVAPAKKTRRGPRSRSSQYRGVTFYRRTGRWESHIWDCGKQVYLGGFDTAHAAARAYDRAAIKFRGLDADINFSLSDYEDDLKQMRNWTKEEFVHILRRQSTGFARGSSKYRGVTLHKCGRWEARMGQLLGKKYIYLGLFDSEVEAARAYDRAALRFNGREAVTNFEPSSYNAGDNNLRDTETEAIDDGDAIDLDLRISQPNVQDPKRDNTLAGLQPTCDSPESSNTMASQCLLLSPAAAVANELIIPLARVSPKPSSVISPSALVLVSLSWLLSEPPGPGKAGGAKA

SEQ ID NO: 159848 - protein, 539 aa, Zea Mays
MAPVDPHSYTDGAHPVVSRAALAFYLDFAASTIHASAVLTLSAPHSGDLLLDTRALAVHSASTDADPPEPIPFSLAAAPDPVLGTALTLALPRDTASFRLTFSTSPAASALQWLAPPQTASAQPFVFSQCQSIHARSVFPCHDTPAARITFSLLLNVPEQLSAVAAARHVARRDPLPSDHRGACDDGLWCAPGRIVEEFQMDQSVPPYLFAFAAGSIGFRDLGPRTRVYAEGGDTVLDEAAREFAGVEEMVKVGEGLFGPYEWERFDLLVLPPSFPYGGMENPRMVFLTPTVIKGDAAGAQVVAHELAHSWTGNLITNKTNEDFWLNEGFTTYAERRIVEVVQGEERAALNMGIGWRGLNRMMERFKDNMEFTKLKPKMAGIDPDDVYSEVPYEKGFQFLWRIEREIGRPAFDEFLKKYIATFKFQSIDTETFLEFLKTNVPGIENKIDLHLWVEGTGIPPDAMEPDSATYKKICSLAAEFKSGKLPSEDEVAKWSGQEWELYLENLPADVEASQVYHGLLCTADCCIACSSESESLHS

SEQ ID NO: 159849 - protein, 145 aa, Zea Mays
MANGLSCRSGTLQAKNVSARLLLLTTGEQWASCLYIRNWIRNIEQHASDNVNKILVGNKADMDESKRAVPTSKGQALADEYGIKFFETSAKTNLNVEQVFFSIARDIKQRLSETDSKPEDRTIKIKAEGEAEAAAAAQNSACCGS

SEQ ID NO: 159850 - protein, 516 aa, Zea Mays
MAATGVVAEPKTKYDRQLRIWGDQGQAALEKASICLLNCGPTGTEALKNLVLGGIGSVTVVDGSKVESSDLGNNFLLDEGCLGQPRAKSICSFLQELNDAVKAKFVEESPAHLIDTNPSFFSQFTVVIATQLPESFLLKLDYICRKADIVLVAARSYGLTGLVRVSVKEHCVIESKPDHFLDDLRLHNPWTELKQFAKSIDINDKDPVVHKNTPYIVILVRLAEKWADAHDGNLPSTRQEKKEFKDLIRAHMLNVDEENYKEAVDSSYKVSVTPGINNEIRQIIDDDSAEVNSSSSDFWILVAALKEGNGELPLEGTIPDMTSLTEYYVSLQKIYQAKAEFDCLALEHHVKEILKRIGRDPDSISRAYIKTFCKNSRKLRVSRYRSFEEEFSSPFVPEIQRYFTDEDYSYATNFYILLRAVDRLAANYSRLPGIFDRLKTVAASVASEMGLNGASLSEDLITEMCRFGGAEIHPVAAFVGGVASQEVIKLVTKQFVPLPGTFIFNGIDLKSQVLML

SEQ ID NO: 159851 - protein, 278 aa, Zea Mays
MLNVDEENYKEAVDSSYKVSVTPGINNEIRQIIDDDSAEVNSSSSDFWILVAALKEFIAKEGNGELPLEGTIPDMTSLTEYYVSLQKIYQAKAEFDCLALEHHVKEILKRIGRDPDSISRAYIKTFCKNSRKLRVSRYRSFEEEFSSPFVPEIQRYFTDEDYSYATNFYILLRAVDRLAANYSRLPGIFDSEIDEDIPRLKTVAASVASEMGLNGASLSEDLITEMCRFGGAEIHPVAAFVGGVASQEVIKLVTKQFVPLPGTFIFNGIDLKSQVLML

SEQ ID NO: 159852 - protein, 387 aa, Zea Mays
MAATGVVAEPKTKYDRQLRIWGDQGQAALEKASICLLNCGPTGTEALKNLVLGGIGSVTVVDGSKVESSDLGNNFLLDEGCLGQPRAKSICSFLQELNDAVKAKFVEESPAHLIDTNPSFFSQFTVVIATQLPESFLLKLDYICRKADIVLVAARSYGLTGLVRVSVKEHCVIESKPDHFLDDLRLHNPWTELKQFAKSIDINDKDPVVHKNTPYIVILVRLAEKWADAHDGNLPSTRQEKKEFKDLIRAHMLNVDEENYKEAVDSSYKVSVTPGINNEIRQIIDDDSAEVNSSSSDFWILVAALKEFIAKEGNGELPLEGTIPDMTSLTEYYVSLQKIYQAKAEFDCLALEHHVKEILKRIGRDPDSISRAYIKTFCKNSRKLRVS

SEQ ID NO: 159853 - protein, 453 aa, Zea Mays
MAATGVVAEPKTKYDRQLRIWGDQGQAALEKASICLLNCGPTGTEALKNLVLGGIGSVTVVDGSKVESSDLGNNFLLDEGCLGQPRAKSICSFLQELNDAVKAKFVEESPAHLIDTNPSFFSQFTVVIATQLPESFLLKLDYICRKADIVLVAARSYGLTGLVRVSVKEHCVIESKPDHFLDDLRLHNPWTELKQFAKSIDINDKDPVVHKNTPYIVILVRLAEKWADAHDGNLPSTRQEKKEFKDLIRAHMLNVDEENYKEAVDSSYKVSVTPGINNEIRQIIDDDSAEVNSSSSDFWILVAALKEFIAKEGNGELPLEGTIPDMTSLTEYYVSLQKIYQAKAEFDCLALEHHVKEILKRIGRDPDSISRAYIKTFCKNSRKLRVSRYRSFEEEFSSPFVPEIQRYFTDEDYSYATNFYILLRAVDRLAANYSRLPGIFDRLLRLQWQVRWV

SEQ ID NO: 159854 - protein, 272 aa, Zea Mays
MAATGVVAEPKTKYDRQLRIWGDQGQAALEKASICLLNCGPTGTEALKNLVLGGIGSVTVVDGSKVESSDLGNNFLLDEGCLGQPRAKSICSFLQELNDAVKAKFVEESPAHLIDTNPSFFSQFTVVIATQLPESFLLKLDYICRKADIVLVAARSYGLTGLVRVSVKEHCVIESKPDHFLDDLRLHNPWTELKQFAKSIDINDKDPVVHKNTPYIVILVRLAEKWADAHDGNLPSTRQEKKEFKMKKITKKLWTLHIKYQSLQESIMRFVR

SEQ ID NO: 159855 - protein, 488 aa, Zea Mays
MAATGVVAEPKTKYDRQLRIWGDQGQAALEKASICLLNCGPTGTEALKNLVLGGIGSVTVVDGSKVESSDLGNNFLLDEGCLGQPRAKSICSFLQELNDAVKAKKADIVLVAARSYGLTGLVRVSVKEHCVIESKPDHFLDDLRLHNPWTELKQFAKSIDINDKDPVVHKNTPYIVILVRLAEKWADAHDGNLPSTRQEKKEFKDLIRAHMLNVDEENYKEAVDSSYKVSVTPGINNEIRQIIDDDSAEVNSSSSDFWILVAALKEFIAKEGNGELPLEGTIPDMTSLTEYYVSLQKIYQAKAEFDCLALEHHVKEILKRIGRDPDSISRAYIKTFCKNSRKLRVSRYRSFEEEFSSPFVPEIQRYFTDEDYSYATNFYILLRAVDRLAANYSRLPGIFDSEIDEDIPRLKTVAASVASEMGLNGASLSEDLITEMCRFGGAEIHPVAAFVGGVASQEVIKLVTKQFVPLPGTFIFNGIDLKSQVLML

SEQ ID NO: 159856 - protein, 73 aa, Zea Mays
MPKLPGKTASTQKMLHCFLLLVTKNTNNRVLQPYYATNFYILLRAVDRLAANYSRLPGIFDRLLRLQWQVRWV

SEQ ID NO: 159857 - protein, 168 aa, Zea Mays
MHHAVSFFFFNVKVKVPSAHCDSRVRTVCADVMTLMKRQARAMSPQERGFSVILSDMCPPVSGITTKDGAISCELGMRALSLAVGKIKLKDSNYSDTLEKYLSSTEPESDEDGVLRRGGNLVVKFLENEDISGFGKFCKVKFKKVSLLRPKATRPSSREIYMICEGLR

SEQ ID NO: 159858 - protein, 469 aa, Zea Mays
MVREGLVGAAHKGQKNPRDEDMEMEGRKSKQSALCDEETVREMFDKVLLCTDKNCEFHSPMPADAQISGGYVKGSRNKRGRRKGRSGSGAEEEPVDLTTLLIHCAQAAAIDDHRNSSELLKQIRKHSSATGDAGQRLAHYFADGLEARLAGSGSSIYRSLAAKRTSTGDILKAFSLYVKACPFRILSHYVANTTILNATKSATRLHIIDYGIMYGFQWPVLMQRLSKRPGGPPYLRITGIDFPLSGFRPAERVEATGRRLHEYARMFNVPFEYQAIAAKWDTIQVKDLNMKSDEFVVVNCLYRMRNMMDETVTDDSPRTRVLNTIRKLNPHLFVHGIVNGTYNAPFFVTRFKEAMFFFSSIFDMLEANALRMDEHRLLIEREFFGREAVNVIACEGTERIERPETYKQWQMRNLRAGFRQLALDREIMKRARYKVSKSYQGDFLVDEDNKWMLQGWKGRIIYALSAWTS

SEQ ID NO: 159859 - protein, 79 aa, Zea Mays
MAAGGTADFFYRESQRLGYVARSAFKLIQMQKQHKLIAPGAAVLDLGCAPGAWLQVACQNLGPLEKGGIVVGVDVKSRR

SEQ ID NO: 159860 - protein, 136 aa, Zea Mays
MAAGGTADFFYRESQRLGYVARSAFKLIQMQKQHKLIAPGAAVLDLGCAPGAWLQVACQNLGPLEKGGIVVGVDVKKVKVPSAHCDSRVRTVCADVMTLMKRQARAMSPQERGFSVILSDMCPPVSGITTKDGAIS

SEQ ID NO: 159861 - protein, 141 aa, Zea Mays
MAAGGTADFFYRESQRLGYVARSAFKLIQMQKQHKLIAPGAAVLDLGCAPGAWLQVACQNLGPLEKGGIVVGVDVKKVKVPSAHCDSRVRTVCADVMTLMKRQARAMSPQERGFSVILSDMCPPVSGITTKDGAISLSELH

SEQ ID NO: 159862 - protein, 92 aa, Zea Mays
MRALSLAVGKIKLKDSNYSDTLEKYLSSTEPESDEDGVLRRGGNLVVKFLENEDISGFGKFCKVKFKKVSLLRPKATRPSSREIYMICEGLR

SEQ ID NO: 159863 - protein, 120 aa, Zea Mays
MAAGGTADFFYRESQRLGYVARSAFKLIQMQKQHKLIAPGAAVLDLGCAPGAWLQVACQNLGPLEKGGIVVGVDVKKVKVPSAHCDSRVRTVCADVMTLMKRQARAMSPQVRIIDRVWCG

SEQ ID NO: 159864 - protein, 139 aa, Zea Mays
MAAGGTADFFYRESQRLGYVARSAFKLIQMQKQHKLIAPGAAVLDLGCAPGAWLQVACQNLGPLEKGGIVVGVDVKKVKVPSAHCDSRVRTVCADVMTLMKRQARAMSPQERGFSVILSDMCPPVSGITTKDGAISLIP

SEQ ID NO: 159865 - protein, 112 aa, Zea Mays
MCPPVSGITTKDGAISCELGMRALSLAVGKIKLKDSNYSDTLEKYLSSTEPESDEDGVLRRGGNLVVKFLENEDISGFGKFCKVKFKKVSLLRPKATRPSSREIYMICEGLR

SEQ ID NO: 159866 - protein, 668 aa, Zea Mays
MQQRSCSCLMERDAVLEDAAAGDGEEQDQDQEEVVVPIGAQKHDPAWKHCVMVRSDGRMRLKCAYCGKHFLGGGIHRFKEHLARRPGNACCCPSVPRDVQDTMLRSLAAVAAKKMQRKLAAASTTPASVSTASGGTGSPIHMISLNEVLDFEAVPLEEQRPPVPEGSIRGSTSGKKKRKQVTYAPAPPLIPQIRPQHVRSTPQNNLLHGLQHVPPTPQTNPLHQVVMAVNAVTPAEHFEHAAPSEKEHVSVAVGRFLYDAGVPLEAVNSVYFQPMLEAIAAAGGRPETLSYHDFRGHILKRSLDDVTARLEFFRGSWTRTGCSVLADEWITDKGRTLINFSVYCPEGTMFLKSVDATSIVTSSDALYELLKSAVEEIGEKKVVQVITNNSEVHAAAGKKLGETFPTLFWSPCTFQCVDGMLEDFSKVEAISEIISNAKAITGFVYNSAYALNLMKKYLQGKDLLVPAETRAAMNFVTLKNMYGLREALQAMVNSDEWIDLLPKKGGIEASNLVNNLQFWNSCAAVVHITEQLVHLLKLVGNPKRPSMGYVYAGLYKAKAAIKKELVSKNDYMVYWNIIDWRWDNQTPQPLHSAGFFLNPLFFDGIRGDISNGIFSGMLDCIERLVPDVKIQDKVQRELHIYRSETAVDFRRQMAVRSRRTLPPEIGNL

SEQ ID NO: 159867 - protein, 582 aa, Zea Mays
MERDAVLEDAAAGDGEEQDQDQEEVVVPIGAQKHDPAWKHCVMVRSDGRMRLKCAYCGKHFLGGGIHRFKEHLARRPGNACCCPSVPRDVQDTMLRSLAAVAAKKMQRKLAAASTTPASVSTASGGTGSPIHMISLNEVLDFEAVPLEEQRPPVPEGSIRGSTSGKKKRKQVTYAPAPPLIPQIRPQHVRSTPQNNLLHGLQHVPPTPQTNPLHQVVMAVNAVTPAEHFEHAAPSEKEHVSVAVGRFLYDAGVPLEAVNSVYFQPMLEAIAAAGGRPETLSYHDFRGHILKRSLDDVTARLEFFRGSWTRTGCSVLADEWITDKGRTLINFSVYCPEGTMFLKSVDATSIVTSSDALYELLKSAVEEIGEKKVVQVITNNSEVHAAAGKKLGETFPTLFWSPCTFQCVDGMLEDFSKVEAISEIISNAKAITGFVYNSAYALNLMKKYLQGKDLLVPAETRAAMNFVTLKNMYGLREALQAMVNSDEWIDLLPKKGGIEASNLVNNLQFWNSCAAVVHITEQLVHLLKLVGNPKRPSMGYVYAGLYKAKAAIKKELVSKNDYMVYWNIIDWRNARLHRKAGT

SEQ ID NO: 159868 - protein, 576 aa, Zea Mays
MQQRSCSCLMERDAVLEDAAAGDGEEQDQDQEEVVVPIGAQKHDPAWKHCVMVRSDGRMRLKCAYCGKHFLGGGIHRFKEHLARRPGNACCCPSVPRDVQDTMLRSLAAVAAKKMQRKLAAASTTPASVSTASGGTGSPIHMISLNEVLDFEAVPLEEQRPPVPEGSIRGSTSGKKKRKQVTYAPAPPLIPQIRPQHVRSTPQNNLLHGLQHVPPTPQTNPLHQVVMAVNAVTPAEHFEHAAPSEKEHVSVAVGRFLYDAGVPLEAVNSVYFQPMLEAIAAAGGRPETLSYHDFRGHILKRSLDDVTARLEFFRGSWTRTGCSVLADEWITDKGRTLINFSVYCPEGTMFLKSVDATSIVTSSDALYELLKSAVEEIGEKKVVQVITNNSEVHAAAGKKLGETFPTLFWSPCTFQCVDGMLEDFSKVEAISEIISNAKAITGFVYNSAYALNLMKKYLQGKDLLVPAETRAAMNFVTLKNMYGLREALQAMVNSDEWIDLLPKKGGIEASNLVNNLQFWNSCAAVVHITEQLVHLLKLVGNPKRPSMGYVYAGLYKAKAAIKKELVTYQMEYSQEC

SEQ ID NO: 159869 - protein, 567 aa, Zea Mays
MQQRSCSCLMERDAVLEDAAAGDGEEQDQDQEEVVVPIGAQKHDPAWKHCVMVRSDGRMRLKCAYCGKHFLGGGIHRFKEHLARRPGNACCCPSVPRDVQDTMLRSLAAVAAKKMQRKLAAASTTPASVSTASGGTGSPIHMISLNEVLDFEAVPLEEQRPPVPEGSIRGSTSGKKKRKQVTYAPAPPLIPQIRPQHVRSTPQNNLLHGLQHVPPTPQTNPLHQVVMAVNAVTPAEHFEHAAPSEKEHVSVAVGRFLYDAGVPLEAVNSVYFQPMLEAIAAAGGRPETLSYHDFRGHILKRSLDDVTARLEFFRGSWTRTGCSVLADEWITDKGRTLINFSVYCPEGTMFLKSVDATSIVTSSDALYELLKSAVEEIGEKKVVQVITNNSEVHAAAGKKLGETFPTLFWSPCTFQCVDGMLEDFSKVEAISEIISNAKAITGFVYNSAYALNLMKKYLQGKDLLVPAETRAAMNFVTLKNMYGLREALQAMVNSDEWIDLLPKKGGIEASNLVNNLQFWNSCAAVVHITEQLVHLLKLVGNPKRPSMGYVYAGLYKAKAAIKKELEC

SEQ ID NO: 159870 - protein, 811 aa, Zea Mays
MERDAVLEDAAAGDGEEQDQDQEEVVVPIGAQKHDPAWKHCVMVRSDGRMRLKCAYCGKHFLGGGIHRFKEHLARRPGNACCCPSVPRDVQDTMLRSLAAVAAKKMQRKLAAASTTPASVSTASGGTGSPIHMISLNEVLDFEAVPLEEQRPPVPEGSIRGSTSGKKKRKQVTYAPAPPLIPQIRPQHVRSTPQNNLLHGLQHVPPTPQTNPLHQVVMAVNAVTPAEHFEHAAPSEKEHVSVAVGRFLYDAGVPLEAVNSVYFQPMLEAIAAAGGRPETLSYHDFRGHILKRSLDDVTARLEFFRGSWTRTGCSVLADEWITDKGRTLINFSVYCPEGTMFLKSVDATSIVTSSDALYELLKSAVEEIGEKKVVQVITNNSEVHAAAGKKLGETFPTLFWSPCTFQCVDGMLEDFSKVEAISEIISNAKAITGFVYNSAYALNLMKKYLQGKDLLVPAETRAAMNFVTLKNMYGLREALQAMVNSDEWIDLLPKKGGIEASNLVNNLQFWNSCAAVVHITEQLVHLLKLVGNPKRPSMGYVYAGLYKAKAAIKKELVSKNDYMVYWNIIDWRWDNQTPQPLHSAGFFLNPLFFDGIRGDISNGIFSGMLDCIERLVPDVKIQDKVQRELHIYRSETAVDFRRQMAVRSRRTLPPAEWWYTYGGACPNLTRLAVRILSQTCSARGCDRTNIHFEQVHDERMNSFERQRMHDLTFVQYNLRLQQRQQHKAKAFDPLSVDYIDVVDDWAVDRPAMFSGPAEQPNWMEINQSGNRMTSREPTEDEFESFIEGVDDEMIQGAAQGFHEDGDDPACG

SEQ ID NO: 159871 - protein, 112 aa, Zea Mays
MNSFERQRMHDLTFVQYNLRLQQRQQHKAKAFDPLSVDYIDVVDDWAVDRPAMFSGPAEQPNWMEINQSGNRMTSREPTEDEFESFIEGVDDEMIQGAAQGFHEDGDDPACG

SEQ ID NO: 159872 - protein, 517 aa, Zea Mays
MAAPAPKQEELQPHAVRDQLPSVSYCLTSPPPWPEAVLLGFQHYLVMLGTTVIIPTALVPQMGGGNEEKARVVQTLLFVAGINTLIQSFLGTRLPAVMGGSYTFVAPTISIILAGRYSGIADPHEKFVRIMRGTQGALIVASTLQIIIGFSGLWRIVVRLLSPLSAAPLVALVGFGLYELGFPSVAKCVEIGLPQILLLVALSQYVPHLVPLLSTAFERFAVIMSVVLIWLYAFFLTVGGAYKNAAPKTQFHCRTDRSGLVGGAPWISVPYPFQWGAPTFDAGEAFAMMAASFVALVESTGAFIAVSRYASATPCPPSVMSRGIGWQGVGILLGGLFGTANGTTVSVENAGLLALTRVGSRRVVQISAGFMIFFSILGKFGAVFASIPGPVIAAVYCLLFAYVGMAGVGFLQFCNLNSFRTKFILGFSLFMGLSVPQYFNEYTSVAGFGPVHTRARWALVGGAVAYFLDNTLHRRDGVARKDRGHHFWDRFRSFKTDPRSEEFYSLPFNLNKFFPSF

SEQ ID NO: 159873 - protein, 224 aa, Zea Mays
MGARCSKLSVCWWPPHFKSPMLENGAAGDDGSGVPVFAEYSFDDLRVATDGFAPDRIVSEHGEKAPNVVYRGTLFSSGRTVAIKRFGRSAWPDSRQFLEEARAVGQLRSGRLANLIGCCCESGERLLVAEFMPHETLAKHLFHWETNPLSWAMRMRAALYVAQALDYCSSKGRALYHDLHAYRVVFDVDGNPRLSCFGLMKNSRDGKSYSTNLAFTPPEYLKTE

SEQ ID NO: 159874 - protein, 479 aa, Zea Mays
MGARCSKLSVCWWPPHFKSPMLENGAAGDDGSGVPVFAEYSFDDLRVATDGFAPDRIVSEHGEKAPNVVYRGTLFSSGRTVAIKRFGRSAWPDSRQFLEEARAVGQLRSGRLANLIGCCCESGERLLVAEFMPHETLAKHLFHWETNPLSWAMRMRAALYVAQALDYCSSKGRALYHDLHAYRVVFDVDGNPRLSCFGLMKNSRDGKSYSTNLAFTPPEYLKTGRVSPESVVYSFGTVLLDLLSGKHIPPSHALDLIRGKNFLVLMDSCLEGHVSNSDGTDLMRLASRCLQYEARDRPNLKTVTPSHTLLGIQHDKNNSGQVSLSAIGKAFARADLNEVHEILLHDGYNEDDEANAELSLQSWNGDISESFVVKRRADNAFRSKEYTTAIECYSRFLDSGAVVAPTMLGRRCFAHVVAGNPQEGLEDAKRAEIIASDWPMGHYLQALALHKLGREAESQEALKNGTALEAARNSRARTV

SEQ ID NO: 159875 - protein, 324 aa, Zea Mays
MGARCSKLSVCWWPPHFKSPMLENGAAGDDGSGVPVFAEYSFDDLRVATDGFAPDRIVSEHGEKAPNVVYRGTLFSSGRTVAIKRFGRSAWPDSRQFLEEARAVGQLRSGRLANLIGCCCESGERLLVAEFMPHETLAKHLFHWETNPLSWAMRMRAALYVAQALDYCSSKGRALYHDLHAYRVVFDVDGNPRLSCFGLMKNSRDGKSYSTNLAFTPPEYLKTGRVSPESVVYSFGTVLLDLLSGKHIPPSHALDLIRGKNFLVLMDSCLEGHVSNSDGTDLMRLASRCLQYEARDRPNLKTVVSGLTSLQKDAYVMLFLTIVF

SEQ ID NO: 159876 - protein, 360 aa, Zea Mays
MPHETLAKHLFHWETNPLSWAMRMRAALYVAQALDYCSSKGRALYHDLHAYRVVFDVDGNPRLSCFGLMKNSRDGKSYSTNLAFTPPEYLKTGRVSPESVVYSFGTVLLDLLSGKHIPPSHALDLIRGKNFLVLMDSCLEGHVSNSDGTDLMRLASRCLQYEARDRPNLKTVVSGLTSLQKDAYTPSHTLLGIQHDKNNSGQVSLSAIGKAFARADLNEVHEILLHDGYNEDDEANAELSLQSWNGDISESFVVKRRADNAFRSKEYTTAIECYSRFLDSGAVVAPTMLGRRCFAHVVAGNPQEGLEDAKRAEIIASDWPMGHYLQALALHKLGREAESQEALKNGTALEAARNSRARTV

SEQ ID NO: 159877 - protein, 457 aa, Zea Mays
MVIAVSYFFDHEYYRDSDHAKELEGIDMGKYVASSIVVFNLDTRQVKWAADLDLSTDAVNFRAHVFSSPTVVDLDGDGYLDILIGTAYGLFYVIDHRGKVRNKFPLEMAEIHAPVIAADINDDGKIEMVTTDSHGNVAAWTAEGEEIWEVHLKSLIPQRPTVGDVNGDGHTDVVVPTVSGNIYVLSGKDGSKIQPFPYRTHGRIMSPVLLLDMSKHGDNAKGLTLATTSFDGYLYLIEGSSGCADVVDIGETSYTMVLADNVDGGDDLDLIVTTMNGNVFCFSTQSPHHPLKEWRSSNQGRNNAAYQYNREGIYVKHGSRTFRDEEGKNFWIEFEIVDKYRVPYGKQAPYNVTVTLLVPGNYQGDRRIVVSGVYHQPGKQRMMLPTVPVRTTGTVVVEMIDKNGLYFSDEFSLTFHMHYYKLLKWLLLLPMLGMFGVLVILRPQEGAPLPSFSRNID

SEQ ID NO: 159878 - protein, 767 aa, Zea Mays
MTVRSVITWKAGNKRHIVQQMGAETSKPEVIKPEFKGFDANTVEEAVKIIVPYLEDTRIQNQVIYFDGWNGLGASAVLNSIAEHPPPSVRNKFQNIIHIDCSRWRNRRTVQRMMAQKLRLPQHVMAIFDKHDEDDDLAGIDECSRVEIKVVRKEISRALQGQNSLVVFHNGSHSMVNFNDLGITLDAADPSSNILRKVLWTFQGRLRAINARKEIQGTEAVDTSYLYLGSIFSKENSDLSHRVEILREEATKIAQYTNKLMVTREIAEVCCKYLLSLHSNTTTSLDFNWAIHASNYWVCDGILQDLQQEEAWEVATALHEELQLEDHSTYITPFSGGDTTSWIVATKGVVPTVQPETSSFFLAIKEKKSLVSLPKGMFQRSEQLHVLKLCHCTFNFSSPPFLCCRNIRFLGVDSCKDEPQDKPEEYKEQEEEGNFRPTIEGEFFQSLWVLDVCQTDWELTLSPNAIETMATNIREIHIKSGRIWHNNLSWTCLGNIHKLRLINPTRPWETGNEDEFKDMVKLELLDLSGNTTIQFLPSLSGAVGLKTLILDGCIELQHVMPKTLPPTLETFSLDGGSKQTKISCISLAGCARLVNFRLCGSVLNLEELDLSNTSIKKLDLTDKVVQVPGLQRIILLGCERLRAVLWPKHGMPKLMVLGIDTRGGTEAVSSKTLHNSFFNKEREEGCRAFIAISDMRFAESLVLASGNKFCWNTDPRYDLNICLYSTSKCVEQNYNNVKMCPLQKCSVGHDSTSVWQFLSLDRHVEIW

SEQ ID NO: 159879 - protein, 951 aa, Zea Mays
MGAETSKPEVIKPEFKGFDANTVEEAVKIIVPYLEDTRIQNQVIYFDGWNGLGASAVLNSIAEHPPPSVRNKFQNIIHIDCSRWRNRRTVQRMMAQKLRLPQHVMAIFDKHDEDDDLAGIDECSRVEIKVVRKEISRALQGQNSLVVFHNGSHSMVNFNDLGITLDAADPSSNILRKVLWTFQGRLRAINARKEIQGTEAVDTSYLYLGSIFSKENSDLSHRVEILREEATKIAQYTNKLMVTREIAEVCCKYLLSLHSNTTTSLDFNWAIHASNYWVCDGILQDLQQEEAWEVATALHEELQLEDHSTYITPFSGGDTTSWIVATKGVVPTVQPETSSFFLAIKEKKSLVSLPKGMFQRSEQLHVLKLCHCTFNFSSPPFLCCRNIRFLGVDSCKDEPQDKPEEYKEQEEEGNFRPTIEGEFFQSLWVLDVCQTDWELTLSPNAIETMATNIREIHIKSGRIWHNNLSWTCLGNIHKLRLINPTRPWETGNEDEFKDMVKLELLDLSGNTTIQFLPSLSGAVGLKTLILDGCIELQHVMPKTLPPTLETFSLDGGSKQTKISCISLAGCARLVNFRLCGSVLNLEELDLSNTSIKKLDLTDKVVQVPGLQRIILLGCERLRAVLWPKHGMPKLMVLGIDTRGGTEAVSSKTLHNSFFNKEREEGCRAFIAISDMRFAESLVLASGNKFCWNTDPRYDLNICLYSTSKCVEQNYNNVKMCPLQKCSVGHDSTSVWQFLSLDRHVEIWWCRVERCPNIDTVFATNYDIVCFNELEAFWAADLLIAHCIWSKGRTVNIKDTESFAKLQAIHLHSCPKLTFVLPLSWFYTLPSLETLHIVYCGDLSQVFPVEAEFLNKLGTGHQRGVLEFPKLQHIYFHELPKLHQICEARMYAPELKTITVRGCWSLKHLPGTTDRPYDRPVVDCEVGWWEKLEWDGREASHHPSFFDPRYVS

SEQ ID NO: 159880 - protein, 304 aa, Zea Mays
MREPGRETFPYGSGPVLLSHSASPSHPQQRRAHMDTAVFSPADLFHGVDDSDDDRDEMQICSDGEKPVALEYQERVHDFPDMKLSVREFSCHELNANLLWPGTFSFATWLVKNRSILDGRRVLELGSGTGALAIFLRKAFEVNITTSDYDDGEIEKNISYNCRANALDVLPHIRHTWGDPFPVCTPNWDIVIASDILLYVKQYDNLVKTVSFLLNEYKQKDHKSGCITITDKSGTQISAKPPVFLMSWRRRIGKGHQSLFFDGCEKTGLQVQHLGDLVYLISNKQEADFVETKSDGGSSEGMIF

SEQ ID NO: 159881 - protein, 83 aa, Zea Mays
MREPGRETFPYGSGPVLLSHSASPSHPQQRRAHMDTAVFSPADLFHGVDDSDDDRDEMQICSDGEKPVALEYQERVHDFPDMV

SEQ ID NO: 159882 - protein, 173 aa, Zea Mays
MFIPFCLFMFFCIHSGTGALAIFLRKAFEVNITTSDYDDGEIEKNISYNCRANALDVLPHIRHTWGDPFPVCTPNWDIVIASDILLYVKQYDNLVKTVSFLLNEYKQKDHKSGCITITDKSEESARVINHSSSTGVRRRACKCSTWVILCTLLAINKRRILWKRSQTVAVVRG

SEQ ID NO: 159883 - protein, 158 aa, Zea Mays
MREPGRETFPYGSGPVLLSHSASPSHPQQRRAHMDTAVFSPADLFHGVDDSDDDRDEMQICSDGEKPVALEYQERVHDFPDMKLSVREFSCHELNANLLWPGTFSFATWLVKNRSILDGRRVLELGRYGCYALTLMTWKNFLSFFSNQFSSNGHFISD

SEQ ID NO: 159884 - protein, 290 aa, Zea Mays
MKFGKDFRNHLEETLPAWRDKYLAYKALKKLIKNLVPREPAAAPPLPPPAPAAADAEGPGAPAAAHGNVNLANWFASILDAELHKLNEFYIEREEWYVIRLQVLKERIERVKAKKNDAFTSRSEFTEEMLEIRKDFVIIHGEMILLQTYSSLNFAGLVKILKKYDKRTGGVLSLPFTQRVRHQPFFTTEPLTRLVRECEANLELLFPVEAEVLEPSSSSNLEPHDVARFFHGEDGEPCSGAITSESSLSDSSTDSQIQDAGKDDKEVQSNSRDQNAAQGEQNAQGEPTDE

SEQ ID NO: 159885 - protein, 741 aa, Zea Mays
MASLTLPALALALSNPGAVRLRAAAFRCWALRRRGWAAAGALASPNSVLSEHAFKRLQLGSDDEDGEGPYGSDADEGFEAGEGDNEELAIARLGLPDELVATLEKRGITHLFPIQRAVLIPALEGRDLIARAKTGTGKTLAFGIPMIKQLIEQDDGRITRRGRTPRVLVLAPTRELAKQVEKEIKESAPKLGTVCVYGGVSYNVQQNALSRGVDVVVGTPGRIIDLINGGSLQLGEVQYLVLDEADQMLAVGFEEDVETILQQLPAGRQSMLFSATMPSWVKKLSRRYLNNPLTIDLVGDQDEKLAEGIKLYAIPLTTTSKRTVLSDLITVYAKGGKTIVFTRTKKDADEVSLALTNSIASEALHGDISQHQRERTLNGFRQGKFTVLVATDVAARGLDIPNVDLIIHYELPNDPETFVHRSGRTGRAGKAGTAILMFTSSQKRTVKSLERDVGCNFEFISPPSIEEVLESSAEHVIATLRGVHPESTKYFLGAAEKLTEELGPHALASALAHLSGFSQPPSSRSLISHEQGWVTLQLTREQGFGRGFFSPRSVTGFLSDVCSAAADEVGKIYLTADENVQGAVFDLPEEIAKDLLTMELPPGNTLTKISKLPALQDDGPATDSYGRFSNDRGSRNNRRSRGGGASRGRGGWDTDGEDRFRRGGRSLRSDNDSWSDDDWSGGGRKSNRSSSFGSRSSSYSSRGSPSFGGRSSSFGGRERSFSGACFNCGESGHRATDCPNK

SEQ ID NO: 159886 - protein, 724 aa, Zea Mays
MLGHKDVPRHLVCSDNVQHSNGQELLSTLLKNLGSVAKSLEPKELCKLLEAYQSLQNGSNAGTSGTANATEEAAGPSNSKLPFVNGSHCGHASSSVVPVQSKATIVVTPEPASCKLKDFDLNDTCNDMEGFEDGQEGSPTPAFKTADSPNCASWMQQDSTQSPPQTSGNSDSTSTQSLSSSNGDAQCRTDKIVFKLFDKVPSDLPPVLRSQILGWLSSSPTDIESHIRPGCIILTIYLRLVESAWQELSENMSLHLDKLLSSSTDNFWASGLVFVMVRRRLAFMLNGQIMLDRPLAPSSHHYCKILCVKPVAAPYSATINFRVEGSNLLSTSSRLICSFEGRCIFQEDTDSVAENDEYEDRAIECLSFCCSVPGPRGRGFIEVEDSGFSNGFFPFIIAEKDICFEVSELESIFESSSIEHADANDNAREQALEFLNELGWLLHRANRMSKENVTDTSVATFSMWRFRNLGVFAMEREWCAVIKMLLDFLFIGLVDVGSRSPEEVVLSENLLHAAVRRKSVNMVRFLLRYRPNKNSKGTAQTYLFRPDALGPSMITPLHIAAATSDAEDVLDVLTDDPGLIGISAWSNARDGTGFTPEDYARQRGNDAYLNLVQKKIDKHLGKGRVVLGVPSSICSVITDGVKPGDVSLEICMPMSASVPGCLLCSRKARVYPNSTSRTFLYRPAMLTVMGVAVVCVCVGILLHTFPRVYAAPTFRWELLERGPM

SEQ ID NO: 159887 - protein, 323 aa, Zea Mays
MSKTLIWSQENMKVSSGLKLWEGSLDLVKALNSDIKEYKLRVEGKHVLELGCGHGLRGIFAGLKWSIVNYIISCSIHRSRSKRPSDSSFCICVEWGFIRPSSLADEKRHEKGKAEFKKVVESLGHVILGWRLVPTDNSDLGESALETEPVIEQVFVTKSSRSEAEFEQQGGGGHAARRRGHAQVPGALPADGPRRPHLQSRRAADRVQLLQHVRAGAGRAHPVPAEAHVRLRHLRVRRDGEGHPKQGQPALRVLRARARQALQGEGQDPRQVQEAAARAPWRSRVRRLRVAHQIAGFQGPLRPPASFRCPGFLLGMKPLGYDV

SEQ ID NO: 159888 - protein, 315 aa, Zea Mays
MVLLRFHFHCFYLCYKAGKSAPHSLRHTFVDGSISELFEYCDLVLARSWSIVNYIISCSIHRSRSKRPSDSSFCICVEWGFIRPSSLADEKRHEKGKAEFKKVVESLGHVILGWRLVPTDNSDLGESALETEPVIEQVFVTKSSRSEAEFEQQVLSRKQKEKKQMATLRAAVGMLLGGEDMHRFPVRSPRMDRGDLICSPAARQIVSNYFSMFGPVQDVRIPYQQKHMFGFVTFVYAETVKVIPSKGNPHFVCYARVLVKPYKEKGKIPGRFRKLQHAHHGGAEFGDCASPTRLLDFRDPYALLLLSGAQVFSWA

SEQ ID NO: 159889 - protein, 151 aa, Zea Mays
MATLRAAVGMLLGGEDMHRFPVRSPRMDRGDLICSPAARQIVSNYFSMFGPVQDVRIPYQQKHMFGFVTFVYAETVKVIPSKGNPHFVCYARVLVKPYKEKGKIPGRFRKLQHAHHGGAEFGDCASPTRLLDFRDPYALLLLSGAQVFSWA

SEQ ID NO: 159890 - protein, 339 aa, Zea Mays
MFDGDPAAEPFGRLGPADVCSREHQDLALDAPRQGVVLLKNRSGGWLHPYFAATPILCSYLIRSGGRPLPAPLHLAREGKDLAAKFWQLSLCESNDTYRRLWMHVYLRSWSLISPDEVKLSQFSFSILLGETQPQVSSGLKLWEGSLDLVKALNSDIKEYKLRVEGKHVLELGCGHGLRGIFAGLKAGKSAPHSLRHTFVDGSISELFEYCDLVLARSWSIVNYIISCSIHRSRSKRPSDSSFCICVEWGFIRPSSLADEKRHEKGKAEFKKVVESLGHVILGWRLVPTDNSDLGESALETEPVIEQVFVTKSSRSEAEFEQQVLSRKQKEKKQMATLR

SEQ ID NO: 159891 - protein, 203 aa, Zea Mays
MFDGDPAAEPFGRLGPADVCSREHQDLALDAPRQGVVLLKNRSGGWLHPYFAATPILCSYLIRSGGRPLPAPLHLAREGKDLAAKFWQLSLCESNDTYRRLWMHVYLRSWSLISPDEVKLSQFSFSILLGETQPQVSSGLKLWEGSLDLVKALNSDIKEYKLRVEGKHVLELGCGHGLRGIFAGLKESGVKGILVPRHSLDVD

SEQ ID NO: 159892 - protein, 330 aa, Zea Mays
MFDGDPAAEPFGRLGPADVCSREHQDLALDAPRQGVVLLKNRSGGWLHPYFAATPILCSYLIRSGGRPLPAPLHLAREGKDLAAKFWQLSLCESNDTYRRLWMHVYLRSWSLISPDEVKLSQFSFSILLGETQPQVSSGLKLWEGSLDLVKALNSDIKEYKLRVEGKHVLELGCGHGLRGIFAGLKAGKSAPHSLRHTFVDGSISELFEYCDLVLARSWSIVNYIISCSIHRSRSKRPSDSSFCICVEWGFIRPSSLADEKRHEKGKAEFKKVVESLGHVILGWRLVPTDNSDLGESALETEPVIEQVFVTKSSRSEAEFEQQVIPYHLR

SEQ ID NO: 159893 - protein, 201 aa, Zea Mays
MFDGDPAAEPFGRLGPADVCSREHQDLALDAPRQGVVLLKNRSGGWLHPYFAATPILCSYLIRSGGRPLPAPLHLAREGKDLAAKFWQLSLCESNDTYRRLWMHVYLRSWSLISPDEVKLSQFSFSILLGETQPQVSSGLKLWEGSLDLVKALNSDIKEYKLRVEGKHVLELGCGHGLRGIFAGLKMKSVMRKAKLSLRRL

SEQ ID NO: 159894 - protein, 261 aa, Zea Mays
MAGPSGAAASSSTSRGVPENRFYNPPHVRRQQQQEQQRLRSASPSPSPSPSPRSARQKPPPPPGALASAADVDSRVDSDDSSSTTSSKPSVASTAAGNLERFLTSTTPSVTAQYLPKTSLRMRRGGDSMDSRPYFVLGDLWESFREWSAYGAGVPLVLNDSDSVIQYYVPYLSAIQLFADPSRPASRNSSESSIENDVERLRVSSLLEGTHRLENGGVRSDDGKGDASSSFPIFEYMERDPPYGREPLTDKISSSEDVQKL

SEQ ID NO: 159895 - protein, 279 aa, Zea Mays
MAGPSGAAASSSTSRGVPENRFYNPPHVRRQQQQEQQRLRSASPSPSPSPSPRSARQKPPPPPGALASAADVDSRVDSDDSSSTTSSKPSVASTAAGNLERFLTSTTPSVTAQYLPKTSLRMRRGGDSMDSRPYFVLGDLWESFREWSAYGAGVPLVLNDSDSVIQYYVPYLSAIQLFADPSRPASRNSSESSIENDVERLRVSSLLEGTHRLENGGVRSDDGKGDASSSFPIFEYMERDPPYGREPLTDKASTLAHRFPALKTFKSCDLLPSSWMSVA

SEQ ID NO: 159896 - protein, 396 aa, Zea Mays
MAGPSGAAASSSTSRGVPENRFYNPPHVRRQQQQEQQRLRSASPSPSPSPSPRSARQKPPPPPGALASAADVDSRVDSDDSSSTTSSKPSVASTAAGNLERFLTSTTPSVTAQYLPKTSLRMRRGGDSMDSRPYFVLGDLWESFREWSAYGAGVPLVLNDSDSVIQYYVPYLSAIQLFADPSRPASRNSSESSIENDVERLRVSSLLEGTHRLENGGVRSDDGKGDASSSFPIFEYMERDPPYGREPLTDKASTLAHRFPALKTFKSCDLLPSSWMSVAWYPIYRIPTGPTLKDLDACFLTFHCLATPCKDCDPPTPACPGFGGINRCTAASGKLSLPTFGLAPYKFRASIWIPDGTQEQDRVTSLMQEADSWLRRIRVDHPDFRFFVSRSSTMWR

SEQ ID NO: 159897 - protein, 789 aa, Zea Mays
MGLDSMPAASSPESNPVPLTVQPPFQPNSHEDLIGRSYVGSPLKMPGSPIDRFKMEALPPRLAKRTLSVAQYKLLSPMKNPNHISSRNAADIMEAASRIIRPGVENISSYRVHDVGNTNAARAYNPGELIGVQQRSQKLNEALRKRDGSASFRPPSGKPSDGRLRGSEGTSSSRISQANGCAPVAPKVKPGNRLDTARAMHAQEKGGMRKFGKKLETHKNPENSNAERSGLNRQKDSNQLGTSSSSVLVPNSRKQNATVTKHKVHSNPATPSRQRSNIHQINAHPRKARAANTFAGSSSQGSRKVDLQPDARANVRNNSVSKAIPKPRRLQDRRVYSDTSQSSDSINSDRSQRRIRHNIVIDEQSSFSTNKKKVSTEIVSFTFTSPVHKSLHGTHFPNHSVEKQILGNQNTVSTSSNTSNTKLDVIDGKFLGLLLEQKLRELTSGVRSPYTKPAEGAQVYHTSTALEDMASACETSSIASTDYDRESLQSFSDGKATLPYTNLATRSVQSSQPVKYDHGVTDRSELEHLGQSPLFTWEVSISTETCSSSESWRRPANGGTRLFSSTEGATTSDSTRFNKLLEADASSEYSDTASSITVATAEIARSESSSSWHMDSRQEVEFIREILNASSPARRISYLERFGNGNSSGILDPHLLEELNGGTRLLAGEEGKGHRLRRRLLFDCVNESLSVKYAHYFSAGYSLWFTGMAVLQSLSAAEMHREMTSLTVAEEWMVDELVYREMSGPMGSWVDFRTEAYQAGGDVAAELLGSLVDEAVAELLTSGGSSSSL

SEQ ID NO: 159898 - protein, 344 aa, Zea Mays
MAAMLVGALRRGSGCRGGLRLIAHSLRRFVSTLVVAEHEGGFVKPSSLSALAAAEAIAKDNKVSVLLGGSGPALHKAADHAACSHPLVSEVLVADSEALAHPLAEPWAELLRSVQQKGGYSHVIASSTSFGKNLLPRAAALLDVSPVTDVTAVKEPHVFVRPIYAGNALCTVKYTGEGPCMMSIRSTSFSPATEAMSETKVAPITQVDLSFLSEGKSTWVNLTSQDTERPDLANAPVVVTGGRGLKSAENFKLLEQLAEKLGAAVGATRAAVDAGYVPNDLQVGQTGKIVAPDLYMAFGVSGAIQHLAGMRDSKVIVAVNKDADAPIFQITDWLLICSRFWMSY

SEQ ID NO: 159899 - protein, 560 aa, Zea Mays
MLYLDVDIERLPAVHRSPPPAAIQPPVQGSSSRSQPCPLPSRREARRLGSWSEDKETRERMQQLQPKQMHWVRADSSDFGGDRPAPRSGHTAVIIGKSKVVVFGGFADKRFLADVSVYDVENKLWYTPECTGNGSDGQAGPSPRAFHIAVVIDCNMFIFGGRSGGKRLGDFWMLDTDLWQWSEMTGFGDLPSPREFAAASAIGNRKIVMYGGWDGKKWLSDVYIMDTMSLEWTELAVTGSVPPPRCGHSATMIEKRLLIFGGRGGAGPIMGDLWALKGITEEDNEAPGWTQLKLPGQSPSPRCGHSVTSGGPYLLLFGGHGTGGWLSRYDVYYNECIILDRVSVQWKRLPTSNEPPPPRAYHSITSIGSRFLLFGGFDGKNTFGDLWWLVPEDDPIAKRDLVPSIDSNSKPSTVTDDNQLLNLKESQALENPITELAKRLGIALSEEVSASFVDEANDKELVELSSRLAGQSLPASDQVASIQVLRDHWKSSPASSLQLQELGPLLRDYQRLILRHYTGNSLPAFREMEALRFFHLKSASQLRMDDIPVLLSEYGRLLST

SEQ ID NO: 159900 - protein, 153 aa, Zea Mays
MEALRAWRASSNLIGFAASRAAASASRPLGLRIRCCSAAAATTNPPAQPQDRRRRSASSSASTSDRDSIRAIRLKKVDELRGKGYEPYAYRWDRTHTTKALQEQYTHLMNGEVCEDVSVSVAGRIVARRAFGKLVFMTVRDDAGTVQGSYLFM

SEQ ID NO: 159901 - protein, 286 aa, Zea Mays
MLVGGLEKVYEIGRIFRNEGISTRHNPEFTTIEMYEAYSDYESMMNMAEEIVTRCAMATHGKLKVDYEGTEISLERPWRRETMHSLVKEATGIDFNSFGQDVESAKRAVRGLPGFVVGNSESTSLQACSSVGHVLNEVFETFVESTLVQPTFVLDYPVEISPLAKPHRSHVGLTERFELFICGREIGNAFSELTDPIDQRSRFENQIKQHNAKRAAMAKEVKSTEGEGDDDYSYEVSLDEDFLTSLEYGMPPASGMGLGIDRLVMLLTNSSSIRDVIAFPVLKIQQ

SEQ ID NO: 159902 - protein, 188 aa, Zea Mays
MEALRAWRASSNLIGFAASRAAASASRPLGLRIRCCSAAAATTNPPAQPQDRRRRSASSSASTSDRDSIRAIRLKKVDELRGKGYEPYAYRWDRTHTTKALQEQYTHLMNGEVCEDVSVSVAGRIVARRAFGKLVFMTVRDDAGTVQLYCEKDSLTEDQFEQLKAFIDIGDILGASGSIKKTEKGMLT

SEQ ID NO: 159903 - protein, 225 aa, Zea Mays
MESFGFIEVETPVLQGAAGGAEARPFITYHNSLQRDLYLRIATELHLKRMLVGGLEKVYEIGRIFRNEGISTRHNPEFTTIEMYEAYSDYESMMNMAEEIVTRCAMATHGKLKVDYEGTEISLERPWRRETMHSLVKEATGIDFNSFGQDVESAKRAVRGLPGFVVGNSESTSLQACSSVGHVLNEVFETFVESTLVQPTFVLDYPVEISPLAKPHRREAVLKIK

SEQ ID NO: 159904 - protein, 1034 aa, Zea Mays
MEASAGLVAGSHNRNELVVIRRDGEPGPKPMDQRNGQVCQICGDDVGRNPDGEPFVACNECAFPICRDCYEYERREGTQNCPQCKTRFKRLKGCARVPGDEEEDGVDDLENEFNWSDKHDSQYLAESMLHAHMSYGRGADLDGVPQPFHPIPNVPLLTNGQMVDDIPPDQHALVPSFVGGGGKRIHPLPYADPNLPVQPRSMDPSKDLAAYGYGSVAWKERMESWKQKQERMHQTRNDGGGDDGDDADLPLMDEARQPLSRKIPLPSSQINPYRMIIIIRLVVLCFFFHYRVMHPVPDAFALWLISVICEIWFAMSWILDQFPKWFPIERETYLDRLSLRFDKEGHPSQLAPVDFFVSTVDPLKEPPLVTANTVLSILSVDYPVDKVSCYVSDDGAAMLTFEALSETSEFAKKWVPFCKRYSLEPRAPEWYFQQKIDYLKDKVAPNFVRERRAMKREYEEFKVRINALVAKAQKVPEEGWTMQDGTPWPGNNVRDHPGMIQVFLGQSGGHDVEGNELPRLVYVSREKRPGYNHHKKAGAMNALVRVSAVLTNAPYLLNLDCDHYINNSKAIKEAMCFMMDPLLGNKVCYVQFPQRFDGIDRHDRYANRNVVFFDINMKGLDGIQGPIYVGTGCVFRRQALYGYDAPKTKKPPSRTCNCWPKWCICCCCFGNRKTKKKTKTSKPKFEKIKKLFKKKENQAPAYALGEIDEAAPGAENEKASIVNQQKLEKKFGQSSVFVASTLLENGGTLKSASPASLLKEAIHVISCGYEDKTGWGKDIGWIYGSVTEDILTGFKMHCHGWRSIYCIPKRAAFKGSAPLNLSDRLHQVLRWALGSIEIFFSNHCPLWYGYGGGLKFLERFSYINSIVYPWTSIPLLAYCTLPAICLLTGKFITPEGLLKVIAGVDTSFTVTSKGGDDEEFSELYTFKWTTLLIPPTTLLLLNFIGVVAGISNAINNGYESWGPLFGKLFFAFWVIVHLYPFLKGLVGRQNRTPTIVIVWSILLASIFSLLWVRIDPFLAKDDGPLLEECGLDCN

SEQ ID NO: 159905 - protein, 290 aa, Zea Mays
MTVGFLLLSSRYGKSSVKCRPRLSRLASALLTTSLAQQKRLRISQTSTPFSRPVERTMPTYSHITYCSSILACLVCPTMSDSAPSPSADRGSVSRAHLAASDGRGELSRSGEILRPWIRRKKQTAVTTRITGLKLTRILKFRISMDYNTTIPIALFGIPIFRSPNVRDITVPKSSSSSACAAALLPTGSRAAASSPPASLHSPPPVRLYRRWPPLGRQPRLACFYCCAPPQSPRWSYEPRDPRRCGTGARRRQRAHPPHALGGATNPTVLNIAAKNATLLAALLYLGDLA

SEQ ID NO: 159906 - protein, 272 aa, Zea Mays
MGGFDATSNVAAGRLFGIPIRGTHSHAFVSSFMGLDEITDKTLTSSDGSNTCEDFISLVQNWLIRIQDSSSLHGTFGETSQSELAAFTSYALAFPNSFLALVDTYDVMRSGVPNFCAVALALNDMGYKAVGIRLDSGDLAYLSVEARKFFHAVEKEFVVVGFGKTSITASNDLNEETIDALNKQGHEVDAFGIGTYLVTCYAQAALGCVFKLVEINKQPRIKLSEDVMKVSIPCKKKCYRLYGKEGYPLVDIMTGEDEPGPKMVGFMIYHSF

SEQ ID NO: 159907 - protein, 387 aa, Zea Mays
MPACEDDFFEYLRSIDCSDVEVYAIPEGYAVFPKVPLMRIEGPVAFSHTSRLCCLPQVVQLLETPFLSLVNYASLVTTNAARHRLVAGKSKNLLEFGLRRAQGPDGGISASRYCYMGGFDATSNVAAGRLFGIPIRGTHSHAFVSSFMGLDEITDKTLTSSDGSNTCEDFISLVQNWLIRIQDSSSLHGTFGETSQSELAAFTSYALAFPNSFLALVDTYDVMRSGVPNFCAVALALNDMGYKAVGIRLDSGDLAYLSVEARKFFHAVEKEFVVVGFGKTSITASNDLNEETIDALNKQGHEVDAFGIGTYLVTCYAQAALGCVFKLVEINKQPRIKLSEDVMKVSIPCKKKCYRLYGKEGYPLVDIMTGEDEPGPKMVGFMIYHSF

SEQ ID NO: 159908 - protein, 210 aa, Zea Mays
MPACEDDFFEYLRSIDCSDVEVYAIPEGYAVFPKVPLMRIEGPVAVVQLLETPFLSLVNYASLVTTNAARHRLVAGKSKNLLEFGLRRAQGPDGGISASRYCYMGGFDATSNVAAGRLFGIPIRGTHSHAFVSSFMGLDEITDKTLTSSDGSNTCEDFISLVQNWLIRIQDSSSLHGTFGETSQSELAAFTSYALAFPNSFLALVDTYDV

SEQ ID NO: 159909 - protein, 275 aa, Zea Mays
MAAANGDACRSVGGVPRPTNPMVTPLLTDLYQFTMAYAYWKAGKHLDRAVFDLYFRKNPFGGEFTIFGGLEECIRFIANFKFTEEEIKFLRSVMPACEDDFFEYLRSIDCSDVEVYAIPEGYAVFPKVPLMRIEGPVAVVQLLETPFLSLVNYASLVTTNAARHRLVAGKSKNLLEFGLRRAQGPDGGISASRYCYMGGFDATSNVAAGRLFGIPIRGTHSHAFVSSFMGLDEITDKTLTSSDGSNTCEDFISLVQNWLIRIQFIAWHLWRNEPK

SEQ ID NO: 159910 - protein, 269 aa, Zea Mays
MAPLEKRAKVSWLHSRHMHWHFQIPSWPWLTHMMYKAVGIRLDSGDLAYLSVEARKFFHAVEKEFVVVGFGKTSITASNDLNEETIDALNKQGHEVDAFGIGTYLVTCYAQAALGCVFKLVEINKQPRIKLSEDVMKVSIPCKKKCYRLYGKEGYPLVDIMTGEDEPGPKIGERLLCRHPFNESKRAYVVPQHVEELLKCYWPGNSSNSREELPSIHEIRTRCIHHLDRMRPDHMRRLNPTPYKVSVSAKLYDFIHFLWLNEAPVGELQ

SEQ ID NO: 159911 - protein, 303 aa, Zea Mays
MAAANGDACRSVGGVPRPTNPMVTPLLTDLYQFTMAYAYWKAGKHLDRAVFDLYFRKNPFGGEFTIFGGLEECIRFIANFKFTEEEIKFLRSVMPACEDDFFEYLRSIDCSDVEVYAIPEGYAVFPKVPLMRIEGPVAVVQLLETPFLSLVNYASLVTTNAARHRLVAGKSKNLLEFGLRRAQGPDGGISASRYCYMGGFDATSNVAAGRLFGIPIRGTHSHAFVSSFMGLDEITDKTLTSSDGSNTCEDFISLVQNWLIRIQDSSSLHGTFGETSQSELAAFTSYALAFPNSFLALVDTYDV

SEQ ID NO: 159912 - protein, 459 aa, Zea Mays
MPACEDDFFEYLRSIDCSDVEVYAIPEGYAVFPKVPLMRIEGPVAVVQLLETPFLSLVNYASLVTTNAARHRLVAGKSKNLLEFGLRRAQGPDGGISASRYCYMGGFDATSNVAAGRLFGIPIRGTHSHAFVSSFMGLDEITDKTLTSSDGSNTCEDFISLVQNWLIRIQDSSSLHGTFGETSQSELAAFTSYALAFPNSFLALVDTYDVMRSGVPNFCAVALALNDMGYKAVGIRLDSGDLAYLSVEARKFFHAVEKEFVVVGFGKTSITASNDLNEETIDALNKQGHEVDAFGIGTYLVTCYAQAALGCVFKLVEINKQPRIKLSEDVMKVSIPCKKKCYRLYGKEGYPLVDIMTGEDEPGPKIGERLLCRHPFNESKRAYVVPQHVEELLKCYWPGNSSNSREELPSIHEIRTRCIHHLDRMRPDHMRRLNPTPYKGRIPNLTLISCSAYGCRRSK

SEQ ID NO: 159913 - protein, 554 aa, Zea Mays
MAAANGDACRSVGGVPRPTNPMVTPLLTDLYQFTMAYAYWKAGKHLDRAVFDLYFRKNPFGGEFTIFGGLEECIRFIANFKFTEEEIKFLRSVMPACEDDFFEYLRSIDCSDVEVYAIPEGYAVFPKVPLMRIEGPVALLETPFLSLVNYASLVTTNAARHRLVAGKSKNLLEFGLRRAQGPDGGISASRYCYMGGFDATSNVAAGRLFGIPIRGTHSHAFVSSFMGLDEITDKTLTSSDGSNTCEDFISLVQNWLIRIQDSSSLHGTFGETSQSELAAFTSYALAFPNSFLALVDTYDVMRSGVPNFCAVALALNDMGYKAVGIRLDSGDLAYLSVEARKFFHAVEKEFVVVGFGKTSITASNDLNEETIDALNKQGHEVDAFGIGTYLVTCYAQAALGCVFKLVEINKQPRIKLSEDVMKVSIPCKKKCYRLYGKEGYPLVDIMTGEDEPGPKIGERLLCRHPFNESKRAYVVPQHVEELLKCYWPGNSSNSREELPSIHEIRTRCIHHLDRMRPDHMRRLNPTPYKVSVSAKLYDFIHFLWLNEAPVGELQ

SEQ ID NO: 159914 - protein, 361 aa, Zea Mays
MGGFDATSNVAAGRLFGIPIRGTHSHAFVSSFMGLDEITDKTLTSSDGSNTCEDFISLVQNWLIRIQDSSSLHGTFGETSQSELAAFTSYALAFPNSFLALVDTYDVMRSGVPNFCAVALALNDMGYKAVGIRLDSGDLAYLSVEARKFFHAVEKEFVVVGFGKTSITASNDLNEETIDALNKQGHEVDAFGIGTYLVTCYAQAALGCVFKLVEINKQPRIKLSEDVMKVSIPCKKKCYRLYGKEGYPLVDIMTGEDEPGPKIGERLLCRHPFNESKRAYVVPQHVEELLKCYWPGNSSNSREELPSIHEIRTRCIHHLDRMRPDHMRRLNPTPYKVSVSAKLYDFIHFLWLNEAPVGELQ

SEQ ID NO: 159915 - protein, 693 aa, Zea Mays
MKALASPAASFLPGIPSPSHLARALPRSAAAALSRPPSGRSIAAAAAAATGDHWGADHQHYHGGRAGASEAGPTASARGVKCDVDVVSWRERRVLASVPVAADVDTLWQVITDYERLADFIPNLVQSVTIPCPHEGRIWLEQRGLQRALYWHIEARVVLDLQEIPDSDKWDGRSSSAVLLYEVNVIPRFNFPAIFLERIIRSDLPVNLRALACRAEKIYLENQGCGSRKFFVEDLKPSYTSQLNNFHSTTVETSKFKQAPPRSGVSSVLPSPSSELISKWGVYGNICRIDKPCVVDEIHLRRFDGMLEHEGAHRCVFASITVKAPVREVWNVLTAYENLPEFVPNLAISRIVLRDNNKVRIMQEGCKGLLYMVLHARVVMDLREKHEQEISFEQVEGDFYTFKGKWRLEQLGDQHTLLKYMVETKMHRDTFLSESILEEVIYEDLPSNLCAIRDYIEKAGAKSSNSTGHSNVPTDPDPDVDHDESRQSEQTCVSCSSSTMKQRPKVPGLQKDIEVLKSELDNFIAEYGQYGFMPKRKHLRSHGRVDIEKAITRMGGFRKIASIMNLSLSYKNRKPRGYWDNLENLQEEISRFQKIWGLDPSYMPSRKSFERAGRYDIARALEKWGGVQEVSRLLSLELRYPRRQADPDDERQSESPSGMMKKHGVKPDEGNVSPNAQKWLLKLKDLDVNWVEY

SEQ ID NO: 159916 - protein, 628 aa, Zea Mays
MKALASPAASFLPGIPSPSHLARALPRSAAAALSRPPSGRSIAAAAAAATGDHWGADHQHYHGGRAGASEAGPTASARGVKCDVDVVSWRERRVLASVPVAADVDTLWQVITDYERLADFIPNLVQSVTIPCPHEGRIWLEQRGLQRALYWHIEARVVLDLQEIPDSDKWDGRSSSAVLLYEVNVIPRFNFPAIFLERIIRSDLPVNLRALACRAEKIYLENQGCGSRKFFVEDLKPSYTSQLNNFHSTTVETSKFKQAPPRSGVSSVLPSPSSELISKWGVYGNICRIDKPCVVDEIHLRRFDGMLEHEGAHRCVFASITVKAPVREVWNVLTAYENLPEFVPNLAISRIVLRDNNKVRIMQEGCKGLLYMVLHARVVMDLREKHEQEISFEQVEGDFYTFKGKWRLEQLGDQHTLLKYMVETKMHRDTFLSESILEELNALIKFNVFRDSKADCSFFMNLLQVIYEDLPSNLCAIRDYIEKAGAKSSNSTGHSNVPTDPDPDVDHDESRQSEQTCVSCSSSTMKQRPKVPGLQKDIEVLKSELDNFIAEYGQYGFMPKRKHLRSHGRVDIEKAITRMGGFRKIASIMNLSLSYKNRKPRGYWDNLENLQEEPVPENLGVGSFLYAQ

SEQ ID NO: 159917 - protein, 97 aa, Zea Mays
MLTAQPPPEVAGEDDSSFHHVFVEFMTKAAQFEELAESGERLLGRFREELEYFRRPQIPKESDVMNQILKSNCTVRMRSYVEAGCRLHYQNISNINQ

SEQ ID NO: 159918 - protein, 116 aa, Zea Mays
MLTAQPPPEVAGEDDSSFHHVFVEFMTKAAQFEELAESGERLLGRFREELEYFRRPQIPKESDVMNQILKSNCTVRMRSYVEAGCRLHYQNISNINQCELYSFGSEQPFLFLHANG

SEQ ID NO: 159919 - protein, 138 aa, Zea Mays
MATYDHAATPTPQSPGVGGVPFSSCIGDLLRFVLSSHAAAYPGDDTVAFPLSPSYCARLLNDGELFEKLEACIQQCLEEGRLPGPPAVVGIPAEEEGPEERGWKLLLPEKGAELKRMYDAVEFELHVQEPYFTQLRGT

SEQ ID NO: 159920 - protein, 301 aa, Zea Mays
MATYDHAATPTPQSPGVGGVPFSSCIGDLLRFVLSSHAAAYPGDDTVAFPLSPSYCARLLNDGELFEKLEACIQQCLEEGRLPGPPAVVGIPAEEEGPEERGWKLLLPEKGAELKRMYDAVEFELHVQEPYFTQLRAGVKKVEGRLATGNYNRITQGSLLLFNKCLLLNVEAVRKYNSFSEMLKGEKISNVLPGISSIVEGVKVYRKFYAEEKENSYGVLAISVSKPTSQPYITMNNILAGLGYDGLGRLLGMAKTTGTVPDGLPPPRSALLSSCMGLVQPNFIGFLEPYTPEGYAKGWKH

SEQ ID NO: 159921 - protein, 384 aa, Zea Mays
MATYDHAATPTPQSPGVGGVPFSSCIGDLLRFVLSSHAAAYPGDDTVAFPLSPSYCARLLNDGELFEKLEACIQQCLEEGRLPGPPAVVGIPAEEEGPEERGWKLLLPEKGAELKRMYDAVEFELHVQEPYFTQLRAGVKKVEGRLATGNYNRITQGSLLLFNKCLLLNVEAVRKYNSFSEMLKGEKISNVLPGISSIVEGVKVYRKFYAEEKENSYGVLAISVSKPTSQPYITMNNILAGLGYDGLGRLLGMAKTTGTVPDGLPPPRSALLSSCMGLVQPNVKGCSLTDGARALAKHVHRSRKGWWGSFNGSDSSKNQAASETIESLLRVCCWMNVHLTQPYGPVFEIRVHEGYGARWSQDGSKFIGFLEPYTPEGYAKGWKH

SEQ ID NO: 159922 - protein, 102 aa, Zea Mays
MMDWVDSLVWRKQLELFQMDYLLQDLHCCHLVWDWFNQMSRKGWWGSFNGSGKDKVHLDTPESRVRDFCRDLFHCCVACLQIQARTKLHLKPLSLCCVCVVG

SEQ ID NO: 159923 - protein, 146 aa, Zea Mays
MRSFSCAAIGTRRRGNTVLHHAPCASSSFNQGGAWKRMWPQSRPQSRYRGGNWTCGWPRSSGCSFPRAGPRCLPRPWTSSTPSASACCHCVCPYISLCLLQIVPSVLFVYSLLRIVLTTATERHFSQSRVSIFDYLLKAIFPFRLM

SEQ ID NO: 159924 - protein, 141 aa, Zea Mays
MRSFSCAAIGTRRRGNTVLHHAPCASSSFNQGGAWKRMWPQSRPQSRYRGGNWTCGWPRSSGCSFPRAGPRCLPRPWTSSTPSASACCHCVCPYISLCLLQIVPSVLFVYSLLRIVLTTATERKILGAVPNSSHINEMDSD

SEQ ID NO: 159925 - protein, 96 aa, Zea Mays
MRELLLQPGRRMEKDVATVEAAVAVPGRQLDVRVATLVRMLISKGRAAMLAEALDEFDAICIRLLPLRRYSERCQIHHTSMRWTQTDSLLMLFHLR

SEQ ID NO: 159926 - protein, 89 aa, Zea Mays
MCHIQKGDKHGTSLREDVNIEEEPTIKEDHILNVSHIDGHKNLLISPGDKYATFPHEDVNIVEEPTIIKPFYSLWLKMICLLVLSYMMT

SEQ ID NO: 159927 - protein, 203 aa, Zea Mays
MFDEEIGNTTQGGKFDHADRLFQSIENAYINSLSNTSDVKELIPEFFYMPEFLENSNSYHLGVKQDGEPIGDVALPPWAKDDNSSDEFDKDSIESDDRSLEELSWETLELLVVPHIFSIRRSTWRSTFTSSVSVSPTVMFAFSASRPLRSLPTFSPRGCRRVYSLSFDLVSTSVQDRIETVGGVRLLLRVRPGPSCIYLITPM

SEQ ID NO: 159928 - protein, 118 aa, Zea Mays
MFDEEIGNTTQGGKFDHADRLFQSIENAYINSLSNTSDVKELIPEFFYMPEFLENSNSYHLGVKQDGEPIGDVALPPWAKDDNSSDEFDKDSIESDDRSLEELSWETLELLVVPHIFR

SEQ ID NO: 159929 - protein, 128 aa, Zea Mays
MFDEEIGNTTQGGKFDHADRLFQSIENAYINSLSNTSDVKELIPEFFYMPEFLENSNSYHLGVKQDGEPIGDVALPPWAKDDNSSDEFDKDSIESDDRSLEELSWETLELLVVPHIFRYPSSVLPINC

SEQ ID NO: 159930 - protein, 256 aa, Zea Mays
MARALLLLRVAVARYPPLPASPALLQPQPLLRCHAPSQYKSQLRFLSSLSSSVPNSSDAPSDGGGDRDGEEDGAKSGSHVDYLGMSDEELMEQCDMGTFKASGPGGQHCNKRESAVRLKHLPIGIIAQAVEDRSQHKNRASALSRLRTLIALKVRRPINLEDYTPPVELLQILPLKSSVRGNDVGPQIGPNNSKFSPGMQALLDLLFAVEDSVSDAAKILGLSTGALSRLILSDDSLRTAANELRASKRSELNSVL

SEQ ID NO: 159931 - protein, 324 aa, Zea Mays
MARALLLLRVAVARYPPLPASPALLQPQPLLRCHAPSQYKSQLRFLSSLSSSVPNSSDAPSDGGGDRDGEEDGAKSGSHVDYLGMSDEELMEQCDMGTFKASGPGGQHCNKRESAVRLKHLPIGIIAQAVEDRSQHKNRASALSRLRTLIALKVRRPINLEDYTPPVELLQILPLKSSVRGNDVGPQIGPNNSKFSPGMQALLDLLFAVEDSVSDAAKILGLSTGALSRLILSDDSLRTAANELRASKCFFDCRAPVLYYVLLTLQDSVHKVFYAVVEAAAVRADNSHLGGLARYPVSATLPQIGSRLFLTWGVFWSFPELYTD

SEQ ID NO: 159932 - protein, 340 aa, Zea Mays
MARALLLLRVAVARYPPLPASPALLQPQPLLRCHAPSQYKSQLRFLSSLSSSVPNSSDAPSDGGGDRDGEEDGAKSGSHVDYLGMSDEELMEQCDMGTFKASGPGGQHCNKRESAVRLKHLPIGIIAQAVEDRSQHKNRASALSRLRTLIALKVRRPINLEDYTPPVELLQILPLKSSVRGNDVGPQIGPNNSKFSPGMQALLDLLFAVEDSVSDAAKILGLSTGALSRLILSDDSLRTAANELRASKCFFDCRAPVLYYVLLTLQDSVHKVFYAVVEAAAVRADNSHLGGLARYPVSATLPQIGSRLFLTWGVFWSFPEVSPLANFRVFIYDTIFRNTS

SEQ ID NO: 159933 - protein, 497 aa, Zea Mays
MARALLLLRVAVARYPPLPASPALLQPQPLLRCHAPSQYKSQLRFLSSLSSSVPNSSDAPSDGGGDRDGEEDGAKSGSHVDYLGMSDEELMEQCDMGTFKASGPGGQHCNKRESAVRLKHLPIGIIAQAVEDRSQHKNRASALSRLRTLIALKVRRPINLEDYTPPVELLQILPLKSSVRGNDVGPQIGPNNSKFSPGMQALLDLLFAVEDSVSDAAKILGLSTGALSRLILSDDSLRTAANELRASKCFFDCRAPVLYYVLLTLQDSVHKVFYAVVEAAAVRADNSHLGGLARYPVSATLPQIGSRLFLTWGVFWSFPEMAPFTSTNRYLIPILYVSVELVKALQAHIINWDIHMFDEEIGNTTQVHTSNLNEPMRTLAGFIQFCLIKPGGKFDHADRLFQSIENAYINSLSNTSDVKELIPEFFYMPEFLENSNSYHLGVKQDGEPIGDVALPPWAKDDNSSDEFDKDSIESDDRSLEELSWETLELLVVPHIFR

SEQ ID NO: 159934 - protein, 120 aa, Zea Mays
MGGKFDHADRLFQSIENAYINSLSNTSDVKELIPEFFYMPEFLENSNSYHLGVKQDGEPIGDVALPPWAKDDNSSDEFDKDSIESDDRSLEELSWETLELLVVPHIFRCRYPSSVLPINC

SEQ ID NO: 159935 - protein, 65 aa, Zea Mays
MFAFSASRPLRSLPTFSPRGCRRVYSLSFDLVSTSVQDRIETVGGVRLLLRVRPGPSCIYLITPM

SEQ ID NO: 159936 - protein, 836 aa, Zea Mays
MMEVGLNPGEELDFGDNQEDDDDAGDISPASKELAAMVAAAAAAETVELDDGGAGVEAAASAAAAASSSSAAARYGDDRTPRDGMVFKSYEEVLNFYKRYALRTGFGVCVKKSSFTKAGLCRRLVLVCNKWGNGKEDACYQARPTAKTNCQATVVARLLGDDLLHLTDVNLEHNHALNPSAARFLRCYKTLPSGLSKDLVVRAARGECSVAGDIDVPIFDEWGRLKTGQADVLAINAFFTQMQAKLPNSFYVMDFYVEGHLRSVLWADSRSRAAYQYFSDAVWIDTACLRNKYHVPLVSFLGVNHHGQLVLLGCGLLSDESTESFLWLFKSWLTCMKGQPPNAIVTDECVAIKAAVREVFPKTRHRISDWHVVRSISEKIGDLPEYEAMRTNLVTVIYDSLNDNEFEARWKNWIDRFSLQDNEWITFLYENRHLWAPAFLRDTFSAGLCTVSQRESPSTFFEDAVSSETTLVTFLASYMTLLDNKYKMEQQDDFDSLNSSRLLISKYQMEEQLSRLYTLNMFMKFQDELKATMHCQVQLDGSASSFIVIDLTEAGSEMLNKKYEVVHCMATNRMECNCGLFQFHGIVCRHALSVLKWQQVYDIPPCYVLNRWRADFKQLHYLDNPSKDLATSNHVERYDYISLQFLRLVEIGMVSDEKYRHAVRLLKDMKETLLDDNLCRDLEQKLTPAERAIVNGDNHTQPGSSEGGAAKKRRGRPPKKNKEINMDSMDPLLVSSDVTQKDTFHSASTTSNLGTHVRTHGIVDLMEEVNPSELSFDSRYGVQSGHSHHFGNNQLNTGNTLRFGQSTSAAEQSRVQWVFHNGMYQDDQVTYGRRTS

SEQ ID NO: 159937 - protein, 656 aa, Zea Mays
MTVSYRPQEFVRVIPPLIGSWISRGPSMMEVGLNPGEELDFGDNQEDDDDAGDISPASKELAAMVAAAAAAETVELDDGGAGVEAAASAAAAASSSSAAARYGDDRTPRDGMVFKSYEEVLNFYKRYALRTGFGVCVKKSSFTKAGLCRRLVLVCNKWGNGKEDACYQARPTAKTNCQATVVARLLGDDLLHLTDVNLEHNHALNPSAARFLRCYKTLPSGLSKDLVVRAARGECSVAGDIDVPIFDEWGRLKTGQADVLAINAFFTQMQAKLPNSFYVMDFYVEGHLRSVLWADSRSRAAYQYFSDAVWIDTACLRNKYHVPLVSFLGVNHHGQLVLLGCGLLSDESTESFLWLFKSWLTCMKGQPPNAIVTDECVAIKAAVREVFPKTRHRISDWHVVRSISEKIGDLPEYEAMRTNLVTVIYDSLNDNEFEARWKNWIDRFSLQDNEWITFLYENRHLWAPAFLRDTFSAGLCTVSQRESPSTFFEDAVSSETTLVTFLASYMTLLDNKYKMEQQDDFDSLNSSRLLISKYQMEEQLSRLYTLNMFMKFQDELKATMHCQVQLDGSASSFIVIDLTEAGSEMLNKKYEVVHCMATNRMECNCGLFQFHGIVCRHALSVLKWQQVYDIPPCYVLNSFFVSSRLGWYPTRSIGMQ

SEQ ID NO: 159938 - protein, 342 aa, Zea Mays
MADMRRAQHRPHRKVRRRLRPPARALRAGGVAGKRKKAATSGKPKRPPSAFFVFISWSGLPLATLREKLPRFLQKCASSLTPSAHGSVASRSLEMAGEEERKQVLLSYVVPTVSSWNTTTSSTTGSGSRMGHKRSRSVWARSAEEEDCRPNRVYLWFVVVFTSRVYTTILQDLGTDFLINGQMAKREATVVDRTRSPWRNHLSNGEWKRMDPVCPRKPEKGPGTVKKKVLVRPCPPRILQTKKPGVEQSPEKLLITNCRAANRVRKRVSTCAASWDSEKSPYETLGKGFRSEMVAAAAAHRASFPLRLQQILAGSCTVSPVVKVESEPILWGPRSRRRSTGR

SEQ ID NO: 159939 - protein, 661 aa, Zea Mays
MASRLSGYMDKLVSRNQTAFIKGRFIQDNFMLVQQTARLLHAQKQPRILLKLDISKAFDSVSWSFLLEVLEKVGFGPIWRDVISGLLMTSSTQILLNGVPGEFIQHLRGLRQGDSLSPLLFIIVMDVLNGLIVKAADEGLLQPLSTRSIQHRISLYADDVVIFLRPAASDLHLVTRILELFGDASGLKTNVQKSSVAPIHCSPVDMEMVTQIFPCKVETLPLKYLGLPLSLRKLSKEQLQPLIDRLADLLPNWKADLMTRAGRAIQVQHVLTATVIYHAMALDLPKWAIKAIDKIRRCFLWKGRKDVLSGHCLVAWGKVTRPKELGGLGISDLQKLNWALRVRWLWLERTYPSKSWADLPLQSSSTLKSILSTALITEIGDGRNTLFWRDRWLMGLRIEDLTPHIFTLVPTRITNRRTVAEGIVEMAWIRDLRGTITWDVLSDFLTLSEAIADYSINVGVPDKHIWKFSPTGQYSSKSAYDMLFLGSTSLGAYECIWESWAPSKCSFFLWLVMHNRCWTADRLARRVLPHPSVCPLCDQEEETIQHLLISCVFERQLWYSLLSRSGLPNLSPDNANCSLDDWWSRAVEKIPRDLQSGFNSLVILGAWSLWRHRNDCVFNGRSPSLASALTLAGDELRMWCSAGAKGLNLLSTLMFMLDPGG

SEQ ID NO: 159940 - protein, 319 aa, Zea Mays
MVQILQGLAYMHNNGYFHRDLKPENLLVTNGIIKIADFGLAREISSNPPYTDYVSTRWYRAPEVLLQSSVYTPAIDMWAVGAILAELFTLSPLFPGESETDQLYKICTVLGTPDCTIWPEGMNLPRSCSFKFFQNPPRNLWELIPNASSEAIDLIQQLCSWDPRRRPTAEQALQHPFFNVCNWVPRPVHDAYHTKTNGPKAEPRLELNLWDFSTEPDDCVLDLTLSLKPSFSGTDLGKHVPRRTEEEILLYPGFENTPVKSGFWPLVPSDRPVGDVPAIPSWQQAYMVDSQGAFSGSPFLQSNLLENRSLAPIRQVNFF

SEQ ID NO: 159941 - protein, 640 aa, Zea Mays
MSRCFPFPPPRYEKTVRPDAQLASQQQQLDKEKHKEKKHKKDKKDKDRKEGKEKKDKDRSRDKHKDKKDRKEKHKDEKKDKSKDKNRESGEGIQRNDEALHGQKVGESSRGSEEIKDLKFREELVRGVQDEKGAASQTIENYAVSNDRNRKGFIASPAMETERSAHNKVHIQSGNASRKTEGFIQQSINANRQKNGTSVQHSESFTTSARRTAGGFPPAPTTEDKFKAARLSSSNEAAPRKEGVGQRISNISISLQKRTENTNKDVAKKEVGTSSPLPPNPANAMHKGNGKVGRPMDNTQGSMQRFGSPSTSSATWGMDRGAPRSSIPSPSITIRRPNGMVRPAENLSVSAKKPDAGGLSPAMGKEKEQGGRLLQANISTDQKLAAESRSASAKKPDAGGLSPAMGKEKEQGGRLLQANISTDQKLAAESRSVSAKKPDAGGLSPAMGKEKEQGGRLLQGNISTDQKLGAENRSVSAKKPDAGGLSPAMGKEKEQGGRLLQANISTDQKLVMSKPPAVEKAADGRAERMEKVRDGAPDIAKKEDKKSDRHEKKKRKEKDKHKEKKKEKEAKKEKREHNHKEHNKTRENSISYPIDSLNLKHSVPPLAPPVDDGKSVVPDENLKKRKNHETNGYLQRSHKY

SEQ ID NO: 159942 - protein, 64 aa, Zea Mays
MEPLSCTPAEPCHRPSRDFRHASPPCEIAAPGRECAVCPSRQLLSPSPTCRIVPTTATSRARPG

SEQ ID NO: 159943 - protein, 83 aa, Zea Mays
MNQGGSEVYGCRNTTMSLYIISTYGDLSLSQALDDFVSLQSQGRIAILSRAVHCAQSTSLNRSNNVLNNSIGQSCNRKAQEAD

SEQ ID NO: 159944 - protein, 83 aa, Zea Mays
MSLYIISAYGDLSLSQALDEFNNDPLHWHQQTKVAMVRGLLRDHSLHCKAYSHKKAVNWASAREAHDLHDAPSPEIKGTSILF

SEQ ID NO: 159945 - protein, 610 aa, Zea Mays
MQDIQCITPETSSGVNRFSTWQNPIYSLHDQRRCTSLIPQLGSHQQPSPLNQHLVAMAAQVVAAGDGGSWPQQWRLTLVLAALVPLLSLCLLLARTTRRARASSWSSSSKGRRLDVHRLPPGPPRLPLLGNLHQLGSLPHRSLRELARRHGPVMLLRLGSVPTLVVSSADAAREVMKARDADCCSRPDTPGARRLSYGHKDVAFAPYTDYWRQMRKLFVVELLSARRVRAADHAREAEVDKLIARLSSAGGKPVQLEDHMFALMDGVIGTVAFGNIYGAEQFAHRNHFHDVLDEALSAKAGFSAEDYYPNAAGRLVDRLTGAAARRERVFRDLDAFFDTIIDQHLVDPSSSLSSATTTPDLIDVFVDLMEESRRQPQVHGSLRFTRDHIKGLLSNVFTAGVDTSSVTMVWAMAELIRRPAMLRKAQEEVRSVVGGDRERVHPDDVPKLRYLKAVVKETLRLHPAAPLLLPRETMRHVSVCGYDVPAKTRVLVNAWAIGRDPRSWGPRPEEFDPARFEDGGDVGFNGTHFELIPFGAGRRMCPGIAMGVATMEFTLANLLYCFDWELPEGVGVEDVSMEEAGSLTVHKKTPLLLVPTRYKANCQSRHSFQF

SEQ ID NO: 159946 - protein, 280 aa, Zea Mays
MAAALRFPGVARESLSLDAPVAASKLGRERRPAPASANPGPQCWRRRRGLAVRCQTGSTAPPVLRTEEAPAAAAGARNAQAGFTVVMKFGGSSLASAERMREVAGLILSFPDETPVVVLSAMGKTTNNLLLAGEKAVSCGAPKASEIPELAVIKDLHLRTVDELGLDRSIVSGLLDELEQLLKGVAMMKELTLRTRDYLVSFGECMSTRIFAAYLNKLGKKARQYDAFDIGFITTDDFTNADILEATYPAVAKRLHEDWMDDPAIPIVTGFLGKAGVVVT

SEQ ID NO: 159947 - protein, 529 aa, Zea Mays
MAAALRFPGVARESLSLDAPVAASKLGRERRPAPASANPGPQCWRRRRGLAVRCQTGSTAPPVLRTEEAPAAAAGARNAQAGFTVVMKFGGSSLASAERMREVAGLILSFPDETPVVVLSAMGKTTNNLLLAGEKAVSCGAPKASEIPELAVIKDLHLRTVDELGLDRSIVSGLLDELEQLLKGVAMMKELTLRTRDYLVSFGECMSTRIFAAYLNKLGKKARQYDAFDIGFITTDDFTNADILEATYPAVAKRLHEDWMDDPAIPIVTGFLGKGCKSCAVTTLGRGGSDLTATTIGKALGLREIQVLHPQSMRPARDGDIPVRVKNSYNRHAPGTVITKSRDMSKSILTSIVLKSNVTMLDIVSTRMLGQYGFLAKVFSIFEDLGISVDCVATSEVSISLTLDPSKLWSRELIQQELDHVVEELKKFAVVHLLQRRSIISLIGNVQRSSLILEKAFNVLRRNGVNVQMISQGASKVNISLVVNDSEAKQCVQALHSAFFENGFLSEVEGADVPQNGASLNSNGAVYGN

SEQ ID NO: 159948 - protein, 241 aa, Zea Mays
MVRLTADLIWKSPHFFNAVKERELDLRGNKIAVIENVGATEDQFDTIDLSDNEIVKLENFPYLNRLGTLLVNNNRITRINPNLGEIDPLASLPKLQFLSLLDNTVTKQPDYRLYVIHKLKHLRLLDFKKVKQQVCSFPLEWLQNMFWDGPQKCWAAGSKRDKQATLLTLDFHELDALTPWNALSGMFSIIQSANVAFISDFLGRFFFCFVGESCGSEKVPLKGSRGRGKEGACQNVYSWSA

SEQ ID NO: 159949 - protein, 94 aa, Zea Mays
MEPQGPKVVAPTPEQITAIKAAIANAHTLEEAARLEQVLSTGQVPAEFAVPRPDANMAEASDGAEKMDTDGENQEGGEADGQKQGEGSTPIQED

SEQ ID NO: 159950 - protein, 97 aa, Zea Mays
MFWDGPQKCWAAGSKRDKQATLLTLDFHELDALTPWNALSGMFSIIQSANVAFISDFLGRFFFCFVGESCGSEKVPLKGSRGRGKEGACQNVYSWSA

SEQ ID NO: 159951 - protein, 299 aa, Zea Mays
MGDPPTLKRPKLEKADDDSTYCPRPSSNGAAPVRTPGATAAIGAAPGDDVEEEDDIAEEAVIALIAHRERDVERCKLKLLHYQSLLDTAEMKLEEAHSRLARFRDRKPPPTRSEPKPPTPPIQREHKPSPPPIQRDLKPSPQPLIQKAPSPAPQPSARPQLVIPGTSNRPTPRPEPMPGLKRAAAPSSSSSPAPPERSRKEEKKPKIKMEQKEHQNLIPSVGKSSATVLRFQGGNLVSSQHRRKLRCLELCPANDQLVVTSALDGLVTLWQVETRGFMPTGALGNALYLKPHSQNDHVL

SEQ ID NO: 159952 - protein, 375 aa, Zea Mays
MGDPPTLKRPKLEKADDDSTYCPRPSSNGAAPVRTPGATAAIGAAPGDDVEEEDDIAEEAVIALIAHRERDVERCKLKLLHYQSLLDTAEMKLEEAHSRLARFRDRKPPPTRSEPKPPTPPIQREHKPSPPPIQRDLKPSPQPLIQKAPSPAPQPSARPQLVIPGTSNRPTPRPEPMPGLKRAAAPSSSSSPAPPERSRKEEKKPKIKMEQKEHQNLIPSVGKSSATVLRFQGGNLVSSQHRRKLRCLELCPANDQLVVTSALDGLVTLWQVETRGPSLSFRGKTDFFSPKHRWPEDIAWHPDGETIFAVYTADNGDSQVSMTNLISGQIIYFLEILLNGVPQFFRWTETEESYFPTREASHKRHHKRHKFHALV

SEQ ID NO: 159953 - protein, 227 aa, Zea Mays
MGDPPTLKRPKLEKADDDSTYCPRPSSNGAAPVRTPGATAAIGAAPGDDVEEEDDIAEEAVIALIAHRERDVERCKLKLLHYQSLLDTAEMKLEEAHSRLARFRDRKPPPTRSEPKPPTPPIQREHKPSPPPIQRDLKPSPQPLIQKAPSPAPQPSARPQLVIPGTSNRPTPRPEPMPGLKRAAAPSSSSSPAPPERSRKEEKKPKIKMEGASELDSECWEIICDCA

SEQ ID NO: 159954 - protein, 105 aa, Zea Mays
MSSRNVNLSEEDRKKALSISRSLVDARTATLSGSNRSQEIKDQIVRTITEAGGQVDYVEIVEQESLVPVERMDRPCVICVAAWFGKVRLIDNIEIHVDSSTVLSI

SEQ ID NO: 159955 - protein, 117 aa, Zea Mays
MEETINHLLVQCSFAKQFWFSLLRSGGFQELCPSHDDVCFETWWRNSAARVGKPLSKGFNSLVILGAWSLWKHRNRCVFENCNPSAAVVLAAAREELMGWRMARAKALSFFHLEEVS

SEQ ID NO: 159956 - protein, 365 aa, Zea Mays
MAGKKTTPAKPAPSSTQRNGSAVPGSKSRPKQASEEAAAASAKAQSPSKPRKITKEKPAAAKKKREKTEPQEGGKRRKQQVLADAATPSKKRKKGGEGPEPKEATPAKKHKPAGTPPKKQKAPSKPATPAKKQQSPGKAEKLTPKKKQQSPGKAEKPTPKKKQQSPGKAEKPTPKKKQQSPGKAEKAAPKKQQQQPAGKARKPAAAATSPTKKKQAKREKPTPTKRKRGDDEQAKEAKSPKRAPADGAARASTPVKKKLKDQKAAAANMGVCSFSMARVRQLMRAEDPTIRPSSEAVFLINKASEFFLGKFAEDAYHNAAKDRKKSIIYDNLSVSSQKTLKFLSDFVPQRVAAEDALKAMTSNNS

SEQ ID NO: 159957 - protein, 238 aa, Zea Mays
MRFVQPRDVRQVAGAEVVGRQQRAHHGALQRPPLQPPGAPHAAALRRRREGVVLLAVSGREPLGHPVAGAAHAGEDQLGRVRAAGGSAASIIRCHRRRAAAQLPADVAAAAVVLQPFGAGLAAAAAATHRWWWWRWSGRRQEPRRLRGRRRRHGSGADHHVVQGRRVRQQRQRAGGVGVDHPGPARRLHHRQGARRRQPGAAPRQVQPREVRGAQCQAVVGGEQGEDTGSVPLKTELE

SEQ ID NO: 159958 - protein, 366 aa, Zea Mays
MDVVHVVVGVHRAAQGHGAEAVGHPPPPARRAAQARRVAAAATGPGHLPVPQRLLPPRRRAGRHGRAPGHVPGRWRRRRVERELHPGVGPARRRPRGRRGLQGVGGAGGARRADHLRVTPRRRRQRPQAHPVQPRDVRQVAGAEVVGRQQRAHHGALQRPPLQPPGAPHAAALRRRREGVVLLAVSGREPLGHPVAGAAHAGEDQLGRVRAAGGSAASIIRCHRRRAAAQLPADVAAAAVVLQPFGAGLAAAAAATHRWWWWRWSGRRQEPRRLRGRRRRHGSGADHHVVQGRRVRQQRQRAGGVGVDHPGPARRLHHRQGARRRQPGAAPRQVQPREVRGAQCQAVVGGEQGEDTGSVPLKTELE

SEQ ID NO: 159959 - protein, 404 aa, Zea Mays
MRVKIFAKPFIGAMDGHIDAVSCMAKNPNHLKAIFSGSMDGDVRLWDIAARKTVCQFPGHQGAVRGLTTSTDGDLLVSCGVDCTVRLWKVPMLKMVDTSERAGDNSQPSAVYTWKHAFWGADHQWDGNLFATVGAQVDIWDPDRSEPINSFEWGKDTVLSVRFDPGDSNILITSGSDRSLTLYDLRMSSPARKLIMKTRCNSVCWNPREPMNFTAANEDTNCYSFDARKLDEAKIVHKGHVSAVMDIDYSPTGREFVTGSYDRTVRIFNYLGDHSREIYHTKRMQRVFCVKYTYDGTYLVSGSDDTNLRLWKSKASEQLGVLLPRERKKQEYQDALKERYKHLPEVKRIVRHRHLPKPIYKAANLRRTMIEAESRKEERRRKHSAPGSMPVQPFRKRRIIREVE

SEQ ID NO: 159960 - protein, 331 aa, Zea Mays
MVIFLYHVALTALFDSGKFRCLKWWILVSVLEIIPSHQQFTPGSMHSGVLITSGTAIFSQLLVLKLIYGILTEPINSFEWGKDTVLSVRFDPGDSNILITSGSDRSLTLYDLRMSSPARKLIMKTRCNSVCWNPREPMNFTAANEDTNCYSFDARKLDEAKIVHKGHVSAVMDIDYSPTGREFVTGSYDRTVRIFNYLGDHSREIYHTKRMQRVFCVKYTYDGTYLVSGSDDTNLRLWKSKASEQLGVLLPRERKKQEYQDALKERYKHLPEVKRIVRHRHLPKPIYKAANLRRTMIEAESRKEERRRKHSAPGSMPVQPFRKRRIIREVE

SEQ ID NO: 159961 - protein, 446 aa, Zea Mays
MRVKVISRSTDDYTRERSQDLQKVFRNYDPALRSQEKAVEYTRALNAAKLEKIFAKPFIGAMDGHIDAVSCMAKNPNHLKAIFSGSMDGDVRLWDIAARKTVCQFPGHQGAVRGLTTSTDGDLLVSCGVDCTVRLWKVPMLKMVDTSERAGDNSQPSAVYTWKHAFWGADHQWDGNLFATVGAQVDIWDPDSFEWGKDTVLSVRFDPGDSNILITSGSDRSLTLYDLRMSSPARKLIMKTRCNSVCWNPREPMNFTAANEDTNCYSFDARKLDEAKIVHKGHVSAVMDIDYSPTGREFVTGSYDRTVRIFNYLGDHSREIYHTKRMQRVFCVKYTYDGTYLVSGSDDTNLRLWKSKASEQLGVLLPRERKKQEYQDALKERYKHLPEVKRIVRHRHLPKPIYKAANLRRTMIEAESRKEERRRKHSAPGSMPVQPFRKRRIIREVE

SEQ ID NO: 159962 - protein, 165 aa, Zea Mays
MDSMEDAVSGTAAQGDLAEVVARAGAMAAAASHHHHRRPPSPAAADHGHIVSAARATARSQIMLVPAAACYDDETRPAAACGDAVMFDAPSSSMAAAVGPYHHLSSSSAALAPAHGGYWLPPQQISQEHARDGGLDEPPVVTRISPVTTPPPPSHHHQIMNRRMR

SEQ ID NO: 159963 - protein, 445 aa, Zea Mays
MSPVEGCPTVFQAICSLSPGIHEYKFYVDGEWRHDERQPTISGEFGIVNTLYLTREFNQINALLNPSTPGSRMNMDVDNENFQHTVTLSDGTIPEGTVRVSEAAIQISRCRVSEYLNLHTCYDLLPDSGKVIALDINLPVKQSFHILHEQGIPVAPLWDSFRGQFVGLLSPLDFILILRELETHGSNLTEDQLETHTISAWKEAKRQTCGRNDGQWRAHQHLVHATPYESLRDIAVKLLQNDISTVPVIYSSSSDGSFPQLLHLASLSGILKCIFRYFKNSTGNLPILNQPVCSIPLGSWVPKIGDPNSRPLAMLRPNASLSSALNMLVQAGVSSIPIVDENDSLLDTYSRSDITALAKDKVYTHVRLDEMTIHQALQLGQDANTPFGFFNGQRCQMCLRSDPLLKVMERLANPGVRRVFIVEAGSKRVEGIISLSDIFKFLLSL

SEQ ID NO: 159964 - protein, 245 aa, Zea Mays
MAQMLLLLLLPPPFLLLAAPTVPAEAAATASTPTLVFLLAGQSNMGGRGGATNGTWDGVVPPACAPSPRILRLSPSLRWEEAREPLHAGIDLHNVLGVGPGMPFAHALLRSWRRSGRRPAVVGLIPCAQGATPIASWSRGTPLYDRMLARARAAVARGPATRLAALLWYQGEADTIRRQDADAYTPRMEALVRDVRRDLGMPDLLVIQVGLATGQGRFVDIVREAQRRVSLRNVRRRRTGRRRWR

SEQ ID NO: 159965 - protein, 143 aa, Zea Mays
MRLPRNATPALLILALSIAGQGRIALTAEDNAPLVRVCDRCMAEVTQRLSIAKDVANRSATVQSHEDLARKLKGIGLVDGSVAMPCVHSSSYAVQAEVTQRLSIAKDVANRSATVQSHEDLARKLKVIYCFFPVIYSFKWLCT

SEQ ID NO: 159966 - protein, 74 aa, Zea Mays
MCYEPSFPLLPSGDQLVLQEGHCHGVAGTGELTGREPPGGIVLRLILFDCWAGFGPCNWRIGHIHKYCSNLVKK

SEQ ID NO: 159967 - protein, 274 aa, Zea Mays
MYADVSAPPTAENKLQGKLSPPEIKWSHPKIHGKESVLNLAAARATHGSGDGSTIIISCSEATDIKVWHGKSGKEFGTVDTNQLKNNMADISPNGRFIAAAAFTADVKVWEIVYSKDGSVKEVNKVMQLKGHKSAVTCLCFAPNSEQIITASKDGSIRVWNINVRYHLDEDPKTLRVMPIPLHDSKGSVCQYDHMTVSPDGKILAVTSGSTLQWLLVETGAVLDTADKAHEGDITGIAWAPRTIPNGGVHVFILATAGVDKKVKLWTAPDVGST

SEQ ID NO: 159968 - protein, 216 aa, Zea Mays
MRLQQLLHQHNPHLHTTRDASPPASINALNSDVSAVLASKMMQDRVRNPNPIDSDASQHLLDANRIALLKSPPPSHTGPMPMQQQLHPRNQQLDIKPDVGMPQRTMPADPSSMYASGMMHPKPALLATGLNQGGVGSVPLKGWPLTVPGIDQLRSNLGVQKQLVPSSNQFQLLSPQQQLLAQAQTQNDLTRMGSPAPSASPNVRPDDPDYLMKYCI

SEQ ID NO: 159969 - protein, 435 aa, Zea Mays
MARTNWVADKMLDVYIYDYLVKRNLQATAKAFIAEGKVATDPVAIDAPGGFLFEWWSIFWDIFHSSTAKASSTSTAAAFIDHTAKQQQPIGAGTGAPPPHPLHDSREHQMRLQQLLHQHNPHLHTTRDASPPASINALNSDVSAVLASKMMQDRVRNPNPIDSDASQHLLDANRIALLKSPPPSHTGPMPMQQQLHPRNQQLDIKPDVGMPQRTMPADPSSMYASGMMHPKPALLATGLNQGGVGSVPLKGWPLTVPGIDQLRSNLGVQKQLVPSSNQFQLLSPQQQLLAQAQTQNDLTRMGSPAPSASPNVRPDDPDYLMKLKMAQMQQSSGHRPMELQQPHQQNTRKRKPTSSGAANSSGTGNTVGPSPPSTPSTHTPGGGVPVASNVNILQKSSMICGVDATGGLASSSNQMTEEACLQHLKKGLQSTIQSP

SEQ ID NO: 159970 - protein, 454 aa, Zea Mays
MGSPAPSASPNVRPDDPDYLMKLKMAQMQQSSGHRPMELQQPHQQNTRKRKPTSSGAANSSGTGNTVGPSPPSTPSTHTPGGGVPVASNVNILQKSSMICGVDATGGLASSSNQMDALDSFVDFDENVDSFLSNDDVDGRGMFAALEKGSSEHNTESLKGLSLSEVGNNRTSNNKVVCCHFSSDGKLLASAGHEKKVFLWNMDNFKMDTKIEDHTNFITDIRFRTNSTQLATSSSDGTVRLWNAADESGALQTFHGHRSHVTSVDFHPRLTEVLCSCDDNGEILFWTVGQTTSTHVLRVKQGGTGRVRFEPRSGQLLAVAAGSMVNIFDVEKQSSLPCPPKGHNSEVNFVSWDENGEYLASVSQDTVKVWSVSSGVCIHELRSNGNQYQSCTFHPRYPKVLIVGGYQTLELWSLSDNQRIPIQAHEGLIAALAHSPFTGMIASASHDRCVKLWK

SEQ ID NO: 159971 - protein, 688 aa, Zea Mays
MARTNWVADKMLDVYIYDYLVKRNLQATAKAFIAEGKVATDPVAIDAPGGFLFEWWSIFWDIFHSSTAKASSTSTAAAFIDHTAKQQQPIGAGTGAPPPHPLHDSREHQMRLQQLLHQHNPHLHTTRDASPPASINALNSDVSAVLASKMMQDRVRNPNPIDSDASQHLLDANRIALLKSPPPSHTGPMPMQQQLHPRNQQLDIKPDVGMPQRTMPADPSSMYASGMMHPKPALLATGLNQGGVGSVPLKGWPLTVPGIDQLRSNLGVQKQLVPSSNQFQLLSPQQQLLAQAQTQNDLTRMGSPAPSASPNVRPDDPDYLMKLKMAQMQQSSGHRPMELQQPHQQNTRKRKPTSSGAANSSGTGNTVGPSPPSTPSTHTPGGGVPVASNVNILQKSSMICGVDATGGLASSSNQMDALDSFVDFDENVDSFLSNDDVDGRGMFAALEKGSSEHNTESLKGLSLSEVGNNRTSNNKVVCCHFSSDGKLLASAGHEKKVFLWNMDNFKMDTKIEDHTNFITDIRFRTNSTQLATSSSDGTVRLWNAADESGALQTFHGHRSHVTSVDFHPRLTEVLCSCDDNGEILFWTVGQTTSTHVLRVKQGGTGRVRFEPRSGQLLAVAAGSMVNIFDVEKQSSLPCPPKTLELWSLSDNQRIPIQAHEGLIAALAHSPFTGMIASASHDRCVKLWK

SEQ ID NO: 159972 - protein, 641 aa, Zea Mays
MARTNWVADKMLDVYIYDYLVKRNLQATAKAFIAEGKVATDPVAIDAPGGFLFEWWSIFWDIFHSSTAKASSTSTAAAFIDHTAKQQQPIGAGTGAPPPHPLHDSREHQMRLQQLLHQHNPHLHTTRDASPPASINALNSDVSAVLASKMMQDRVRNPNPIDSDASQHLLDANRIALLKSPPPSHTGPMPMQQQLHPRNQQLDIKPDVGMPQRTMPADPSSMYASGMMHPKPALLATGLNQGGVGSVPLKGWPLTVPGIDQLRSNLGVQKQLVPSSNQFQLLSPQQQLLAQAQTQNDLTRMGSPAPSASPNVRPDDPDYLMKLKMAQMQQSSGHRPMELQQPHQQNTRKRKPTSSGAANSSGTGNTVGPSPPSTPSTHTPGGGVPVASNVNILQKSSMICGVDATGGLASSSNQMDALDSFVDFDENVDSFLSNDDVDGRGMFAALEKGSSEHNTESLKGLSLSEVGNNRTSNNKVVCCHFSSDGKLLASAGHEKKVFLWNMDNFKMDTKIEDHTNFITDIRFRTNSTQLATSSSDGTVRLWNAADESGALQTFHGHRSHVTSVDFHPRLTEVLCSCDDNGEILFWTVGQTTSTHVLRVKQGGTGRVRFEPRSGQLLAVAAGSMVNIFDVEKQSSLPCPPK

SEQ ID NO: 159973 - protein, 645 aa, Zea Mays
MRLQQLLHQHNPHLHTTRDASPPASINALNSDVSAVLASKMMQDRVRNPNPIDSDASQHLLDANRIALLKSPPPSHTGPMPMQQQLHPRNQQLDIKPDVGMPQRTMPADPSSMYASGMMHPKPALLATGLNQGGVGSVPLKGWPLTVPGIDQLRSNLGVQKQLVPSSNQFQLLSPQQQLLAQAQTQNDLTRMGSPAPSASPNVRPDDPDYLMKLKMAQMQQSSGHRPMELQQPHQQNTRKRKPTSSGAANSSGTGNTVGPSPPSTPSTHTPGGGVPVASNVNILQKSSMICGVDATGGLASSSNQMDALDSFVDFDENVDSFLSNDDVDGRGMFAALEKGSSEHNTESLKGLSLSEVGNNRTSNNKVVCCHFSSDGKLLASAGHEKKVFLWNMDNFKMDTKIEDHTNFITDIRFRTNSTQLATSSSDGTVRLWNAADESGALQTFHGHRSHVTSVDFHPRLTEVLCSCDDNGEILFWTVGQTTSTHVLRVKQGGTGRVRFEPRSGQLLAVAAGSMVNIFDVEKQSSLPCPPKGHNSEVNFVSWDENGEYLASVSQDTVKVWSVSSGVCIHELRSNGNQYQSCTFHPRYPKVLIVGGYQTLELWSLSDNQRIPIQAHEGLIAALAHSPFTGMIASASHDRCVKLWK

SEQ ID NO: 159974 - protein, 412 aa, Zea Mays
MGSPAPSASPNVRPDDPDYLMKLKMAQMQQSSGHRPMELQQPHQQNTRKRKPTSSGAANSSGTGNTVGPSPPSTPSTHTPGGGVPVASNVNILQKSSMICGVDATGGLASSSNQMDALDSFVDFDENVDSFLSNDDVDGRGMFAALEKGSSEHNTESLKGLSLSEVGNNRTSNNKVVCCHFSSDGKLLASAGHEKKVFLWNMDNFKMDTKIEDHTNFITDIRFRTNSTQLATSSSDGTVRLWNAADESGALQTFHGHRSHVTSVDFHPRLTEVLCSCDDNGEILFWTVGQTTSTHVLRVKQGGTGRVRFEPRSGQLLAVAAGSMVNIFDVEKQSSLPCPPKGHNSEVNFVSWDENGEYLASVSQDTVKVWSVSSGVCIHELRSNGNQYQSCTFHPRYPKVLIVGGYQVNEMQ

SEQ ID NO: 159975 - protein, 914 aa, Zea Mays
MHPPYSMQGMPYYPGMNPYYPSPYPPMDETRYHPSERRVSKKHSDSKDSETSDDKSDQSGSERETSYGHRSHKKDKRAGKKKPSVVVIRNINVTSKRHGSSDSDSQTGSDVVSEDSDDSHAKSRKKKNNSSSSKKKDARKMVFESADEYSKNGMSYGQDGDQGSWNVFQSFLLRADEKRDNDADLFASEKKAPPARMKESTSVDVDSILLVEQNSAGANEHNTTGFSMENERIRPQQMLSGDELMMYGEGEGMSFGCDDIKEIEAGGVRYRRGTSDDFMIYGQEKSMDRGSSLDPLAEAQYKSPTLVDKNVHSLADESFMIPLRSTSEDNHEPECRTAIDIDVELPSTVQKISDAKAGSQLFYEPAELMPERGCEDVSFGYDPAMDYNSQIQSQSATMVEDAHMEDALLSTVDEIKKPEKDKKLRSSQESLDKRRKDASARRLSSSKGPLTDAQKRAQNLRIYKADLQKAKKEQEEEQIKRLERLKLERQKRIAARSSTSNAPTPQQPRVKPSPKVSPSTYKSSKLSDTELASSSPLRKFPIKTTPGTDPEKTAKSSKLNDNTNAVSKPTLTDMKERSGRTESSNERLRKLAEPKTNSSTGHTLNSKSASVDRPRRKSMPQDSQTKKISAIMQLDQSKSATLPELKVKYSQAPAVVKNAVASRERKEVSAGAKSLRTTETASVKETNGNISRMNSSDDNVVVEKTVVMLEDEAVILHSGRNAAKETCSDDRTEKPSPESEYIAIRAPLSPVILPEAERSDDLGSSYEVVTECLKDEPEEPTLGAVEKPYQAPFARVTSLENASDNSPLPESLAHANSIKARVPEPVYTVSVEGHVVSEKPRSKEPKGLRKLLKFGRKSHAEGAMDSSVDEASAGDGSMLKNLISQDDSGASSSKASRSFSLLSPFRSKHKVIVL

SEQ ID NO: 159976 - protein, 76 aa, Zea Mays
MTWLCRATDVRVKTEFAEQGELGHLNLRVIGTWHLMEMVPYDEMLNTGTDFDLEELVRVPVAGAGRRRRHHGEFGR

SEQ ID NO: 159977 - protein, 593 aa, Zea Mays
MPCPDTVSYTAMISALLRAGDCHGALALYPCMLPLCAPTQHTFSKLLAPCASMRLHRHGSQLHAQLLRWGCWGPHLGLVLKTALVHMYAACGAMVSARAVLHATPETDVVLWTAIITAYTRRGQLHRALLAFRDMERSAVLPNAFTYAALIAACSADHSLHIGQQLHGRLFKSGLEHDTSACNALLDLYSKSSARSLDLLLAFHAADMPNVVTWTSFIAGLMRHGREQEALAAFARMRATGVKPNSFTLSTLLKGCTSAHACLHAAKIHAYVLKTSSESLDAAAGNSFVDVYARSARMDDAWKVATTMSFVRDRFTYTSLAKGLNQMGLHHRALGMILHMFHEEVSIDGFSLACFLSAAATLASIESGKQLHCCAVKLGLSGQVSLSNSLINMYSRCKSLEDAKSVFQSIREPSVVSWNAIIFGMAFNGSYTEALSVFEDMILAGAQPDGVTFTVVLSACSHGGLVDIGIKHFNSMANMFDVPPQKSHYTLFLDMLGRSGRFTEVAHTIEAMPVQPDLSIYRTLLVYCKFHNEPVVGEYIAKKALELDPSDSVSRNTLSGIRRAPRIQDHDEQIYLWDEEGCRHPSSVLPINC

SEQ ID NO: 159978 - protein, 917 aa, Zea Mays
MPASVAVYPAKMACCLQLHHLRRPSPAPLPARVLFLLSTPRLRPVRASPGSSPPNSFAGWSSDSDSADDGADKSTLGFGRAGGLLGPGLAAFFFLAGITFAAVSIRSSGTHAAGKLQNLPTETAATESYPDYHSHKEDGATREASLPTDWDEEDYDNLDKKEDTDEFLTPLQSNEVPGVPAEGEVGHLLQNTEPVTDGDHVVGEEANQFDNLIASDGNQDPPPPLPILDAAGPSEEIPDVEETSDPKMDLPENQHFDETLTSDAMVLDSDVVPIQDISEGAIAAAFHPEDKGVEQNPQTLDKDELSPSGLPDYMEHVSADGMHPLGSNELSMATRTSETGDGEETIVEDLYKGESELENQNKQLESTPPDQYFSSPGIPAPSVVSTALQVPAGPIVVPASVDPTQENAIAALQILKVIESSAQAGELCTRREYARWLVAASNCLSRNTFSKVYPAMYIDNVTELAFDDVTPEDPDFPFIQAEAGLISSKLSRSDMNIPEDVHDNHILFSPESPLSRQDLVSWKMALDKRQLPEVDRNCLFKLSGYIDIDKINTAAWPALAADLDAGDQSITALAFGFTRLFQPNKPVTKGQAALAFSAGDSGEVVLEEVARIEAEKIAEAAVNAHAALVAQVEKDLNASFERELKEERERVETLEKVAEEARVELDRLRAEREEEKNILVRGRAAVESEMEVLLKLRSEVEEQLQNVLSKKVEVSFEKSRIEKLQKEIESDNSAVVQLQYELEVERKALSMARAWAEEEAKKAREHARALEEARNQWERQGIRVVVEGELKDDASAGVTWANAGKENAVDESINQAEALLEKLKTMSGEMEVRSRGAVERVMQHVRSFIAILKQQAADARQWCTEFGACAASRANEVSAQVKGSVSAFGATLGDKSKRAMEECKDGLERISHRFKTD

SEQ ID NO: 159979 - protein, 1179 aa, Zea Mays
MDARVSLDDLVLQTRRTSPYLRMSMVSSSHPEFYPERTSAYVGQYDLHNAEMTVRETLDFSRRCLGIGARYEMIAELARRERDAGIKPDPEIDAFMKATAVQGQETNIITDLTLKVLGLDICADVIIGDEMIRGISGGQKKRVTTGEMLTGPARALFMDEISTGLDSSSTFEIVKFMRQLVHVMSETVMISLLQPPPETYNLFDDIILLSEGYIVYHGPRENILEFFESAGFRCPDRKGVADFLQEVTSKKDQQQYWYLDQEQYHYVSVPDFAERFKSFHACQQMQKELQIPFEKSKTHPAALTTRKYGLSSWESLKAVMSREQLLMKRNSFIYIFKVTQLIILALMSMTVFLRIKMPHGQIADGTKFFGALTFGLITIMFNGFAELQLTIKKLPVFYKHRDFLFFPAWTLGVANIILKVPVSFVESAVWVVLTYYVMGFAPAAGRFFRQFIAFFATHQMAMALFRFLGAVLKTMVVANTFGMFVLLIIFIFGGFVIRRNDIRPWWIWGYWASPMMYSQNAISVNEFLASRWAIPNNDTTIDAPTVGKAILKSKGLFTGEWGFWLSIGALIGFIILFNMLYLWALTYLSPSSGSNALVSEGEDDVNEMALEGRRKDARRSKDEISQVVSSDPGTNGGTNTLAQSRVTLPFQPLALCFNHVNYYVDMPAEMKEQGFTESRLQLLSDISGTFRPGVLTALVGVSGAGKTTLMDVLAGRKTSGAIEGDITLSGYPKKQETFARISGYCEQTDIHSPNVTVFESITYSAWLRLSSDIDDGTKKMFVEEVMALVELDVLRDALVGLPGVSGLSTEQRKRLTIAVELVANPSIIFMDEPTSGLDARAAAIVMRTVRNTVNTGRTVVCTIHQPSIDIFESFDELLLLKRGGQVIYAGELGRHSHKLVEYFEAIPGVPKITEGYNPATWVLEVSSPLSEARLNMNFAEIYASSVLYRKNQEVIKELSIPRSDNQDLSFPTKYSQNFYGQCAANFWKQYRSYWKNPPYNAMRYLMTCLFGLVFGTVFWQKGKNIDSQQDLYNLLGATYAATFFLGASNCITVQPVVSIERAVFYREKAAGMYSPLSYAFAQTCVEVIYTILQGILYTVIIYAMIGYDWKADKFFYFLFFITASFNYFTLFGMMLVACTPSALLANILITFALPLWNLFAGFLIVRPVSMQATLLGSKI

SEQ ID NO: 159980 - protein, 249 aa, Zea Mays
MRREPDIILSLVERGACVLERTLDGRDALTICKRLTREKDCNRKLDKYEEKSKAYLCIDILEQELKRKSFVLDPISISIEESIATPLLVDNFHMRLINLENRVAFARIFFPSEAKLVMRIAQADSTQEFAGITNFSRLKEVDLNETPTMQNRRLRERLDALTKTVELGRRYFPHCSDVLDKFLNEESTDPIFLETGTPEDQQVKRMRFSELREDVRKAFTKDKAAVAAIASSASSSSSPRCRRPNRKSR

SEQ ID NO: 159981 - protein, 366 aa, Zea Mays
MAAASTSELLKRRITFFVLKLLVLRKLGYLHYTMEATKEIEAALKVSMRAALGLDTNNSNEGQLDDLTIMKETLRVKDEELQHLAKDIRSRDATIKEIADKLTETAEAAEAAASAAHTMDEQRQLLCSEIERLKQALERQIEQSVVKLRQSEEKVISLSKEKEQLMKERDAAFQEAHMWRIELVKAREQAVIQEATIARAEEKARVSEADAAARIKEAAEKLHTVEKEKEELLALVGVLQSQVLREQSSTKQVCEERSESCSGADNSPLLTKHVDASDDDVDKACVSDSRSVPVSSDSTEVQLAVDGVDIRPVGDAEWSSFQQPEALIADVREVSPEADGGSLDIPVVNPPPVSDHIQGGGGATHP

SEQ ID NO: 159982 - protein, 455 aa, Zea Mays
MTDSSRVVPASLPEAFPAARFPPIDLYALPTGGSRTSTNLPSRPARRRRRLAVRFRPPKPYYLLPSSPASSMATNGSSPRVRDTESSLEKVKRQLSSGSGRYLLQGPLLKRSETLRKWNERWVILDPTSGKMEYKLRRNETAIKGTILFDASSTITLSPVNFQGMPKYNGCCFYIGTPQKKDYFLCAETPGAAKAWVSTLHATQLVLRAHKEAVNSLAGNGSPATLGTVATAVANANATAMEATKEIEAALKVSMRAALGLDTNNSNEGQLDDLTIMKETLRVKDEELQHLAKDIRSRDATIKEIADKLTETAEAAEAAASAAHTMDEQRQLLCSEIERLKQALERQIEQSVVKLRQSEEKVISLSKEKEQLMKERDAAFQEAHMWRIELVKAREQAVIQEATIARAEEKARVSEADAAARIKEAAEKLHTVEKEKEELLALRAEQHKASMRGEV

SEQ ID NO: 159983 - protein, 502 aa, Zea Mays
MTDSSRVVPASLPEAFPAARFPPIDLYALPTGGSRTSTNLPSRPARRRRRLAVRFRPPKPYYLLPSSPASSMATNGSSPRVRDTESSLEKVKRQLSSGSGRYLLQGPLLKRSETLRKWNERWVILDPTSGKMEYKLRRNETAIKGTILFDASSTITLSPVNFQGMPKYNGCCFYIGTPQKKDYFLCAETPGAAKAWVSTLHATQLVLRAHKEAVNSLAGNGSPATLGTVATAVANANATAMEATKEIEAALKVSMRAALGLDTNNSNEGQLDDLTIMKETLRVKDEELQHLAKDIRSRDATIKEIADKLTETAEAAEAAASAAHTMDEQRQLLCSEIERLKQALERQIEQSVVKLRQSEEKVISLSKEKEQLMKERDAAFQEAHMWRIELVKAREQAVIQEATIARAEEKARVSEADAAARIKEAAEKLHTVEKEKEELLALVGVLQSQVLREQSSTKQVCEERSESCSGADNSPLLTKHVDASDDDVDKACSGVASSSQKR

SEQ ID NO: 159984 - protein, 73 aa, Zea Mays
MRLVFGPSLPAPACNYRREAHATAATRAADPSVAVVVVAPRLQIGGTLATHTPHPNTQSHRSATRRDSPRAEE

SEQ ID NO: 159985 - protein, 518 aa, Zea Mays
MAMAEKVKEKMLMLRSSDNQEFEVKESVAMQSMTLKKMVEDGCADKGIPLPNVTSHILVKVIEYCNKHAEPTGPGDAAGTTNRSAEDELNIFDADFVNVEHSTLLDLILAANYLDIKGLLNLARQTITDLINGKMPEEVCKTNIKNDLTIPSTSALATTMPSSERKQMEARFIAYMQETAEERMTGFAVRGEKYRKHGERPPQPPLEIVKYPALLERAWGWDSILPYCPVNSWPLYKTYLQEYYERNSREVLAHQVEANAASGPNLNGADENDLATLFNLCISREVQLLNLLKRRDQKHNVDEISLNEKLTNCARQITFVEYAGFPFPSVALKCIMAESDLLCMLLMCGTGMISQVNICSRIRKVAFRFMTYKGPGCFAAAATMMATTKEAKLMSGLLRNRCRENNGPFSRSVFIRKWTIAAMFRICEECSPVEESTGGYTATKLILDGSDDKNPCDKELVNKDNLLQRNKINQKYQGLFKGKTTKCRHPVQKQEPGDGATPASPSPANPISTVVQKL

SEQ ID NO: 159986 - protein, 514 aa, Zea Mays
MAMAEKVKEKMLMLRSSDNQEFEVKESVAMQSMTLKKMVEDGCADKGIPLPNVTSHILVKVIEYCNKHAEPTGPGDAAGTTNRSAEDELNIFDADFVNVEHSTLLDLILAANYLDIKGLLNLARQTITDLINGKMPEEVCKTNIKNDLTIPSTSALATTMPSSERKQMEARFIAYMQETAEERMTGFAVRGEKYRKHGERPPQPPLEIVKYPALLERAWGWDSILPYCPVNSWPLYKTYLQEYYERNSREVLAHQVEANAASGPNLNGADENDLATLFNLCISREVQLLNLLKRRDQKHNVDEISLNEKLTNCARQITFVEYAGFPFPSVALKCIMAESDLLCMLLMCGTGMISQVNICSRIRKVAFRFMTYKGPGCFAAAATMMATTKEAKLMSGLLRNRCRENNGPFSRSVFIRKWTIAAMFRICEECSPVEESTGGYTATKLILDGSDDKNPCDKELVNKDNLLQRNKINQKYQGLFKGKTTKCRHPVQKQEPGDGGCGNHSSNECNMILL

SEQ ID NO: 159987 - protein, 111 aa, Zea Mays
MCSDCAKENGAKRPSNSYPVSPNSDSKIWTSVVFSTLGKLEESFLLSFMITVVLWSNKVLRFLFFTSPSHTNGRVTLHTYCSVSLHWDKPQPHKWRRPAQRRGTRTPRRRG

SEQ ID NO: 159988 - protein, 67 aa, Zea Mays
MSAMWDTVRAAMREAEAAALEPTQSPPISAEDGTVDGGSIPAADGAAGLTAGQLFDQLCNSPYSVNY

SEQ ID NO: 159989 - protein, 159 aa, Zea Mays
MGPFGGIMIECGTNQPIEKVLAAEDAECCICLSAYDDSAELRELPCARMLQHSNNANELLLRRKLEEQQQAAELQHAIELQSRRLMGLQLLDLKARAAATAAAASALPTPVANAFASSHPLSTMAVESPLESAQAEQWVCSGGEAQRWRQGRICLRGEP

SEQ ID NO: 159990 - protein, 215 aa, Zea Mays
MYKSNGIYKNAKVAFCIHNIAYQGRKINWMKTGIVESDLVLTVSPHYVKELTYGPDKGVELDGVLRTKPLEIGIVNGMDVYEWDPSTDKYTSVKYDATTVTEAKALNKERLQAEVGLPVDSSIPVIVFVGRLEEQKGSDILIAAIPEFVGENVQIIVLGTGKKKMEEELMQLEVKYPNIARGIAKFNVPLAHMMFAGSDFIIVPNSHLFITWRTC

SEQ ID NO: 159991 - protein, 255 aa, Zea Mays
MKTGIVESDLVLTVSPHYVKELTYGPDKGVELDGVLRTKPLEIGIVNGMDVYEWDPSTDKYTSVKYDATTVTEAKALNKERLQAEVGLPVDSSIPVIVFVGRLEEQKGSDILIAAIPEFVGENVQIIVLGTGKKKMEEELMQLEVKYPNIARGIAKFNVPLAHMMFAGSDFIIVPSRFEPCGLIQLQGMRVSSSLCYSSDLSARKINISSHLFLSCYILIPVKQKIPICSSPGGLVDTVEEGCHRIPHGFFQCRV

SEQ ID NO: 159992 - protein, 209 aa, Zea Mays
MKTGIVESDLVLTVSPHYVKELTYGPDKGVELDGVLRTKPLEIGIVNGMDVYEWDPSTDKYTSVKYDATTALNKERLQAEVGLPVDSSIPVIVFVGRLEEQKGSDILIAAIPEFVGENVQIIVLGTGKKKMEEELMQLEVKYPNIARGIAKFNVPLAHMMFAGSDFIIVPSRFEPCGLIQLQGMRVSSSLCYSSDLSAHSHLFITWRTC

SEQ ID NO: 159993 - protein, 86 aa, Zea Mays
MPMGCRVRQWIFRNTTSVAIFCILFAALLWILWIIYKRRTLSNRAEQIYEQGSPVGSSREKECFPVEEGRRTHTRRFSNRSISKGD

SEQ ID NO: 159994 - protein, 157 aa, Zea Mays
MPMGCRVRQWIFRNTTSVAIFCILHCFGYCGSFTRGGHYLIELSKYTSRDHLLVPQERKNAFLWKKVEELIREDSRIDQYPKVIKGESKVVYEWQASGSLSAKIKKVQGARAKSRTGVGVIKFGEEMSASSLGEVREQGSCDLTREERSKDKVTCSD

SEQ ID NO: 159995 - protein, 262 aa, Zea Mays
MPSRSPRQSARPPLPTAAEPPPGLFPAREDLVRLLAVIFIAAAAAAACSVLNRRPEPFCDSPQWPDDYADDSCQPCPPNGRCVDGELECVQGFKRHGKACIEDGLLIQRANKIFQEHEVSNAIDELLSKIPAGLTEDGLQLVKTRVLESAGGFFDTTFTSSKVKVYKCPELVAELHMPMGCRVRQWIFRNTTSVAIFCILFAALLWILWIIYKRRTLSNRAEQIYEQGSPVGSSREKECFPVEEGRRTHTRRFSNRSISKGD

SEQ ID NO: 159996 - protein, 148 aa, Zea Mays
MTTPTLLQLRICDQHARALCGHSAEILFQEHEVSNAIDELLSKIPAGLTEDGLQLVKTRVLESAGGFFDTTFTSSKVKVYKCPELVAELHMPMGCRVRQWIFRNTTSVAIFCILHCFGYCGSFTRGGHYLIELSKYTSRYVKSLKIML

SEQ ID NO: 159997 - protein, 299 aa, Zea Mays
MPSRSPRQSARPPLPTAAEPPPGLFPAREDLVRLLAVIFIAAAAAAACSVLNRRPEPFCDSPQWPDDYADDSCQPCPPNGRCVDGELECVQGFKRHGKACIEDGLLIQRANKISQLLQLRICDQHARALCGHSAEILFQEHEVSNAIDELLSKIPAGLTEDGLQLVKTRVLESAGGFFDTTFTSSKVKVYKCPELVAELHMPMGCRVRQWIFRNTTSVAIFCILHCFGYCGSFTRGGHYLIELSKYTSSFSFAVTPFGPSGICAFVCCHSVGITCWFLKRERMLSCGRRSKNSYEKILE

SEQ ID NO: 159998 - protein, 357 aa, Zea Mays
MPSRSPRQSARPPLPTAAEPPPGLFPAREDLVRLLAVIFIAAAAAAACSVLNRRPEPFCDSPQWPDDYADDSCQPCPPNGRCVDGELECVQGFKRHGKACIEDGLLIQRANKISQLLQLRICDQHARALCGHSAEILFQEHEVSNAIDELLSKIPAGLTEDGLQLVKTRVLESAGGFFDTTFTSSKVKVYKCPELVAELHMPMGCRVRQWIFRNTTSVAIFCILHCFGYCGSFTRGGHYLIELSKYTSRDHLLVPQERKNAFLWKKVEELIREDSRIDQYPKVIKGESKVVYEWQASGSLSAKIKKVQGARAKSRTGVGVIKFGEEMSASSLGEVREQGSCDLTREERSKDKVTCSD

SEQ ID NO: 159999 - protein, 286 aa, Zea Mays
MPSRSPRQSARPPLPTAAEPPPGLFPAREDLVRLLAVIFIAAAAAAACSVLNRRPEPFCDSPQWPDDYADDSCQPCPPNGRCVDGELECVQGFKRHGKACIEDGLLIQRANKISQLLQLRICDQHARALCGHSAEILFQEHEVSNAIDELLSKIPAGLTEDGLQLVKTRVLESAGGFFDTTFTSSKVKVYKCPELVAELHMPMGCRVRQWIFRNTTSVAIFCILFAALLWILWIIYKRRTLSNRAEQIYEQGSPVGSSREKECFPVEEGRRTHTRRFSNRSISKGD

SEQ ID NO: 160000 - protein, 265 aa, Zea Mays
MPSRSPRQSARPPLPTAAEPPPGLFPAREDLVRLLAVIFIAAAAAAACSVLNRRPEPFCDSPQWPDDYADDSCQPCPPNGRCVDGELECVQGFKRHGKACIEDGLLIQRANKISQLLQLRICDQHARALCGHSAEILFQEHEVSNAIDELLSKIPAGLTEDGLQLVKTRVLESAGGFFDTTFTSSKVKVYKCPELVAELHMPMGCRVRQWIFRNTTSVAIFCILVCFYNCYLGTRLVYRQLSDDGTQVCSTALDTVDHLQEADII

SEQ ID NO: 160001 - protein, 593 aa, Zea Mays
MVAFDEDFEAELSENHEARFEVSMLAQSPDREFTEVFINTELYARVSVAVLFHQLWKQIKEHSILETEEALECGKLFLLELLDSAVNSKDLSKELYKKYSSVHRRKVRVWQMICVLSHYVEDDIVGEVTSSIHICLYRNNLPAVRQYLETFAILLYLKFPTLAEEQLIPIFHDKGMRQQALSSYVFIAANVILHSRQSVQIYHLNQLLPPILPFLTSHHHSLRGFTQLLVHSVLSRLWPTLHPETSEDAVFERRCFQELKDYLAENSDCVRLRVSIEGFLDVFDPNASGTPPGIFSARPEVSDFECVPVSVMERVIEFLNDVREDLRQAIANDTVTIKNEDLAVGEHHKSDESVSEMVKTGQEVLDFQKKITPHRGDSEQALNLNTRGHSGVGDEYISRIISEMEEDDQVFDLALEARLHAAETIKQSRQELIVVASLVERIPNLAGLTRTCEVFRAAGLVVADKSVLQDKQFRLISVTAEKWLPVTEVPVDSVKAYLERKRGDGYSVIGLEQTANSMPLDRFGFPDRTVLVLGREKEGIPVDIIHILDACVEIPQLGRGEVAQCPCQRRHSRLGVHASTTQSALACCLFLLH

SEQ ID NO: 160002 - protein, 1211 aa, Zea Mays
MTLASCVASCTRQSETNDVPCAISGKAVTKCDGCVPTEVRPTDLLDVLWILSERSKQHFNPKYRLKVCEQVIQVATSLINATEIPLNQLLHFIATIPREFTDYIGPLRVVVQKWFFQKEECSPGDTLLSKLIDFSATFVSQKRNEGSNVFDDEDVDAWEAEARRWARTLLLVTEEEEHLKRIFRFLEAYGYKLSEQCPSGDFIPIKFFIIVLSFIEELELRQRKLVCRSNTILRGSDTLNGLVLDDLNKMFTESLLLILENMVAFSKLSCSIFWLDVDNKDLPPSIKGKLGGPSQRRLATSITSSVLQGIWSMRCVSSVASWCNPYNSDDSVSSAFSVLWDFYLNVTHHSTIANEIGAELHLAAYEALAYVLAVLSTASSTQFLDFVEAKQTDQAHKFSLDILVTTFLDNINHLLTEGTLTRSRRAVLMTWKWLCMDSLLSISSCYSDNESQMKRLEPLFSDSTLRCIFLDIIESLENTGENSVLSILRCVRSVLRLLHLNEGNTIFSSLGISYEMMMQLAKSSWILHLNCNKRRVAPIAALLSAVLHPAIFCNLEMHQTNEKGPGPLKWFVENLLNEGSKSPRTIRLAALHLSGLWLMYPKTLRFYMEELKLLSLYGSVAFDEDFEAELSENHEARFEVSMLAQSPDREFTEVFINTELYARVSVAVLFHQLWKQIKEHSILETEEALECGKLFLLELLDSAVNSKDLSKELYKKYSSVHRRKVRVWQMICVLSHYVEDDIVGEVTSSIHICLYRNNLPAVRQYLETFAILLYLKFPTLAEEQLIPIFHDKGMRQQALSSYVFIAANVILHSRQSVQIYHLNQLLPPILPFLTSHHHSLRGFTQLLVHSVLSRLWPTLHPETSEDAVFERRCFQELKDYLAENSDCVRLRVSIEGFLDVFDPNASGTPPGIFSARPEVSDFECVPVSVMERVIEFLNDVREDLRQAIANDTVTIKNEDLAVGEHHKSDESVSEMVKTGQEVLDFQKKITPHRGDSEQALNLNTRGHSGVGDEYISRIISEMEEDDQVFDLALEARLHAAETIKQSRQELIVVASLVERIPNLAGLTRTCEVFRAAGLVVADKSVLQDKQFRLISVTAEKWLPVTEVPVDSVKAYLERKRGDGYSVIGLEQTANSMPLDRFGFPDRTVLVLGREKEGIPVDIIHILDACVEIPQLGRGEVAQCPCQRRHSRLGVHASTTQSALACCLFLLH

SEQ ID NO: 160003 - protein, 962 aa, Zea Mays
MFTESLLLILENMVAFSKLSCSIFWLDVDNKDLPPSIKGKLGGPSQRRLATSITSSVLQGIWSMRCVSSVASWCNPYNSDDSVSSAFSVLWDFYLNVTHHSTIANEIGAELHLAAYEALAYVLAVLSTASSTQFLDFVEAKQTDQAHKFSLDILVTTFLDNINHLLTEGTLTRSRRAVLMTWKWLCMDSLLSISSCYSDNESQMKRLEPLFSDSTLRCIFLDIIESLENTGENSVLSILRCVRSVLRLLHLNEGNTIFSSLGISYEMMMQLAKSSWILHLNCNKRRVAPIAALLSAVLHPAIFCNLEMHQTNEKGPGPLKWFVENLLNEGSKSPRTIRLAALHLSGLWLMYPKTLRFYMEELKLLSLYGSVAFDEDFEAELSENHEARFEVSMLAQSPDREFTEVFINTELYARVSVAVLFHQLWKQIKEHSILETEEALECGKLFLLELLDSAVNSKDLSKELYKKYSSVHRRKVRVWQMICVLSHYVEDDIVGEVTSSIHICLYRNNLPAVRQYLETFAILLYLKFPTLAEEQLIPIFHDKGMRQQALSSYVFIAANVILHSRQSVQIYHLNQLLPPILPFLTSHHHSLRGFTQLLVHSVLSRLWPTLHPETSEDAVFERRCFQELKDYLAENSDCVRLRVSIEGFLDVFDPNASGTPPGIFSARPEVSDFECVPVSVMERVIEFLNDVREDLRQAIANDTVTIKNEDLAVGEHHKSDESVSEMVKTGQEVLDFQKKITPHRGDSEQALNLNTRGHSGVGDEYISRIISEMEEDDQVFDLALEARLHAAETIKQSRQELIVVASLVERIPNLAGLTRTCEVFRAAGLVVADKSVLQDKQFRLISVTAEKWLPVTEVPVDSVKAYLERKRGDGYSVIGLEQTANSMPLDRFGFPDRTVLVLGREKEGIPVDIIHILDACVEIPQLGRGEVAQCPCQRRHSRLGVHASTTQSALACCLFLLH

SEQ ID NO: 160004 - protein, 1800 aa, Zea Mays
MASPPEREVAALESCFRALSAADAVPAVVDCVLASSASSSPSQLFHALLRSFPPSQSDRHAAICHAAALRHLLAQLDSPPKVREALRLLLWRVFLPLLQDIIEPTHPAHFDLVIEMMCNAVSDTGCWDLLGATIVSFCIRSSVVAMGLSAADANSILYQSIMEADFPAETLSCLLPLSNSSSVLASLLVDMLERRRTIPTSQEGAADLAALVQNLTWDLAKLVLKMFTHAQEYRSCATRVLLQPVLISLTDVSSVTVSFGAVQHKLSRFGFLECIWNSCISLFPLGPGERLDAYRILSVYFSTLKSGHQAAVLGVGIVQEFDLKNVSEFWDELRRGLVDKDSLVRKQAFYVLTISLSIFTSSSGNDSCQHFSSRSPAALPAQIKANAGETKRERWANKEAKSLGVGEMDQSGENCSNGQDRWKVFLLLYEMLQEYGTHLVEAAWTHHVVRLFECTLQNDYLNHTSCGAFHAQMESWERILYWMAVLWERGFSHENPQVRCLVMQSFLDIAWERYKVCTHIIPRGFVLGPLIRGLNDVVHHKDFGIGGAYSSKTIKDAQRFFRTYTHNLARCDRIHLVWSLASAAKQDSFGRAGLMTLASCVASCTRQSETNDVPCAISGKAVTKCDGCVPTEVRPTDLLDVLWILSERSKQHFNPKYRLKVCEQVIQVATSLINATEIPLNQLLHFIATIPREFTDYIGPLRVVVQKWFFQKEECSPGDTLLSKLIDFSATFVSQKRNEGSNVFDDEDVDAWEAEARRWARTLLLVTEEEEHLKRIFRFLEAYGYKLSEQCPSGDFIPIKFFIIVLSFIEELELRQRKLVCRSNTILRGSDTLNGLVLDDLNKMFTESLLLILENMVAFSKLSCSIFWLDVDNKDLPPSIKGKLGGPSQRRLATSITSSVLQGIWSMRCVSSVASWCNPYNSDDSVSSAFSVLWDFYLNVTHHSTIANEIGAELHLAAYEALAYVLAVLSTASSTQFLDFVEAKQTDQAHKFSLDILVTTFLDNINHLLTEGTLTRSRRAVLMTWKWLCMDSLLSISSCYSDNESQMKRLEPLFSDSTLRCIFLDIIESLENTGENSVLSILRCVRSVLRLLHLNEGNTIFSSLGISYEMMMQLAKSSWILHLNCNKRRVAPIAALLSAVLHPAIFCNLEMHQTNEKGPGPLKWFVENLLNEGSKSPRTIRLAALHLSGLWLMYPKTLRFYMEELKLLSLYGSDFEAELSENHEARFEVSMLAQSPDREFTEVFINTELYARVSVAVLFHQLWKQIKEHSILETEEALECGKLFLLELLDSAVNSKDLSKELYKKYSSVHRRKVRVWQMICVLSHYVEDDIVGEVTSSIHICLYRNNLPAVRQYLETFAILLYLKFPTLAEEQLIPIFHDKGMRQQALSSYVFIAANVILHSRQSVQIYHLNQLLPPILPFLTSHHHSLRGFTQLLVHSVLSRLWPTLHPETSEDAVFERRCFQELKDYLAENSDCVRLRVSIEGFLDVFDPNASGTPPGIFSARPEVSDFECVPVSVMERVIEFLNDVREDLRQAIANDTVTIKNEDLAVGEHHKSDESVSEMVKTGQEVLDFQKKITPHRGDSEQALNLNTRGHSGVGDEYISRIISEMEEDDQVFDLALEARLHAAETIKQSRQELIVVASLVERIPNLAGLTRTCEVFRAAGLVVADKSVLQDKQFRLISVTAEKWLPVTEVPVDSVKAYLERKRGDGYSVIGLEQTANSMPLDRFGFPDRTVLVLGREKEGIPVDIIHILDACVEIPQLGRGEVAQCPCQRRHSRLGVHASTTQSALACCLFLLH

SEQ ID NO: 160005 - protein, 1322 aa, Zea Mays
MASPPEREVAALESCFRALSAADAVPAVVDCVLASSASSSPSQLFHALLRSFPPSQREQGLQAQSDRHAAICHAAALRHLLAQLDSPPKVREALRLLLWRVFLPLLQDIIEPTHPAHFDLVIEMMCNAVSDTGCWDLLGATIVSFCIRSSVVAMGLSAADANSILYQSIMEADFPAETLSCLLPLSNSSSVLASLLVDMLERRRTIPTSQEGAADLAALVQNLTWDLAKLVLKMFTHAQEYRSCATRVLLQPVLISLTDVSSVTVSFGAVQHKLSRFGFLECIWNSCISLFPLGPGERLDAYRILSVYFSTLKSGHQAAVLGVGIVQEFDLKNVSEFWDELRRGLVDKDSLVRKQAFYVLTISLSIFTSSSGNDSCQHFSSRSPAALPAQIKANAGETKRERWANKEAKSLGVGEMDQSGENCSNGQDRWKVFLLLYEMLQEYGTHLVEAAWTHHVVRLFECTLQNDYLNHTSCGAFHAQMESWERILYWMAVLWERGFSHENPQVRCLVMQSFLDIAWERYKVCTHIIPRGFVLGPLIRGLNDVVHHKDFGIGGAYSSKTIKDAQRFFRTYTHNLARCDRIHLVWSLASAAKQDSFGRAGLMTLASCVASCTRQSETNDVPCAISGKAVTKCDGCVPTEVRPTDLLDVLWILSERSKQHFNPKYRLKVCEQVIQVATSLINATEIPLNQLLHFIATIPREFTDYIGPLRVVVQKWFFQKEECSPGDTLLSKLIDFSATFVSQKRNEGSNVFDDEDVDAWEAEARRWARTLLLVTEEEEHLKRIFRFLEAYGYKLSEQCPSGDFIPIKFFIIVLSFIEELELRQRKLVCRSNTILRGSDTLNGLVLDDLNKMFTESLLLILENMVAFSKLSCSIFWLDVDNKDLPPSIKGKLGGPSQRRLATSITSSVLQGIWSMRCVSSVASWCNPYNSDDSVSSAFSVLWDFYLNVTHHSTIANEIGAELHLAAYEALAYVLAVLSTASSTQFLDFVEAKQTDQAHKFSLDILVTTFLDNINHLLTEGTLTRSRRAVLMTWKWLCMDSLLSISSCYSDNESQMKRLEPLFSDSTLRCIFLDIIESLENTGENSVLSILRCVRSVLRLLHLNEGNTIFSSLGISYEMMMQLAKSSWILHLNCNKRRVAPIAALLSAVLHPAIFCNLEMHQTNEKGPGPLKWFVENLLNEGSKSPRTIRLAALHLSGLWLMYPKTLRFYMEELKLLSLYGSVAFDEDFEAELSENHEARFEVSMLAQSPDREFTEVFINTELYARVSVAVLFHQLWKQIKEHSILETEEALECGKLFLLELLDSAVNSKDLSKELYKKYSSA

SEQ ID NO: 160006 - protein, 1120 aa, Zea Mays
MASPPEREVAALESCFRALSAADAVPAVVDCVLASSASSSPSQLFHALLRSFPPSQSDRHAAICHAAALRHLLAQLDSPPKVREALRLLLWRVFLPLLQDIIEPTHPAHFDLVIEMMCNAVSDTGCWDLLGATIVSFCIRSSVVAMGLSAADANSILYQSIMEADFPAETLSCLLPLSNSSSVLASLLVDMLERRRTIPTSQEGAADLAALVQNLTWDLAKLVLKMFTHAQEYRSCATRVLLQPVLISLTDVSSVTVSFGAVQHKLSRFGFLECIWNSCISLFPLGPGERLDAYRILSVYFSTLKSGHQAAVLGVGIVQEFDLKNVSEFWDELRRGLVDKDSLVRKQAFYVLTISLSIFTSSSGNDSCQHFSSRSPAALPAQIKANAGETKRERWANKEAKSLGVGEMDQSGENCSNGQDRWKVFLLLYEMLQEYGTHLVEAAWTHHVVRLFECTLQNDYLNHTSCGAFHAQMESWERILYWMAVLWERGFSHENPQVRCLVMQSFLDIAWERYKVCTHIIPRGFVLGPLIRGLNDVVHHKDFGIGGAYSSKTIKDAQRFFRTYTHNLARCDRIHLVWSLASAAKQDSFGRAGLMTLASCVASCTRQSETNDVPCAISGKAVTKCDGCVPTEVRPTDLLDVLWILSERSKQHFNPKYRLKVCEQVIQVATSLINATEIPLNQLLHFIATIPREFTDYIGPLRVVVQKWFFQKEECSPGDTLLSKLIDFSATFVSQKRNEGSNVFDDEDVDAWEAEARRWARTLLLVTEEEEHLKRIFRFLEAYGYKLSEQCPSGDFIPIKFFIIVLSFIEELELRQRKLVCRSNTILRGSDTLNGLVLDDLNKMFTESLLLILENMVAFSKLSCSIFWLDVDNKDLPPSIKGKLGGPSQRRLATSITSSVLQGIWSMRCVSSVASWCNPYNSDDSVSSAFSVLWDFYLNVTHHSTIANEIGAELHLAAYEALAYVLAVLSTASSTQFLDFVEAKQTDQAHKFSLDILVTTFLDNINHLLTEGTLTRSRRAVLMTWKWLCMDSLLSISSCYSDNESQMKRLEPLFSDSTLRCIFLDIIESLENTGENSVLSILRCVRSVLRLLHLNEGNTIFSSLGISYELPFSIFLSLFR

SEQ ID NO: 160007 - protein, 935 aa, Zea Mays
MWTTRIYPLLSKESLEAQASVVWLPPLLLQYYRIWSMRCVSSVASWCNPYNSDDSVSSAFSVLWDFYLNVTHHSTIANEIGAELHLAAYEALAYVLAVLSTASSTQFLDFVEAKQTDQAHKFSLDILVTTFLDNINHLLTEGTLTRSRRAVLMTWKWLCMDSLLSISSCYSDNESQMKRLEPLFSDSTLRCIFLDIIESLENTGENSVLSILRCVRSVLRLLHLNEGNTIFSSLGISYEMMMQLAKSSWILHLNCNKRRVAPIAALLSAVLHPAIFCNLEMHQTNEKGPGPLKWFVENLLNEGSKSPRTIRLAALHLSGLWLMYPKTLRFYMEELKLLSLYGSVAFDEDFEAELSENHEARFEVSMLAQSPDREFTEVFINTELYARVSVAVLFHQLWKQIKEHSILETEEALECGKLFLLELLDSAVNSKDLSKELYKKYSSVHRRKVRVWQMICVLSHYVEDDIVGEVTSSIHICLYRNNLPAVRQYLETFAILLYLKFPTLAEEQLIPIFHDKGMRQQALSSYVFIAANVILHSRQSVQIYHLNQLLPPILPFLTSHHHSLRGFTQLLVHSVLSRLWPTLHPETSEDAVFERRCFQELKDYLAENSDCVRLRVSIEGFLDVFDPNASGTPPGIFSARPEVSDFECVPVSVMERVIEFLNDVREDLRQAIANDTVTIKNEDLAVGEHHKSDESVSEMVKTGQEVLDFQKKITPHRGDSEQALNLNTRGHSGVGDEYISRIISEMEEDDQVFDLALEARLHAAETIKQSRQELIVVASLVERIPNLAGLTRTCEVFRAAGLVVADKSVLQDKQFRLISVTAEKWLPVTEVPVDSVKAYLERKRGDGYSVIGLEQTANSMPLDRFGFPDRTVLVLGREKEGIPVDIIHILDACVEIPQLGRGEVAQCPCQRRHSRLGVHASTTQSALACCLFLLH

SEQ ID NO: 160008 - protein, 1173 aa, Zea Mays
MASPPEREVAALESCFRALSAADAVPAVVDCVLASSASSSPSQLFHALLRSFPPSQSDRHAAICHAAALRHLLAQLDSPPKVREALRLLLWRVFLPLLQDIIEPTHPAHFDLVIEMMCNAVSDTGCWDLLGATIVSFCIRSSVVAMGLSAADANSILYQSIMEADFPAETLSCLLPLSNSSSVLASLLVDMLERRRTIPTSQEGAADLAALVQNLTWDLAKLVLKMFTHAQEYRSCATRVLLQPVLISLTDVSSVTVSFGAVQHKLSRFGFLECIWNSCISLFPLGPGERLDAYRILSVYFSTLKSGHQAAVLGVGIVQEFDLKNVSEFWDELRRGLVDKDSLVRKQAFYVLTISLSIFTSSSGNDSCQHFSSRSPAALPAQIKANAGETKRERWANKEAKSLGVGEMDQSGENCSNGQDRWKVFLLLYEMLQEYGTHLVEAAWTHHVVRLFECTLQNDYLNHTSCGAFHAQMESWERILYWMAVLWERGFSHENPQVRCLVMQSFLDIAWERYKVCTHIIPRGFVLGPLIRGLNDVVHHKDFGIGGAYSSKTIKDAQRFFRTYTHNLARCDRIHLVWSLASAAKQDSFGRAGLMTLASCVASCTRQSETNDVPCAISGKAVTKCDGCVPTEVRPTDLLDVLWILSERSKQHFNPKYRLKVCEQVIQVATSLINATEIPLNQLLHFIATIPREFTDYIGPLRVVVQKWFFQKEECSPGDTLLSKLIDFSATFVSQKRNEGSNVFDDEDVDAWEAEARRWARTLLLVTEEEEHLKRIFRFLEAYGYKLSEQCPSGDFIPIKFFIIVLSFIEELELRQRKLVCRSNTILRGSDTLNGLVLDDLNKMFTESLLLILENMVAFSKLSCSIFWLDVDNKDLPPSIKGKLGGPSQRRLATSITSSVLQGIWSMRCVSSVASWCNPYNSDDSVSSAFSVLWDFYLNVTHHSTIANEIGAELHLAAYEALAYVLAVLSTASSTQFLDFVEAKQTDQAHKFSLDILVTTFLDNINHLLTEGTLTRSRRAVLMTWKWLCMDSLLSISSCYSDNESQMKRLEPLFSDSTLRCIFLDIIESLENTGENSVLSILRCVRSVLRLLHLNEGNTIFSSLGISYEMMMQLAKSSWILHLNCNKRRVAPIAALLSAVLHPAIFCNLEMHQTNEKGPGPLKWVSCEFSHCL

SEQ ID NO: 160009 - protein, 1181 aa, Zea Mays
MASPPEREVAALESCFRALSAADAVPAVVDCVLASSASSSPSQLFHALLRSFPPSQREQGLQAQSDRHAAICHAAALRHLLAQLDSPPKVREALRLLLWRVFLPLLQDIIEPTHPAHFDLVIEMMCNAVSDTGCWDLLGATIVSFCIRSSVVAMGLSAADANSILYQSIMEADFPAETLSCLLPLSNSSSVLASLLVDMLERRRTIPTSQEGAADLAALVQNLTWDLAKLVLKMFTHAQEYRSCATRVLLQPVLISLTDVSSVTVSFGAVQHKLSRFGFLECIWNSCISLFPLGPGERLDAYRILSVYFSTLKSGHQAAVLGVGIVQEFDLKNVSEFWDELRRGLVDKDSLVRKQAFYVLTISLSIFTSSSGNDSCQHFSSRSPAALPAQIKANAGETKRERWANKEAKSLGVGEMDQSGENCSNGQDRWKVFLLLYEMLQEYGTHLVEAAWTHHVVRLFECTLQNDYLNHTSCGAFHAQMESWERILYWMAVLWERGFSHENPQVRCLVMQSFLDIAWERYKVCTHIIPRGFVLGPLIRGLNDVVHHKDFGIGGAYSSKTIKDAQRFFRTYTHNLARCDRIHLVWSLASAAKQDSFGRAGLMTLASCVASCTRQSETNDVPCAISGKAVTKCDGCVPTEVRPTDLLDVLWILSERSKQHFNPKYRLKVCEQVIQVATSLINATEIPLNQLLHFIATIPREFTDYIGPLRVVVQKWFFQKEECSPGDTLLSKLIDFSATFVSQKRNEGSNVFDDEDVDAWEAEARRWARTLLLVTEEEEHLKRIFRFLEAYGYKLSEQCPSGDFIPIKFFIIVLSFIEELELRQRKLVCRSNTILRGSDTLNGLVLDDLNKMFTESLLLILENMVAFSKLSCSIFWLDVDNKDLPPSIKGKLGGPSQRRLATSITSSVLQGIWSMRCVSSVASWCNPYNSDDSVSSAFSVLWDFYLNVTHHSTIANEIGAELHLAAYEALAYVLAVLSTASSTQFLDFVEAKQTDQAHKFSLDILVTTFLDNINHLLTEGTLTRSRRAVLMTWKWLCMDSLLSISSCYSDNESQMKRLEPLFSDSTLRCIFLDIIESLENTGENSVLSILRCVRSVLRLLHLNEGNTIFSSLGISYEMMMQLAKSSWILHLNCNKRRVAPIAALLSAVLHPAIFCNLEMHQTNEKGPGPLKWVSCEFSHCL

SEQ ID NO: 160010 - protein, 680 aa, Zea Mays
MASPPEREVAALESCFRALSAADAVPAVVDCVLASSASSSPSQLFHALLRSFPPSQREQGLQAQSDRHAAICHAAALRHLLAQLDSPPKVREALRLLLWRVFLPLLQDIIEPTHPAHFDLVIEMMCNAVSDTGCWDLLGATIVSFCIRSSVVAMGLSAADANSILYQSIMEADFPAETLSCLLPLSNSSSVLASLLVDMLERRRTIPTSQEGAADLAALVQNLTWDLAKLVLKMFTHAQEYRSCATRVLLQPVLISLTDVSSVTVSFGAVQHKLSRFGFLECIWNSCISLFPLGPGERLDAYRILSVYFSTLKSGHQAAVLGVGIVQEFDLKNVSEFWDELRRGLVDKDSLVRKQAFYVLTISLSIFTSSSGNDSCQHFSSRSPAALPAQIKANAGETKRERWANKEAKSLGVGEMDQSGENCSNGQDRWKVFLLLYEMLQEYGTHLVEAAWTHHVVRLFECTLQNDYLNHTSCGAFHAQMESWERILYWMAVLWERGFSHENPQVRCLVMQSFLDIAWERYKVCTHIIPRGFVLGPLIRGLNDVVHHKDFGIGGAYSSKTIKDAQRFFRTYTHNLARCDRIHLVWSLASAAKQDSFGRAGLMTLASCVASCTRQSETNDVPCAISGKAVTKCDGCVPTEVRPTDLLDVLWILSERSKQHFNPKYRLKGSTLHLFLIEKF

SEQ ID NO: 160011 - protein, 728 aa, Zea Mays
MSSRLWAAQALTRPRNFPASPALFFVAVVVVGQISRVFGFAGLRFAAAMASPPEREVAALESCFRALSAADAVPAVVDCVLASSASSSPSQLFHALLRSFPPSQREQGLQAQSDRHAAICHAAALRHLLAQLDSPPKVREALRLLLWRVFLPLLQDIIEPTHPAHFDLVIEMMCNAVSDTGCWDLLGATIVSFCIRSSVVAMGLSAADANSILYQSIMEADFPAETLSCLLPLSNSSSVLASLLVDMLERRRTIPTSQEGAADLAALVQNLTWDLAKLVLKMFTHAQEYRSCATRVLLQPVLISLTDVSSVTVSFGAVQHKLSRFGFLECIWNSCISLFPLGPGERLDAYRILSVYFSTLKSGHQAAVLGVGIVQEFDLKNVSEFWDELRRGLVDKDSLVRKQAFYVLTISLSIFTSSSGNDSCQHFSSRSPAALPAQIKANAGETKRERWANKEAKSLGVGEMDQSGENCSNGQDRWKVFLLLYEMLQEYGTHLVEAAWTHHVVRLFECTLQNDYLNHTSCGAFHAQMESWERILYWMAVLWERGFSHENPQVRCLVMQSFLDIAWERYKVCTHIIPRGFVLGPLIRGLNDVVHHKDFGIGGAYSSKTIKDAQRFFRTYTHNLARCDRIHLVWSLASAAKQDSFGRAGLMTLASCVASCTRQSETNDVPCAISGKAVTKCDGCVPTEVRPTDLLDVLWILSERSKQHFNPKYRLKGSTLHLFLIEKF

SEQ ID NO: 160012 - protein, 1861 aa, Zea Mays
MSSRLWAAQALTRPRNFPASPALFFVAVVVVGQISRVFGFAGLRFAAAMASPPEREVAALESCFRALSAADAVPAVVDCVLASSASSSPSQLFHALLRSFPPSQREQGLQAQSDRHAAICHAAALRHLLAQLDSPPKVREALRLLLWRVFLPLLQDIIEPTHPAHFDLVIEMMCNAVSDTGCWDLLGATIVSFCIRSSVVAMGLSAADANSILYQSIMEADFPAETLSCLLPLSNSSSVLASLLVDMLERRRTIPTSQEGAADLAALVQNLTWDLAKLVLKMFTHAQEYRSCATRVLLQPVLISLTDVSSVTVSFGAVQHKLSRFGFLECIWNSCISLFPLGPGERLDAYRILSVYFSTLKSGHQAAVLGVGIVQEFDLKNVSEFWDELRRGLVDKDSLVRKQAFYVLTISLSIFTSSSGNDSCQHFSSRSPAALPAQIKANAGETKRERWANKEAKSLGVGEMDQSGENCSNGQDRWKVFLLLYEMLQEYGTHLVEAAWTHHVVRLFECTLQNDYLNHTSCGAFHAQMESWERILYWMAVLWERGFSHENPQVRCLVMQSFLDIAWERYKVCTHIIPRGFVLGPLIRGLNDVVHHKDFGIGGAYSSKTIKDAQRFFRTYTHNLARCDRIHLVWSLASAAKQDSFGRAGLMTLASCVASCTRQSETNDVPCAISGKAVTKCDGCVPTEVRPTDLLDVLWILSERSKQHFNPKYRLKVCEQVIQVATSLINATEIPLNQLLHFIATIPREFTDYIGPLRVVVQKWFFQKEECSPGDTLLSKLIDFSATFVSQKRNEGSNVFDDEDVDAWEAEARRWARTLLLVTEEEEHLKRIFRFLEAYGYKLSEQCPSGDFIPIKFFIIVLSFIEELELRQRKLVCRSNTILRGSDTLNGLVLDDLNKMFTESLLLILENMVAFSKLSCSIFWLDVDNKDLPPSIKGKLGGPSQRRLATSITSSVLQGIWSMRCVSSVASWCNPYNSDDSVSSAFSVLWDFYLNVTHHSTIANEIGAELHLAAYEALAYVLAVLSTASSTQFLDFVEAKQTDQAHKFSLDILVTTFLDNINHLLTEGTLTRSRRAVLMTWKWLCMDSLLSISSCYSDNESQMKRLEPLFSDSTLRCIFLDIIESLENTGENSVLSILRCVRSVLRLLHLNEGNTIFSSLGISYEMMMQLAKSSWILHLNCNKRRVAPIAALLSAVLHPAIFCNLEMHQTNEKGPGPLKWFVENLLNEGSKSPRTIRLAALHLSGLWLMYPKTLRFYMEELKLLSLYGSVAFDEDFEAELSENHEARFEVSMLAQSPDREFTEVFINTELYARVSVAVLFHQLWKQIKEHSILETEEALECGKLFLLELLDSAVNSKDLSKELYKKYSSVHRRKVRVWQMICVLSHYVEDDIVGEVTSSIHICLYRNNLPAVRQYLETFAILLYLKFPTLAEEQLIPIFHDKGMRQQALSSYVFIAANVILHSRQSVQIYHLNQLLPPILPFLTSHHHSLRGFTQLLVHSVLSRLWPTLHPETSEDAVFERRCFQELKDYLAENSDCVRLRVSIEGFLDVFDPNASGTPPGIFSARPEVSDFECVPVSVMERVIEFLNDVREDLRQAIANDTVTIKNEDLAVGEHHKSDESVSEMVKTGQEVLDFQKKITPHRGDSEQALNLNTRGHSGVGDEYISRIISEMEEDDQVFDLALEARLHAAETIKQSRQELIVVASLVERIPNLAGLTRTCEVFRAAGLVVADKSVLQDKQFRLISVTAEKWLPVTEVPVDSVKAYLERKRGDGYSVIGLEQTANSMPLDRFGFPDRTVLVLGREKEGIPVDIIHILDACVEIPQLGRGEVAQCPCQRRHSRLGVHASTTQSALACCLFLLH

SEQ ID NO: 160013 - protein, 74 aa, Zea Mays
MFTESLLLILENMVAFSKLSCSIFWLDVDNKDLPPSIKGKLGGPSQRRLATSITSSVLQGVCSVLFFFSLVCFV

SEQ ID NO: 160014 - protein, 525 aa, Zea Mays
MASPPEREVAALESCFRALSAADAVPAVVDCVLASSASSSPSQLFHALLRSFPPSQSDRHAAICHAAALRHLLAQLDSPPKVREALRLLLWRVFLPLLQDIIEPTHPAHFDLVIEMMCNAVSDTGCWDLLGATIVSFCIRSSVVAMGLSAADANSILYQSIMEADFPAETLSCLLPLSNSSSVLASLLVDMLERRRTIPTSQEGAADLAALVQNLTWDLAKLVLKMFTHAQEYRSCATRVLLQPVLISLTDVSSVTVSFGAVQHKLSRFGFLECIWNSCISLFPLGPGERLDAYRILSVYFSTLKSGHQAAVLGVGIVQEFDLKNVSEFWDELRRGLVDKDSLVRKQAFYVLTISLSIFTSSSGNDSCQHFSSRSPAALPAQIKANAGETKRERWANKEAKSLGVGEMDQSGENCSNGQDRWKVFLLLYEMLQEYGTHLVEAAWTHHVVRLFECTLQNDYLNHTSCGAFHAQMESWERILYWMAVLWERGFSHENPQVRCLVMQSFLDIAWERYKALGVLIVRKP

SEQ ID NO: 160015 - protein, 597 aa, Zea Mays
MASPPEREVAALESCFRALSAADAVPAVVDCVLASSASSSPSQLFHALLRSFPPSQREQGLQAQSDRHAAICHAAALRHLLAQLDSPPKVREALRLLLWRVFLPLLQDIIEPTHPAHFDLVIEMMCNAVSDTGCWDLLGATIVSFCIRSSVVAMGLSAADANSILYQSIMEADFPAETLSCLLPLSNSSSVLASLLVDMLERRRTIPTSQEGAADLAALVQNLTWDLAKLVLKMFTHAQEYRSCATRVLLQPVLISLTDVSSVTVSFGAVQHKLSRFGFLECIWNSCISLFPLGPGERLDAYRILSVYFSTLKSGHQAAVLGVGIVQEFDLKNVSEFWDELRRGLVDKDSLVRKQAFYVLTISLSIFTSSSGNDSCQHFSSRSPAALPAQIKANAGETKRERWANKEAKSLGVGEMDQSGENCSNGQDRWKVFLLLYEMLQEYGTHLVEAAWTHHVVRLFECTLQNDYLNHTSCGAFHAQMESWERILYWMAVLWERGFSHENPQVRCLVMQSFLDIAWERYKVCTHIIPRGFVLGPLIRGLNDVVHHKDFGIGGAYSSKTIKDAQRFFRTYTHNLARWIDDSCILCCFMHTSVRDK

SEQ ID NO: 160016 - protein, 98 aa, Zea Mays
MGKKGCKMKTHKRFRVTRKDKIMRRCAGKQHLLAKKNTKRKKRLSKMEMFADLWAKGFSLLGEHLHSSEIGAYGCTVFYYNTYSTLRLNLAQLVTMSC

SEQ ID NO: 160017 - protein, 81 aa, Zea Mays
MGKKGCKMKTHKRFRVTRKDKIMRRCAGKQHLLAKKNTKRKKRLSKMDSSALAQLGWPDMRIPILYTLSWPDRIYRPSSIC

SEQ ID NO: 160018 - protein, 52 aa, Zea Mays
MGKKGCKMKTHKRFRVTRKDKIMRRCAGKQHLLAKKNTKRKKRLSKMVYRWK

SEQ ID NO: 160019 - protein, 77 aa, Zea Mays
MFTKHVLFSSTRLYTYRVWIHVCNSSRSIANEPCETSPLWPNCFILRHIIFSLLFISFFAYNPVKCGVNSGMMYPCK

SEQ ID NO: 160020 - protein, 76 aa, Zea Mays
MILSDEELETYLKVIAVISMGTEVIEHDLLNIRELYDHVLALLYDYLRSKMNTITAILTALVGESVGAILCMVEVW

SEQ ID NO: 160021 - protein, 57 aa, Zea Mays
MGTEVIEHDLLNIRELYDHVLALLYDYLRSKMNTITAILTALVGESVGAILCMVEVW

SEQ ID NO: 160022 - protein, 93 aa, Zea Mays
MSLRSVTSSARRQQEAEVAATQERERAAAAAAATAARAARLAAAELAAARAEVEAAEAADAARAAAAELEVLRGSRAGSSASVDDNTDEELRL

SEQ ID NO: 160023 - protein, 76 aa, Zea Mays
MSQFCLIKLCLLSLLIPSHTCIAPLCCRSFSTLKLLATHLLCYCAFLLLFMHCYSNNYCRACCHYYCVGCQVLFIG

SEQ ID NO: 160024 - protein, 100 aa, Zea Mays
MKENGRGQFVVDFHGRLSALQAFSVCISLLHCSEASIAISLKKGKQKLYSSSLKLLLEEDVRHLIEAVTAEEKKKKKRSREKAPPPSVLLDPPFSPIGRV

SEQ ID NO: 160025 - protein, 645 aa, Zea Mays
MGQDAGFKREDHSGLGSGPQTLKVSCCTSEENESRNRRYHQLKCSESNSRQLHLDYVPNFHCRSLPTRSRKTNAEQSTVGKRGSMYQSSSEISRIRKIQEGRRKIDSAFDGDAFLSFDIVDASSRPSTSGAYLHSHQNRRSGAKPSVDTAKRASKDFLDLQFREHPDENFKLDRPRLDSTLLKNDDGFLEISLEKEIAKGGPCRNAAPILLNTGSGKCTDLQKMNGCPSENNCGDKGRDSASSSKSTPVKVSSFDGSCQSDGAQHHITENNTKARSSPFKKMLDPIMKSKSPRSPSIMERGGSNSATGPGSRKNSVSRKSLLGDFSRSEQASNCQPNGQTQKRVNKSALSPAHLQAVLRLDSKNGVQVFEFCVDGPGESISARNWKNGDELSSIYTFHSGGKRSSAAGRISKDGGWDLPPIVGQVQVSSYLCSEVGKDGTVNNSVVTEFVSYDIGHARRIVEEKTGALQQPQRTSLTEENKTGRNNSDVSTSCPWSEEDLHPYLEIAATVIEVPFSRYKSEEVKNGSSPCTVKVVAPSGLHGSPSDDEAGGPSPLLDRWRYGGGCDCGGWDMACPIDVIGNTYDNSWAESIATNVKHPMELFVQQRRAPRPFYEGERERAVCGGFPWATISVTGVFSMHLSAALF

SEQ ID NO: 160026 - protein, 2200 aa, Zea Mays
MVSFLPPQERNSNAHRHSRSDQRRPAAGHHHHYHQQQQQRRRQQQLTPYKLKCDKDPLNNKLGPPDFYPQTLNCPEETLTKDYVQYGYKETVEGIEEAREIVISQIPYFCKPDVVIKCKEALKKRLRAINESRAQKRKAGQVYGVPLSGSLLIKPGVYPEQRPCNEDTRRKWVEALAQPNKRLRSLSEHVPHGYRRKSLFEGLIRYNVPLLRATWFIKVTYLNQARPAPNSTSVVASDNQRSNQWTKDVVEYLQQILDEVCSKEGAIVPPSFKEQSSPGLAAGTNQIKMKTESSPAGDSEEPLVHFKWRYMVRLIQWHLTEELLVPSVLIEWLSNQLQERDSDDVLELLLPIILGLVDTITLSQTYVRMFVELLVRRLNVDRPKRFSVSSVIAELLRYMVLAVPDTFVSLDCFPFPSFVVPDVYGRGALLKITSGGGILCSKRRDAYRYLSCGYAVSSIQKRAHDLAAVANPSLQARGAAKVVQALDKALVTGNLSVAYFSLFNDLSDALMEERWIKEVNPCLQSSLMWIGTVELSLICSIFFLCEWATCDYRDCRASPSQNVKFTGRRDLSQIHMAVSILKNKMDEMNNLSRPKSSTRITLNKVAKGSLNDACLTAAAVDDSSGLRSNAKNVDEKKDTNDIFESPGPLHDIIVCWLDQHEVSNVAGFTRVDVLIAELIRNGIFFPQVYVRQLIISGITDKNDTMLDVERKRRHHRTLKQLPGSSLFDVLEETRTAEEQQLYEMMSTYSSERRLVLSELSCGHSFYASGRGEYTSSSCIRKQSDLPVASEGDKHGRVLEQVEDVKALLSSLLGFTYPPLVESKLCEIKTSFQESVTSTLTQVETGEAKSGCEDCMRSKGQKLDDSATPFQGFPLIQSGEEDIWWVKKGTKLQESFNVEPVQKSVKQTSRGRAKVVRKTQSLAQLAAARIEGSQGASTSHVCESKMSCPHHEPNNDGDNVKDFDHTRAANVTAIGKSLKRLRLLERRSVSSWLLKSIRQLVDGNGMTASKATNSISILPLQPDDKTASKWRLGDEELLSVLYVLDTCCDSVSGVKFLIWLLVKIRGVGSSGQPGRTYMLMRNRDHQVCQVNEALVFSSLLRYENILLATDILPDVLSALVNRNSMSATTRHPGSTAFAYVRYFLKKYRDVASVAKWEKNFRTTCDQRLLAELDNGRSIDGDLVSSSGILAGEEIDEQVRQKLNGRSSRLVQNMKEIVQRQADGIQRSLKEKKVLAGAAPRNPLTFEKEDSYQIAHDIVLGLVECIRQNGGANPDGDLSIVASAVSAIVVNAGHMIAKHLDFAGGNYQGVNSVATSLNFVRHTLLIHINSLCLLKETLGDRFSRAFEIALAVETSAAVTAAFAPPKMHRNQFQPSPEAHDAYGNHTSELSNSGKGFVGRTAKVSAAISALVVGAVVHGAVSLERMVATLKIKDGLDIMQLLRGLKSNTNGVSHPTGGFRIENSTEVSVHWFRILLGNCRTVYDGLIADILGDPYIIALSRLQRMLPLTVIFPPAYSIFAMVLWRRYIFNCEDPQLYQSFSNAINDITRHQPFREIYFRNTHRLYNLLASDVGDSKFAAMLESHSPDRNSKILPFIPLRARLFLDAIIDCNTPTIQGDGASEPCDPKDNELKLSERLMQLLDTLQPAKFHWQWVEMRLLLDEQALMEKVAAGKTTLESLRSLSPKAEGFALSDSEKGFTEVILSRLLARPDAAPLYSELVHLLGKLQESLVMDVKWILQGQDAILGRRSTRQQLVHIAQRKGLSTKAQVWKPWGWSSLLSDAIPNKTAKRKLEVTSIEEGEVVDDTVDAKRTTKTPPHSVDRSFEGIRSINKYLTEKALAELVLPCIDRSSADIRGILSVDLTKQMGAISEHIKAIALNGAKQAGSVSSGNEVPSNKSSGRRGIRGGSPNIGRRAPVGNDPSPPSASALRAALWLRLQFIIRLLPVIMADRSMRHTLASAILGLLATRMIYEDADLPLPPTNATALRRDVDSLLEPPLDVLLDRPGESLFEKLLCVLHALLGSYKPSWLKSRSASRSSIKSQRDFSAFDNEAAEGLQSALDHMELPETIRRRIQAAMPLLPPSRRPCMQCQPPQLSLAALSPLQSSTSGVGPQQKSSCVSWVPTNVSVRSKAALPSHDPETEVDPWSLLEDGTNCPPSTASGSNGSSGVTGDHANLKASSWLKGAVRVRRTELTYIGSVDDDS

SEQ ID NO: 160027 - protein, 297 aa, Zea Mays
MASSVHKVGMVLDSVQNDTMQLNRAMKEAALDSGSIQQKIVVLDTSMQKNLKGQGDLKVLVESNTKNIADQLAVLNSHSNKLVEISSALSVLPKQIERDLKQQQSDIFRIFRNNMEEIARAVKSLNSKIDAIQMPTRCTTNGRPLMNQLPVDRNERPQVNQTPEVTRVSQTTVASLVNQAPAANGRHLMSKTPAANGKSVMRQTPAENGRHLVSQTPAANGKTLKRQTSVTNGISLMSQVPAANGKPVVIQIPAPKGRPMMRQKTAESGRTEMNEIPVASGRPHTNKIPIAEVIGHL

SEQ ID NO: 160028 - protein, 427 aa, Zea Mays
MASSVHKVGMVLDSVQNDTMQLNRAMKEAALDSGSIQQKIVVLDTSMQKNLKGQGDLKVLVESNTKNIADQLAVLNSHSNKLVEISSALSVLPKQIERDLKQQQSDIFRIFRNNMEEIARAVKSLNSKIDAIQMPTEQRCTTNGRPLMNQLPVDRNERPQVNQTPEVTRVSQTTVASLVNQAPAANGRHLMSKTPAANGKSVMRQTPAENGRHLVSQTPAANGKTLKRQTSVTNGISLMSQVPAANGKPVVIQIPAPKGRPMMRQKTAESGRTEMNEIPVASGRPHTNKIPIAEVHPAPLVCPAKQVATDPKPKVDEEKLKALPQKLTSSRSRVAPKQEEAANTKVISRAAATEKVVIFIDDSDDDNDVRASCVILRPSGSGSLGERECDLMKVGAEESQEIPRRARKRRRREMQATVGVACMPLPA

SEQ ID NO: 160029 - protein, 249 aa, Zea Mays
MSESELAVIKPEALKTYIWLQCFDGSIQQVEEEVAMFCPMICREIVKNGTGSSKNHAIALPERVNPASLSLILDYCRFHQVTGRSNKERKSFDEKFVRIETERLCELTSAADSLQLKPLVDLTSRALARIIEGKTPEEIRDIFHLPDDLTEEEKLEPLKNVNDDPRIRLLNRLYAKKRKELQERQKLKDVQVQKEEKDERSLDELLCFINGDGGITTVQEVGKVVPRVRKRIKEGRIMLRTPQKLTLSL

SEQ ID NO: 160030 - protein, 266 aa, Zea Mays
MSESELAVIKPEALKTYIWLQCFDGSIQQVEEEVAMFCPMICREIVKNGTGSSKNHAIALPERVNPASLSLILDYCRFHQVTGRSNKERKSFDEKFVRIETERLCELTSAADSLQLKPLVDLTSRALARIIEGKTPEEIRDIFHLPDDLTEEEKLEPLKNVNDDPRIRLLNRLYAKKRKELQERQKLKDVQVQKEEKDERSLDELLCFINGDGGGGESSTKSKKKNKRRKDHAKNPAKADSESVNVVRFPDCFPCCVFHIGYVFLT

SEQ ID NO: 160031 - protein, 214 aa, Zea Mays
MFCPMICREIVKNGTGSSKNHAIALPERVNPASLSLILDYCRFHQVTGRSNKERKSFDEKFVRIETERLCELTSAADSLQLKPLVDLTSRALARIIEGKTPEEIRDIFHLPDDLTEEEKLEPLKNVNDDPRIRLLNRLYAKKRKELQERQKLKDVQVQKEEKDERSLDELLCFINGDGGITTVQEVGKVVPRVRKRIKEGRIMLRTPQKLTLSL

SEQ ID NO: 160032 - protein, 234 aa, Zea Mays
MSESELAVIKPEALKTYIWLQCFDGSIQQVEEEVAMFCPMICREIVKNGTGSSKNHAIALPERVNPASLSLILDYCRFHQVTGRSNKERKSFDEKFVRIETERLCELTSAADSLQLKPLVDLTSRALARIIEGKTPEEIRDIFHLPDDLTEEEKLEPLKNVNDDPRIRLLNRLYAKKRKELQERQKLKDVQVQKEEKDERSLDELLCFINGDGGITTVSYIDYMTYVILFTVCF

SEQ ID NO: 160033 - protein, 184 aa, Zea Mays
MFCPMICREIVKNGTGSSKNHAIALPERVNPASLSLILDYCRFHQVTGRSNKERKSFDEKFVRIETERLCELTSAADSLQLKPLVDLTSRALARIIEGKTPEEIRDIFHLPDDLTEEEKLEPLKNVNDDPRIRLLNRLYAKKRKELQERQKLKDVQVQKEEKDERSLDELLCFINGDGGYVFLT

SEQ ID NO: 160034 - protein, 102 aa, Zea Mays
MRIPLTYDEEKGAWFLEKELPEGRYEYKYVVDGKWLCNEHELITKPNADGHVNNYVQVSRDGTSDEEKELRERLTGPDPDLTDQERLMIREYLEQYADAAER

SEQ ID NO: 160035 - protein, 169 aa, Zea Mays
MFWILGYSLNEGHRLLQSKRACFPKLEAIKLATADILTGLSKNTITLKWEADGSSSVEISGLDIGWGQRIPLTYDEEKGAWFLEKELPEGRYEYKYVVDGKWLCNEHELITKPNADGHVNNYVQVSRDGTSDEEKELRERLTGPDPDLTDQERLMIREYLEQYADAAER

SEQ ID NO: 160036 - protein, 212 aa, Zea Mays
MNYNFIRPDLIVGSCLQSPLDVDKLRKIGVKTVFCLQQDSDLEYFGVDIRAIQDYSLQFKDIVHCRAEIRDFDAFDLRLRLPAVVSKLHKLINCNGGVTYIHCTAGLGRAPAVALAYMFWILGYSLNEGHRLLQSKRACFPKLEAIKLATADILTGLSKNTITLKWEADGSSSVEISGLDIGWGQRIPLTYDEEKGAWFLEKELPDGMNTNT

SEQ ID NO: 160037 - protein, 215 aa, Zea Mays
MNCLQNLLKEPPIVGSRSMRRPSPLNLAMVRGGSRRSNTVKTLQAPGASTSGAESSAVEMGTEKSEVYSTNMTQAMGAALTYRHELGMNYNFIRPDLIVGSCLQSPLDVDKLRKIGVKTVFCLQQDSDLEYFGVDIRAIQDYSLQFKDIVHCRAEIRDFDAFDLRLRLPAVVSKLHKLINCNGGVTYIHCTAGLGRAPAVAVVGLYVLDSWVQSQ

SEQ ID NO: 160038 - protein, 167 aa, Zea Mays
MAGSADAPPPTPPSTSPPGTPPHTKPRPLPSPSALMAEMAGSADALPPTPSPSSPPGIPPHTKPRPLPSSSPSTAPSWKARYADAPHSLPGSDDNHDAPSLPQSTAIKRMDRVRSFGTEGRKKDGVQIPASDKVYEYILFWGTDIKLSHHHHSRHHHKQLPCTMILP

SEQ ID NO: 160039 - protein, 312 aa, Zea Mays
MAGSADAPPPTPPSTSPPGTPPHTKPRPLPSPSALMAEMAGSADALPPTPSPSSPPGIPPHTKPRPLPSSSPSTAPSWKARYADAPHSLPGSDDNHDAPSLPQSTAIKRMDRVRSFGTEGRKKDGVQIPASDKVYEYILFWGTDIKSSPPQPSPPQAASLHNDPAIIQSHYSQPASTSSSLPSTGGAVLPDFSSQAVQYGLQRPNFQSNLPLYQPGNTPWGSLVAPPAGNAPWGSSVAPPAGNASTLLVPSMYWQGYYAPSSGLPHHLQPPPLLHPTPGLSVPQNLQYPGLNPSLQSGPQKLSELQPSLMQH

SEQ ID NO: 160040 - protein, 429 aa, Zea Mays
MTFMSCSAAISDGIPLRFPIEGSRTLCGGLGGVCARGVLALGSHRSNRSRRARHRHATVFARRRRRRRPSKWQRPWWKTFFSDWNEDDESLDGWREEDELLQEIGSDKGLSEDEKFKTWTRKAEAIVDLREAQQDAVNAEERSWENWIGGGGGTSGTGGGGEASLLDQITDDPAEIVRDKSVFEVFRGSIDEDYEDMLFEDRVFMYASTNSAKFLALLIVVPWVIDFIVHDYVMMPFLERYVQKVPLAAELLDVRRTQKLQMVKALKIEKARYRLEVEIGKSPPLSDEEVWIELRDDWRLENRNAFANIWSDTVYGIVLFLLMCFNQSKVAMLKFTGYKLLNNISDSGKAFLIILVSDILLGYHSESGWHTLVEVILEHYGFEADEAAVTFFVCLVPVALDVYIKFWVYKYLPRLSPSVGNVLDEIKRH

SEQ ID NO: 160041 - protein, 294 aa, Zea Mays
MTFMSCSAAISDGIPLRFPIEGSRTLCGGLGGVCARGVLALGSHRSNRSRRARHRHATVFARRRRRRRPSKWQRPWWKTFFSDWNEDDESLDGWREEDELLQEIGSDKGLSEDEKFKTWTRKAEAIVDLREAQQDAVNAEERSWENWIGGGGGTSGTGGGGEASLLDQITDDPAEIVRDKSVFEVFRGSIDEDYEDMLFEDRVFMYASTNSAKFLALLIVVPWVIDFIVHDYVMMPFLERYVQKVPLAAELLDVRRTQKLQMVKALKIEKARYRLEVEIGKSPPLSDEEDRVEG

SEQ ID NO: 160042 - protein, 208 aa, Zea Mays
MTFMSCSAAISDGIPLRFPIEGSRTLCGGLGGVCARGVLALGSHRSNRSRRARHRHATVFARRRRRRRPSKWQRPWWKTFFSDWNEDDESLDGWREEDELLQEIGSDKGLSEDEKFKTWTRKAEAIVDLREAQQDAVNAEERSWENWIGGGGGTSGTGGGGEASLLDQITDDPAEIVRDKSVFEVFRGSIDEDYEDMLFEDRVFMLNF

SEQ ID NO: 160043 - protein, 289 aa, Zea Mays
MTFMRCSAAVSDGIALRFPAEGRALRGGVCARGRGLLALGSHRSSSRRARRRHVAVFARRRLGKWQRPWWRTFFADWNDDEESLAGFREDDELLEEIGADQELSEKAKFEEWRRKAEAIVELREAQQDAFNAEERSWEDWTGGGGGGGAPENGGGGDWGGEASLSEQITDDPAEIVWDKGVVEVFRGTIDEDYEDMLFEDRVFMYASTNSAKFLALLIVVPWVIDFLVHDYAMMPFLERYVQKVPLAAELLDVRRSQKLQMVKDLNIEKARYRLEVEIGKSPPLSDEEA

SEQ ID NO: 160044 - protein, 248 aa, Zea Mays
MTFMRCSAAVSDGIALRFPAEGRALRGGVCARGRGLLALGSHRSSSRRARRRHVAVFARRRLGKWQRPWWRTFFADWNDDEESLAGFREDDELLEEIGADQELSEKAKFEEWRRKAEAIVELREAQQDAFNAEERSWEDWTGGGGGGGAPENGGGGDWGGEASLSEQITDDPAEIVWDKGVVEVFRGTIDEDYEDMLFEDRVFMYASTNSAKFLALLIVVPWVIDFLVHDYAMMPFLERCRLQLSYLM

SEQ ID NO: 160045 - protein, 106 aa, Zea Mays
MAVVAAEAEAEADEQVGSAETEEHIQRILLAIDNYTRQVSDMLDAGRALFKDLAADFEDRLCSIHKERVERWEEEIRELRARDVANEQARALLHNAQLHLLHTVRD

SEQ ID NO: 160046 - protein, 62 aa, Zea Mays
MHPLQMFLADSLPPFCMYQNHGLKLSLDFQEQLTLKVNYPPQDSYSRALGLNWGIYVSYLHY

SEQ ID NO: 160047 - protein, 502 aa, Zea Mays
MGYKRSAKKCREKFENVDKYYKRTKDGRAGRGDGKAYRFFSELEALHGAAPAVASLARRPVAMAPAPPPPVTALVGASTGMAPTALHAEPPPMPQPAAPAPTGTGTGTGTGSVTATIAPPAGAAASDAAAAAACMMTPGDVSFSSGSDGEDTDETGGGSGKRKRDGGEDEDGFGGSISSKMMRFFEGLMRQVMERQEEMQRRFIEAIERREQDRMIREEAWRRQEVARLAREQDALAQERAMAVSRDAAVVSFIQRVTGQNIPMPVPSPVAPPPAFITALTHAPPLQPTPVASAAPAAPAPAQAQHQPPPPAHQLSPKKPQTVMPLTPQAPQQPQVQPRQAPSPSPSPATHPQGNKEIVVRAPPPAESQDTAGFGGGAPSPSRWPKAEVHALIQLRTEMETRYQDSGPKGPLWEDISSGMRRLGYNRSAKRCKEKWENINKYFKKVKESNKKRPEDSKTCPYYHQLDALYRSKALASSSSGAGAGAGPAATTSGSFLTMVHH

SEQ ID NO: 160048 - protein, 625 aa, Zea Mays
MDAAFREAALKGPLWDQVSRRLEAMGYKRSAKKCREKFENVDKYYKRTKDGRAGRGDGKAYRFFSELEALHGAAPAVASLARRPVAMAPAPPPPVTALVGASTGMAPTALHAEPPPMPQPAAPAPTGTGTGTGTGSVTATIAPPAGAAASDAAAAAACMMTPGDVSFSSGSDGEDTDETGGGSGKRKRDGGEDEDGFGGSISSKMMRFFEGLMRQVMERQEEMQRRFIEAIERREQDRMIREEAWRRQEVARLAREQDALAQERAMAVSRDAAVVSFIQRVTGQNIPMPVPSPVAPPPAFITALTHAPPLQPTPVASAAPAAPAPAQAQHQPPPPAHQLSPKKPQTVMPLTPQAPQQPQVQPRQAPSPSPSPATHPQGNKEIVVRAPPPAESQDTAGFGGGAPSPSRWPKAEVHALIQLRTEMETRYQDSGPKGPLWEDISSGMRRLGYNRSAKRCKEKWENINKYFKKVKESNKKRPEDSKTCPYYHQLDALYRSKALASSSSGPGAAPALPPPPPPPQRPDQQAAAAAPPVTVVLAPVPLSQTGPHGNGNGNGNGCAGRGSSDNGGGGSGGMQKQQASNGGVAAARFSAVDGAGGNGVATNKKKASSGRRRRWRRRRGHSRCR

SEQ ID NO: 160049 - protein, 295 aa, Zea Mays
MEKRNELVLVHLIISGNKEKSTPVKSPRNMYKISETTRQPKQRRRRRSPEGALPPETPGRGEEANAEAHGPHAHLHRPPHRLHLDLLLLLLLRVPDHLPPVVVALAAAPAAEARGGVLLRYPLQPGGSAPHPAPAGRAGPVPHQHAALREHHHLRDAHLRRGRRPAALHAPPPLAPRGEDALRRDLLPGGGGEHLEPRALGGGDAVGARVRVGGDPAERDLGGRGWRERAAVESQRRAPDGRVVGQRELRGRRGGAGGEAEVESADVEAPGRGRAEEAALYRRGAAHRGNRSLNQ

SEQ ID NO: 160050 - protein, 733 aa, Zea Mays
MTGDVLPCFDASNLYLPDDAACIVTVPTTLDVAANHGVVVASKDAGIDQETYSLCLVDDLLQKPTVSELAEGHAILDDGRALLDTGIIAATGKAWQDLVTLAHSSSHSVVKELMTCNKELSLYEDLVAAWVPAKHVWLRNRPLGKELISALGKQRLFSFCSYDFSFLHFGTSAEVLDHLAGSYSGLVGRRHMCSLPETTACDIAATAIILCTKISSGVSIGEDTLVYDSVLSGRIRIGSQCIIVSVNIREFDGSACFTLPDRHCLWEVPLANSAGRVLVYCGLHDNPKVSIQKDGTFCGKPWINVLEDLRIQDTDLWGSTSQDKCLWTAKLFPVMSLPEMLNVGMWLMGSECDPDGRIASLWQKSQRISLEELHRAIDYRQLCTDSSKHQANLAADIAKACMNYGLLGRNLFQLCEEMLQKDTCLAVYEELLSFFPSHSEQYPGVLPQSREYQVKMDLLRASGDLSTACTVEEKVWASIASETASAIKYGSKEPSSGKMSSNHESLHPRKTVVELPVRVDFVGGWSDTPPWSLERPGCVLNMAISLQGSLPVGAMIETTEDHLGVRIEDDAGRHVYIDNLASISSPFKESDPFRLVKSALIVTGILGHEILSKSGLNIRTWSNVPRGSGLGTSSILSAAVVKGLFQVMEDDESDDSVARAVLVVEQIMGTGGGWQDQIGGLYPGIKCTQSFPGQPLRLQVVPVLTTPQLIQELEERLLIVFTGQVSSSFLLEA

SEQ ID NO: 160051 - protein, 556 aa, Zea Mays
MCSLPETTACDIAATAIILCTKISSGVSIGEDTLVYDSVLSGRIRIGSQCIIVSVNIREFDGSACFTLPDRHCLWEVPLANSAGRVLVYCGLHDNPKVSIQKDGTFCGKPWINVLEDLRIQDTDLWGSTSQDKCLWTAKLFPVMSLPEMLNVGMWLMGSECDPDGRIASLWQKSQRISLEELHRAIDYRQLCTDSSKHQANLAADIAKACMNYGLLGRNLFQLCEEMLQKDTCLAVYEELLSFFPSHSEQYPGVLPQSREYQVKMDLLRASGDLSTACTVEEKVWASIASETASAIKYGSKEPSSGKMSSNHESLHPRKTVVELPVRVDFVGGWSDTPPWSLERPGCVLNMAISLQGSLPVGAMIETTEDHLGVRIEDDAGRHVYIDNLASISSPFKESDPFRLVKSALIVTGILGHEILSKSGLNIRTWSNVPRGSGLGTSSILSAAVVKGLFQVMEDDESDDSVARAVLVVEQIMGTGGGWQDQIGGLYPGIKCTQSFPGQPLRLQVVPVLTTPQLIQELEERLLIVFTGQHPDIQHQEASGTSQDRERGADER

SEQ ID NO: 160052 - protein, 542 aa, Zea Mays
MCSLPETTACDIAATAIILCTKISSGVSIGEDTLVYDSVLSGRIRIGSQCIIVSVNIREFDGSACFTLPDRHCLWEVPLANSAGRVLVYCGLHDNPKVSIQKDGTFCGKPWINVLEDLRIQDTDLWGSTSQDKCLWTAKLFPVMSLPEMLNVGMWLMGSECDPDGRIASLWQKSQRISLEELHRAIDYRQLCTDSSKHQANLAADIAKACMNYGLLGRNLFQLCEEMLQKDTCLAVYEELLSFFPSHSEQYPGVLPQSREYQVKMDLLRASGDLSTACTVEEKVWASIASETASAIKYGSKEPSSGKMSSNHESLHPRKTVVELPVRVDFVGGWSDTPPWSLERPGCVLNMAISLQGSLPVGAMIETTEDHLGVRIEDDAGRHVYIDNLASISSPFKESDPFRLVKSALIVTGILGHEILSKSGLNIRTWSNVPRGSGLGTSSILSAAVVKGLFQVMEDDESDDSVARAVLVVEQIMGTGGGWQDQIGGLYPGIKCTQSFPGQPLRLQVVPVLTTPQLIQELEERLLIVFTGQVSSSFLLEA

SEQ ID NO: 160053 - protein, 194 aa, Zea Mays
MASPCHEESGRGRGPIAMAMARGRIAMGGSGLHCASAIHCGKRRGTCCSTQFADTLGNRDSNNISLENAKSYKIEAFKAQMQLPFPKLLCLMTMQAAKDPRVDERGGVGDEQMAGGGPAASALSSPWRALLQRALDANAHLRLRWAPPAGRRTAPSCSGVFRNSVIRFRLTRTPEPTRWGLLCSAPIDIFFSAR

SEQ ID NO: 160054 - protein, 297 aa, Zea Mays
MASPCHEESGRGRGPIAMAMARGRIAMGGSGLHCASAIHCGKRRGTCCSTQFADTLGNRDSNNISLENAKSYKIEAFKAQMQLPFPKLLCLMTMQAAKDPRVDERGGVGDEQMAGGGPAASALSSPWRALLQRALDANAHLRHSTYFQLVRFDRLFAFLRIGGNEIGEIKSCPFGEICWYFTDSWEQFRISGSIDVIDASTTDPAKLQHKEKAWFSSSVKSRSQYLGPQPGIPVLDDEHVKDVHLDPLAGPVDAFCLLVLDPEKVDYLNLKSNQRLIFTRRQKDDGSNDWMAVKVSP

SEQ ID NO: 160055 - protein, 207 aa, Zea Mays
MASPCHEESGRGRGPIAMAMARGRIAMGGSGLHCASAIHCGKRRGTCCSTQFADTLGNRDSNNISLENAKSYKIEAFKAQMQLPFPKLLCLMTMQAAKDPRVDERGGVGDEQMAGGGPAASALSSPWRALLQRALDANAHLRHSTYFQLATVGAAGRPANRTVVFRGFQELCDKIQINTDARTNKIGEIKSCPFGEIAGSNSVSVAA

SEQ ID NO: 160056 - protein, 423 aa, Zea Mays
MASCWLLEVRMGLSAFGGWWKARGLMTVILLTMILHTFALSEDPVHEFRGHHDAILDLSWSKNRELLSASKDKTVRLWKVGCDSCLKVFSHNNYVTCVQFKPTNDNYFISGCIDGMVRIWDVPRCLVVDWADSKEIITAVCYRPDGKGAVVGTITGNCHCYEASENHLALESQVPLYGRKKSPLKRIVGFQYCPSDPKKLMVTSGDSQVRILDGAHVVSSYKGLRSPSQVPAAFTPDGDHIIAASDDSSIYMWNYANQLAPVTSRVKTVWSYEHFFCNDVSVAIPWNALPARSSISLACNIPLSRQEVSEELHNSQESVSCCSAEGSPKADSSCRLPSGNFTLSNAFSAELAPRGKATWPEEQLPSSDSVTPSSSSALRKSQYKFLKTSCQSAATHAWGQVIVTAGWDGNIRSFQNYGLPMQV

SEQ ID NO: 160057 - protein, 91 aa, Zea Mays
MGLGAAATEQHDNGRRMASHKIRIPLVSALDSSISFLLRLILYKRKVPLNANVSVYGVKIDNKEGSRCLYIPSRSTTTLWHRFNLLNDLKI

SEQ ID NO: 160058 - protein, 108 aa, Zea Mays
MEIRHKAIIQYTLPFISVDLNTMAAAFKTSVSMLQKELAALITEDKIQARIDSHNKILYARHADQRNATFQRVLQTGNDFERDVKSMLLRANLLKHDYIQKTSGPRKM

SEQ ID NO: 160059 - protein, 167 aa, Zea Mays
MGYNDIGDFFYAHGQLSDAFKSYIRTRDYCTTSKHIVQMCMNVILVSIELGQYAHVSNYVSKAEQTPDSLDPTIVAKLKAAAGLANLETKKYKFAARKFVETGIELGNNFSEVIAPQDVAVYGALCALASFDRSDLKSKVIDNINFRNFLELVPEVRELVNDFYASM

SEQ ID NO: 160060 - protein, 308 aa, Zea Mays
MDVEGEVPAAAAAAVANGLGGAGAEEASPAPVSAEQLDVEAYAAQYSGRTRLVRLLFVADRCGVEAMQLEALRMAYDEIKRGEDVQLHRDVVTKIGGRLGPRYGLDQAWVFSVSRRADQRKEKLESELNGYRTNLIKESIRMGYNDIGDFFYAHGQLSDAFKSYIRTRDYCTTSKHIVQMCMNVILVSIELGQYAHVSNYVSKAEQTPDSLDPTIVAKLKAAAGLANLETKKYKFAARKFVETGIELGNNFSEVIAPQDVAVYGALCALASFDRSDLKSKVIDNINFRNFLELVPEVRELVNDFYASM

SEQ ID NO: 160061 - protein, 343 aa, Zea Mays
MVTLCHPIRIRASGSTASWRRRNAAAAAKVLCSVQQMPPPPPAATAAQSTIKVLHLHSTAVHAPCSCWRIQPASCLSYICAHQVVIVGATKEIGRTAVVAVSKARGMELAGAIDSQCIGEDAGQISGMDEPLEIPVLNDLTMVLGSIAQSRATGVVVDFSEPSAVYDNVKQAAAFGLSSVVYVPKIELETVTELSAFCEKGCLVAPTLSIGSVLLQQAAIQASFHYSNVEIVESRPNPSDLPSQDAIQIANNISDLGQIYNREDMDSSSPARGQLLGEDGVRVHSMVLPGLVSSTSINFSGPGEMYTLRHDVANVQCLMPGLILAIRKVVRFKNLIYGLEKFL

SEQ ID NO: 160062 - protein, 303 aa, Zea Mays
MPSDSDPSKREHRELAEEKCGGGGEGPLLRAANAAAAAGGHGCPEHDQEIGRTAVVAVSKARGMELAGAIDSQCIGEDAGQISGMDEPLEIPVLNDLTMVLGSIAQSRATGVVVDFSEPSAVYDNVKQAAAFGLSSVVYVPKIELETVTELSAFCEKASVGCLVAPTLSIGSVLLQQAAIQASFHYSNVEIVESRPNPSDLPSQDAIQIANNISDLGQIYNREDMDSSSPARGQLLGEDGVRVHSMVLPGLVSSTSINFSGPGEMYTLRHDVANVQCLMPGLILAIRKVVRFKNLIYGLEKFL

SEQ ID NO: 160063 - protein, 162 aa, Zea Mays
MGAGASGLAGAEPGGKVARGAGLGDLPELCTAEVLLRLGAPDICRLARLNLAFRGAAGADFVWEAKLPGNYARLLRFVDEAEEEGGSGRDWSAVGRKDVFARLARPVPFDGGKREFWLEKNEGGICMALSSKALVITGIDDRRYWINMPTSESSRYTGEVSM

SEQ ID NO: 160064 - protein, 505 aa, Zea Mays
MHSRVFEKRNIIMVIMQSSDSSHNGSHNGIVENSPYRIPYDRHAEGDQLGASWYFSRKEIEENSVSRRDGIDLKKESYLRKSYCTFLQDLGMRLKVPQVTIATAIVFCHRFFLRQSHAKNDRRTIATVCMFLAGKVEETPRPLKDVILLSYEIIHKKDPAAVQRIKHKEVYEQQKELILLGERVVLVTLGFDFNVNHPYKPLVEAIKKFEVAQNALAQVAWNFVNDGLRTSLCLQFKPHHIAAGAIFLAAKFLKVKLPSDGEKVWWQEFDVTPRQLEEVSNQMLELYEQNRVQPPPSQGNDTEGSSVTAVNQRALGKVPGVVDEPPAHEHNQATRQSSQQNMSGHHGYDHPHPEKRNYRVPPNEARDDSANSSEGPNVSASMMDAMKKINKDKVKAALEKRRSKGDLSRKVDVMDDDDLIERELEHGVELAVEDEKVKQERRQSWPHPSHRVDHRSTDRENTEEGELSMDSQEHHSPEHDNRKRKDAHEHRNYDRDERDLKRLRS

SEQ ID NO: 160065 - protein, 117 aa, Zea Mays
MDILDLAKYASVPVINGLTDYNHPCQIMADALTMLEQIGRIENTKGFEPDAHTVEMARGAGISKIEITNRPREAVKGADIVYTDVWASMGQKEEVDYRKQKFQGFTVDETLMEIAGP

SEQ ID NO: 160066 - protein, 148 aa, Zea Mays
MDILDLAKYASVPVINGLTDYNHPCQIMADALTMLEQIGRIENTKVFYVGDGNNIVHSWLLLADVLPFHFVCACPKGFEPDAHTVEMARGAGISKIEITNRPREAVKGADIVYTDVWASMGQKEEVDYRKQKFQGFTVDETLMEIAGP

SEQ ID NO: 160067 - protein, 66 aa, Zea Mays
MTRRKVIDMLLFNATEELNNIVEHAKQRHHVIGQYVIGQEGLVHELGSKDLGNSDFLKKFYTSNYF

SEQ ID NO: 160068 - protein, 84 aa, Zea Mays
MAFTMRAVKVPPNSASLEEARHRVFDFFKQACRSIPTVMEIYNLDDVVTPSQLRSTIAKEIRKNQNVTNPKKPVERIRIGGVSW

SEQ ID NO: 160069 - protein, 95 aa, Zea Mays
MAFTMRAVKVPPNSASLEEARHRVFDFFKQACRSIPTVMEIYNLDDVVTPSQLRSTIAKEIRKNQNVTNPKRRAPRKSGISDTLLIQIAGLNFEE

SEQ ID NO: 160070 - protein, 340 aa, Zea Mays
MLMDRLEMQDDSKRSNRPKYSKFTQQELPACKPLLTPAIVISAFLLVGILFVPIGLASLSASQEIVELVDRYDTSCVPVADKVGFIQNTKTDKSCTRTLTIPKHMKSPIQIYYQIGDFYQNHRRYVKSRSDKQLRYKDAAHLTKDCEPEVYSAGGAPIVPCGLVAWSLFNDTYTISVNKKAIVVNKKDIAWQSDKKKKFGSDVYPSNFQNGNLIGGAKLNESIPLSEQEDLIVWMRTAALPTFRKLYGRIETDIMENDELTVVIQNNYNTYSFGGSKALVLSTTSWIGGKNNFIGFAYLIVGGFCLFLALVFVVLYMIKPRTLGDTSFLSWNRGTMDYPS

SEQ ID NO: 160071 - protein, 236 aa, Zea Mays
MKSPIQIYYQIGDFYQNHRRYVKSRSDKQLRYKDAAHLTKDCEPEVYSAGGAPIVPCGLVAWSLFNDTYTISVNKKAIVVNKKDIAWQSDKKKKFGSDVYPSNFQNGNLIGGAKLNESIPLSEQEDLIVWMRTAALPTFRKLYGRIETDIMENDELTVVIQNNYNTYSFGGSKALVLSTTSWIGGKNNFIGFAYLIVGGFCLFLALVFVVLYMIKPRTLGDTSFLSWNRGTMDYPS

SEQ ID NO: 160072 - protein, 368 aa, Zea Mays
MEYERIHEPLPRRQSGGFSPAKLRAMLRGLEKHQRNSGEDTSPEANDSGELDDRRSLECSTSTEMSSNSGHRSRNRAPDDDSFDSESSSSGPPTVKRSAAVAALLPPFSRPTPSKWDDAEKWISSPTSNRTGRAGPTAGTMPKKSALAFPEHGARQPAVAKVVTDVPTIAGPLVKNSDGLAHPDLLKLAHDASIVDGPAPAVRSVSMRDMGTEMTPIASQEPSRTATPMIASSPTSSRTPTPQRTTEFSVSNIDSNKMAMSEEEVHISTRQEIMDLGERLGKTTIAAWASKEEKAAARSTDTAADNAVDVNRENRAADWQEAEKAKYLARFHREEAKIQAWENLQKAKIEAEMKRIERQFKRSSTWRI

SEQ ID NO: 160073 - protein, 106 aa, Zea Mays
MIGTSTGRPGTRASRRPHARARTPGRQTDRGCAAQGRTAPAGHHPSGWAMDCNVRVWAILLGGSRSGGQRNRQAEMGVWRGSVDSSSNVELDRVGKKKTLGHFFRL

SEQ ID NO: 160074 - protein, 244 aa, Zea Mays
MRSIPCVLASFHCCWRLGVWGDRCGLVVASILDSWSILTNQNRRRHWELLVIERTCDRIIWLAISEESVANLQLLVSWKLARHSGCATVRVKARTCLCDDRSPPNPVPDDRTKQLETSVRRTGWPCPAGIAAGASRNDWHVDRPAGNTGQSASARPCADARPTDRSRLRSAGQDSAGRPPPVRVGHGLQRTGVGHSPWRKPEWRPEKQAGRDGSLARLRRQLVKCRVGPSREKKNVGSFFSFIR

SEQ ID NO: 160075 - protein, 143 aa, Zea Mays
MVALSGAHTVGAARCSSFAPRLYSYGPSGAGQDPSMDPAYLAALAQQCPPQGTGAADPPLPMDPVTPTAFDTNYYANLVARRGLLASDQALLADPATAAQVLAYTNSPATFQTDFVAAMIKMGAIQVLTGTAGTVRTNCRVAS

SEQ ID NO: 160076 - protein, 318 aa, Zea Mays
MAPSHMGCACTPTMPVALYIKPPGPTGVPLAPLHHTHRAASCHRSKKEEKPAAPIDRRHARDRGVRRVGAAGLVGGQPGGEGRGAQRQPARVRGHRQRQDAAGAGLLRRRLLRRRPRLRRPRRPRAGRGRRVPGAGGAEGRQRLLGAGGGREPAAADGEREPADAGVRRQGAEPGRDGGAVGGAHGGRGALQLLRAPPLLVRAQRRGAGPVHGPRVPGGAGAAVPAAGDRRRRPAPPHGPRHAHRLRHQLLRQPGRQARPARLRPGAARRPGHRRAGARLHQQPRHLPDRLRRRHDQDGCHTGAHRHSRHRPDQLQGG

SEQ ID NO: 160077 - protein, 1199 aa, Zea Mays
MRSCQMQDTITKFRDGRVTLLVATSVAEEGLDIRQCNVVIRFDLAKTVLAYIQSRGRARKPGSDYILMLERGNMSHEAFLRNARNSEETLRKEAIERTDLSHLDGTSMLSPVDISPDSMYQVESTGAVVSLNSAVGLVHFYCSQLPSDRYSILRPEFIMQKHEKPGGSTEYSCKLQLPCNAPFEKLEGPICSSIRLAQQAVCLAACKKLHEMGAFTDMLLPDRGSGEGEKTEQNDEGDPLPGTARHREFFPEGVAEILHGEWILSGRDGYQSSQFIKLYLYSVNCVNIGTSKDPFVTQLSNFALIFGNELDAEVLSTTMDLFVARTIITKASLVFRGPIEITESQLILLKSFHVRLMSIVLDVDVDPSTTPWDPAKAYLFVPVGAEKCMDLLREIDWTLVNSIVNSDAWNNPLQRARPDVYLGTNERTLGGDRREYGFGKLRHGTAFGQKAHPTYGIRGAIAEFDVVKASGLVPGRGWGHFNDYQNKGKLFMADSCWDAKDLAGMVVTAAHSGKRFYVDSICYNMNAENSFPRKEGYLGPLEYSSFADYYKQKYGVELVYKKQPLIRARGVSYCKNLLSPRFEHSEASNGEFSENLDKTYYVYLPPELCLVHPLPGSLVRGAQRLPSIMRRVESMLLAIQLKDIIGYPVPANKILEALTAASCQETFCYERAELLGDAYLKWVVSRFLFLKYPQKHEGQLTRMRQQMVSNMILYQYALNKNLQSYIQADRFAPSRWAAPGVLPVFDEETRDSEPSIFDEEFTPSSELQKNLYDDYDGDSMQEDGEIEGDSSCYRVLSSKTLADVVEALIGVYYVAGGKIATNHLMKWIGINAELDPQEIPSSKPYNIPESIIKSINFDTLEGALGIKFQNKGLLVEAITHASRPSSGVSCYQRLEFVGDAVLDHLITKHLFFTYTDLPPGRLTDLRAAAVNNENFARVAVKHKLHVHLRHGSSALETQIREFVKDVQEELSKPGFNSFGLGDCKAPKVLGDIFESIAGAIFLDSGCATSVVWKVFQPLLDPMVTPDTLPMHPVRELQERCQQQAEGLEYKASRTGNVATVEVLVDGIQIGVAQNPQKKMAQKLAARNALVVLKEKETAAKKDTEKDGEKKNGSQFTRQTLNDICLRRQWPMPQYRCINEGGPAHAKRFVYAVRVNTSDSGWTDECIGEPMPSVKKAKDSAAVLLLELLNRNYRGKPDGK

SEQ ID NO: 160078 - protein, 843 aa, Zea Mays
MSIVLDVDVDPSTTPWDPAKAYLFVPVGAEKCMDLLREIDWTLVNSIVNSDAWNNPLQRARPDVYLGTNERTLGGDRREYGFGKLRHGTAFGQKAHPTYGIRGAIAEFDVVKASGLVPGRGWGHFNDYQNKGKLFMADSCWDAKDLAGMVVTAAHSGKRFYVDSICYNMNAENSFPRKEGYLGPLEYSSFADYYKQKYGVELVYKKQPLIRARGVSYCKNLLSPRFEHSEASNGEFSENLDKTYYVYLPPELCLVHPLPGSLVRGAQRLPSIMRRVESMLLAIQLKDIIGYPVPANKILEALTAASCQETFCYERAELLGDAYLKWVVSRFLFLKYPQKHEGQLTRMRQQMVSNMILYQYALNKNLQSYIQADRFAPSRWAAPGVLPVFDEETRDSEPSIFDEEFTPSSELQKNLYDDYDGDSMQEDGEIEGDSSCYRVLSSKTLADVVEALIGVYYVAGGKIATNHLMKWIGINAELDPQEIPSSKPYNIPESIIKSINFDTLEGALGIKFQNKGLLVEAITHASRPSSGVSCYQRLEFVGDAVLDHLITKHLFFTYTDLPPGRLTDLRAAAVNNENFARVAVKHKLHVHLRHGSSALETQIREFVKDVQEELSKPGFNSFGLGDCKAPKVLGDIFESIAGAIFLDSGCATSVVWKVFQPLLDPMVTPDTLPMHPVRELQERCQQQAEGLEYKASRTGNVATVEVLVDGIQIGVAQNPQKKMAQKLAARNALVVLKEKETAAKKDTEKDGEKKNGSQFTRQTLNDICLRRQWPMPQYRCINEGGPAHAKRFVYAVRVNTSDSGWTDECIGEPMPSVKKAKDSAAVLLLELLNRNYRGKPDGK

SEQ ID NO: 160079 - protein, 665 aa, Zea Mays
MKSDSNDVEMHNSENPKPNELEEGELPDSHAVSVGEHVDEVIGAAVADGKVTPRVQALIKILLKYQHTEDFRAIIFVERVVTALVLPKVFAELPSLGFIRCASLIGHNNNQEMRSCQMQDTITKFRDGRVTLLVATSVAEEGLDIRQCNVVIRFDLAKTVLAYIQSRGRARKPGSDYILMLERGNMSHEAFLRNARNSEETLRKEAIERTDLSHLDGTSMLSPVDISPDSMYQVESTGAVVSLNSAVGLVHFYCSQLPSDRYSILRPEFIMQKHEKPGGSTEYSCKLQLPCNAPFEKLEGPICSSIRLAQQAVCLAACKKLHEMGAFTDMLLPDRGSGEGEKTEQNDEGDPLPGTARHREFFPEGVAEILHGEWILSGRDGYQSSQFIKLYLYSVNCVNIGTSKDPFVTQLSNFALIFGNELDAEVLSTTMDLFVARTIITKASLVFRGPIEITESQLILLKSFHVRLMSIVLDVDVDPSTTPWDPAKAYLFVPVGAEKCMDLLREIDWTLVNSIVNSDAWNNPLQRARPDVYLGTNERTLGGDRREYGFGKLRHGTAFGQKAHPTYGIRGAIAEFDVVKASGLVPGRGWGHFNDYQNKGKLFMADSCWDAKDLAGMVVTAAHSGKRFYVDSICYNMNAENSFPRKEGYLGPLEYSSFADYYKQK

SEQ ID NO: 160080 - protein, 492 aa, Zea Mays
MPHTSVGDRPTDLSPSHGCSHWGAGSARPSSSSIRKSQPASPTKAKAPPAPSSPVGSPRLPPSSSLKSYHQSERDGERRAGKDRERERVKRKSSVDTPSNRIETLPPPHRTPHIASESSIAIATPPSHHRFPLSTPFPPSPRPAPRLRDSYGLSPPLSLPLSLRGWVRLGPVRSARRRRGTHYNCWCRARWREGQEEAATPAASTRRRRTGTTRARTAPPCSAASTSPRPPTSTRASYRPWTAAPMTASSPRSTGYSRASTPRPPPHRRLLLLRLRLRQRQRLWLRCSHSRSCRRRLRPWPTMRWRCRTWRRGPRPWKRGRSPGGSSRSPRPMAATTAGTASASVSLRVVPGDHATTGGGVRWRPRLHPVGGRTGGAEGGSTTGLVSATATATTANAMITTDATLGVSGSATAAARWCSAMACGRLRRTARESVPGRRMDALLRRIRRRWIGRGRRSLPLRRRRGSTSSRCLSKQRAGTQLLSLKLVRGRLS

SEQ ID NO: 160081 - protein, 260 aa, Zea Mays
MAEHLISTADHDRLPDSYVRPETQRPRLREVVPDAEIPVVDLADPDREAVVARVAEACRTHGFFQLLNHGVPEQLTAAMMSVAYEFFRLPAEEKAKLYSDDPAKKMRLSTSFNVRKETVHNWRDYLRLHCHPLEQYVPDWPDNPPSFRRTVSAYCSAVRELGFRLYVAISEGLGLDGAYIKEALGEQEQHMAVNFYPRCPAPELTYGLPAHTDPNALTILLMDQQVAGLQVLKDGRWIAVNPRPGALVVNIGDQLQLHRR

SEQ ID NO: 160082 - protein, 72 aa, Zea Mays
MNLRKSNEDLREKCKKQPPPPPPMLMAPPPPPAPAAIDHTGPKDVGMDVETELYIGLPGRDYRSNNKDMTAQ

SEQ ID NO: 160083 - protein, 60 aa, Zea Mays
MIHELASAAIQRANFHQCSGSICHAIPFPNQVNPFHPKKCIMCTEISMGCARQASNVYLR

SEQ ID NO: 160084 - protein, 283 aa, Zea Mays
MQTYFSCISHTACLDYHRRAYMINDLFWQSASIATLRQLGWADDELFLREGARLALRGELRARLGRDVGGDPLDVGAVPLQLLGVRREAGGHVGYADPGVGVLRDALHPAGHGHVLGEHVAVVDAGDLGHGVGVGRVVGVLPVVAGHPEHPLHGVEAEAAHEDVPDEAAPPGAGLDPDGRLRVDGHAVLGAHVADAAGHLAAQRDHGARGGDAGQPPDDDVLARHVEPDAVLVPPALHGHAVVAGDDVAVLDLDTRGRICTHAQAMKFRIRNMCFSLLSVKGS

SEQ ID NO: 160085 - protein, 238 aa, Zea Mays
MAVARLVAAPFPLATCRLRRPRPALPPAHAGPGPRPQVLVLAPPAATAARRAVPVRAAPEDEAVVAGDGGGGDAEAVAARAARKQSERRTYLVAAVMSSLGITSMAAAAVYYRFAWQMEGGGEIPVTEMVGTFALSVGAAVGMEFWARWAHRALWHASLWHMHQSHHRPRDGPFELNDVFAIVNAVPAMSLLAYGFFNRGLVPGLCFGAELKEVGGTEELEKEIKKRIRRREALDAIQ

SEQ ID NO: 160086 - protein, 746 aa, Zea Mays
MAHSPAPSGGGGGGPLPLLVSLNCLDDLSLEQEGLAGVAAVEHVPLSAVACGRIEAASAVLLPSLAFLPRAAQRRLRPWQLLLCLGSADRAADAAAAADLGLRLVHVDANRAEEVADTVMALILGLLRRTHLLSCHASSVPAAGWLGSVQPMCRGMRRCRGLVLGIIGRSAAARCLATRSLAFRMSVLYFDPRYVGLLYRLSNFSTTITTKGVFGNTVFQNHGISNTTVYKCHDMISVFNTTVLEYHGFEYMEVFGNKASGKTKRPSIVFPSAARRMDTLNDLLAASDLISLHCGLTNETMHILNADCLQHIKPGAFIVNTGSCQLIDDCALKQLLIDGTIAGCALDGAEGPQWMEAWVREMPNVLILPRSADYSEEVWMEIREKAITMLQSFFFDGVLPSSAISDEDEEISEAKNEDDYLGPQAKDSQSQIFDTEIDESHITLESEKKRAISHHKEPQASGKSVNIGSRSEGRRSRSGKKGKKRPAHRRPQQKPDDLSAVESDSNYSSRRDDDTAMSSRDQVVSSSSRFASPEDPKYKHKSLSESPMEITSEKKVPVLLSRKYPDKLKDGFIVALRARDNSGYHVARQRVVGGGGWILDVVSNATNRDPAAQFLVTFKNKDTMGLRSFVAGGKLLQINRKMEFVFASHSFDVWESWMLDGSLLEVMVVEVVLAGGGGSMLVRLEVKVSTCSRGWPHLEEARGVIIGAERGKHGKRSTVTDSPSEDVRSHEMRKISLFHGWKEIGD

SEQ ID NO: 160087 - protein, 204 aa, Zea Mays
MATTVTPASPFRDYLHRRRVRLHAKPHPHSQRRLSRTARLRYAPDGGGAEVSGPPASAAVEEQTPQERPEDFMLLAANRSEFNEIIMVIDSPVARYLVLDHNKNIHSILPKTTVWTNSYWDEFVSLPAIVPRGPVALLGLVNHLMRIITTFFLSVRVHIFFQQSYCALGKITSMLTGNGGKGCFLSSSKDGLPCFFGGHMFYHL

SEQ ID NO: 160088 - protein, 252 aa, Zea Mays
MFFWGTYVLPFITRLYMSRLHSLCSISDFFREKQYLHIFHTLLFTPVNNLCLITLSFPCFFQGAGTSAHLMLKFWPWLQLIGWEIDPMIIELSRDYFGMSDLEKATESGGSLLVRIGDALSPSATVEGGFAGIVVDLFCDGKVIPQLQEAKTWLQIAKRLMPDGRIMVNCGGSDTEESLSSPWVQNPTVKALCSAFPGQVSWKRLSEKESVNYVALTGPLPDLDGWSASVPSELSTNRAGPKPMLERRRPGA

SEQ ID NO: 160089 - protein, 111 aa, Zea Mays
MAAATSAVRATTAHATHRKQQPGPKPLCRLACSCVLASSSRMMRRPVRCVHPCLSIEDSSAKRVIGLDRRRRRSNDVSGGKPERILAPPCTENLTPILGHHHLLLLHALDY

SEQ ID NO: 160090 - protein, 273 aa, Zea Mays
MYTWTDGRGGPGDTYVLTFARATRETKRPGSIASADGARVWVLLHAHVAHVVVLRGRRGRRRVRVVRHGRRRRGAVVVLAHVVVGDHVHVLRRQLVQRRERQNRGHRGGGLLLLCAAAAAVLLVVLLAIAILLLALAVLLLAVAVLLLALAVFLAVATAAAVLLPVPFLLLALATAAVLLLAAAVLLLLLLLGLLGRPDGVDVRRPRLAAQLAHHLHRVHRPDHRHLVRRHVHRHGVDADEHGDGLQRLLLVLVVVQVQLHHDFLRHVSTRRG

SEQ ID NO: 160091 - protein, 235 aa, Zea Mays
MAGYLPFDDANLMRLYKLICHATFSCPPWFSSGARKFIKRILDPNPDTRIKIAEILEDEWFKKGYKPPHFEQGEDVNLDDVDAAFNDSEDRLVAEKREKPESMNAFALISRSQGFNLGNLFEKEMMGMVKRETSFTSQCTAQEIMSKIEDACGPLGFNVRKQNYKMKLKGDKSGRKGHLSVATEVFEVAPSLHMVELRKTGGDTLEFHNFYKNFSSELKDIVWKAESDASMKQTK

SEQ ID NO: 160092 - protein, 75 aa, Zea Mays
MWGCYVNSLKALSSLQATVTNFAANFLSSGLAGYFLFEEPLPSKVPASSFLASSSSASPASRRNRTRIRWKSFDR

SEQ ID NO: 160093 - protein, 649 aa, Zea Mays
MLEQLEAHVVTIETLRAEIKTTQVQHGKELEELRETTSSSYLDQTKSLQSTLEEKQKQIDSLSTSNTELQNSIKDLDERLGASKQSRADADEIISSQKAIIRELEEQLSEERNLRREERDKAAHDLKFAVHKVQAEAQEEIKKQAESYLRQQREQKEVINKLQESEKETRLFVETLRSKLEDARDNLVTSEKKVRELEAQFQDEQLVSANNRKKSENLETELRKLKKELENEKAAREEAWAKVSALELEIAATIRDLSIEKQRYQGARERIILRETQLRAFYSTTEEISSLFAKQQEQLKAMQRTLEDEENYESTLMSVDLNKEHLAIDNAGMKPVNCSKNTLGASIASPENTQVSEHSSSDEDANMTEQQDDDVTANGGNTQDLECTSPERSVERRPGFHGNPVPTAPEREVTDTEQVPETESEAGNVGCDDQRCDNIGGETMPLEDEVLLPENEEPTALLKDAGQPQSNMVPIPILDDGGGHCSEEKHEGACSESKRDDTHVGAIRTGDLLASEVAGSWAVETAPSVNGENESPRSLGDATERDEDGGSVAADALLTLVNSEGQAAGSQNNVEQASSKITDDRRVLSAMIGIVDPEFRKQMSRSGAGNEEPMSDAETDEGVEEGDSDSGSDGSDSDSEEAMVEDSVG

SEQ ID NO: 160094 - protein, 303 aa, Zea Mays
MAVLETVAVITHDKKKNDSQHTNSPKPFQIGDMFGGQDETSDDLETVIDKEDNVFVMSNRKTKYPTLQLDLRLIKDLVIIIVSATGGGIMFSFMGQPVIVGYLLAGSLVGPGGLNFINEMVQVETFAQFGVVFLLFALGLEFSLTKLKVVGPVAVLGGLLQIVLFMFLCGLTAALCGAKSSEGVFVGAFLSMSSTAVVSKFLVEKGSTNTLHGQVTIGTLILQDCAVGLLFALLPVLGGASGIFGGVMSMAKLLLVLSVFVAVTYMMTWSIVPRFLKLMIQLSSQTNELYQLASVAFCLLLAW

SEQ ID NO: 160095 - protein, 403 aa, Zea Mays
MAPAAAAAEAAGPSPRRRLAAAVLALALALACVLAQAAARPDKETREKFYGTLVANGTHNASGDGSIAEMFGRVLDKEFSDSDTPDAPDKSSFNNSVSDHQAVLETVAVITHDKKKNDSQHTNSPKPFQIGDMFGGQDETSDDLETVIDKEDNVFVMSNRKTKYPTLQLDLRLIKDLVIIIVSATGGGIMFSFMGQPVIVGYLLAGSLVGPGGLNFINEMVQVETFAQFGVVFLLFALGLEFSLTKLKVVGPVAVLGGLLQIVLFMFLCGLTAALCGAKSSEGVFVGAFLSMSSTAVVSKFLVEKGSTNTLHGQVTIGTLILQDCAVGLLFALLPVLGGASGIFGGVMSMAKLLLVLSVFVAVTYMMTWSIVPRFLKLMIQLSSQTNELYQLASVAFCLLLAW

SEQ ID NO: 160096 - protein, 438 aa, Zea Mays
MAPAAAAAEAAGPSPRRRLAAAVLALALALACVLAQAAARPDKETREKFYGTLVANGTHNASGDGSIAEMFGRVLDKEFSDSDTPDAPDKSSFNNSVSDHQAVLETVAVITHDKKKNDSQHTNSPKPFQIGDMFGGQDETSDDLETVIDKEDNVFVMSNRKTKYPTLQLDLRLIKDLVIIIVSATGGGIMFSFMGQPVIVGYLLAGSLVGPGGLNFINEMVQVETFAQFGVVFLLFALGLEFSLTKLKVVGPVAVLGGLLQIVLFMFLCGLTAALCGAKSSEGVFVGAFLSMSSTAVVSKFLVEKGSTNTLHGQVTIGTLILQDCAVGLLFALLPVLGGASGIFGGVMSMAKLLLVLSVFVAVTYMMTWSIVPRFLKLMIQLSSQTNELYQLASVAFCLLLAWCSDYCGLSLELGSFLAGVMISTTDFAHHTMEQVVF

SEQ ID NO: 160097 - protein, 102 aa, Zea Mays
MALTSGASLAWKASSLTANRVRPLSMAASYVLSTPVEAASDAKTLQPARSRRRVRLSVEGVSKRPSNSMGAVTSRMANLKGCVSTSLVTVQILAPGVAAEKP

SEQ ID NO: 160098 - protein, 251 aa, Zea Mays
MGLRIREKAVARNGMAQLLRILCSETIMKKGGNVHVCSNYMWKWQCTNRFNEARTGTERGREITEKRVSAWIGGSRGRRSCQATMHHKREASTTEHTATAASAGEVVGGGGVEEAVELDGRRDLEDGELERVRLHLLGDGADPGARRGGREAVVLVLLVHHLDVPRGAGGVARGLVQRGGALVAVLLHLLAVVVVEHRVEAQRVLDGGERVAGVGGQRRHGVVGQHQDGHRRRLPRVDLVAHLRLRQVLVV

SEQ ID NO: 160099 - protein, 899 aa, Zea Mays
MDVPSNLEARRRLTFFTNSLFMDMPDAPKVRNMLSFSALTPYYNEPVLFSIKELEEENEDGVSTLFYLQKIYPDEWKNFKERVGLEEELKESEESEELKEELRLWASYRGQTLARTVRGMMYYKKALNLEAFLDMAKREDLMEGYKAAESVNDEQWKIHQRSLFAQCEAVADMKFTYVVSCQQYGNDKRAALANAQDILQLMRNYPSLRVAYIDEVEDRVGDKKMETAYYSTLVKVALTKDSESADPTQNLDQVIYRIKLPGPAILGEGKPENQNHAIIFTRGEGLQTIDMNQDNYLEESLKMRNLLQEFLTEHGVRRPSILGVREHIFTGSVSSLAWFMSNQEHSFVTIGQRLLANPLKVRFHYGHPDVFDRLFHLTTGGVSKASKSINLSEDIFAGYNSTLRGGNVTHHEYVQVGKGRDVGLNQISKFEAKIANGNGEQTLSRDIYRLGHRFDFFRMLSCYFTTVGFYFSTLLTVVTVYVFLYGRLYLALSGLEEGLSQGRLIHNHPLQIALASQSLVQLGFLMALPMMMEIGLERGFGQALSDLIMMNLQLATVFFTFSLGTKTHYYGRMLLHGGAQYRGTGRGFVVFHAKFAENYRLYSRSHFVKGIELMILLIVYQLFGQSYRSTIAYIFITFSMWLLVLTWLFAPFLFNPSGFEWAKIVDDWSDWNKWISNRGGIGVSPDKSWESWWEVEQDHLKYSGTIGRFVEIILAIRFFIYQYGLVYHLHVTHNKSILVYLISWLVIVAVLLVMKTVSVGRRTFSADFQLFFRLIKFLIFVAFIAILIVLIVLLHMTFRDIFVCFLAFLPTGWGILLIAQACKPLARHVGLWGSVRALARAYEIIMGVLLFSPVAILAWFPFVSEFQTRMLFNQAFSRGLQISRILGGQKKERSARNKD

SEQ ID NO: 160100 - protein, 441 aa, Zea Mays
MLSCYFTTVGFYFSTLLTVVTVYVFLYGRLYLALSGLEEGLSQGRLIHNHPLQIALASQSLVQLGFLMALPMMMEIGLERGFGQALSDLIMMNLQLATVFFTFSLGTKTHYYGRMLLHGGAQYRGTGRGFVVFHAKFAENYRLYSRSHFVKGIELMILLIVYQLFGQSYRSTIAYIFITFSMWLLVLTWLFAPFLFNPSGFEWAKIVDDWSDWNKWISNRGGIGVSPDKSWESWWEVEQDHLKYSGTIGRFVEIILAIRFFIYQYGLVYHLHVTHNKSILVYLISWLVIVAVLLVMKTVSVGRRTFSADFQLFFRLIKFLIFVAFIAILIVLIVLLHMTFRDIFVCFLAFLPTGWGILLIAQACKPLARHVGLWGSVRALARAYEIIMGVLLFSPVAILAWFPFVSEFQTRMLFNQAFSRGLQISRILGGQKKERSARNKD

SEQ ID NO: 160101 - protein, 675 aa, Zea Mays
METAYYSTLVKVALTKDSESADPTQNLDQVIYRIKLPGPAILGEGKPENQNHAIIFTRGEGLQTIDMNQDNYLEESLKMRNLLQEFLTEHGVRRPSILGVREHIFTGSVSSLAWFMSNQEHSFVTIGQRLLANPLKVRFHYGHPDVFDRLFHLTTGGVSKASKSINLSEDIFAGYNSTLRGGNVTHHEYVQVGKGRDVGLNQISKFEAKIANGNGEQTLSRDIYRLGHRFDFFRMLSCYFTTVGFYFSTLLTVVTVYVFLYGRLYLALSGLEEGLSQGRLIHNHPLQIALASQSLVQLGFLMALPMMMEIGLERGFGQALSDLIMMNLQLATVFFTFSLGTKTHYYGRMLLHGGAQYRGTGRGFVVFHAKFAENYRLYSRSHFVKGIELMILLIVYQLFGQSYRSTIAYIFITFSMWLLVLTWLFAPFLFNPSGFEWAKIVDDWSDWNKWISNRGGIGVSPDKSWESWWEVEQDHLKYSGTIGRFVEIILAIRFFIYQYGLVYHLHVTHNKSILVYLISWLVIVAVLLVMKTVSVGRRTFSADFQLFFRLIKFLIFVAFIAILIVLIVLLHMTFRDIFVCFLAFLPTGWGILLIAQACKPLARHVGLWGSVRALARAYEIIMGVLLFSPVAILAWFPFVSEFQTRMLFNQAFSRGLQISRILGGQKKERSARNKD

SEQ ID NO: 160102 - protein, 1044 aa, Zea Mays
MIPTPTRDLPHAISVIWWQLRTNWARGTTRRVITTWRTVAARVPASTRKPTRKENDEKDRSAVIKIFQDMLEVVTRDIFDDHLSILESSHGGSYQKHDGTTTWDKEYQLFQPSGAIKFPLQVTTTDAWLEKIKRLELLLTVKESAMDVPSNLEARRRLTFFTNSLFMDMPDAPKVRNMLSFSALTPYYNEPVLFSIKELEEENEDGVSTLFYLQKIYPDEWKNFKERVGLEEELKESEESEELKEELRLWASYRGQTLARTVRGMMYYKKALNLEAFLDMAKREDLMEGYKAAESVNDEQWKIHQRSLFAQCEAVADMKFTYVVSCQQYGNDKRAALANAQDILQLMRNYPSLRVAYIDEVEDRVGDKKMETAYYSTLVKVALTKDSESADPTQNLDQVIYRIKLPGPAILGEGKPENQNHAIIFTRGEGLQTIDMNQDNYLEESLKMRNLLQEFLTEHGVRRPSILGVREHIFTGSVSSLAWFMSNQEHSFVTIGQRLLANPLKVRFHYGHPDVFDRLFHLTTGGVSKASKSINLSEDIFAGYNSTLRGGNVTHHEYVQVGKGRDVGLNQISKFEAKIANGNGEQTLSRDIYRLGHRFDFFRMLSCYFTTVGFYFSTLLTVVTVYVFLYGRLYLALSGLEEGLSQGRLIHNHPLQIALASQSLVQLGFLMALPMMMEIGLERGFGQALSDLIMMNLQLATVFFTFSLGTKTHYYGRMLLHGGAQYRGTGRGFVVFHAKFAENYRLYSRSHFVKGIELMILLIVYQLFGQSYRSTIAYIFITFSMWLLVLTWLFAPFLFNPSGFEWAKIVDDWSDWNKWISNRGGIGVSPDKSWESWWEVEQDHLKYSGTIGRFVEIILAIRFFIYQYGLVYHLHVTHNKSILVYLISWLVIVAVLLVMKTVSVGRRTFSADFQLFFRLIKFLIFVAFIAILIVLIVLLHMTFRDIFVCFLAFLPTGWGILLIAQACKPLARHVGLWGSVRALARAYEIIMGVLLFSPVAILAWFPFVSEFQTRMLFNQAFSRGLQISRILGGQKKERSARNKD

SEQ ID NO: 160103 - protein, 232 aa, Zea Mays
MQQRKLLYMGLYLLIWGEAANLRFMPECICYIYHHMAFEMYGMLAGNVSALTGEYVKPAYGGEKEAFLKKVVTPIYHTIAKEAERSKREKGNHSEWRNYDDLNEYFWSADCFRLGWPMRADADFFCQPDERNESTRISKQKGKVNFVELRSFWHIFRSFDRLWSFFILALQVMIILAWDGGSLASIFDYAVFKKVLSIFITSAILNLGQATLDIIFNWKARRTMEFAVKLRY

SEQ ID NO: 160104 - protein, 342 aa, Zea Mays
MWCLAGAAGLKDSGNQAIMKFPEIQAAASALRNTRGLPWPKTYEHKVNEDLLDWLQAMFGFQTDSVSNQREHLILLLANIHIRRNPKTDQQSKLDDNALNDVMKRLFKNYKKWCKYLGRKSSLWLPTIQQEMQQRKLLYMGLYLLIWGEAANLRFMPECICYIYHHMAFEMYGMLAGNVSALTGEYVKPAYGGEKEAFLKKVVTPIYHTIAKEAERSKREKGNHSEWRNYDDLNEYFWSADCFRLGWPMRADADFFCQPDERNESTRISKQKGKVNFVELRSFWHIFRSFDRLWSFFILALQVMIILAWDGGSLASIFDYAVFKKVLSIFITSAILNLGQGV

SEQ ID NO: 160105 - protein, 332 aa, Zea Mays
MWCLAGAAGLKDSGNQAIMKFPEIQAAASALRNTRGLPWPKTYEHKVNEDLLDWLQAMFGFQLDDNALNDVMKRLFKNYKKWCKYLGRKSSLWLPTIQQEMQQRKLLYMGLYLLIWGEAANLRFMPECICYIYHHMAFEMYGMLAGNVSALTGEYVKPAYGGEKEAFLKKVVTPIYHTIAKEAERSKREKGNHSEWRNYDDLNEYFWSADCFRLGWPMRADADFFCQPDERNESTRISKQKGKVNFVELRSFWHIFRSFDRLWSFFILALQVMIILAWDGGSLASIFDYAVFKKVLSIFITSAILNLGQATLDIIFNWKARRTMEFAVKLRY

SEQ ID NO: 160106 - protein, 261 aa, Zea Mays
MKRLFKNYKKWCKYLGRKSSLWLPTIQQEMQQRKLLYMGLYLLIWGEAANLRFMPECICYIYHHMAFEMYGMLAGNVSALTGEYVKPAYGGEKEAFLKKVVTPIYHTIAKEAERSKREKGNHSEWRNYDDLNEYFWSADCFRLGWPMRADADFFCQPDERNESTRISKQKGKVNFVELRSFWHIFRSFDRLWSFFILALQVMIILAWDGGSLASIFDYAVFKKVLSIFITSAILNLGQATLDIIFNWKARRTMEFAVKLRY

SEQ ID NO: 160107 - protein, 405 aa, Zea Mays
MGRGQKSDAREIQTFYHSYYKKYIQALQNASDQLDRAQLTKAYQTAAILFEVLKAVTQQHAVEVDHEILEAADKVKEKTKIYLPFNILPLDPDSGNQAIMKFPETDSVSNQREHLILLLANIHIRRNPKTDQQSKLDDNALNDVMKRLFKNYKKWCKYLGRKSSLWLPTIQQEMQQRKLLYMGLYLLIWGEAANLRFMPECICYIYHHMAFEMYGMLAGNVSALTGEYVKPAYGGEKEAFLKKVVTPIYHTIAKEAERSKREKGNHSEWRNYDDLNEYFWSADCFRLGWPMRADADFFCQPDERNESTRISKQKGKVNFVELRSFWHIFRSFDRLWSFFILALQVMIILAWDGGSLASIFDYAVFKKVLSIFITSAILNLGQATLDIIFNWKARRTMEFAVKLRY

SEQ ID NO: 160108 - protein, 297 aa, Zea Mays
MTSLSRTLSRGGPMQSPGARRIQRTQTAVNFGEPMFDSEVVPSSLVEIAPILRVANEVEMANPRVAYLCRFYAFEKAHRLDPTSSGRGVRQFKTALLQRLERENEPTLMGRGQKSDAREIQTFYHSYYKKYIQALQNASDQLDRAQLTKAYQTAAILFEVLKAVTQQHAVEVDHEILEAADKVKEKTKIYLPFNILPLDPDSGNQAIMKFPEIQAAASALRNTRGLPWPKTYEHKVNEDLLDWLQAMFGFQTDSVSNQREHLILLLANIHIRRNPKTDQQSKVFFCKYSTTSWMTMH

SEQ ID NO: 160109 - protein, 552 aa, Zea Mays
MTSLSRTLSRGGPMQSPGARRIQRTQTAVNFGEPMFDSEVVPSSLVEIAPILRVANEVEMANPRVAYLCRFYAFEKAHRLDPTSSGRGVRQFKTALLQRLERENEPTLMGRGQKSDAREIQTFYHSYYKKYIQALQNASDQLDRAQLTKAYQTAAILFEVLKAVTQQHAVEVDHEILEAADKVKEKTKIYLPFNILPLDPDSGNQAIMKFPEIQAAASALRNTRGLPWPKTYEHKVNEDLLDWLQAMFGFQTDSVSNQREHLILLLANIHIRRNPKTDQQSKLDDNALNDVMKRLFKNYKKWCKYLGRKSSLWLPTIQQEMQQRKLLYMGLYLLIWGEAANLRFMPECICYIYHHMAFEMYGMLAGNVSALTGEYVKPAYGGEKEAFLKKVVTPIYHTIAKEAERSKREKGNHSEWRNYDDLNEYFWSADCFRLGWPMRADADFFCQPDERNESTRISKQKGKVNFVELRSFWHIFRSFDRLWSFFILALQVMIILAWDGGSLASIFDYAVFKKVLSIFITSAILNLGQATLDIIFNWKARRTMEFAVKLRY

SEQ ID NO: 160110 - protein, 223 aa, Zea Mays
MPTTTRPRHPALLPSALAGRRTAWCLSAFLLPLTAVDGDAASAEAAAAAGVGAARGQGVLGRAPPQVRGPGRAPRRRHPAAPQPQALVPPRGVGALRAGLRRVGGRGRHGRGAGGAQAAAEHRRVHRPAPADRVREEGPGTPRARRRRRGHRPPPGRAGADVEEDGGGGVQDVRGEAPDQPRPAHQRHGLSADPAGAPSLVCSGLIAEMLFYSVGFSIRFRSR

SEQ ID NO: 160111 - protein, 177 aa, Zea Mays
MLTQLVASLPVDMMPGCHDPANFSLPQQPLHRCLFSGASTYNTFSSCSNPHQFELDSVQFLGTSGQNIDDLYKYSDAKDKLEFMERTLRWRHLAPTAPNSLGCYPYTDKDPFLVESCPHVYFVGNQDKYETRLLEGQEKQKVRLISIPRFSESGVAVMLNLRNLECSTLSFSTSFDA

SEQ ID NO: 160112 - protein, 116 aa, Zea Mays
MSQLNLVSSNRRSCGETMNTRREQNLYMASASVTVYLRCISQGYIQSGFHLLPPKSNFAALHHGYEFGVVNLTVLKSRCKQGTSVHALVKQHNKTRHRHCYYLVVPTTVSWFSPYI

SEQ ID NO: 160113 - protein, 372 aa, Zea Mays
MRSGRGKMATPPPPIRPAAALLLLVLAGVLASAASADLVISKADRRVDLTSHIVRVLASLKAENVGPDPVSQVLLPFPNIQAKNLAAIRAFGSEGKVKGQSTVLPIEVVQPSGAPPELTFFSALLPKPLEKGKTLYLDVLTVFTHSLQPFPEEITQAEAQLVVYQDSAHYLSPYPVKAQTLAIRLPGGRVESYTRHPNAKLVDSELKYGPFHDLPPFSYLPVIVHFENNNPFAVAKEVIREIEISHWGNVQITEHYNIAHGGARLKGEFSRIDYQSRPYVRGVSSFRHLIAKLPPRAHSIYYRDEIGNISTSHLWSDSMKNQGFHCLVGGKQPSLLVMVYHLKTLFSILMERDFSISHLVLHWRKFSLKSLS

SEQ ID NO: 160114 - protein, 280 aa, Zea Mays
MAYFADLWPLCLVFIINCHLYLCRDHRNVDSKNNDRVVLPEGSKDIEVSAPFPTQQQQEVKYSHLDIVGRPVVVLEKPDVIPEHNLYFQVYYRFNNISLLREPLMLITGFFLLFVACIVYMRTDMSISKSSPSYLAKLQWDEVQATVQKIQGIFEQCLAVHDKLEASLRDLSRTGDIQSCKAARKAADTQFKELSKDLKPLLATLQSSPQSYQILPKVEDLIVKEREMQEKLMTRHSTVVDSFEKKLRGQDVENRIALQQQKIAALRQEVESLLEYISEI

SEQ ID NO: 160115 - protein, 421 aa, Zea Mays
MRSGRGKMATPPPPIRPAAALLLLVLAGVLASAASADLVISKADRRVDLTSHIVRVLASLKAENVGPDPVSQVLLPFPNIQAKNLAAIRAFGSEGKVKGQSTVLPIEVVQPSGAPPELTFFSALLPKPLEKGKTLYLDVLTVFTHSLQPFPEEITQAEAQLVVYQDSAHYLSPYPVKAQTLAIRLPGGRVESYTRHPNAKLVDSELKYGPFHDLPPFSYLPVIVHFENNNPFAVAKEVIREIEISHWGNVQITEHYNIAHGGARLKGEFSRIDYQSRPYVRGVSSFRHLIAKLPPRAHSIYYRDEIGNISTSHLWSDSMKTQLEIEPRFPLFGGWQTTFTVGYGLPLEDFVFYSDGKRFLNITFGSPLEEILIEKLIVKVRVNVHQTNKLYFVCLRLHGILCRFVAIVFGIHYKLPSLFVS

SEQ ID NO: 160116 - protein, 53 aa, Zea Mays
MQEKLMTRHSTVVDSFEKKLRGQDVENRIALQQQKIAALRQEVESLLEYISEI

SEQ ID NO: 160117 - protein, 595 aa, Zea Mays
MAAFSFICHYMFTFYSKNRDTYVKDMVGESSNDRNDRAIRVAARWYQSHLGESVKVLLITNDRDNKRKAIEEGLNAETVESYVRSLAQPGLLDLVVVPTSGDVSMEDVDDHRPSKKKVIYNEHKPMSEITSGLRCGIYHQGKLRVNRYNPFEAYVGSESIGDEIVIRGRSNMNRAFDGDIVAVELLPQDQWHESKSFIADDDEEEEDVHLVPNSADDAPRNTNSTQSTVGSSAPSISSRPVGRVMGIIKRNWNSYCGSLQPMPMPAGSGGVAHALFVSKDRRVPKIRIQTRQLENLVNKRIVVAVDSWDVLSRYPSGHYVRTIGDIGDKETETEVVLIENDINTRPFSTQVLACLPPLPWTLSPEDLANPNRQDLRQVRVFSVDPPDVCSLRADVERLAFSVIWEMTPDADVISTRYTKSVIKSCAAMSYVEAQARMDDSRLVDPLTVDLRNLNSLAKIMRQRRCERGALTLASAEVKFEIDSETHDPLDIGIYQIREANQMIEEFMLAANVSVAEKILKHFPLCSLLRRHPSPTKEMLEPLLRTASSIGLNLDVSSSKALAESLDNAKSNDPYFNKLIRILATRCMTQWRFDLF

SEQ ID NO: 160118 - protein, 869 aa, Zea Mays
MLQSKSFVKKTKQGRIQKVVREHYLRDDIYCGFVPCTACAAAAERKLGAAAAAILVVDTNVVLHQIDLLENPAIEDVVLLSVVLDEVKNKNLSVFNRIKALCINKARRFYVFANEQHRDTYVKDMVGESSNDRNDRAIRVAARWYQSHLGESVKVLLITNDRDNKRKAIEEGLNAETVESYVRSLAQPGLLDLVVVPTSGDVSMEDVDDHRPSKKKVIYNEHKPMSEITSGLRCGIYHQGKLRVNRYNPFEAYVGSESIGDEIVIRGRSNMNRAFDGDIVAVELLPQDQWHESKSFIADDDEEEEDVHLVPNSADDAPRNTNSTQSTVGSSAPSISSRPVGRVMGIIKRNWNSYCGSLQPMPMPAGSGGVAHALFVSKDRRVPKIRIQTRQLENLVNKRIVVAVDSWDVLSRYPSGHYVRTIGDIGDKETETEVVLIENDINTRPFSTQVLACLPPLPWTLSPEDLANPNRQDLRQVRVFSVDPPDVCSLRADVERLAFSVIWEMTPDADVISTRYTKSVIKSCAAMSYVEAQARMDDSRLVDPLTVDLRNLNSLAKIMRQRRCERGALTLASAEVKFEIDSETHDPLDIGIYQIREANQMIEEFMLAANVSVAEKILKHFPLCSLLRRHPSPTKEMLEPLLRTASSIGLNLDVSSSKALAESLDNAKSNDPYFNKLIRILATRCMTQAVYFCSGDLTFSEYYHYGLAASLYTHFTSPIRRYADVVVHRLLAAALNIAKLPPIFQDGPQLTGIADNLNYRHRNAQMASRASVELHTHIYFKTRPTDTEARIVKIKANGFIVFVPKFGIEGPIYLTPKGDKGGDWVVDEVHQRVTKPGTNISYAILQTVRIHMEVVEPQPHRPKLQLTLI

SEQ ID NO: 160119 - protein, 836 aa, Zea Mays
MAAFSFICHYMFTFYSKNRDTYVKDMVGESSNDRNDRAIRVAARWYQSHLGESVKVLLITNDRDNKRKAIEEGLNAETVESYVRSLAQPGLLDLVVVPTSGDVSMEDVDDHRPSKKKVIYNEHKPMSEITSGLRCGIYHQGKLRVNRYNPFEAYVGSESIGDEIVIRGRSNMNRAFDGDIVAVELLPQDQWHESKSFIADDDEEEEEDVHLVPNSADDAPRNTNSTQSTVGSSAPSISSRPVGRVMGIIKRNWNSYCGSLQPMPMPAGSGGVAHALFVSKDRRVPKIRIQTRQLENLVNKRIVVAVDSWDVLSRYPSGHYVRTIGDIGDKETETEVVLIENDINTRPFSTQVLACLPPLPWTLSPEDLANPNRQDLRQVRVFSVDPPGCRDIDDALHCTLLPNGNFEVGVHIADVTNFVHPGTPLDEEAAQRGTSVYLVGQRIDMLPKPLTEDVCSLRADVERLAFSVIWEMTPDADVISTRYTKSVIKSCAAMSYVEAQARMDDSRLVDPLTVDLRNLNSLAKIMRQRRCERGALTLASAEVKFEIDSETHDPLDIGIYQIREANQMIEEFMLAANVSVAEKILKHFPLCSLLRRHPSPTKEMLEPLLRTASSIGLNLDVSSSKALAESLDNAKSNDPYFNKLIRILATRCMTQAVYFCSGDLTFSEYYHYGLAASLYTHFTSPIRRYADVVVHRLLAAALNIAKLPPIFQDGPQLTGIADNLNYRHRNAQMASRASVELHTHIYFKTRPTDTEARIVKIKANGFIVFVPKFGIEGPIYLTPKGDKGGDWVVDEVHQRVTKPGTNISYAILQTVRIHMEVVEPQPHRPKLQLTLI

SEQ ID NO: 160120 - protein, 445 aa, Zea Mays
MISLSALLVCHNHLPGLEAPRNSMEFALEASHSYGVFQEDVPHYPCNMRQYPKSGLNHSFNPVKKLIQEDISFRTNEVQKRPGGVIARLMGMESPPLNAATESISRSEITPRPTMPRRDPPERETSAKHVSFVQHGNRDSTKQASKQEIRAYGEERDVFGQQNKRGNEWSKPQPREHPQEEELQKFKKEFEAWQASRAWEHSRSFELESSTLGDDDDDGRCTDIVPYRYQHHHHHHHKGKDASHGGKHIRSSNEDVHCWRRSSKESGTSISGSRTFSLTTSADAAACSTRLPLSRFYHEEERSLSPTRIVILKPCPELSADDVEESSLGSPELVKKENNMEAFLEEVKKRLKIELEGGVASDDKADRRWFAAAAAADVIPADPKQIARSIANQIRENVTRDMHPALLRSESTRSYRSDVPFDGQGQMDYIGRDARRQLSDSSRTC

SEQ ID NO: 160121 - protein, 486 aa, Zea Mays
MLNSLSITIQQTCYTLRVVSLKELVDEGSIETSALTPPEYDKSMHENIDEVCSGIGVPARTASLETSEEVSSWIASLVCAQNKGVKEMDGDLPFGFSKQEDEGFSVTAGWHTSPVIEPEGSIFSGFKQHEEYKVKEVTCLRDPSSSNLEKTVEKRRTKMEKTVSLEELRKHFAGSLKEAAKNLGVCPTTLKRICRQHGINRWPSRKIKKVGHSLKKLQMVIDSVHGSEGTVQLSSLYENFTKTTWSERELQGDATYPLSEEKGPLEPSVPDRYCEGRFTSHTSGSNSLSPSCSQSSNSSHGCSSGSKSQQHVSAPQLAVKKEVFMEENQSSTLLKAASHAELQMLPEERLVTLPRSHSQVLLSEQKPVENITGMQMSKPDSLKIKAMYGEERCIFRLQPSWGFEKLKEEILKRFGIAREVYVDLKYLDDESEWVLLTCNADLLECIDVYKSSSTQTVRILVHSSDQIGEKVIVGVPCQLLGLVCMQ

SEQ ID NO: 160122 - protein, 915 aa, Zea Mays
MEDVAVGDLDLMEELFMAAPGFDFSDFSQPGAGGESPGVCFSPLFDICSTTTTATPPPPPPSGDDNRDQPTPPRRGWVFQPRLEVDATVKERLRRALERIASLSQTQPGELLAQVWVPTVIGDRQVLTTCGQPFWLDCRNERLANYRTVSMKYQFSADETARTDLGMPGRVFVGRVPEWTPDVRYFSTEEYPRVHHAQYFDIRGSVALPIFEPRSRVCLGVVELVMTTEKVNYNAEIQNICSALKLCRLLCRYTLNLFDEMPLGKDVITTGHANPRSNQSFHLTLFGDVLVSVTDTSYRAIIPEIVDVLRTVCETHKLPLAQTWIPCICQAKRGSRHTDEKLKYCVSTLDEACYVRDLNVNGFHEACSEHHLFRGEGVVGRAFATNEPCFSEDITASSKIQYPLSHHAKLFSLRAAVAIRLRSISTGSLDYVLEFFLPVDCIEIEEQRAMLNSLSITIQQTCYTLRVVSLKELVDEGSIETSALTPPEYDKSMHENIDEVCSGIGVPARTASLETSEEVSSWIASLVCAQNKGVKEMDGDLPFGFSKQEDEGFSVTAGWHTSPVIEPEGSIFSGFKQHEEYKVKEVTCLRDPSSSNLEKTVEKRRTKMEKTVSLEELRKHFAGSLKEAAKNLGVCPTTLKRICRQHGINRWPSRKIKKVGHSLKKLQMVIDSVHGSEGTVQLSSLYENFTKTTWSERELQGDATYPLSEEKGPLEPSVPDRYCEGRFTSHTSGSNSLSPSCSQSSNSSHGCSSGSKSQQHVSAPQLAVKKEVFMEENQSSTLLKAASHAELQMLPEERLVTLPRSHSQVLLSEQKPVENITGMQMSKPDSLKIKAMYGEERCIFRLQPSWGFEKLKEEILKRFGIAREVYVDLKYLDDESEWVLLTCNADLLECIDVYKSSSTQTVRILVHSSDQ

SEQ ID NO: 160123 - protein, 216 aa, Zea Mays
MGGFVKTQKTNAYFKRFQVKFKRRRAGKTDYRARIRLINQDKNKYNTPKYRFIVRFTNKDIIAQIVSASITGDIILAAAYSRELPRYGLEVGLTNYAAAYCTGLLLARRVLKIRDLDQEYEGNVEATGEDFSVEPAEERRPFRALLDVGLIRTTTGNRVFGALKGALDGGLDIPHSDKRFAGFKKDDKQLDADIHRKYIYGLHVAEYMKVLYLGAD

SEQ ID NO: 160124 - protein, 501 aa, Zea Mays
MGGGDADAGGEPAAAQATLHIRCTNGSKFAVRADLGATVGTFKAIVADSCDVPAPQQRLIYKGRILKDEQTLASYGVETDHTIHMVRGAAPPPASTAPAANQEPTTAAPASSPAAGLGGLLQNLGATGAAANSGGLGLFGSGLPELDHMQQQLAENPNLMREIMNMPLMQNLMNSPELIRSIIMNNPQMRELIDRNPDLAHVLNDPSIMRQTFEAVRNPELMREMMRNTDRAMSNIESSPEGFNMLRRMYETVQEPFLNATTMGSEGDRNSNPFAALLGNQGSNQARDSAANGTTTASDTTSGAPAPNTNPLPNPWGPNARSPPATNTRSTTAGGPGGLGSADFGSTLGASGGGSDATFLTQVLQNPTMMQMMQNIMSNPQSMNQLLNMNPNVRNMMESNTQMREMIQNPEFIRQLTSPETLQQLISFQQSLMSQLGQQQTGQERTQSASGAVPPEELYATQLAQLQEMGFFDTQENIRALAATAGNVHAAVERLLGNMGQ

SEQ ID NO: 160125 - protein, 425 aa, Zea Mays
MGGGDADAGGEPAAAQATLHIRCTNGSKFAVRADLGATVGTFKAIVADSCDVPAPQQRLIYKGRILKDEQTLASYGVETDHTIHMVRGAAPPPASTAPAANQEPTTAAPASSPAAGLGGLLQNLGATGAAANSGGLGLFGSGLPELDHMQQQLAENPNLMREIMNMPLMQNLMNSPELIRSIIMNNPQMRELIDRNPDLAHVLNDPSIMRQTFEAVRNPELMREMMRNTDRAMSNIESSPEGFNMLRRMYETVQEPFLNATTMGSEGDRNSNPFAALLGNQGSNQARDSAANGTTTASDTTSGAPAPNTNPLPNPWGPNGAARSPPATNTRSTTAGGPGGLGSADFGSTLGASGGGSDATFLTQVLQNPTMMQMMQNIMSNPQSMNQLLNMNPNVRNMMESNTQMREMIQNPEFIRQLTSPETFN

SEQ ID NO: 160126 - protein, 550 aa, Zea Mays
MGGGDADAGGEPAAAQATLHIRCTNGSKFAVRADLGATVGTFKAIVADSCDVPAPQQRLIYKGRILKDEQTLASYGVETDHTIHMVRGAAPPPASTAPAANQEPTTAAPASSPAAGLGGLLQNLGATGAAANSGGLGLFGSGLPELDHMQQQLAENPNLMREIMNMPLMQNLMNSPELIRSIIMNNPQMRELIDRNPDLAHVLNDPSIMRQTFEAVRNPELMREMMRNTDRAMSNIESSPEGFNMLRRMYETVQEPFLNATTMGSEGDRNSNPFAALLGNQGSNQARDSAANGTTTASDTTSGAPAPNTNPLPNPWGPNAGSAQGAARSPPATNTRSTTAGGPGGLGSADFGSTLGASGGGSDATFLTQVLQNPTMMQMMQNIMSNPQSMNQLLNMNPNVRNMMESNTQMREMIQNPEFIRQLTSPETLQQLISFQQSLMSQLGQQQTGQERTQSASGAGNVNLNTLMNMFSGLGAGGGLGVPNAPNGEHPSLGRHCWKCSCCSGATSWKHGPIEYDDEHNCVLIHAICSWHCEIMSGSLVLDLRLRGGI

SEQ ID NO: 160127 - protein, 253 aa, Zea Mays
MGGGDADAGGEPAAAQATLHIRCTNGSKFAVRADLGATVGTFKAIVADSCDVPAPQQRLIYKGRILKDEQTLASYGVETDHTIHMVRGAAPPPASTAPAANQEPTTAAPASSPAAGLGGLLQNLGATGAAANSGGLGLFGSGLPELDHMQQQLAENPNLMREIMNMPLMQNLMNSPELIRSIIMNNPQMRELIDRNPDLAHVLNDPSIMRQTFEAVRNPELMREMMRNTDRAMSNIESSPEGFNMLRRMKSGV

SEQ ID NO: 160128 - protein, 376 aa, Zea Mays
MFLQRPNAHLHVRLPRVLDASQIKSSLPNYNLPQRRRSQTPSPTAQPRSGDPSLSFPSFCRPRSLAFPSTMAAAAGGGAVRALSQKEQDIQMMLAADVHLGTKNCDFQTERYVFKRRTDGIYIINLGKTWDKLQLAARVIVAIENPQDIIVQSARPYGQRAVLKFAQYTGAHAIAGRHTPGTFTNQLQTSFSEPRLLILTDPRTDHQPIKESALGNIPTIAFCDTDSPMRYVDIGIPANNKGRNSIGCLFWLLSRMVLQMRGTILPGHKWEVMVDLFFYRDPEEAKEQEEEVAAAPEFAAITDYQGADQWGGDQWTSDVAAPPVAPTGADWGAAPVPTGEGWDQAGAPVPADGTVPPVVAPTGWDQAAPPTAQGWE

SEQ ID NO: 160129 - protein, 345 aa, Zea Mays
MQMRAEGFQVEAVTAINLLAACGQTESSLYGRSVHAYVVRRHFLPHVVLETALLEMYGNVGKVESSEKIFGQMTEKTVVTWNNMIAAYIYMEMYQEAIALFLELLNQPLYPDYFTMTTVVPAFVLLGSLRQCRQMHSYIIKLGYGDSTLIMNAVMHMYARCGDIVASREIFDKMPGKDVISWNTIIIGYAIHGQGKTALEMFDEMKCNGIEPNESTFVSVLTACSVSGLETEGWKEFNSMQHEYGMVPQIEHYGCMTDLLGRADPFASGKTVLPNKHSVRLAVAFGLISSEPGTPILVKKNVRVCNHCHRALKLISKYSRRKIVVGDTKIYHIFSDGSCCCGDYW

SEQ ID NO: 160130 - protein, 65 aa, Zea Mays
MLLLFKNLVDYQQDQQKHMNQGQTILMELDLTIWKRRCSVNFERPRKGNILVNCFVLMHDLVLCI

SEQ ID NO: 160131 - protein, 103 aa, Zea Mays
MLQAVIAKSFERIHRSNLAGMGIIPLCYKAGEDADTLGLTGHERYTVHLPTNVSEIKPGQDVTVTTDNGKSFTCTLRFDTEVELAYYDHGGILPYVARKIAEQ

SEQ ID NO: 160132 - protein, 752 aa, Zea Mays
MELEFHRNKERFGFLKWGSSAFRNMLVVPPGSGIVHQVNLEYLARVVFNNGGILYPDSVVGTDSHTTMVDGLGVAGWGVGGIEAEAAMLGQPMSMVLPGVVGFKLSGKLRNGVTATDLVLTVTQMLRKHGVVGKFVEFYGQGMSELSLADRATIANMSPEYGATMGFFPVDGKTLDYLKLTGRSDDTVAMVESYLRANKMFVDHSQVDAERVYSSYLELNLEEVEPCLSGPKRPHDRVTLKNMKSDWLSCLDSDVGFKGFAVPKESQGKVAEFSFHGTPAKIKHGDVVIAAITSCTNTSNPNVMLGAALVAKKACELGLEVKPWIKTSLAPGSGVVKKYLDKSGLQKYLDQLGFHIVGYGCTTCIGNSGELDESVSAAITENDIVAAAVLSGNRNFEGRVHPLTRANYLASPPLVVAYALAGTVNIDFEKEPIGISKDGKEVYFRDVWPSTEEIAEVVKSSVLPDMFKSTYESITKGNPMWNELPVSTSTLYPWDPSSTYIHEPPYFKDMKMSPPGPRPVKDAYCLLNFGDSITTDHISPAGNIHPDSPAAKYLKERGVERKDFNSYGSRRGNDEIMARGTFANIRLVNKFLKGEVGPKTIHVPSGEKLAVFDAAMKYKNEGHDTIILAGAEYGSGSSRDWAAKGPMLQGVKAVIAKSFERIHRSNLAGMGIIPLCYKAGEDADTLGLTGHERYTVHLPTNVSEIKPGQDVTVTTDNGKSFTCTLRFDTEVELAYYDHGGILPYVARKIAEQ

SEQ ID NO: 160133 - protein, 366 aa, Zea Mays
MTNGAFVAERSGVHARDLRIVGPLLSRCPGILGFARFAAREKAMVIDLEFIRAIVTADEVLLLEPLAQEVIPFIDKLRRHFPLKSLEVDVGATQVGNVNGKHAKTAAECELPLPFEFQVLELALEAVCLSFHSSLSDLNRHTIFVMDELTKNVSTRNLERVRSLKRNLTSLLAGVQKVRDEVEHLLDHNENMAQLHLSRKQIKCPQDEILLASAALNSNLPSKTKLGTPNSVVNQAMGIAMTAPLADNVGDLEILLESYFMQLDGIRNRIMMVRGYIVDTEDYINIQLDNQRNELIQFHLVLIIVSFGIAMNTLIAGAFAMNMPHNGEMKKFVGPFWPFVGATSSFCLLVSVVLLGYARGNRLLGS

SEQ ID NO: 160134 - protein, 221 aa, Zea Mays
MDELTKNVSTRNLERVRSLKRNLTSLLAGVQKVRDEVEHLLDHNENMAQLHLSRKQIKCPQDEILLASAALNSNLPSKTKLGTPNSVVNQAMGIAMTAPLADNVGDLEILLESYFMQLDGIRNRIMMVRGYIVDTEDYINIQLDNQRNELIQFHLVLIIVSFGIAMNTLIAGAFAMNMPHNGEMKKFVGPFWPFVGATSSFCLLVSVVLLGYARGNRLLGS

SEQ ID NO: 160135 - protein, 100 aa, Zea Mays
MKATRSVQCTDATADADMQWSSSSRFPSLARQKSTSIEVFNDTSRMRWTSLVGARLRRNENCTISVSKLVEVCHAGLLSPKPESRKNGERMLAIYMHLTH

SEQ ID NO: 160136 - protein, 50 aa, Zea Mays
MILTSLLPKKATKLQLHIDYKTKRKCSVHTTKAPISSQQTNPQVARDWRK

SEQ ID NO: 160137 - protein, 84 aa, Zea Mays
MSHGQSQSFIAAMPLPKAMEYETIFKWRKALKDENPCKQTSTDKNLIFDVCFGICKHVMFAPKKLKNLGALPSVSNKQGVAIPS

SEQ ID NO: 160138 - protein, 537 aa, Zea Mays
MELVYMERRNGSYDDGAVPEFSGRGAGGDQDQDPPAAASEVQSDSRQTPDEKKSKGCQSCRDPFCSCSGGTPHSELFPPHPAKMMILEFLIASLRHPTRTHNVSDLDDLIADGVSQGSVVNLGPSEKKVLESLHAMVNAKTRPKSPSPFMAGSKLRKIRSKSHVITQSEILKLISPETWEASSFPGASPMIGGGTAEDGVHGNKPPPPCCSSVSSNQHVLSRCPSSLSACLLQCIWKDGLPHFELSLDDHPIAVYAASPVRVLEKDRAFDYVYMIHSGEQGRKDWMGHSSNVSRLVGKVKVSSSLVLNPDKSGLLETEFVLYGSPDDYLRQMRSPYSVPKGKGLVRRVTEIMRAGNVSASPRHPWKLGKSSSHQFDDLAGVLEGEMISAGGSDLVSLKADDLPSNQELAAIVVREQRRRRRKEPVSGGWGLKFLEKAGLNRPQGTEETDVQNSDGATHCVTVVVPRGYHGGVVSKSSRPSGLVERWRSGGRCDCGGWDLGCPIRVLNGDGCGSLPEGESRDRRSVEISIKYFAGCKE

SEQ ID NO: 160139 - protein, 591 aa, Zea Mays
MELVYMERRNGSYDDGAVPEFSGRGAGGDQDQDPPAAASEVQSDSRQTPDEKKSKGCQSCRDPFCSCSGGTPHSELFPPHPAKMMILEFLIASLRHPTRTHNVSDLDDLIADGVSQGSVVNLGPSEKKVLESLHAMVNAKTRPKSPSPFMAGSKLRKIRSKSHVITQSEILKLISPETWEASSFPGASPMIGGGTAEDGVHGNKPPPPCCSSVSSNQHVLSRCPSSLSACLLQCIWKDGLPHFELSLDDHPIAVYAASPVRVLEKDRAFDYVYMIHSGEQGRKDWMGHSSNVSRLVGKVKVSSSLVLNPDKSGLLETEFVLYGSPDDYLRQMRSPYSVPKGKGLVRRVTEIMRAGNVSASPRHPWKLGKSSSHQFDDLAGVLEGEMISAGGSDLVSLKADDLPSNQELAAIVVREQRRRRRKEPVSGGWGLKFLEKAGLNRPQGTEETDVQNSDGATHCVTVVVPRGYHGGVVSKSSRPSGLVERWRSGGRCDCGGWDLGCPIRVLNGDGCGSLPEGESRDRRSVEISIKGWSDLYTSTLQGAKNETMLKLVNITEDLYILYFDSSISPLQCFSTGIAIVHSRAPELCPKL

SEQ ID NO: 160140 - protein, 530 aa, Zea Mays
MELVYMERRNGSYDDGAVPEFSGRGAGGDQDQDPPAAASEVQSDSRQTPDEKKSKGCQSCRDPFCSCSGGTPHSELFPPHPAKMMILEFLIASLRHPTRTHNVSDLDDLIADGVSQGSVVNLGPSEKKVLESLHAMVNAKTRPKSPSPFMAGSKLRKIRSKSHVITQSEILKLISPETWEASSFPGASPMIGGGTAEDGVHGNKPPPPCCSSVSSNQHVLSRCPSSLSACLLQCIWKDGLPHFELSLDDHPIAVYAASPVRVLEKDRAFDYVYMIHSGEQGRKDWMGHSSNVSRLVGKVKVSSSLVLNPDKSGLLETEFVLYGSPDDYLRQMRSPYSVPKGKGLVRRVTEIMRAGNVSASPRHPWKLGKSSSHQFDDLAGVLEGEMISAGGSDLVSLKADDLPSNQELAAIVVREQRRRRRKEPVSGGWGLKFLEKAGLNRPQGTEETDVQNSDGATHCVTVVVPRGYHGGVVSKSSRPSGLVERWRSGGRCDCGGWDLGCPIRVLNGDGCGSLPEGESRDRRVQRMRQC

SEQ ID NO: 160141 - protein, 647 aa, Zea Mays
MEAALSFSKDSPPISIICAAKIVGLPLTINHSLAAGSAPTLQFASGESLHGVNPIILYIARGASIASLSGKNDIEFGHVVEWLEYAPTFLSGSEFENACLFVDGFLASRTFLVGHGLTIADIAVWSNLAGIGQRWESLRKSKKYQNLVRWFNSIDSEYKEALNEVVAAFVGKRGIGKSPAPSLKEKVHDSKDPSAPEVDLPGAKVGKVCVRFAPEPSGYLHIGHAKAALLNKYFAERYQGRLIVRFDDTNPSKESNEFVENLLKDIETLGIKYDAVTYTSDYFPKLMEMAESLIKQGKAYIDDTPKEQMRKERMDGIESRCRNNTVEENLSLWKEMVNGTERGMQCCVRGKLDMQDPNKSLRDPVYYRCNTDPHHRVGSKYKVYPTYDFACPFVDALEGVTHALRSSEYHDRNAQYYRILQDMGLRRVEIYEFSRLNMVYTLLSKRKLLWFVQNKKVEDWTDPRFPTVQGIVRRGLKVDALIQFILQQGASKNLNLMEWDKLWTINKKIIDPVCARHTAVLKDQRVIFTLTNGPEEPFVRILPRHKKFEGAGKKATTFANRIWLDYADAAAISKGEEVTLMDWGNAIVKEIKVESGVITELVGELHLEGSVKTTKLKITWLADIEELVPLSLVEFDYLISKKKTMLH

SEQ ID NO: 160142 - protein, 348 aa, Zea Mays
MSEVMRAYYFSNEYLVDLFSKCGLTLEEICVHNKQVENRSLELVMNRNWIQATFTLNSASPQGPNGQHDLLAYEGEDDKVVTDTSKKKSSGEEIDLSEDFCNMFGTSHSLDEVQIIGVKAKGHDFKIRMLRKEYQHTCRSTGLMLWESAQFMCCLLAENPSIVASKRVLELGCGSAGICSMVAASFTPFVLATDGDEESLDLLRQNISSNMEPNLLSRIMVRKLFWGNEDDMKAVRELHGNGVGFDCIIGTDVTYNPDAILPLFKTARGVISEKANEDSVPALILCYIQRRVDEDSILSNATSQGFRLVDKWINGVHESNGTISSWFSGNDVCSAFRHTVLSVLYFEL

SEQ ID NO: 160143 - protein, 527 aa, Zea Mays
MPQPTADSSTMVAGEHQQQQQPATARISSSSTSSGRLVTPFWKEKYERDARRYWDIFYRRHEDKFFKDRHYLDKEWGKYFKGRDGEKKVVLEVGCGAGNTIYPLLSTYPDIFVHACDFSPRAVNLVKKHKDFKADRINAFVCDIASEQLTENVEPSSADIVTMERLMSKGQQISENFYVRGDGTRAYYFSNEYLVDLFSKCGLTLEEICVHNKQVENRSLELVMNRNWIQATFTLNSASPQGPNGQHDLLAYEGEDDKVVTDTSKKKSSGEEIDLSEDFCNMFGTSHSLDEVQIIGVKAKGHDFKIRMLRKEYQHTCRSTGLMLWESAQFMCCLLAENPSIVASKRVLELGCGSAGICSMVAASFTPFVLATDGDEESLDLLRQNISSNMEPNLLSRIMVRKLFWGNEDDMKAVRELHGNGVGFDCIIGTDVTYNPDAILPLFKTARGVISEKANEDSVPALILCYIQRRVDEDSILSNATSQGFRLVDKWINGVHESNGTISSWFSGNDVCSAFRHTVLSVLYFEL

SEQ ID NO: 160144 - protein, 246 aa, Zea Mays
MFGTSHSLDEVQIIGVKAKGHDFKIRMLRKEYQHTCRSTGLMLWESAQFMCCLLAENPSIVASKRVLELGCGSAGICSMVAASFTPFVLATDGDEESLDLLRQNISSNMEPNLLSRIMVRKLFWGNEDDMKAVRELHGNGVGFDCIIGTDVTYNPDAILPLFKTARGVISEKANEDSVPALILCYIQRRVDEDSILSNATSQGFRLVDKWINGVHESNGTISSWFSGNDVCSAFRHTVLSVLYFEL

SEQ ID NO: 160145 - protein, 461 aa, Zea Mays
MPQPTADSSTMVAGEHQQQQQPATARISSSSTSSGRLVTPFWKEKYERDARRYWDIFYRRHEDKFFKDRHYLDKEWGKYFKGRDGEKKVVLEVGCGAGNTIYPLLSTYPDIFVHACDFSPRAVNLVKKHKDFKADRINAFVCDIASEQLTENVEPSSADIVTMIFMLSAVAPDKMPIVLENVRSVLKHGGRVLFRDYAFGDLAQERLMSKGQQISENFYVRGDGTRAYYFSNEYLVDLFSKCGLTLEEICVHNKQVENRSLELVMNRNWIQATFTLNSASPQGPNGQHDLLAYEGEDDKVVTDTSKKKSSGEEIDLSEDFCNMFGTSHSLDEVQIIGVKAKGHDFKIRMLRKEYQHTCRSTGLMLWESAQFMCCLLAENPSIVASKRVLELGCGSAGICSMVAASFTPFVLATDGDEESLDLLRQNISSNMEPNLLSRIMVRKLFWGNEDDMKAVRELHDC

SEQ ID NO: 160146 - protein, 544 aa, Zea Mays
MPQPTADSSTMVAGEHQQQQQPATARISSSSTSSGRLVTPFWKEKYERDARRYWDIFYRRHEDKFFKDRHYLDKEWGKYFKGRDGEKKVVLEVGCGAGNTIYPLLSTYPDIFVHACDFSPRAVNLVKKHKDFKADRINAFVCDIASEQLTENVEPSSADIVTMHGGRVLFRDYAFGDLAQERLMSKGQQISENFYVRGDGTRAYYFSNEYLVDLFSKCGLTLEEICVHNKQVENRSLELVMNRNWIQATFTLNSASPQGPNGQHDLLAYEGEDDKVVTDTSKKKSSGEEIDLSEDFCNMFGTSHSLDEVQIIGVKAKGHDFKIRMLRKEYQHTCRSTGLMLWESAQFMCCLLAENPSIVASKRVLELGCGSAGICSMVAASFTPFVLATDGDEESLDLLRQNISSNMEPNLLSRIMVRKLFWGNEDDMKAVRELHGNGVGFDCIIGTDVTYNPDAILPLFKTARGVISEKANEDSVPALILCYIQRRVDEDSILSNATSQGFRLVDKWINGVHESNGTISSWFSGNDVCSAFRHTVLSVLYFEL

SEQ ID NO: 160147 - protein, 319 aa, Zea Mays
MSEVMQVENRSLELVMNRNWIQATFTLNSASPQGPNGQHDLLAYEGEDDKVVTDTSKKKSSGEEIDLSEDFCNMFGTSHSLDEVQIIGVKAKGHDFKIRMLRKEYQHTCRSTGLMLWESAQFMCCLLAENPSIVASKRVLELGCGSAGICSMVAASFTPFVLATDGDEESLDLLRQNISSNMEPNLLSRIMVRKLFWGNEDDMKAVRELHGNGVGFDCIIGTDVTYNPDAILPLFKTARGVISEKANEDSVPALILCYIQRRVDEDSILSNATSQGFRLVDKWINGVHESNGTISSWFSGNDVCSAFRHTVLSVLYFEL

SEQ ID NO: 160148 - protein, 361 aa, Zea Mays
MPIVLENVRSVLKHGGRVLFRDYAFGDLAQERLMSKGQQISENFYVRGDGTRAYYFSNEYLVDLFSKCGLTLEEICVHNKQVENRSLELVMNRNWIQATFTLNSASPQGPNGQHDLLAYEGEDDKVQIIGVKAKGHDFKIRMLRKEYQHTCRSTGLMLWESAQFMCCLLAENPSIVASKRVLELGCGSAGICSMVAASFTPFVLATDGDEESLDLLRQNISSNMEPNLLSRIMVRKLFWGNEDDMKAVRELHGNGVGFDCIIGTDVTYNPDAILPLFKTARGVISEKANEDSVPALILCYIQRRVDEDSILSNATSQGFRLVDKWINGVHESNGTISSWFSGNDVCSAFRHTVLSVLYFEL

SEQ ID NO: 160149 - protein, 618 aa, Zea Mays
MSSSSQSPPASMATVPPATTPHTVPPSTAATLDLTSTLGLPTAGSSYNLPTMTKSQRPSSTSPRTWQRCKLIYPRSSSTWRAPSRNPHYRRRLWPARQWRLHRRTAPSVPLHQLQFPRSPSEIPAWAWGPEPVFSTPPPITTVAPLGVLYGGGGGGWDSLFSPHHDASSKQPRAHDRPVTDPIPPKFYKLEFTTYDGTKDPLNWLNHCEQFFGGQRTSAIDRTWLAFYHLRGAARTWYYTMEQDTGMPTWERFKELCHLQFGPPVRDSRLAELGRLQFRTTVQEFTEWFNAALCHARNLDAIQKAELFVGGLPEHIHVDVALRAPHDLHTMVYLARAFELRANNLMVQFPTGPQRVARQQQRVTQAPTASSGAPRSAATALPPIRQFCRLTPAEQQEHRHQGPCFNCDEPYVRGHQCKRLFYLESSDFDMEEDGAVDAAPNDKLDDDLPPQDVTVATACVVSLHAFAGIRTKNTMIMPVVLKGARILALDTGSTHNFLQGVAMTRLGLTPLDGDQLRVTVANGDHLRCAGIARHVPISIAGDECTITCVGIDLGCFDFILGVDFLRTLGDITWNLETMTLAFQRDARRIVWNGVQGKEATCTTPPRRPWQWPSRISHC

SEQ ID NO: 160150 - protein, 757 aa, Zea Mays
MEVGGDLQSLLEAIKSSEVLEDRIGLINRLESSFEYSADDLRPVLDSLNVYDLNGNFRYLGMILDVQVALKCSYIETTGCLGQFLALGAKASSWCRKHIVCSIESVDDSEDVQQEEHSKILPEIILMALNISIKILPSAAKCVTVDMVHNIGDFISELLSLMESSIVDNDKKIHGAALDITKAAPVFLDETTKLCRAYSEATKVDNCTMSITDEDATVKHNKQGLASDVIRITSSTIQTMCRLGTYAASSGGSQVILLNVSWKGVVSLLQSGKGMIEGKVNVREIIVTLLSLSIESLRVAAETWCAPLLETLGATEARRAFLPIKFFLINAVRICSTYPSEAMIIYKNIINCAVVITSSSILFSKKPQLKAANETLVELLEPTLFVLLDTLMKSSDLTPESKCQLAHHFFENEEDKSPDLMGQANQREINLASLDCIFSMDSDVDHRNRALLPAELLVFLHFLNASSWLTEMVVITLSKKLQTLLNILTSEDIYSYVLGFQIPALNGADQSPAVVWQPVYTSIIQALKAFMISTVASSAAWNELEAFLLENIFHPHFLCLEIITELWCFFIRYAETETSINLVNQVSLLLKTVASPEDVLSPLSALRKVARSLCIILSYASSATVDQIYTCVLNGENSSKSSILHLALLMEGFPLDSLSDGTKELAMKKMFTSFAGYLESYSKNHRVINVPTCKLGVVGLPIHALASALQHRNGTGRSFTSQWIPLATSPPAHPLRSSGDLFPEMLPFRTMQAQGRA

SEQ ID NO: 160151 - protein, 656 aa, Zea Mays
MYLGMILDVQVALKCSYIETTGCLGQFLALGAKILPSAAKCVTVDMVHNIGDFISELLSLMESSIVDNDKKIHGAALDITKAAPVFLDETTKLCRAYSEATKVDNCTMSITDEDATVKHNKQGLASDVIRITSSTIQTMCRLGTYAASSGGSQVILLNVSWKGVVSLLQSGKGMIEGKVNVREIIVTLLSLSIESLRVAAETWCAPLLETLGATEARRAFLPIKFFLINAVRICSTYPSEAMIIYKNIINCAVVITSSSILFSKKPQLKAANETLVELLEPTLFVLLDTLMKSSDLTPESKCQLAHHFFENEEDKSPDLMGQANQREINLASLDCIFSMDSDVDHRNRALLPAELLVFLHFLNASSWLTEMVVITLSKKLQTLLNILTSEDIYSYVLGFQIPALNGADQSPAVVWQPVYTSIIQALKAFMISTVASSAAWNELEAFLLENIFHPHFLCLEIITELWCFFIRYAETETSINLVNQVSLLLKTVASPEDVLSPLSALRKVARSLCIILSYASSATVDQIYTCVLNGENSSKSSILHLALLMEGFPLDSLSDGTKELAMKKMFTSFAGYLESYSKNHRVINVPTCKLGVVGLPIHALASALQHRNGTGRSFTSQWIPLATSPPAHPLRSSGDLFPEMLPFRTMQAQGRA

SEQ ID NO: 160152 - protein, 712 aa, Zea Mays
MEVGGDLQSLLEAIKSSEVLEDRIGLINRLESSFEYSADDLRPVLDSLNVYDLNGNFRYLGMILDVQVALKCSYIETTGCLGQFLALGAKASSWCRKHIVCSIESVDDSEDVQQEEHSKILPEIILMALNISIKILPSAAKCVTVDMVHNIGDFISELLSLMESSIVDNDKKIHGAALDITKAAPVFLDETTKLCRAYSEATKVDNCTMSITDEDATVKHNKQGLASDVIRITSSTIQTMCRLGTYAASSGGSQVILLNVSWKGVVSLLQSGKGMIEGKVNVREIIVTLLSLSIESLRVAAETWCAPLLETLGATEARRAFLPIKFFLINAVRICSTYPSEAMIIYKNIINCAVVITSSSILFSKKPQLKAANETLVELLEPTLFVLLDTLMKSSDLTPESKCQLAHHFFENEEDKSPDLMGQANQREINLASLDCIFSMDSDVDHRNRALLPAELLVFLHFLNASSWLTEMVVITLSKKLQTLLNILTSEDIYSYVLGFQIPALNGADQSPAVVWQPVYTSIIQALKAFMISTVASSAAWNELEAFLLENIFHPHFLCLEIITELWCFFIRYAETETSINLVNQVSLLLKTVASPEDVLSPLSALRKVARSLCIILSYASSATVDQIYTCVLNGENSSKSSILHLALLMEGFPLDSLSDGTKELAMKKMFTSFAGYLESYSKNHRVINVPTCKLGVVGLPIHALASALQHR

SEQ ID NO: 160153 - protein, 886 aa, Zea Mays
MALNISIKILPSAAKCVTVDMVHNIGDFISELLSLMESSIVDNDKKIHGAALDITKAAPVFLDETTKLCRAYSEATKVDNCTMSITDEDATVKHNKQGLASDVIRITSSTIQTMCRLGTYAASSGGSQVILLNVSWKGVVSLLQSGKGMIEGKVNVREIIVTLLSLSIESLRVAAETWCAPLLETLGATEARRAFLPIKFFLINAVRICSTYPSEAMIIYKNIINCAVVITSSSILFSKKPQLKAANETLVELLEPTLFVLLDTLMKSSDLTPESKCQLAHHFFENEEDKSPDLMGQANQREINLASLDCIFSMDSDVDHRNRALLPAELLVFLHFLNASSWLTEMVVITLSKKLQTLLNILTSEDIYSYVLGFQIPALNGADQSPAVVWQPVYTSIIQALKAFMISTVASSAAWNELEAFLLENIFHPHFLCLEIITELWCFFIRYAETETSINLVNQVSLLLKTVASPEDVLSPLSALRKVARSLCIILSYASSATVDQIYTCVLNGENSSKSSILHLALLMEGFPLDSLSDGTKELAMKKMFTSFAGYLESYSKNHRVINVPTCKLGVVGLPIHALASALQHSTFFGSVINVDSIVDENSITAMFKFTISLIKMFRIAPDSSKDNLAKHISSMLVIISNTRHLCAFSEMEKLTLQLRTLFVSTSDKSNAVLSQCKPSMASFMSTLGHLNVTEDDANELCSAIWDLYHLLLKERHWALIHLAMDSFGYFAARTSFTQLWRFVPRDAALSYNASTGTSIDENGFMLELRAYLQKEVALHTDKWSEEQIRLLVSEGRALKKLVEACCEIPVVAEPEKAPVAKDASTKKRKMPDGICEGMAMLQNGLKVMRGAFGEGDFADLKDRFAAHLSRLEDAVSQFASLSDEI

SEQ ID NO: 160154 - protein, 611 aa, Zea Mays
MYLGMILDVQVALKCSYIETTGCLGQFLALGAKILPSAAKCVTVDMVHNIGDFISELLSLMESSIVDNDKKIHGAALDITKAAPVFLDETTKLCRAYSEATKVDNCTMSITDEDATVKHNKQGLASDVIRITSSTIQTMCRLGTYAASSGGSQVILLNVSWKGVVSLLQSGKGMIEGKVNVREIIVTLLSLSIESLRVAAETWCAPLLETLGATEARRAFLPIKFFLINAVRICSTYPSEAMIIYKNIINCAVVITSSSILFSKKPQLKAANETLVELLEPTLFVLLDTLMKSSDLTPESKCQLAHHFFENEEDKSPDLMGQANQREINLASLDCIFSMDSDVDHRNRALLPAELLVFLHFLNASSWLTEMVVITLSKKLQTLLNILTSEDIYSYVLGFQIPALNGADQSPAVVWQPVYTSIIQALKAFMISTVASSAAWNELEAFLLENIFHPHFLCLEIITELWCFFIRYAETETSINLVNQVSLLLKTVASPEDVLSPLSALRKVARSLCIILSYASSATVDQIYTCVLNGENSSKSSILHLALLMEGFPLDSLSDGTKELAMKKMFTSFAGYLESYSKNHRVINVPTCKLGVVGLPIHALASALQHR

SEQ ID NO: 160155 - protein, 716 aa, Zea Mays
MEVGGDLQSLLEAIKSSEVLEDRIGLINRLESSFEYSADDLRPVLDSLNVSWDDSGCSGLSHCMLHKSILQVALKCSYIETTGCLGQFLALGAKASSWCRKHIVCSIESVDDSEDVQQEEHSKILPEIILMALNISIKILPSAAKCVTVDMVHNIGDFISELLSLMESSIVDNDKKIHGAALDITKAAPVFLDETTKLCRAYSEATKVDNCTMSITDEDATVKHNKQGLASDVIRITSSTIQTMCRLGTYAASSGGSQVILLNVSWKGVVSLLQSGKGMIEGKVNVREIIVTLLSLSIESLRVAAETWCAPLLETLGATEARRAFLPIKFFLINAVRICSTYPSEAMIIYKNIINCAVVITSSSILFSKKPQLKAANETLVELLEPTLFVLLDTLMKSSDLTPESKCQLAHHFFENEEDKSPDLMGQANQREINLASLDCIFSMDSDVDHRNRALLPAELLVFLHFLNASSWLTEMVVITLSKKLQTLLNILTSEDIYSYVLGFQIPALNGADQSPAVVWQPVYTSIIQALKAFMISTVASSAAWNELEAFLLENIFHPHFLCLEIITELWCFFIRYAETETSINLVNQVSLLLKTVASPEDVLSPLSALRKVARSLCIILSYASSATVDQIYTCVLNGENSSKSSILHLALLMEGFPLDSLSDGTKELAMKKMFTSFAGYLESYSKNHRVINVPTCKLGVVGLPIHALASALQHR

SEQ ID NO: 160156 - protein, 61 aa, Zea Mays
MCYCSMWFWVLRYILFMTMLFIVNGIFFVHDKVIMLIGTWSDHPRKQCYHKCRMGRPWLIN

SEQ ID NO: 160157 - protein, 67 aa, Zea Mays
MLVKRLIGLPGEKIQLPGSLNPTKIPEGHCWVEGDNSTRSWDSRAFGPILVFFSNHQFKCVHAVQLV

SEQ ID NO: 160158 - protein, 75 aa, Zea Mays
MRTKKTEKQGIKRNYNSYRTEGQTWCNDESCLTPCRRFELQSSLLICRGRLALVYPIPRPANMGACDTGSALQQL

SEQ ID NO: 160159 - protein, 376 aa, Zea Mays
MFKCFQASIHQHHRRAVEDPKPVMEPSPSFDFREEYTSAFRTESYNDFWARVLDITLAHGAGLVPRPGGDGGVTASSKRLPSYRLFAEQLLEPDQRAVRAALASPRSGQLHPGVRDLLVTYYNETASASFLCSHLLRDIEQIRLRYRPLKTTLRKLACDVEAPNLSDVSAALGQPFAALAVSQGKLRQVQLSSADLLRSLDASRKKARLRISSLARLRQLLSASFVTVVAAVAVVGAFIGVHILAAFAAFPMMSPAWLGLFSGRSVRRALVQLEAATKGTYILNRDMDTISRLVARLRDEGEHMLALLQLCVEHLAMAGEKGRLVKEVLKQLCKNEESFRQQLDDLEEHLFLCFMTINKARSMVMNFIAGAEQNSS

SEQ ID NO: 160160 - protein, 147 aa, Zea Mays
MMSDYKVDMVNDGMQEFFVEFRGPNESIYQGGIWRVRVELPDAYPYKSPSIGFINKIYHPNVDEMSGSVCLDVINQTWSPMFDLVNVFEVFLPQLLLYPNPSDPLNGDAAALMMRDRPAYEQKSTVKNTPNQRMLVSAQKTSPVTKS

SEQ ID NO: 160161 - protein, 586 aa, Zea Mays
MRIRRYAARLLSSTSPGSAATAAPSSPPRPPAASWLHTDDDDCCAFCELSRPASQEGLDAIKHKGYIADRVLESVVRADERVGLPERPPVPEVKKCKIDHVPPVNKACVGLQVVKLAAKPEGAAPASEDAADPATKAGVFVVNDAAIEQGVKCIASLSGGASKMEVTVENSLANGPTTELEVSNSLANGPTTELGVSKGTSLANESADLPGVTCIMPEVTDKPVTDLGVISTVVEVSDTGPVVHETTELESAGEDYIASEATAEPEDAGRASCNVDDTAALDEPQPPNCDLYLGNVQDGNAIDTVTSTLQPSRCDAAEGGGSVNFTTNIPVRARGPTFKGGVLKDKSVAPSVLLVLDVLTRSIGKSGRTDVICYARRTGKRKAELLKVKKENIDLEDGVICEKEETLVSTDRCECVLSTAGSIDVKLADIKKDLMDNSAVGKVKKMKRNRFECNIDYCHMVFKTEAELAVHKKNMCTVSSCSRHFRSHRYLRRHQSAHNDDMPYKCPWDGCNMAFKWSWDRAEHFKVHAGAKPYKCTTPGCSKIFKFVSDFTRHRRRCKPQRCLFYAFQEESTKYYVTLSIWKLLW

SEQ ID NO: 160162 - protein, 525 aa, Zea Mays
MRIRRYAARLLSSTSPGSAATAAPSSPPRPPAASWLHTDDDDCCAFCELSRPASQEGLDAIKHKGYIADRVLESVVRADERVGLPERPPVPEVKKCKIDHVPPVNKACVGLQVVKLAAKPEGGASKMEVTVENSLANGPTTELEVSNSLANGPTTELGVSKGTSLANESADLPGVTCIMPEVTDKPVTDLGVISTVVEVSDTGPVVHETTELESAGEDYIASEATAEPEDAGRASCNVDDTAALDEPQPPNCDLYLGNVQDGNAIDTVTSTLQPSRCDAAEGGGSVNFTTNIPVRARGPTFKGGVLKDKSVAPSVLLVLDVLTRSIGKSGRTDVICYARRTGKRKAELLKVKKENIDLEDGVICEKEETLVSTDRCECVLSTAGSIDVKLADIKKDLMDNSAVGKVKKMKRNRFECNIDYCHMVFKTEAELAVHKKNMCTVSSCSRHFRSHRYLRRHQSAHNDDMPYKCPWDGCNMAFKWSWDRAEHFKVHAGAKPYKCTTPGCSKIFKFVSDFTRHRRRCKPQR

SEQ ID NO: 160163 - protein, 90 aa, Zea Mays
MTGLRFVSDGVMDHERRFARRRAPGRGASSARQRSADRSRAETTGAGQRSTRERSRRAPRRSCTGVERAREGERRRRPSGSPVERRGRRC

SEQ ID NO: 160164 - protein, 147 aa, Zea Mays
MAHRLRRQVLEHRLLWPRLQRLHGVRAALVHREERPRLRHHVQPPLHHHGRHPGLLHLRRKPIRREHRRRRGCDSGPLHAAVGEGERPGAGHGQRAGTARDGLREAGEEGQRLCLRSAQDDEVTAAGHERQTAQSSAMPCSSSVLYL

SEQ ID NO: 160165 - protein, 456 aa, Zea Mays
MSPSGCCCARVQAAVAITCQAIAYYVHGDSTMHASGIFIQAVVACVTGWERIEQRGRRRLLFTIPRHGTSTQQGRGRNIMAEREVVEGGTTTGGGLWRRYAPHVQMVLAQLCYTLMYFITEAAFNQGLNPYVYITYRHLLVAVLIWPFAYYLEKGLRPKMTLMLFVEIFVLSLLGVSLTLNMYFTSLKYTSPTFVTSVVNTIASMTFVIAIILRMEIVDVKSLRGVAKVAGTVVSFAGVTTMTLYKGAAITSLWKSPVQIAGSGSGGGGVAHDSWVKGSVLAVASCVCWSIWYIMQASSLKRYPAQLSLTAWMCTVGGIQSTVFTLFMQHEPEEWRIGFGVKFWSIVYSGLACNGFTVFVQLWCTEKKGPVFVTMFNPLSTIMVAILAYFIFGENLYVGSIVGGGVVILGLYMLLWGKEKDQERGTGKEREQLETDCEKQAKKVSDCVYEAPKTTK

SEQ ID NO: 160166 - protein, 69 aa, Zea Mays
MRRGRRPWRPPRRCRRCRARRGSRRAPGPGSPRRTCPTAASARRGTCPPSCRPPLILVVQLDSASYSEQ

SEQ ID NO: 160167 - protein, 144 aa, Zea Mays
MLVLKLRFSYGEPMTVESSTQAICDLALRFGEGDEESMSRPFGVSLLIAGHDENGPSLYYTDPSGTFWQCNAKAIGSGSEGADSSLQEQYNKELTLQEAETIALSILKQVMEEKVTPNNVDIAKVAPKYHLYTPAEVEAVIARL

SEQ ID NO: 160168 - protein, 127 aa, Zea Mays
MLHVPHGDASVPRARGEPNGGGARRGPQLGKGDGEGTSEAAGPQPCGAGSVHRGQARRLHRQGHVAPPQRQSRHNATQRGRTLGVVQVQCSASCSGAFGCPQIKESVLLPLSTQSGIPRLCVERQNP

SEQ ID NO: 160169 - protein, 369 aa, Zea Mays
MALKEAKNYPREPAAHVAIRTVRRFLEKQKDKITAIVFCTISSSDTEIYKRLLPLYFPRDKQEEEIAALKLPADVGDENGETVIDERKIRIKPLPAGEANSKTPIPTLADIPLPDSSLTRRRNSFKLDSYLDPAFMSIIKDPDLRRKEQWEKSQANKGLNLANMLGFGDLGSPPLSAAEEYSLHSRYLAKANSMNLSDVAEMKIIYRGGVDSEGRPVMVIVGAHFLLRCLDLERFVLYVVKEFESLIQKPYTIVYFHSVASLQPQPDLGFMKRLQQILGRKHKKNLHTIYILHPTLGLRTAVMAMQLFVDGEVWKKVVYVDRLVQLFRYVPREQLTIPDFVFQHDLEVNGGKGIIVDPRTKHIYQRPSG

SEQ ID NO: 160170 - protein, 398 aa, Zea Mays
MALKGFTSNVLQLLQVICSAFDVVSIATGCIYTEAKNYPREPAAHVAIRTVRRFLEKQKDKITAIVFCTISSSDTEIYKRLLPLYFPRDKQEEEIAALKLPADVGDENGETVIDERKIRIKPLPAGEANSKTPIPTLADIPLPDSSLTRRRNSFKLDSYLDPAFMSIIKDPDLRRKEQWEKSQANKGLNLANMLGFGDLGSPPLSAAEEYSLHSRYLAKANSMNLSDVAEMKIIYRGGVDSEGRPVMVIVGAHFLLRCLDLERFVLYVVKEFESLIQKPYTIVYFHSVASLQPQPDLGFMKRLQQILGRKHKKNLHTIYILHPTLGLRTAVMAMQLFVDGEVWKKVVYVDRLVQLFRYVPREQLTIPDFVFQHDLEVNGGKGIIVDPRTKHIYQRPSG

SEQ ID NO: 160171 - protein, 387 aa, Zea Mays
MALKVICSAFDVVSIATGCIYTEAKNYPREPAAHVAIRTVRRFLEKQKDKITAIVFCTISSSDTEIYKRLLPLYFPRDKQEEEIAALKLPADVGDENGETVIDERKIRIKPLPAGEANSKTPIPTLADIPLPDSSLTRRRNSFKLDSYLDPAFMSIIKDPDLRRKEQWEKSQANKGLNLANMLGFGDLGSPPLSAAEEYSLHSRYLAKANSMNLSDVAEMKIIYRGGVDSEGRPVMVIVGAHFLLRCLDLERFVLYVVKEFESLIQKPYTIVYFHSVASLQPQPDLGFMKRLQQILGRKHKKNLHTIYILHPTLGLRTAVMAMQLFVDGEVWKKVVYVDRLVQLFRYVPREQLTIPDFVFQHDLEVNGGKGIIVDPRTKHIYQRPSG

SEQ ID NO: 160172 - protein, 426 aa, Zea Mays
MAKMTNAYDLPARKVIHTVGPKYAVKYHTAAENALSHCYRSCLELLIENGLESIATGCIYTEAKNYPREPAAHVAIRTVRRFLEKQKDKITAIVFCTISSSDTEIYKRLLPLYFPRDKQEEEIAALKLPADVGDENGETVIDERKIRIKPLPAGEANSKTPIPTLADIPLPDSSLTRRRNSFKLDSYLDPAFMSIIKDPDLRRKEQWEKSQANKGLNLANMLGFGDLGSPPLSAAEEYSLHSRYLAKANSMNLSDVAEMKIIYRGGVDSEGRPVMVIVGAHFLLRCLDLERFVLYVVKEFESLIQKPYTIVYFHSVASLQPQPDLGFMKRLQQILGRKHKKNLHTIYILHPTLGLRTAVMAMQLFVDGEVWKKVVYVDRLVQLFRYVPREQLTIPDFVFQHDLEVNGGKGIIVDPRTKHIYQRPSG

SEQ ID NO: 160173 - protein, 385 aa, Zea Mays
MQHRSPEAASASASPTAAAVEAMAPGVGGVEPAVTLDQVPRWSDPDQRISLLSPTAAGSETPASSFLSFSDPLTGDDAAAGAGGRGASRFPVDYEINSKIYLWRGHPWNLEVDAVVNSTNENLDEAHSSPGLHAAAGSGLAEECATLGGCRTGMAKMTNAYDLPARKVIHTVGPKYAVKYHTAAENALSHCYRSCLELLIENGLESIATGCIYTEAKNYPREPAAHVAIRTVRRFLEKQKDKITAIVFCTISSSDTEIYKRLLPLYFPRDKQEEEIAALKLPADVGDENGETVIDERKIRIKPLPAGEANSKTPIPTLADIPLPDSSLTRRRILISDARSNGKNLRQTRDLTWLTCLGLVILAVHHYLLLKNIHFIHDTLLKRIL

SEQ ID NO: 160174 - protein, 807 aa, Zea Mays
MASQGEPSSSDPKGKKDYSTAILERKKSPNRLVVDEATNDDNSVVALHPDTMERLQLFRGDTVLLKGKKRKDTICIVLADETCEEPKVRMNKVVRKNLRVRLSDVVSVHQCPDVKYGKRVHILPIDDTIEGITGNLFDAFLKPYFLEAYRPLRKGDLFLVRGGMRSVEFKVIETDPAEYCIVAPDTEIFCEGEPIKREDEERLDEVGYDDVGGVRKQMAQIRELVELPLRHPQLFKSIGVKPPKGILLYGPPGSGKTLIARAVANETGAFFFLINGPEIMSKLAGESESNLRKAFEEAEKNAPSIIFIDEIDSIAPKREKTHGEVERRIVSQLLTLMDGLKSRAHVIVMGATNRPNSIDPALRRFGRFDREIDIGVPDEVGRLEVLRIHTKNMKLAEDVDLEIIAKDTHGYVGADLAALCTEAALQCIREKMDIIDLEDETIDAEILNSMAVSNDHFKTALGTSNPSALRETVVEVPNVSWEDIGGLENVKRELQETVQYPVEHPEKFEKFGMSPSKGVLFYGPPGCGKTLLAKAIANECQANFISVKGPELLTMWFGESEANVREIFDKARQSAPCVLFFDELDSIATQRGSSVGDAGGAADRVLNQLLTEMDGMNAKKTVFIIGATNRPDIIDPALLRPGRLDQLIYIPLPDEQSRLQIFKACLRKSPVAKDVDLNALAKYTQGFSGADITEICQRACKYAIRENIEKDIERERRSKDNPEAMEEDEVDDIAEIKAAHFEESMKYARRSVSDADIRKYQAFAQTLQQSRGFGSEFRFPDQPTAAAAAADPFASAAAAADDDDLYS

SEQ ID NO: 160175 - protein, 204 aa, Zea Mays
MTETCGIISLEYPEKGQIRQFGSTGALVSGVEAKIVDVETLICLPPNQLGEICVRGPNIMQGYFNNVQATEFTIKQGWLHTGDIGYFDEGGQLFVVDRLKELIKYKGFQIAPAELEGLLLSHPEILDAVVIPFPDAEAGEVPIAYVVRSSESSLTEVDVQKFIEKQVAYYKKLRRVTFVDSVPKSASGKILRRELISKVRSSKL

SEQ ID NO: 160176 - protein, 373 aa, Zea Mays
MARTAAPAAGYGEDGVYHSATGQSLTFAAFRSAVLTTAVALSSRAGVRRGDVVLFFAPNCFLYPVCFLPMFHIFGLSVITFAQMQRGNSVVVMSRFDMDSVMAAVQRHRVTHLFCVPPVMIALAKLGSVGKYDLSSLRFIGSGAAPLGKDVMEGVAKNFPEAVIAQGYGMTETCGIISLEYPEKGQIRQFGSTGALVSGVEAKIVDVETLICLPPNQLGEICVRGPNIMQGYFNNVQATEFTIKQGWLHTGDIGYFDEGGQLFVVDRLKELIKYKGFQIAPAELEGLLLSHPEILDAVVIPFPDAEAGEVPIAYVVRSSESSLTEVDVQKFIEKQVAYYKKLRRVTFVDSVPKSASGKILRRELISKVRSSKL

SEQ ID NO: 160177 - protein, 282 aa, Zea Mays
MARTAAPAAGYGEDGVYHSATGQSLTFAAFRSAVLTTAVALSSRAGVRRGDVVLFFAPNCFLYPVCFLPMFHIFGLSVITFAQMQRGNSVVVMSRFDMDSVMAAVQRHRVTHLFCVPPVMIALAKLGSVGKYDLSSLRFIGSGAAPLGKDVMEGVAKNFPEAVIAQGYGMTETCGIISLEYPEKGQIRQFGSTGALVSGVEAKIVDVETLICLPPNQLGEICVRGPNIMQGYFNNVQATEFTIKQGWLHTGDIGYFDEGGQLFVVDRLKELIKYKGFQVPRC

SEQ ID NO: 160178 - protein, 324 aa, Zea Mays
MARTAAPAAGYGEDGVYHSATGQSLTFAAFRSAVLTTAVALSSRAGVRRGDVVLFFAPNCFLYPVCFLPMFHIFGLSVITFAQMQRGNSVVVMSRFDMDSVMAAVQRHRVTHLFCVPPVMIALAKLGSVGKYDLSSLRFIGSGAAPLGKDVMEGVAKNFPEAVIAQGYGMTETCGIISLEYPEKGQIRQFGSTGALVSGVEAKIVDVETLICLPPNQLGEICVRGPNIMQGYFNNVQATEFTIKQGWLHTGDIGYFDEGGQLFVVDRLKELIKYKGFQSNFIFFFGRLHLPSLKGYFCLIQKFWMLLLSRSPMLKLVKFLLLTS

SEQ ID NO: 160179 - protein, 93 aa, Zea Mays
MRRSVTGVPNIAARRRKGWRSAIGSGEEEGGGAAAGGAGAGADACDARCSSLAFPSHGRWMEADGGSLCCLFAVVGHKRAKTAATKRGPPQQL

SEQ ID NO: 160180 - protein, 350 aa, Zea Mays
MLKDYRGQSKAGCPLDAQDLFHQSHNLIKPSDNPLYGFGDKDTFPVGKIELPLSFGVAPNARSEQITFDIVDMVYPYNAIMGRGSINKFEAAIHGLYLCMKIPDPLGAITVYGNQQTARNIERDFVPGQRNVHCLTAQCEVPASVSQTDKEHDKAHLQSNDGTKTVPLDQATPKQTVTISEDLTSHDEEKLLCCLSKNKDVFAWSALDLFGVSRSIIEHSLGIDPSVRPKKQRLRKMSDEKTEAAKAEVHHLLEAKFIEPVAYPTWLSNVVMVQKKSGKWRMCIDFTSLNKACPKDNFPLPRIDRIVDSAAGCEVMSLLDCFSGYHQIYMWMTSSSLAGARRKTRPAPAS

SEQ ID NO: 160181 - protein, 523 aa, Zea Mays
MRGIGFVTQDDVLFAHLTVKETLTYAALLRLPRTMTQQQKKERAMDIIHELGLERCQDTMIGGSFVRGVSGGERKRVCIGNEILINPSLLFLDEPTSGLDSTTALRIVQLLHDIAEDGKTVITTIHQPSSRLFHKFDKLILLGKGSLLYFGKASEAMPYFQSIGCAPLIAMNPAEFLLDLANGNTTDVSVPSELDDKVHMENHNLENNNSKIDYRPSAQDVHEYLVDAYETRVAFKEKKKLLAPLPISDDLKATITSSKREWGTSWWQQYSILFCRGIKERRHDYLSWMRITQVIATSVILGLLWWHSDPSTLKGLEDQAGLLFFIAVFWGFFPVFTAIFTFPQERAMLNKERAVDMYKLSAYFLARTTSDLPLDLFLPIIFMVIVYFMAGLKATATHFFLSMLTVFLSIIAAQGLGLAIGATLLDIKKATTLASVTVMTFMLAGGFFVKSVPPFISWLRYLSFNYHTYRLLLKVQYDPVPDILTTTRHMDSGGTEVAALVAMVIGYRVLAYLSLRRAKALGS

SEQ ID NO: 160182 - protein, 54 aa, Zea Mays
MGFDDMYLCSPGGMYDKFGKDYFLCTGMASMLVPVVVNPGEEWKAAQVIEHDNL

SEQ ID NO: 160183 - protein, 596 aa, Zea Mays
MAAVAPPPAPAPAPVPAPAPATVPVADQTTDLLQKLSLDSQPKAADATQPAAATAKKGAAASQPLSVAIPPEPSITPVIQDFTDPNLFYLPAYYYGGYDSSMSEWDDYPRYLNSDGVEIAPAVYGDIYGYGYAPYGAYSPATSPVPTVDGQMFGAQHYQYPTAYFQPPTPVPSTTQSDLQSSKNPEKPAAKADPAKTTNGVPNGTAHSNSGTVPLASSQQNSSLTPDGTYRAPLLGGVPSAGYLDTTYGYDSTGAHFAWYDGSAYANGQQRATTTNHFPSSTFGNGSPARYQNKSTTTPQMGMQNRRPTTTSPAPTYPNRMYPSSRPYTQYGNSIKTGLPYGSNGYDSRIYGRWGLGMDNRYRPRGRNGYYGYGNESQDGTIELNRGPRSGRFKNQKLYGHTVTIAVKGQSLPSGESKDDSAVPDRAQFNRDDFPVQYDAAKFFVIKSYSEDDIHKSVKYNVWASTTNGNKKLDAAYQEAQSKGSACPIFLFFSVNTSGQFVGVAEMTGAVDFEKTLGYWQQDKWNGSFSVKWHIVKDVPNNILKHIILENNENKPVTNSRDTQENKAFRCSRYSRSMSARRPSWMTSPSMRVARS

SEQ ID NO: 160184 - protein, 829 aa, Zea Mays
MAVFLLLLRLVVFSLSFAINAVQTAPASHAQVHIVYLGHNNDLDPSLTTDSHLQLLSTVFTEPNEAREAILYSYSCGFSGFAALLNSTQATTLSGTDGVVSVFRSRMLEVHTTRSWDFMGLRLHMHTEQSSQRHLKFGDDVIVGVLDTGVWPESKSFRDDPHYGPVPSSWKGTCVVGDEFDPAAACNRKLIGARYYLAGFESELGPLNTSDGSEYRSPRDRVGHGTHTASTAVGSVAPNASYFGGLGGGAARGGAPRARLAVYKVCWYRDLTGRCSDADILAAFDDALCDGVHVVSASLGSPPPLMPLLSTSTEIGAFHAMQRGVVAVFSAGNDGPDASMVQNVSPWGLTVAASSIDRRFPTVITLGNNASIVVGFFLLLRALPWARMIYHMTCLAYVVAQGESFLVKAMKNGLVDSSSVFTDGTCTFEQLINRTAAWGKIVLCFATMGGVSSDGAALAVYAGNGAGVIFADTISRKSSQDSFWPTVHVDLYQGTQILNYIRDSRKPTVRISPSKTVVGETPAPAVAYFSSRGPSSVSPKILKPDVTAPGVNILAAWPPKSSPTVIPLDKRLTEWNMDSGTSMSCPHVSGIAAVIKSVHPTWSPAAVKSALMTTAYMYDGTSDVMQAGGTVKAADAFDVGAGHVDPLRALDPGLVYDAGARDHVVFLCSLGYTEAAIRNMVLPQPALDTSCPRGGGGGGGPEADLNYPAIVLPDLGGTVTVKRTVTNVGANRDAVYRAAVASPQGARAEVWPRELAFSARPGGEQASYYLTVTPAKLSRGRFDFGEVVWSDGFHRVRTPLVVRVTNLPDDGVKVVQAANATGDGSQAAA

SEQ ID NO: 160185 - protein, 790 aa, Zea Mays
MAVFLLLLRLVVFSLSFAINAVQTAPASHAQVHIVYLGHNNDLDPSLTTDSHLQLLSTVFTEPNEAREAILYSYSCGFSGFAALLNSTQATTLSGTDGVVSVFRSRMLEVHTTRSWDFMGLRLHMHTEQSSQRHLKFGDDVIVGVLDTGVWPESKSFRDDPHYGPVPSSWKGTCVVGDEFDPAAACNRKLIGARYYLAGFESELGPLNTSDGSEYRSPRDRVGHGTHTASTAVGSVAPNASYFGGLGGGAARGGAPRARLAVYKVCWYRDLTGRCSDADILAAFDDALCDGVHVVSASLGSPPPLMPLLSTSTEIGAFHAMQRGVVAVFSAGNDGPDASMVQNVSPWGLTVAASSIDRRFPTVITLGNNASIVGESFLVKAMKNGLVDSSSVFTDGAAWGKIVLCFATMGGVSSDGAALAVYAGNGAGVIFADTISRKSSQDSFWPTVHVDLYQGTQILNYIRDSRKPTVRISPSKTVVGETPAPAVAYFSSRGPSSVSPKILKPDVTAPGVNILAAWPPKSSPTVIPLDKRLTEWNMDSGTSMSCPHVSGIAAVIKSVHPTWSPAAVKSALMTTAYMYDGTSDVMQAGGTVKAADAFDVGAGHVDPLRALDPGLVYDAGARDHVVFLCSLGYTEAAIRNMVLPQPALDTSCPRGGGGGGGPEADLNYPAIVLPDLGGTVTVKRTVTNVGANRDAVYRAAVASPQGARAEVWPRELAFSARPGGEQASYYLTVTPAKLSRGRFDFGEVVWSDGFHRVRTPLVVRVTNLPDDGVKVVQAANATGDGSQAAA

SEQ ID NO: 160186 - protein, 723 aa, Zea Mays
MLEVHTTRSWDFMGLRLHMHTEQSSQRHLKFGDDVIVGVLDTGVWPESKSFRDDPHYGPVPSSWKGTCVVGDEFDPAAACNRKLIGARYYLAGFESELGPLNTSDGSEYRSPRDRVGHGTHTASTAVGSVAPNASYFGGLGGGAARGGAPRARLAVYKVCWYRDLTGRCSDADILAAFDDALCDGVHVVSASLGSPPPLMPLLSTSTEIGAFHAMQRGVVAVFSAGNDGPDASMVQNVSPWGLTVAASSIDRRFPTVITLGNNASIVVGFFLLLRALPWARMIYHMTCLAYVVAQGESFLVKAMKNGLVDSSSVFTDGTCTFEQLINRTAAWGKIVLCFATMGGVSSDGAALAVYAGNGAGVIFADTISRKSSQDSFWPTVHVDLYQGTQILNYIRDSRKPTVRISPSKTVVGETPAPAVAYFSSRGPSSVSPKILKPDVTAPGVNILAAWPPKSSPTVIPLDKRLTEWNMDSGTSMSCPHVSGIAAVIKSVHPTWSPAAVKSALMTTAYMYDGTSDVMQAGGTVKAADAFDVGAGHVDPLRALDPGLVYDAGARDHVVFLCSLGYTEAAIRNMVLPQPALDTSCPRGGGGGGGPEADLNYPAIVLPDLGGTVTVKRTVTNVGANRDAVYRAAVASPQGARAEVWPRELAFSARPGGEQASYYLTVTPAKLSRGRFDFGEVVWSDGFHRVRTPLVVRVTNLPDDGVKVVQAANATGDGSQAAA

SEQ ID NO: 160187 - protein, 684 aa, Zea Mays
MLEVHTTRSWDFMGLRLHMHTEQSSQRHLKFGDDVIVGVLDTGVWPESKSFRDDPHYGPVPSSWKGTCVVGDEFDPAAACNRKLIGARYYLAGFESELGPLNTSDGSEYRSPRDRVGHGTHTASTAVGSVAPNASYFGGLGGGAARGGAPRARLAVYKVCWYRDLTGRCSDADILAAFDDALCDGVHVVSASLGSPPPLMPLLSTSTEIGAFHAMQRGVVAVFSAGNDGPDASMVQNVSPWGLTVAASSIDRRFPTVITLGNNASIVGESFLVKAMKNGLVDSSSVFTDGAAWGKIVLCFATMGGVSSDGAALAVYAGNGAGVIFADTISRKSSQDSFWPTVHVDLYQGTQILNYIRDSRKPTVRISPSKTVVGETPAPAVAYFSSRGPSSVSPKILKPDVTAPGVNILAAWPPKSSPTVIPLDKRLTEWNMDSGTSMSCPHVSGIAAVIKSVHPTWSPAAVKSALMTTAYMYDGTSDVMQAGGTVKAADAFDVGAGHVDPLRALDPGLVYDAGARDHVVFLCSLGYTEAAIRNMVLPQPALDTSCPRGGGGGGGPEADLNYPAIVLPDLGGTVTVKRTVTNVGANRDAVYRAAVASPQGARAEVWPRELAFSARPGGEQASYYLTVTPAKLSRGRFDFGEVVWSDGFHRVRTPLVVRVTNLPDDGVKVVQAANATGDGSQAAA

SEQ ID NO: 160188 - protein, 115 aa, Zea Mays
MHPYMDGINIAFKKRMEGFSFFCIYLYFPLRISSGLACGGEEKKKQGDGKCSDQTSCKRSPEHQDEVHSSSSGAMGIAVVAISVPLRPPAIILDSTVLAPRAEALDLGCFALTPI

SEQ ID NO: 160189 - protein, 226 aa, Zea Mays
MLLAAAAADDSGAGAHAGGVRRRVHVDGLGGGLHLAVLVVVLGALQGRRGPRRRRGGQGPVGAVRARAVLGHRVAPVLPLVPGPLQLHRRLVGARRRRRRRRRPRPGRGRGRGRGGGAHVLAGPARRLPPVHGGDGRGAAAGRAAPRRQGAPPRAAALLPRAQRQARAQVRRQRLHRPPPPPHRRRRSRQPQRRRPARVTAFFFTVMAVRTDRISGTAEAQKSSTA

SEQ ID NO: 160190 - protein, 335 aa, Zea Mays
MMLALKTGIITGVIALAEGIAVGRSFAMFKNYHIDGNKEMIAIGTMNVLGSLTSCYLTTGPFSRSAVNYNAGCRTAMSNVVMSLAVMVTLLFLTPLFHYTPLVVLSAIIVSAMLGLVDFGAALHLWRVDKVDFCVCAGAYLGVVFGSVEVGLVVAVAVSLLRVLLFVARPRTTVLGNIPGTMVYRRMDQYAAAQTVPGVLVLRVDAPVYFANASYLRERISRWIDDEEERTKSQGEMGVRYVVLDMGAIGSIDTSGTSMLDELNKSLDRRGMQIVLANPGSEIMKKLDSSKVLEQIGHEWVFPTVGEAVASCDYVLHSHKPGMAKDSAAAHESMV

SEQ ID NO: 160191 - protein, 396 aa, Zea Mays
MSKRRPKLFWISAAAPLTSVVLGSVLVYLTHAENHGIEVIGYLKKGLNPPSVTSLQFSPPYMMLALKTGIITGVIALAEGIAVGRSFAMFKNYHIDGNKEMIAIGTMNVLGSLTSCYLTTGPFSRSAVNYNAGCRTAMSNVVMSLAVMVTLLFLTPLFHYTPLVVLSAIIVSAMLGLVDFGAALHLWRVDKVDFCVCAGAYLGVVFGSVEVGLVVAVAVSLLRVLLFVARPRTTVLGNIPGTMVYRRMDQYAAAQTVPGVLVLRVDAPVYFANASYLRERISRWIDDEEERTKSQGEMGVRYVVLDMGAIGSIDTSGTSMLDELNKSLDRRGMQIVLANPGSEIMKKLDSSKVLEQIGHEWVFPTVGEAVASCDYVLHSHKPGMAKDSAAAHESMV

SEQ ID NO: 160192 - protein, 677 aa, Zea Mays
MGGSADANGAGSVRVPVPPARPFLDTFRGNLKETFFPDDPFRGVVRERGAGRRTVAALRYFFPFLEWAPAYALSTFKSDLIAGITIASLAIPQGISYAKLANLPPVLGLYSSFVPPLVYALMGSSKDLAVGTVAVASLLISSMLGSEVSPTENPVLYLHLAFTATFFAGVFQASLGLLRLGFIVDLLSHATIVGFMAGAATVVCLQQLKGMLGLVHFTTSTDVVSVMESVFSQTHQWRWESVLLGCGFLFFLLVTRFISKRRPKLFWISAAAPLTSVVLGSVLVYLTHAENHGIEVIGYLKKGLNPPSVTSLQFSPPYMMLALKTGIITGVIALAEGIAVGRSFAMFKNYHIDGNKEMIAIGTMNVLGSLTSCYLTTGPFSRSAVNYNAGCRTAMSNVVMSLAVMVTLLFLTPLFHYTPLVVLSAIIVSAMLGLVDFGAALHLWRVDKVDFCVCAGAYLGVVFGSVEVGLVVAVAVSLLRVLLFVARPRTTVLGNIPGTMVYRRMDQYAAAQTVPGVLVLRVDAPVYFANASYLRERISRWIDDEEERTKSQGEMGVRYVVLDMGAIGSIDTSGTSMLDELNKSLDRRGMQIVLANPGSEIMKKLDSSKVLEQANRMCSVLRFRSDVTSRHADRDELCIHVSRVLYTCTVAGKTNSEKKGSHPVFFGEEKPHLDMVS

SEQ ID NO: 160193 - protein, 106 aa, Zea Mays
MRIRQHVNPLSSSFSEPTGPPEWKEVFDDPLLPLMVDIGCGSGRFLIWHAKNSGKSQNYLGLEIRQKFKREKKDHNSFRNKELGSSSSTPPQKKGIPHPHNTEQRK

SEQ ID NO: 160194 - protein, 238 aa, Zea Mays
MAWTTAATVCWRLLHLPSARCPLSSRARCSAAQSPDAVDKEYADLNLRPLYPNRGHHMRIRQHVNPLSSSFSEPTGPPEWKEVFDDPLLPLMVDIGCGSGRFLIWHAKNSGKSQNYLGLEIRQKLVERAQFWVNELELMNVYFMFANATVSFEKIISSYPGPLSLVSILCPDPHFKKRHHKRRVLQQPLVDSIINNLCLGGQVFIQSDVLEVSVDMRERMASGQPNGNPDRARNPCRA

SEQ ID NO: 160195 - protein, 203 aa, Zea Mays
MAWTTAATVCWRLLHLPSARCPLSSRARCSAAQSPDAVDKEYADLNLRPLYPNRGHHMRIRQHVNPLSSSFSEPTGPPEWKEVFDDPLLPLMVDIGCGSGRFLIWHAKNSGKSQNYLGLEIRQKLVERAQFWVNELELMNVYFMFANATVSFEKIISSYPGPLSLVSILCPDPHFKKRHHKRRVLQQPLVDSIINNLCLGGQV

SEQ ID NO: 160196 - protein, 725 aa, Zea Mays
MAAPESECGGSDGYRDLRGVRVDLDTGAARAGGGGGFAVSFWLYLSVSARPSSVILHQITAGDDTKLPFLALGEGNKLLLFPLMRLHREAPAPASSYPWTDTTNLSSTSVCPLEKWFHIGCEMKKNTTCSIHQELYFLVTENVMRLHVDGFLTAEAPLCSLFDEPDSQDDSNQISLVGNDGKLEGYIYNIEVSYVLGAIKEQYTKNPPFKLSIDYSCSDGIEEGDDGIWSIVGGKASCRRNFILEVVLTNAFGEPVKDKEVVSSLVYADDGTVVAKSRDDSEPPLLITCEGLEYAAISRPLPIIRGRALFKLKISQLSSKCDNKLFRIKFSTLHMQRYSFLEAYSKPIRCISRSRTVRPLGPTKRASSATANEIDMLSNGQGFVSTDKVNSRGHSVCLHTPMFPKIEDGMVEVVEAHKIVSQNKNARKVVVSKEAQNVIGTDSSTSNYDSFDSGSSWSGSEGDDGIETFSDAVVFRYCLDSTYDRSKFLRGASLTVNKDDLVKLADRVSLYSGCSHHRNQILMSKRLLREGADTWNMISKNNERALWSSAIPEIITKFTNIAHSVRRGLSEQYSLFQDLEVLRGIAGCGEDIGRDEFDRLWCWLYPVAVSLSRERIKKLWDCTAPRWIEGLITTEEAESALRSSRELLKEAGTFVLRFPITRSWPHPDAGSLVVTYIGSDSSIHHRLLSLDSSDASAEKLQDLLLQEPELSQLGRVDRVSITIRR

SEQ ID NO: 160197 - protein, 693 aa, Zea Mays
MAAPESECGGSDGYRDLRGVRVDLDTGAARAGGGGGFAVSFWLYLSVSARPSSVILHQITAGDDTKLPFLALGEGNKLLLFPLMRLHREAPAPASSYPWTDTTNLSSTSVCPLEKWFHIGCEVTENVMRLHVDGFLTAEAPLCSLFDEPDSQDDSNQISLVGNDGKLEGYIYNIEVSYVLGAIKEQYTKNPPFKLSIDYSCSDGIEEGDDGIWSIVGGKASCRRNFILEVVLTNAFGEPVKDKEVVSSLVYADDGTVVAKSRDDSEPPLLITCEGLEYAAISRPLPIIRGRALFKLKISQLSSKCDNKLFRIKFSTLHMQRYSFLEAYSKPIRCISRSRTVRPLGPTKRASSATANEIDMLSNGQGFVSTDKVNSRGHSVCLHTPMFPKIEDGMVEVVEAHKIVSQNKNARKVVVSKEAQNVIGTDSSTSNYDSFDSGSSWSGSEGDDGIETFSDAVVFRYCLDSTYDRSKFLRGASLTVNKDDLVKLADRVSLYSGCSHHREGADTWNMISKNNERALWSSAIPEIITKFTNIAHSVRRGLSEQDLEVLRGIAGCGEDIGRDEFDRLWCWLYPVAVSLSRERIKKLWDCTAPRWIEGLITTEEAESALRSSRELLKEAGTFVLRFPITRSWPHPDAGSLVVTYIGSDSSIHHRLLSLDSSDASAEKLQDLLLQEPELSQLGRVDRVSITIRR

SEQ ID NO: 160198 - protein, 52 aa, Zea Mays
MTISFTSCIVCKGYFPPLCNCPQDTHANYCCSKLNKQCQTSNDNSFSYSQIS

SEQ ID NO: 160199 - protein, 806 aa, Zea Mays
MGRRILFSGSIHYPRSTPDMWEGLIQKAKDGGLDVIQTYVFWNGHEPTPGNYYFEERYDLVRFVKTVQKAGLFVHLRIGPYICGEWNFGGFPVWLKYVPGISFRTDNEPFKTAMQGFTEKIVGMMKSENLFASQGGPIILSQIENEYGPEGKEFGAAGQAYINWAAKMAVGLDTGVPWVMCKEEDAPDPVINACNGFYCDAFSPNKPYKPTMWTEAWSGWFTEFGGTIRQRPVEDLAFAVARFVQKGGSFINYYMYHGGTNFGRTAGGPFITTSYDYDAPIDEYGLIREPKHSHLKELHRAVKLCEQALVSVDPTITTLGTMQEAHVFRSPSGCAAFLANYNSNSHAKVVFNNEQYSLPPWSISILPDCKNVVFNSATVGVQTSQMQMWGDGATSMMWERYDEEVDSLAAAPLLTTTGLLEQLNVTRDSSDYLWYITSVDISPSENFLQGGGKPPSLSVQSAGHALHVFVNGQLQGSSYGTREDRRIKYNGNVNLRAGTNKIALLSVACGLPNVGVHYETWNTGVGGPVVLHGLNEGSRDLTWQTWSYQVGLKGEQMNLNSVEGSGSVEWMQGSLIAQKQQPLAWYKAYFETPSGDEPLALDMGSMGKGQVWINGQSIGRYWTAYADGDCKGCSYTGTFRAPKCQAGCGQPTQRWYHVPRSWLQPSRNLLVVLEELGGGDSSKIALAKRSVSSVCADVSEDHPNIKKWQIESYGEREHRRAKVHLRCAHGQSISAIRFASFGTPVGTCGNFQQGGCHSASSHAVLEKRCIGLQRCVVAISPDNFGGDPCPSVTKRVAVEAVCSPAA

SEQ ID NO: 160200 - protein, 796 aa, Zea Mays
MPARRPTSMMWEGLIQKAKDGGLDVIQTYVFWNGHEPTPGNYYFEERYDLVRFVKTVQKAGLFVHLRIGPYICGEWNFGGFPVWLKYVPGISFRTDNEPFKTAMQGFTEKIVGMMKSENLFASQGGPIILSQIENEYGPEGKEFGAAGQAYINWAAKMAVGLDTGVPWVMCKEEDAPDPVINACNGFYCDAFSPNKPYKPTMWTEAWSGWFTEFGGTIRQRPVEDLAFAVARFVQKGGSFINYYMYHGGTNFGRTAGGPFITTSYDYDAPIDEYGLIREPKHSHLKELHRAVKLCEQALVSVDPTITTLGTMQEAHVFRSPSGCAAFLANYNSNSHAKVVFNNEQYSLPPWSISILPDCKNVVFNSATVGVQTSQMQMWGDGATSMMWERYDEEVDSLAAAPLLTTTGLLEQLNVTRDSSDYLWYITSVDISPSENFLQGGGKPPSLSVQSAGHALHVFVNGQLQGSSYGTREDRRIKYNGNVNLRAGTNKIALLSVACGLPNVGVHYETWNTGVGGPVVLHGLNEGSRDLTWQTWSYQVGLKGEQMNLNSVEGSGSVEWMQGSLIAQKQQPLAWYKAYFETPSGDEPLALDMGSMGKGQVWINGQSIGRYWTAYADGDCKGCSYTGTFRAPKCQAGCGQPTQRWYHVPRSWLQPSRNLLVVLEELGGGDSSKIALAKRSVSSVCADVSEDHPNIKKWQIESYGEREHRRAKVHLRCAHGQSISAIRFASFGTPVGTCGNFQQGGCHSASSHAVLEKRCIGLQRCVVAISPDNFGGDPCPSVTKRVAVEAVCSPAA

SEQ ID NO: 160201 - protein, 95 aa, Zea Mays
MCMALWRLPCERGVQKTLLWRHNHVESLVAGAIRTGSGRKLEIDGGTAGVREKERAREIGRFLSPASVGEEAEVAARPCRPSRSSCRQSPGRSDG

SEQ ID NO: 160202 - protein, 1320 aa, Zea Mays
MGRKKRTSAPNPTPPPLDASRRSPAAAEKPAGIGREDAAVRAEVDKALACLQRGSHARAQRLTRDAIARHGEASPLLLRAHGTVHARAASVLDDHASRARHQRTALQAAQRAVQLAPDSIELAHFHAMLLFDAATDSRAYDEVVAECERGLSIEAPSDPAPHSLRLPGPDVDQVQSELRNLIQKANLASISSWVKNMGGAGDDKLRLIPVRRLADEPMEARLVPTAPSPRRPNEIKKATKTTEERRQEIEVRLAAMRLLQQQKEQSNDVVSATPASSRSHGDDAPSSSESSVGGHRADRRKGGSRKATGSSASERTDQVRAYWGSIPVEQRLAFLNTSISELKSHYASAMHKEKDAASAASDVLNEVIQFANKHDKWEFMVCGRCREQFTHVEAHRWHVMVEHVGLLSSELQEMVPQEIDADWAEMLSGCNWRPLDATAALKLFEEDQHNNLGPDREDESNSLDSWSNKAMDMSESSAWSHNEESSGFGVVVREGDTKWPFSDDDERAKILERIHSSFKILVKNHNLSVHNLNRVIRFAVEELRGLPSGSLLLNHSLDESPLCIRFLEASSLQKVDNFLQDLMQASGLNRNLQKAEGLGDGDSFIQNHDVLEKVTLNSDSSELIIDGHTFGGKFDSESVDTDALLSWLYAGSSIGEQLLAWNRMIDERSNQCVDLIRALGREFNNLQNSCERKLEQLRNEDAFTSVEGLFCEEQTRREQVGRYGFQTFEELLRKRQEFLEHNTEEQSDSNRSEIDAISAILKELHTSHFGYDEALTGMAPRFSDFDGGEEDEWRLHDFIHPNDSMVHMVVSKMKEHVTMEISKIDAKIMRTLSVMRQLEHKLGPVSALDYRMILLPLMRSFLQSHLEELVDKDARERSDAAREAFLAELALDAKKNASKGGDMKQSHEKSKDKKKFKDSRRAKEFKDSSWSDQSLIHQDSADEETTETFQILADCDDLDCKFSTSDDYFNEQEEELRHKVQLEAEERKLEETLEYQRRIEEEAKQKHLAEQCRSTYASSVIGTARLSSTGNQDNHESAINHSSRTYLEGIKFGDFRYTENNFSQKLNGLDSSDAHALTSSDMNAPRWTSTCKIAPYANHSYQTGKQNRLHVLPSDDLQFAHRDHAAGTEKPNFEKVGSGAIPSADLCIKDDFDKRFQEDLDEAVRQSLGYDAYPAGTISTSNETEVYGTGLKNAAGEYNCFLNVIIQSLWHIRRFRDEFLKTSSLHKHVEDPCAVCALYGIFIDLSKAAKGHGEAVAPTSLRIALSKSYPNSKFFQEGQMNDASEVLGVIFECLHKSYTSRTVCHDGVSAAQIYFIFPQY

SEQ ID NO: 160203 - protein, 93 aa, Zea Mays
MTSNSIRKLPIHYSASTQPPSLPLRLEQCEDVSLANRSLDVPHDETVLVIQELHSDLGNLTPGAGPSHHLSLLAQSRGRRTTGLRRKPGRRRR

SEQ ID NO: 160204 - protein, 107 aa, Zea Mays
MTSNSIRKLPIHYSASTQPPSLPLRLEQCEDVSLANRSLDVPHDETVLVIQELHSDLGNLTPGAGPSHHLHHNSKLHLGVHTALSLLAQSRGRRTTGLRRKPGRRRR

SEQ ID NO: 160205 - protein, 105 aa, Zea Mays
MGDYVDRGYYSVETVTLLVALKVRYPHRITILRGNHESRQITQVYGFYDECLRKYGNANVWKTFTDLFDYFPLTALVCTLKTGTTFFQLYLEHLFYASSSQYAES

SEQ ID NO: 160206 - protein, 140 aa, Zea Mays
MDPMNVDNGGCGGLDAQIEQLMQCRPLAEQEVKALCEKAKEILMEESNVQPVKSPVTICGDIHGQFHDLVELFRIGGKCPDTNYLFMGDYVDRGYYSVETVTLLVALKVRYPHRITILRGNHESRQITQVYGFYDECLRK

SEQ ID NO: 160207 - protein, 139 aa, Zea Mays
MDPMNVDNGGCGGLDAQIEQLMQCRPLAEQEVKALCEKAKEILMEESNVQLLVALKVRYPHRITILRGNHESRQITQVYGFYDECLRKYGNANVWKTFTDLFDYFPLTALVCTLKTGTTFFQLYLEHLFYASSSQYAES

SEQ ID NO: 160208 - protein, 263 aa, Zea Mays
MAFLSRSRSHAVPSALLVLLLLSVASAAAVGVAAKTDVHDVAEESNKDEESWTGWAKDKISEGLGLKHHADVDEEETARKAGHTVKSARESAQHTASEIGKKAGYAKETAGDAAAGASNKAGQAKDQAKDTVKDAAGEASNKAEYGKQKTKEAAEAASESGAEADKAGKKAQESKEAAKGKATEKAASAKDAAWETVEAAKEKAGEGYERVKEKARETADTAKERLEEVKERVAGPDVAAVDGKGKHRRADVDKYRSESEDEL

SEQ ID NO: 160209 - protein, 50 aa, Zea Mays
MSSLPPSSQHDPCWLYLCLTRRPLCMLTESRKTFIAWPLMFLEFGTQSRK

SEQ ID NO: 160210 - protein, 156 aa, Zea Mays
MYIAAGEIYGGDRRLEPLRSAFPNLVRKEMLLDSEVLHQFQNHSSQMAALDFIVSTASDVFIPTFDGNMAKLVEGHRRFLGFRRSVVLDRRKLVELLDLYTNKTISWDKFASSVREAHKDRVAQPSCRRKLENRPKEEDYFYANPHECLANSTLCS

SEQ ID NO: 160211 - protein, 265 aa, Zea Mays
MARSRPRVWLVAGCAAVILWASVAQLVAVGRFLLLFGLVGDADPSPPPSALPPPRIYMSNGYLKISCNGGLNQMRSEICDMVAVARLLNLTMVVPELDKRSFWADQSNFGDIFDVRHFINSLRDKVHIIEQLPEKLGPRDSNIIILEMPPVSWSDEKYYLHQILPLFNKYSIIHFNKTDARIANNGISTELQLLRCRVNFHALKFTPQIEGLGNKLVHKLRAKGSFVALHLRYEMDMLAFSGCNHGLSPEEAEELKKMRYERRCC

SEQ ID NO: 160212 - protein, 431 aa, Zea Mays
MARSRPRVWLVAGCAAVILWASVAQLVAVGRFLLLFGLVGDADPSPPPSALPPPRIYMSNGYLKISCNGGLNQMRSEICDMVAVARLLNLTMVVPELDKRSFWADQSNFGDIFDVRHFINSLRDKVHIIEQLPEKLGPRDSNIIILEMPPVSWSDEKYYLHQILPLFNKYSIIHFNKTDARIANNGNKLVHKLRAKGSFVALHLRYEMDMLAFSGCNHGLSPEEAEELKKMRYAYPWWRDKEIDSQAKRSQGLCPLTPEEASLVLKALGFQKDALMYIAAGEIYGGDRRLEPLRSAFPNLVRKEMLLDSEVLHQFQNHSSQMAALDFIVSTASDVFIPTFDGNMAKLVEGHRRFLGFRRSVVLDRRKLVELLDLYTNKTISWDKFASSVREAHKDRVAQPSCRRKLENRPKEEDYFYANPHECLANSTLCS

SEQ ID NO: 160213 - protein, 124 aa, Zea Mays
MMRDDNSQREFDTHSNTCPELQSKSMSVCPVAPNARPNNKRSKNFSDNEDDILVSVWLNISLDHIVSKDKKGGRYLSRIYEYFHEHNKCQTKRTLNSLMHRWETIQKCVNKFCGCLTRIKLRRQ

SEQ ID NO: 160214 - protein, 158 aa, Zea Mays
MQVPEPSMQHRVMIEAVENHMPEVVIVDEIGTEAEAQACRSIAERGVMLIGTAHGERLANIIKNPTLSDLIGGVETVTLGDDEARARRSQKSILERKAPPTFPFLIEMRERHYWVTHRTERSVDMLLHGKKPLVEVRKRDSEFQVVIERWATYDGDGL

SEQ ID NO: 160215 - protein, 122 aa, Zea Mays
MGWSTVGHGSSPAPTSPSSLQCSTVRSLVLLHGPRLTVARTAYRLAMLWCEGHPLLPLHIPPLVAHLSLFLGPTAIVLRRMVAAHLVPSHQISRLQALVYCFIDGHAQNQAITCCKGCGSNR

SEQ ID NO: 160216 - protein, 59 aa, Zea Mays
MATQAAISSQIRLVDRHSTNRCSPDSRTAWHKAQCRVASIFVPIVITLSIVTFSAWFLL

SEQ ID NO: 160217 - protein, 373 aa, Zea Mays
MSNAAIAIGTIIFVIFVAAIIACAYRRAEACAGGVARSYAVVSDQQIRHATIEKFLSEIRHEKPFRFTSQQLAGFTGNYTTRLGAGGFGTVYKGVLPNGLAVAVKVFDRSLTQRSQEEQFMAEVGTIGRTYHVNLVRLFGFCFDDVARALVYEYMGNGALDAYLLGRGRGAGLPALRDIAAGVARGIRYLHEECQQKIVHYDIKPGNVLLDAALTPKVADFGLARLVNRADTHVSVSCVRGTPGFAAPEMWMLSGVTEKCDVYSFGMLLLEIVGRRRNFHEEASESQQWFPTLAWTKYESGELVDLVACSSGTGADGGAAAAPGEEKEHELQRDKEIVERMCKVAFWCVQQQPEARPPMGAVVKMLEAPAQLP

SEQ ID NO: 160218 - protein, 153 aa, Zea Mays
MDTLVLGTITGGEAPHTTTNTINKECIQQVHQSPGSPQVVWQDNIEPDNMTYEELLDLGEAVGTQSRGLSQERISSLPVTKYKCGFFSRKKTRRERCVICQMEYRRGNLQMTLPCKHVYHASCVTRWLGINKVCPVCFAEVPGEDPEAMSQQL

SEQ ID NO: 160219 - protein, 140 aa, Zea Mays
MNSSRQMELHYINTGFPYTITESFMDFFEGLTYAHADFALTDGFQDQGNPYWAMMHTNSYKYGYSGPGNYYSYAHVYDIDDYMRRADGGRRIWDNTTPVNNVDSANVVLQGGEAPHTTTNTINKEYTCDARVFMSNVCDQ

SEQ ID NO: 160220 - protein, 457 aa, Zea Mays
MSLSTLSHPAAAAAGSGKSLFPAGPAAQSVHFPKARLPVPAAVSAATAAVHAEDRVSSLTQVSGVLGSQWGDEGKGKLVDVLAPRFDIVARCQGGANAGHTIYNSEGKKFALHLVPSGILHEGTLCVVGNGAVIHVPGFFGEIDGLESNGVRCDGRILVADRAHLLFDLHQAVDGLREAELENSFIGTTKRGIGPCYSSKVTRNGLRVCDLRHMDTFGDKLDILFKDAASRFQGFQYSKSLLKEEVERYKKFADRLEPFIADTVHVLNESIKQKKKILVEGGQATMLDIDFGTYPFVTSSSPSAGGICTGLGIAPRAIGDLIGVVKAYTSRVGSGPFPTELFGEEGDRLRKAGMEFGTTTGRPRRCGWLDIVALKHSCQINGFSSLNLTKLDVLSGLSEIKVNYEVLPGWQSDISSVRRYDELPQAARLYVERIEELVGVPVHYIGVGPGRDALIYK

SEQ ID NO: 160221 - protein, 437 aa, Zea Mays
MSLSTLSHPAAAAAGSGKSLFPAGPAAQSVHFPKARLPVPAAVSAATAAVHAEDRVSSLTQVSGVLGSQWGDEGKGKLVDVLAPRFDIVARCQGGANAGHTIYNSEGKKFALHLVPSGILHEGTLCVVGNGAVIHVPGFFGEIDGIGPCYSSKVTRNGLRVCDLRHMDTFGDKLDILFKDAASRFQGFQYSKSLLKEEVERYKKFADRLEPFIADTVHVLNESIKQKKKILVEGGQATMLDIDFGTYPFVTSSSPSAGGICTGLGIAPRAIGDLIGVVKAYTSRVGSGPFPTELFGEEGDRLRKAGMEFGTTTGRPRRCGWLDIVALKHSCQINGFSSLNLTKLDVLSGLSEIKVGVSYTQTDGQKLQSFPGDLDTLEQVQVNYEVLPGWQSDISSVRRYDELPQAARLYVERIEELVGVPVHYIGVGPGRDALIYK

SEQ ID NO: 160222 - protein, 148 aa, Zea Mays
MLPPHLTENGAVMIQFGHQMPDYDSPATQSTSETSHQEASGMSEGSLNEHNNDHSGNLDGYSKSDENKMMSALSLGNPETAYAHNPKPDRTQSFYAPFQAISYPYADPYYGGAVAAAYGPHAIVSDLHASSLLFHYLLPVLDDALCPL

SEQ ID NO: 160223 - protein, 138 aa, Zea Mays
MRQNGAVMIQFGHQMPDYDSPATQSTSETSHQEASGMSEGSLNEHNNDHSGNLDGYSKSDENKMMSALSLGNPETAYAHNPKPDRTQSFAISYPYADPYYGGAVAAAYGPHAIVSDLHASSLLFHYLLPVLDDALCPL

SEQ ID NO: 160224 - protein, 68 aa, Zea Mays
MSTACRPAVATTITREGAVSREPRHWQLILGLSAIRLGSPSSETELSATTVTVTKLGVPGLAVVLFYY

SEQ ID NO: 160225 - protein, 87 aa, Zea Mays
MIQFGHQMPDYDSPATQSTSETSHQEASGMSEGSLNEHNNDHSGNLDGYSKSDENKMMSALSLGNPETAYAHNPKPDRTQSFYAPFQ

SEQ ID NO: 160226 - protein, 162 aa, Zea Mays
MKPTQIYTTLPHALPWRRRLAQQQDPAAKPRPKACLPGRTANGEKARGPCTAHSDEAVGRRCFDNPTYGTCPLLTWLHKDEVKVEETKEDAHLEGTQAMDTVEAMVVASKTPVREEISIGVKSIISPIIELLSAATRMMRIINQKIDLVWRHRSHKSYHWRT

SEQ ID NO: 160227 - protein, 377 aa, Zea Mays
MDMNNGWLGFSLSPSAASRGGYGYGDGGGGASASACGDGEGSCPSPAAAASPLPLVAMPLDDSLHYSSAPDWRHGAAEAKGPKLEDFMSITCSNKSSGRSLYDSCGHHDDEQASKYHEVHGIHPLSCGSYYHGCISSGGGGGGGIGLGINMNAPPCTGGFPDHQHHQFVPSSHHGQYFLGAPAASAGPPAGAAMPMYNAGGGSVVGGSMSISGIKSWLREAMYVPPERPAAAALSLAVTDDVPPAEPPQLLPAPLPVHRKPAQTFGQRTSQFRGVTRHRWTGRYEAHLWDNTCRKEGQTRKGRQVYLGGYDREEKAARAYDLAALKYWGPSTHINFPLSHYEKELEEMKHMSRQEFIAHLRRYCMIAVLIYTACMLH

SEQ ID NO: 160228 - protein, 352 aa, Zea Mays
MDMNNGWLGFSLSPSAASRGGYGYGDGGGGASASACGDGEGSCPSPAAAASPLPLVAMPLDDSLHYSSAPDWRHGAAEAKGPKLEDFMSITCSNKSSGRSLYDSCGHHDDEQASKYHEVHGIHPLSCGSYYHGCISSGGGGGGGIGLGINMNAPPCTGGFPDHQHHQFVPSSHHGQYFLGAPAASAGPPAGAAMPMYNAGGGSVVGGSMSISGIKSWLREAMYVPPERPAAAALSLAVTDDVPPAEPPQLLPAPLPVHRKPAQTFGQRTSQFRGVTRHRWTGRYEAHLWDNTCRKEGQTRKGRQVYLGGYDREEKAARAYDLAALKYWGPSTHINFPVRLLMAPFVPFSRRP

SEQ ID NO: 160229 - protein, 311 aa, Zea Mays
MDMNNGWLGFSLSPSAASRGGYGYGDGGGGASASACGDGEGSCPSPAAAASPLPLVAMPLDDSLHYSSAPDWRHGAAEAKGPKLEDFMSITCSNKSSGRSLYDSCGHHDDEQASKYHEVHGIHPLSCGSYYHGCISSGGGGGGGIGLGINMNAPPCTGGFPDHQHHQFVPSSHHGQYFLGAPAASAGPPAGAAMPMYNAGGGSVVGGSMSISGIKSWLREAMYVPPERPAAAALSLAVTDDVPPAEPPQLLPAPLPVHRKPAQTFGQRTSQFRGVTRHRWTGRYEAHLWDNTCRKEGQTRKGRQGSLPRRL

SEQ ID NO: 160230 - protein, 308 aa, Zea Mays
MDMNNGWLGFSLSPSAASRGGYGYGDGGGGASASACGDGEGSCPSPAAAASPLPLVAMPLDDSLHYSSAPDWRHGAAEAKGPKLEDFMSITCSNKSSGRSLYDSCGHHDDEQASKYHEVHGIHPLSCGSYYHGCISSGGGGGGGIGLGINMNAPPCTGGFPDHQHHQFVPSSHHGQYFLGAPAASAGPPAGAAMPMYNAGGGSVVGGSMSISGIKSWLREAMYVPPERPAAAALSLAVTDDVPPAEPPQLLPAPLPVHRKPAQTFGQRTSQFRGVTRHRWTGRYEAHLWDNTCRKEGQTRKGRQEQST

SEQ ID NO: 160231 - protein, 217 aa, Zea Mays
MSSSPLPTTSGGAHIFPSPPRPRHRRCSQVIVAAAAPPRSYGVGRRAVSLAGVAAWLATTVGRADAASPFDKKKLEPLETYVPAVLLTIDQFVDLEKSLEFEKPRYDESRSLLRSGPASSLRVNIRAVAQYASSNGQGKAASDAVDECLRALEDLDSLLLHASRNDPSASVETMRSKISVALAALDNLLQTVPSAVLDKGKAIADAYRTPVDDYVEG

SEQ ID NO: 160232 - protein, 141 aa, Zea Mays
MAVNFLAVHERSFHIWFIAEKSLEFEKPRYDESRSLLRSGPASSLRVNIRAVAQYASSNGQGKAASDAVDECLRALEDLDSLLLHASRNDPSASVETMRSKISVALAALDNLLQTVPSAVLDKGKAIADAYRTPVDDYVEG

SEQ ID NO: 160233 - protein, 418 aa, Zea Mays
MMTEDEKEKARLFLPDLRRSPTSSSRGPAVEEMTSNESVSSNSISNFKWGATNRRSRTQFRGQGDTEISAPALIGSSDKGISGLSAGTSKEKKGTEETRSAQNTGDLGLISSSSSPVTSAQRPLPSSSVGSNSRESKKRDTALHPLIFKEAGLPDNTLLTYKLKNGEALLQGYKQGAGIVCNCCNQEVSPSEFEKHAGMGKRRQPYQNIYTSQGLTLHDVALQLHHLNLNSNGFSNASVSSFSDYPNLTSSGCGKEPSVSGPIVPLKRTLQERVVQTESCYFCGYGHTELGKIDPNMIVFCNQCERPCHVKCYNSRVVKKKVPLEILKDYLCFHFLCCQECQSLRVRLEGMEKCEEIAFLGRIRSNICWRLLSSADASRDVKLYLSQVIDIFKYACCVCCDSESARGTCCRTGPYCYS

SEQ ID NO: 160234 - protein, 311 aa, Zea Mays
MAARKEELLVRSRGRVAFAWTLVALCCGSHASHILHSLGIHVGHGTFLDLLHNPYVKCGIATTALFGPGRDILFDGFRAFKQGSPNMNSLVGFGSAAAFTISAVSLLNPDWEWNSTFFDEPVMLLGFVLLGRSLEESARLKASSDMNELISLLSPQSRLIVTSSSDNPSADSSLNSDAITVEVPVDDVRVGDSILVLPGETIPVDGNVIEGSSFVDESMLTGESLPVAKETGLPVFSGTVNWDGPLKIRATCTGPSSTIAKIVRMVEDAQAREAPVQRLADSIAGPFVYTVMTLAATTFSFWCALVFLFLL

SEQ ID NO: 160235 - protein, 729 aa, Zea Mays
MAARKEELLVRSRGRVAFAWTLVALCCGSHASHILHSLGIHVGHGTFLDLLHNPYVKCGIATTALFGPGRDILFDGFRAFKQGSPNMNSLVGFGSAAAFTISAVSLLNPDWEWNSTFFDEPVMLLGFVLLGRSLEESARLKASSDMNELISLLSPQSRLIVTSSSDNPSADSSLNSDAITVEVPVDDVRVGDSILVLPGETIPVDGNVIEGSSFVDESMLTGESLPVAKETGLPVFSGTVNWDGPLKIRATCTGPSSTIAKIVRMVEDAQAREAPVQRLADSIAGPFVYTVMTLAATTFSFWYYIGTHLFPEVLLNDIAGPDGDSLLLSIKLAVDVLVVSCPCALGLATPTAILIGTSLGAKRGLLVRGGDVLERLAGIDTLVLDKTGTLTEGKPVVTSIASLAYEETEVLRLAAAVEKTALHPIANAIMNKAELLKLDIPITSGQLTSPGFGCLAEVDGSLVAVGTLDWVHDRFETKASPTELRDLRNRLEFMLSSEASSSNQSKSIAYVGREGEGIIGAIAISDILREDANLTVERLQQESITTFLLSGDRGEAVTSIGRTIGIRNENIKSSLTPQDKASIISTLQAKGHRVAMVGDGINDAPSLAAADVGIAMRTHSKENAASDAASVVLLGNRLSQVVDALSLSKATMAKVHQNLAWAVAYNIVAIPIAAGVLLPQYDFAMTPSLSGGLMALSSIFVVSNSLLLQLHGSFQNTEKRQGDLSSRLN

SEQ ID NO: 160236 - protein, 665 aa, Zea Mays
MWHCYNCFVWAWKRAFKQGSPNMNSLVGFGSAAAFTISAVSLLNPDWEWNSTFFDEPVMLLGFVLLGRSLEESARLKASSDMNELISLLSPQSRLIVTSSSDNPSADSSLNSDAITVEVPVDDVRVGDSILVLPGETIPVDGNVIEGSSFVDESMLTGESLPVAKETGLPVFSGTVNWDGPLKIRATCTGPSSTIAKIVRMVEDAQAREAPVQRLADSIAGPFVYTVMTLAATTFSFWYYIGTHLFPEVLLNDIAGPDGDSLLLSIKLAVDVLVVSCPCALGLATPTAILIGTSLGAKRGLLVRGGDVLERLAGIDTLVLDKTGTLTEGKPVVTSIASLAYEETEVLRLAAAVEKTALHPIANAIMNKAELLKLDIPITSGQLTSPGFGCLAEVDGSLVAVGTLDWVHDRFETKASPTELRDLRNRLEFMLSSEASSSNQSKSIAYVGREGEGIIGAIAISDILREDANLTVERLQQESITTFLLSGDRGEAVTSIGRTIGIRNENIKSSLTPQDKASIISTLQAKGHRVAMVGDGINDAPSLAAADVGIAMRTHSKENAASDAASVVLLGNRLSQVVDALSLSKATMAKVHQNLAWAVAYNIVAIPIAAGVLLPQYDFAMTPSLSGGLMALSSIFVVSNSLLLQLHGSFQNTEKRQGDLSSRLN

SEQ ID NO: 160237 - protein, 698 aa, Zea Mays
MAARKEELLVRSRGRVAFAWTLVALCCGSHASHILHSLGIHVGHGTFLDLLHNPYVKCGIATTALFGPGRDILFDGFRAFKQGSPNMNSLVMLLGFVLLGRSLEESARLKASSDMNELISLLSPQSRLIVTSSSDNPSADSSLNSDAITVEVPVDDVRVGDSILVLPGETIPVDGNVIEGSSFVDESMLTGESLPVAKETGLPVFSGTVNWDGPLKIRATCTGPSSTIAKIVRMVEDAQAREAPVQRLADSIAGPFVYTVMTLAATTFSFWYYIGTHLFPEVLLNDIAGPDGDSLLLSIKLAVDVLVVSCPCALGLATPTAILIGTSLGAKRGLLVRGGDVLERLAGIDTLVLDKTGTLTEGKPVVTSIASLAYEETEVLRLAAAVEKTALHPIANAIMNKAELLKLDIPITSGQLTSPGFGCLAEVDGSLVAVGTLDWVHDRFETKASPTELRDLRNRLEFMLSSEASSSNQSKSIAYVGREGEGIIGAIAISDILREDANLTVERLQQESITTFLLSGDRGEAVTSIGRTIGIRNENIKSSLTPQDKASIISTLQAKGHRVAMVGDGINDAPSLAAADVGIAMRTHSKENAASDAASVVLLGNRLSQVVDALSLSKATMAKVHQNLAWAVAYNIVAIPIAAGVLLPQYDFAMTPSLSGGLMALSSIFVVSNSLLLQLHGSFQNTEKRQGDLSSRLN

SEQ ID NO: 160238 - protein, 364 aa, Zea Mays
MAARKEELLVRSRGRVAFAWTLVALCCGSHASHILHSLGIHVGHGTFLDLLHNPYVKCGIATTALFGPGRDILFDGFRAFKQGSPNMNSLVGFGSAAAFTISAVSLLNPDWEWNSTFFDEPVMLLGFVLLGRSLEESARLKASSDMNELISLLSPQSRLIVTSSSDNPSADSSLNSDAITVEVPVDDVRVGDSILVLPGETIPVDGNVIEGSSFVDESMLTGESLPVAKETGLPVFSGTVNWDGPLKIRATCTGPSSTIAKIVRMVEDAQAREAPVQRLADSIAGPFVYTVMTLAATTFSFWYYIGTHLFPEVLLNDIAGPDGDSLLLSIKLAVDVLVSDPAIVFSLTEEKTQHFNLGFGIFSN

SEQ ID NO: 160239 - protein, 133 aa, Zea Mays
MAARKEELLVRSRGRVAFAWTLVALCCGSHASHILHSLGIHVGHGTFLDLLHNPYVKCGIATTALFGPGRDILFDGFRAFKQGSPNMNSLVGFGSAAAFTISAVSLLNPDWEWNSTFFDEPCQFPEHGNLIFF

SEQ ID NO: 160240 - protein, 192 aa, Zea Mays
MENLDKLSEEDYVPTKEDVLHARVRTNGVVETQFSPLGESKRGGEVYRLYDVGGQRNERRKWIHLFEGVNAVIFCAAISEYDQMLFEDETKNRMMETKELFDWVLKQRCFEVPLSVCEWFKDYQPTAPGKQEVEHAYEFVKKKFEELYFQSSKPDRVDRVFKIYRTTALDQKLVKKTFKLIDESMRRSREGT

SEQ ID NO: 160241 - protein, 459 aa, Zea Mays
MRERAFPSRFHWYQVATIQHGTPVHRCLSSTVHPACARSLALSPLALSGASGRPPPRPSVRCPGVASSAPPSGLRRPPRRRAPTSRSHSFDEAEAAENAKSADIDRRILQETKAEQHIHKLLLLGAGESGKSTIFKQIKLLFQTGFDEAELRSYTSVIHANVYQTIKILYEGAKELAQVEPDSSKYVLSPDNQEIGEKLSEIGARLEYPSLNKERVQDVRKLWQDPAIQETYSRGSILQVPDCAQYFMENLDKLSEEDYVPTKEDVLHARVRTNGVVETQFSPLGESKRGGEVYRLYDVGGQRNERRKWIHLFEGVNAVIFCAAISEYDQMLFEDETKNRMMETKELFDWVLKQRCFEKTSFMLFLNKFDIFERKIQKVPLSVCEWFKDYQPTAPGKQEVEHAYEFVKKKFEELYFQSSKPDRVDRVFKIYRTTALDQKLVKKTFKLIDESMRRSREGT

SEQ ID NO: 160242 - protein, 370 aa, Zea Mays
MSVLTCVIESMGSSCSRSHSFDEAEAAENAKSADIDRRILQETKAEQHIHKLLLLGAGESGKSTIFKQIKLLFQTGFDEAELRSYTSVIHANVYQTIKILYEGAKELAQVEPDSSKYVLSPDNQEIGEKLSEIGARLEYPSLNKERVQDVRKLWQDPAIQETYSRGSILQVPDCAQYFMENLDKLSEEDYVPTKEDVLHARVRTNGVVETQFSPLGESKRGGEVYRLYDVGGQRNERRKWIHLFEGVNAVIFCAAISEYDQMLFEDETKNRMMETKELFDWVLKQRCFEVPLSVCEWFKDYQPTAPGKQEVEHAYEFVKKKFEELYFQSSKPDRVDRVFKIYRTTALDQKLVKKTFKLIDESMRRSREGT

SEQ ID NO: 160243 - protein, 56 aa, Zea Mays
MQRWGYWLQKYREASLRTSLFCTIMSERTSLCGRNSESCLYLVRTVCLFVSSCSAS

SEQ ID NO: 160244 - protein, 363 aa, Zea Mays
MVSLSHPHRSGKALSCCTFPSGSGLDSHLLFPSMRAPAGGASATALAAAMNIKQPLHGASTLFALLSLSLLLLRLLLRLRLAAFRDAALSLHLLARLRLRPVLLCLPSACHDGGAGAGATTLRVWCPAAPSSKPPLLLLHGFGGDAKWTWARNLPRLSRHFHVYVPDLVFFGAQSRSASPLRSVAFQARCAAEAMRLLGVPRYDVAGISYGGFVAYRMAAAEARDAVGRLVIMTTGVAATPGEMRAMAAREDRTVEDALLPDTAEGLRFLVRRSMHRPPPWMPDFVLDDFIQETLIIWGDKDQVFPVDLGHRLHRLLGERSRLEIVRDAGHALQLEGADHVNRSIKSFLLDERVGPGAGAGRK

SEQ ID NO: 160245 - protein, 366 aa, Zea Mays
MVSLSHPHRSGKALSCCTFPSGSGLDSHLLFPSMRAPAGGASATALAAAMNIKQPLHGASTLFALLSLSLLLLRLLLRLRLAAFRDAALSLHLLARLRLRPVLLCLPSACHDGGAGAGATTLRVWCPAAPSSKPPLLLLHGFGGDAKWTWARNLPRLSRHFHVYVPDLVFFGAQSRSASPLRSVAFQARCAAEARDAVGRLVIMTTGVAATPGEMRAMAAREDRTVEDALLPDTAEGLRFLVRRSMHRPPPWMPDFVLDDFIQLMYVDQKRERAELLHELLKTGAGFDPLPVLTQETLIIWGDKDQVFPVDLGHRLHRLLGERSRLEIVRDAGHALQLEGADHVNRSIKSFLLDERVGPGAGAGRK

SEQ ID NO: 160246 - protein, 468 aa, Zea Mays
MCEKRHTESLLHTIQTGAAICAFFSLKASFDLFGGACGRGVVPGSVLRLRLAIVHASFCPAKRRSIVASIITRRAGQVGMVSLSHPHRSGKALSCCTFPSGSGLDSHLLFPSMRAPAGGASATALAAAMNIKQPLHGASTLFALLSLSLLLLRLLLRLRLAAFRDAALSLHLLARLRLRPVLLCLPSACHDGGAGAGATTLRVWCPAAPSSKPPLLLLHGFGGDAKWTWARNLPRLSRHFHVYVPDLVFFGAQSRSASPLRSVAFQARCAAEAMRLLGVPRYDVAGISYGGFVAYRMAAAEARDAVGRLVIMTTGVAATPGEMRAMAAREDRTVEDALLPDTAEGLRFLVRRSMHRPPPWMPDFVLDDFIQKRERAELLHELLKTGAGFDPLPVLTQETLIIWGDKDQVFPVDLGHRLHRLLGERSRLEIVRDAGHALQLEGADHVNRSIKSFLLDERVGPGAGAGRK

SEQ ID NO: 160247 - protein, 96 aa, Zea Mays
MAEVTERRKRAAVVVLGDIGRSPRMQYHSLSLANQASMEVDIVANGGSEPYLSQRESINLHPRDEKVQLTGISKISESTLCSNIGCCKTGKLAERC

SEQ ID NO: 160248 - protein, 199 aa, Zea Mays
MAEVTERRKRAAVVVLGDIGRSPRMQYHSLSLANQASMEVDIVANGEKVQLTGISKISGALALLLKAAVQFILLVWFLCFKIPRPYVFVVQNPPSVPTLAAVKLASWLRGAKFIVDWHKFGYTLLGLSHGRSHIIVKIYFWFEKYFGQMADGAFCVTKAMQHELAQNWGIRAKVLYDQSPDFFHPASLMEKHGAREFHL

SEQ ID NO: 160249 - protein, 81 aa, Zea Mays
MGLGNSICSAMGNAKCISVEEVWEDMSITVFASKIDDEVFLKSNRPALVVSSTSWTLDEDFSILLEAALMYETTTDVSLQL

SEQ ID NO: 160250 - protein, 350 aa, Zea Mays
MAEVTERRKRAAVVVLGDIGRSPRMQYHSLSLANQASMEVDIVANGGSEPYLSQRESINLHPRDEKVQLTGISKISGALALLLKAAVQFILLVWFLCFKIPRPYVFVVQNPPSVPTLAAVKLASWLRGAKFIVDWHKFGYTLLGLSHGRSHIIVKIYFWFEKYFGQMADGAFCVTKAMQHELAQNWGIRLGNSICSAMGNAKCISVEEVWEDMSITVFATLGEDDSTDEEQLWIDIKNGKQFVYPRLLFIVTGKGPDRKKYEVQIKRLKLRRVALRTMWLASEDYPLLLGSADLGVSLHTSSSGLDLPMKMLFKGFPEECNALKSLKECAMKSPSSSKWSQNGKPTPYRW

SEQ ID NO: 160251 - protein, 106 aa, Zea Mays
MEGKNAESGVGNPMMCNTCSKRTQCKAGMKLKKNTMMLKRMLFLYGLIWLTLSIIMNSERKIQKKGNCNATKLTIVIIWSSLMRCRKVGFRNIALWILFRKCMVVQ

SEQ ID NO: 160252 - protein, 250 aa, Zea Mays
MAEVTERRKRAAVVVLGDIGRSPRMQYHSLSLANQASMEVDIVANGEKVQLTGISKISGALALLLKAAVQFILLVWFLCFKIPRPYVFVVQNPPSVPTLAAVKLASWLRGAKFIVDWHKFGYTLLGLSHGRSHIIVKIYFWFEKYFGQMADGAFCVTKAMQHELAQNWGIRLGNSICSAMGNAKCISVEEVWEDMSITVFASKIDDEVFLKSNRPALVVSSTSWTLDEDFSILLEAALMYETTTDVSLQL

SEQ ID NO: 160253 - protein, 184 aa, Zea Mays
MADGAFCVTKAMQHELAQNWGIRLGNSICSAMGNAKCISVEEVWEDMSITVFATLGEDDSTDEEQLWIDIKNGKQFVYPRLLFIVTGKGPDRKKYEVQIKRLKLRRVALRTMWLASEDYPLLLGSADLGVSLHTSSSGLDLPMKMLFKGFPEECNALKSLKECAMKSPSSSKWSQNGKPTPYRW

SEQ ID NO: 160254 - protein, 110 aa, Zea Mays
MRNYSKLVSIRLGGKQLEGGTAWRPDKTPRIGYRWIRQFLAPCYYTLLLMPGFIEVVYYYFFSSQVHRSVVYGDQPKNSDVHMPDMDGFKLLELVGLEMDIPVISKSKML

SEQ ID NO: 160255 - protein, 202 aa, Zea Mays
MCVSRVRAEDARCRKREDVETATKKSEESDTESEEEEQTWTESSTIEKQVCPLLFSVCSLILITLRYFVDSEILVTKFTIEIGNVQIVCEHGYTLAQNLDPNSEGRGVLQFKTDLMSVIWQKLAKRGGAAIDRSQDIAKLQEFYKLYREKHKVDELIEDEMKLRESAVFSGNLGFPLLGPSEADAKKDNHLDLQHPARNAKG

SEQ ID NO: 160256 - protein, 52 aa, Zea Mays
MACLQVYCQNADNYRKPVMQKELDLINAHTDNHKIQHINIHTSPIVLFRNLS

SEQ ID NO: 160257 - protein, 84 aa, Zea Mays
MVHWFLTGDEVVARPNHIVGGFTAEICSGEQSVASRRLRPRVVTELAPTAPWRCPSALQREANSTANRGGQRSTSISWNWSLQI

SEQ ID NO: 160258 - protein, 153 aa, Zea Mays
MVGTGKRERIAIRRIDNLAARQVTFSKRRRGLFKKAEELSILCDAEVGLVVFSATGKLFHFASSSMKQVIDRYDSHSKTLQRSEPQSSQLQSHMDDGTCARLKEELAETSLKLRQMRGEELQRLSVEQLQELEKTLESGLGSVLKTKVEPKNP

SEQ ID NO: 160259 - protein, 230 aa, Zea Mays
MVGTGKRERIAIRRIDNLAARQVTFSKRRRGLFKKAEELSILCDAEVGLVVFSATGKLFHFASSSMKQVIDRYDSHSKTLQRSEPQSSQLQSHMDDGTCARLKEELAETSLKLRQMRGEELQRLSVEQLQELEKTLESGLGSVLKTKSQKILDEISGLERKRTQLIEENSRLKEQLQVTRMSRMETQLGADPEFVYEEGQSSESVTNTSYPRPSTDTDDCSDTSLRLGSK

SEQ ID NO: 160260 - protein, 175 aa, Zea Mays
MVGTGKRERIAIRRIDNLAARQVTFSKRRRGLFKKAEELSILCDAEVGLVVFSATGKLFHFASSSMKQVIDRYDSHSKTLQRSEPQSSQLQSHMDDGTCARLKEELAETSLKLRQMRGEELQRLSVEQLQELEKTLESGLGSVLKTKSQKILDEISGLERKRTQLIEENSRLKEQ

SEQ ID NO: 160261 - protein, 177 aa, Zea Mays
MPLPAPFRVFSPPTSAAASPAGAQRALLYGRRAPFAGALLFFSIGAVSAAVAFRTGARGLSSTRMESASTTVPSIVVYVTVPNREAGKKLSQSIISEKLAACVNIVPGIESVYWWEGKVQSDAEELLIIKTRESLLDALTAHVKANHEYDVPEVIALPITGGNTKYLEWIKNSTRDK

SEQ ID NO: 160262 - protein, 559 aa, Zea Mays
MSEEDEDQPPAKRPSPSPPADQVLDNVLETVLQFLDAPRDRSAASLVCRSWHSAESATRESVAVRNLLAVSATRTARRFPNARSLLLKGRPRFADFNLLPHGWDASAFRPWAAAVAAGAFPALTSLYLKRIPVTDADLDLLSRSLPASFRDLTLHLCDGFTSRGLASIASHCRGLRVLDVVECDMAEEQEVVDWVAAFPQEPSNLESLSFECYEPPVAFAALEALVERSPRLRRLGVNLHVSLGQLCRLMAHAPRLSHLGTGSFRPADGGEEGTGFGEVVSAFVAAGRARTLVSLSGFRDLAQEYLPTIAVVCAHLKSLDLSYSAVTPNQILMFIGQCYNLETLWVLDSVRDEGLDAVGISCKKLQSLRVLPLNAHEDADELVSEVFRLCIMGRHQPDHATGEPMDEGFGAIVQNCSKLTRLSTSGQLTDRAFEYIGRHGKSLRTLSVAFAGNSDVALQYILQGCPKLEKLEIRDCPFGDAGLFAGMHHFYNMRFVWMSGCNLTLQGCKEVAQVLPRMVVELINGQSDENERNESVDILYMYRSLDGPREDVPPFVKIL

SEQ ID NO: 160263 - protein, 226 aa, Zea Mays
MICCNHVSLSDHDDRIVWGLGRKGFSVNSLYKKKVMDQVSIPYKFLWKSKLPQKIKIFMWLVVRNKILTKDNLKKRNWNGSLECCFCGVDESIDNLFFHCPIARYMWRVIQVALNLVVIPKSISNLCDNWLSKPKDKIANLILFGCGAMFWAIWRTRNDWCFGNKTILDPSNIIFLSCFWLDSWAIQQRKREQKMVVQGSKLIRKIASEAFGRAFGWCPRDRRISG

SEQ ID NO: 160264 - protein, 70 aa, Zea Mays
MPRRKKRKGVGGLQRRLPPVHPRPAPLCPWSMGRLPRAPPHSTVLWEVAFGRGPGCHARRVGAWWRVVFW

SEQ ID NO: 160265 - protein, 311 aa, Zea Mays
MNQLSDTDRSLLTAPFTINEIKKVVFEMKHNSAPGPDGFPAEFFQNFWELIQMDVWNLFKDFYDGNLDIERLNYGMVILLPKVDNAVDIKNFRPICLLNVCYKIITKVLNNRLASCITTVISDSQYGFIKNRYIMDEVVSLNEILHVVKMKNQSGVFLKIDFEKAYDKVNWHFLYVMMEKGFGSTWCDWVMRTVRGGKVAIKSNDMLGPYFTTHKGVRQGDLFSPLLFNLVADGLACMIHKAQDEDLIEGLIPHIIQNGCSCLQYADDTIFLIQDCLEGAQNLKFILCLFESMSGLKINFHKSEIFCFWKS

SEQ ID NO: 160266 - protein, 190 aa, Zea Mays
MATLRATVGMLLGGEDMHRFPGRSPRMDRGDLIRSPAARQIVSNYFRYPEHAPPLLAPLLRSFFFVSTSRPIMLPRHRWTEQHVRAGAGRVHPVPAEAHVRLRHLRVRRDGEGHPEQGQPALRVRRARARQALQGEGQGPRQVQEAAARAPWWSRVRRLCVAHWIAGFQGPLRPPASFMCPEFLQVFSWA

SEQ ID NO: 160267 - protein, 80 aa, Zea Mays
MKHVIPNIIKKRKQISTCCAPSSVPPVEARRIRRQLLNERRLTSSGAFASSQQASTLQCGHFDPDFVEALKGTSNSGCNP

SEQ ID NO: 160268 - protein, 152 aa, Zea Mays
MFVFDQRYRAVTSAYYRGALGALLVYDITRRQSFDHIPRWLDELRAHADKNIVIMLVGNKSDLEEQRAVSTEDAKEFAEKENLFFLETSALQATNVESSFQTVLTEIFKIHSKKNMVSEPKSNGAAPAMPGTKVLVPGPAQEIPKSKCCSSM

SEQ ID NO: 160269 - protein, 574 aa, Zea Mays
MGKMSCFSGLLSCKKKALEGKNKGAYAKKASGNDCPKVKPVEFMDMVVADAVVDDVSRCRDSVPASACSSRLVAHAAAELARHATGENGDKAAAKRDSSSAAGSSSSGYSSDGTGDDAKSAEPDDGEPCSLGRMSPTAASPKLMRSCSNIETTRSVLTGSDLPAKSRSYDDLKTLPSHGSSSARSGGAVRASPTPASSRTSCSADRVMLKKRSSRQVLPSRSRKLWWQLFLWSHRNVHRRRGASAPTPTTLLWPSPGREGGGAAHRRDGYASDTLGTATADDAKEKGVAVEEEGPRVPTQWVAFSAEASPLDRVSAWVNSLGNGSFHAVDEDGGATGHGGDGASRLRPRPRRSEIVELPTSAAGGRRHPQPQARRRAAAAAAEAGQASGIIVQTLNTFSSVAHIAGMGLQAVPAIAAFSTLRAVNLSGNVIVRITAGSLPKGLHSLDLSRNKIAIIEGLRDLTRLRVLNLSYNRISRIGHGKQPCMHALVLAMRHHCLLLYCTDYYYQFGRHSRALNTCQAQAGESTVPSMLGAICTARILSSAAVMCDTLDVWHLEIFVRSSGRASMVHACCV

SEQ ID NO: 160270 - protein, 372 aa, Zea Mays
MACSWGPLPAATSPSMSTSPPSGDVRARWRSFLAGLIAGPSMLLTGPGTQHTSLAIYILMRAAVLASRCGIKSKRFGKICKPLTWSHGDVFLMCLSSAQILSAYILKQDSLPSSYKSFLNKHGGKDLTILQGVKDVVNHTAFSNLVGIEKYYKSVGVDIKLDPNMKVPCSIVHGNQSCTGHVFSFLLQAYGRAVPVYVPVYLVPALVVHRQHLMKRPYSIIGKSFLGVARSSLFLSVYCASAWAWTCLLFRIFRRANTPLVILGTFPTGLALLIEKKSRRIEISLYCLARAIESFFTWMTDAGLCPPILQIKRADVVVFSIATSIIMHCYAQEREVFRSKYLNVLDWVFGVPPPPDSEDKNCYLPDEAKKCQ

SEQ ID NO: 160271 - protein, 313 aa, Zea Mays
MTNEEAVVLAVKETVRYGLFLGTFAGSYVSVDEYIAAVWGRKRTARWRSFLAGLIAGPSMLLTGPGTQHTSLAIYILMRAAVLASRCGIKSKRFGKICKPLTWSHGDVFLMCLSSAQILSAYILKQDSLPSSYKSFLNKHGGKDLTILQGVKDVVNHTAFSNLVGIEKYYKSVGVDIKLDPNMKVPCSIVHGNQSCTGHVFSFLLQAYGRAVPVYVPVYLVPALVVHRQHLMKRPYSIIGKSFLGVARSSLFLSVYCASAWAWTCLLFRIFRRANTPLVILGTVWLCSSRRRAGGLRYPCTVLPELSRVFSHG

SEQ ID NO: 160272 - protein, 205 aa, Zea Mays
MTNEEAVVLAVKETVRYGLFLGTFAGSYVSVDEYIAAVWGRKRTARWRSFLAGLIAGPSMLLTGPGTQHTSLAIYILMRAAVLASRCGIKSKRFGKICKPLTWSHGDVFLMCLSSAQILSAYILKQDSLPSSYKSFLNKHGGKDLTILQGVKDVVNHTAFSNLVGIEKYYKSVGVDIKLDPNMKVPCSVSLKIHMNDIELLSIVL

SEQ ID NO: 160273 - protein, 653 aa, Zea Mays
MLKDSFKKSDSFTRWMSKALGEVDSQIKSSSGVYWNSEETNNIIETSSCDQLDQCTIDPVLAQEQLFSIVDFSPSWTYAGSKTRVLINGKFLNSAELKRCKWSCMFGEVEVPAEISADGILRCYSPSHKPGRVPFYVTCTNRLACSEIREFEFRPSVTQYMDAPSPHGATNKTYLQMRLDNLLSLGHNEYQATVSNPTKEMVDLSKKISSLMTDNDSWSQLLKLASDNEPVTDDDQDEFFEKHLKEKLHIWLVHKASDGGKGPNVLDDEGQGVLHLAAALGYDWVIRPAVSAGVNINFRDAHGWTALHWAAFCGRERTVVALIALGAAPGALTDPTPIFPTGSTPADLASANGYKGISGFLAESSLTSHLQTLDLKEGKGSNPPEISGLPGIGDVTERRASPLAGEGLQAGSMGDSLGAIRNAAQAAARIYQVFRVQSFQRKQAVQYEDDNGAVSDDRAISLLSVKPSKPVQLDPLHAAATRIQNKYRGWKGRKEFLLIRQRIVKIQAHVRGHQVRKHYRKIIWSVGIVEKIILRWRRKGAGLRGFRSTEGATVGSSSNLIQNKPEDDYDFLQQGRKQTEERLQKALARVKSMAQYPDARDQYQRILTVVTKIQESKAMQEKMLEESTEMDEGFFMSDFKELWDDDIPMPSWS

SEQ ID NO: 160274 - protein, 743 aa, Zea Mays
MSTPQSTVPSELFPFTEEHGNESFTFHEVYSNGLSIKDAEIVGTNEESVWKLPGAISSIPSEDSFQQNDRSLEETISYPLLKTRSSNLSEMLKDSFKKSDSFTRWMSKALGEVDSQIKSSSGVYWNSEETNNIIETSSCDQLDQCTIDPVLAQEQLFSIVDFSPSWTYAGSKTRVLINGKFLNSAELKRCKWSCMFGEVEVPAEISADGILRCYSPSHKPGRVPFYVTCTNRLACSEIREFEFRPSVTQYMDAPSPHGATNKTYLQMRLDNLLSLGHNEYQATVSNPTKEMVDLSKKISSLMTDNDSWSQLLKLASDNEPVTDDDQDEFFEKHLKEKLHIWLVHKASDGGKGPNVLDDEGQGVLHLAAALGYDWVIRPAVSAGVNINFRDAHGWTALHWAAFCGRERTVVALIALGAAPGALTDPTPIFPTGSTPADLASANGYKGISGFLAESSLTSHLQTLDLKEGKGSNPPEISGLPGIGDVTERRASPLAGEGLQAGSMGDSLGAIRNAAQAAARIYQVFRVQSFQRKQAVQYEDDNGAVSDDRAISLLSVKPSKPVQLDPLHAAATRIQNKYRGWKGRKEFLLIRQRIVKIQAHVRGHQVRKHYRKIIWSVGIVEKIILRWRRKGAGLRGFRSTEGATVGSSSNLIQNKPEDDYDFLQQGRKQTEERLQKALARVKSMAQYPDARDQYQRILTVVTKIQESKAMQEKMLEESTEMDEGFFMSDFKELWDDDIPMPSWS

SEQ ID NO: 160275 - protein, 987 aa, Zea Mays
MAEARRHAVAPQLDIEQILKEAQHRWLRPAEICEILKNYRNFHIAPEPPNRPPSGSLFLFDRKVLRYFRKDGHSWRKKKDGKTVKEAHERLKSGSVDVLHCYYAHGEGNENFQRRSYWMLEEDFMHIVLVHYLEVKGGKSTSRIRGHDDMLQAARTDSPLSQLPSQTTEGGNSLSGQASEYEETESDIYSGGAGYHPFSWTQHHENGGGPVIGTSIPSSYVPALPLDNQLDPSSLNGLVKPFLQMSTPQSTVPSELFPFTEEHGNESFTFHEVYSNGLSIKDAEIVGTNEESVWKLPGAISSIPSEDSFQQNDRSLEETISYPLLKTRSSNLSEMLKDSFKKSDSFTRWMSKALGEVDSQIKSSSGVYWNSEETNNIIETSSCDQLDQCTIDPVLAQEQLFSIVDFSPSWTYAGSKTRVLINGKFLNSAELKRCKWSCMFGEVEVPAEISADGILRCYSPSHKPGRVPFYVTCTNRLACSEIREFEFRPSVTQYMDAPSPHGATNKTYLQMRLDNLLSLGHNEYQATVSNPTKEMVDLSKKISSLMTDNDSWSQLLKLASDNEPVTDDDQDEFFEKHLKEKLHIWLVHKASDGGKGPNVLDDEGQGVLHLAAALGYDWVIRPAVSAGVNINFRDAHGWTALHWAAFCGRERTVVALIALGAAPGALTDPTPIFPTGSTPADLASANGYKGISGFLAESSLTSHLQTLDLKEGKGSNPPEISGLPGIGDVTERRASPLAGEGLQAGSMGDSLGAIRNAAQAAARIYQVFRVQSFQRKQAVQYEDDNGAVSDDRAISLLSVKPSKPVQLDPLHAAATRIQNKYRGWKGRKEFLLIRQRIVKIQAHVRGHQVRKHYRKIIWSVGIVEKIILRWRRKGAGLRGFRSTEGATVGSSSNLIQNKPEDDYDFLQQGRKQTEERLQKALARVKSMAQYPDARDQYQRILTVVTKIQESKAMQEKMLEESTEMDEGFFMSDFKELWDDDIPMPSWS

SEQ ID NO: 160276 - protein, 920 aa, Zea Mays
MCFIATMLMVKEMKTFRGGVIGCWRRILCTLYLYIILKSRGHDDMLQAARTDSPLSQLPSQTTEGGNSLSGQASEYEETESDIYSGGAGYHPFSWTQHHENGGGPVIGTSIPSSYVPALPLGNLQGFPATVTNTDIYSRQDALPVTLNEPGLAIEFNGADNQLDPSSLNGLVKPFLQMSTPQSTVPSELFPFTEEHGNESFTFHEVYSNGLSIKDAEIVGTNEESVWKLPGAISSIPSEDSFQQNDRSLEETISYPLLKTRSSNLSEMLKDSFKKSDSFTRWMSKALGEVDSQIKSSSGVYWNSEETNNIIETSSCDQLDQCTIDPVLAQEQLFSIVDFSPSWTYAGSKTRVLINGKFLNSAELKRCKWSCMFGEVEVPAEISADGILRCYSPSHKPGRVPFYVTCTNRLACSEIREFEFRPSVTQYMDAPSPHGATNKTYLQMRLDNLLSLGHNEYQATVSNPTKEMVDLSKKISSLMTDNDSWSQLLKLASDNEPVTDDDQDEFFEKHLKEKLHIWLVHKASDGGKGPNVLDDEGQGVLHLAAALGYDWVIRPAVSAGVNINFRDAHGWTALHWAAFCGRERTVVALIALGAAPGALTDPTPIFPTGSTPADLASANGYKGISGFLAESSLTSHLQTLDLKEGKGSNPPEISGLPGIGDVTERRASPLAGEGLQAGSMGDSLGAIRNAAQAAARIYQVFRVQSFQRKQAVQYEDDNGAVSDDRAISLLSVKPSKPVQLDPLHAAATRIQNKYRGWKGRKEFLLIRQRIVKIQAHVRGHQVRKHYRKIIWSVGIVEKIILRWRRKGAGLRGFRSTEGATVGSSSNLIQNKPEDDYDFLQQGRKQTEERLQKALARVKSMAQYPDARDQYQRILTVVTKIQESKAMQEKMLEESTEMDEGFFMSDFKELWDDDIPMPSWS

SEQ ID NO: 160277 - protein, 340 aa, Zea Mays
MHRAASRTLAAAGRGEEGYRHGAEGVILLQEKEKKDGRAGAGAMNVSKHLWAGAVAAMISRTVVAPLERLKLEYIVRGEQRNLFELMHAIATTQGLKGFWKGNFVNILRTAPFKAVNFYAYDSYRKQLLKWSGNEESANFERFIAGAFAGVTATIMCIPMDTIRTKMVAPGGEALGGVIGVARHMIQTEGFFSLYKGLVPSLISMAPSGAVFYGVYDILKMAYLHSPEGKKRVSMMKQQKQETNALDQLELGTVRTLLYGAIAGCCAEAATYPFEVVRRQLQMQVKATRMNALATCLKIVDQGGVPALYAGLIPSLLQVLPSASISYFVYELMKIVLKVE

SEQ ID NO: 160278 - protein, 261 aa, Zea Mays
MPWPEMWLPPAAGEGAVAAGLFLDGVDGTAHGALLAAMPGCSLSFGHQHRRRRGAPLGFLSLTMSVKGGRGFAPAPVGLLPDAEEKARAEESDALVAGKRAVEVAAEAEGVILLQEKEKKDGRAGAGAMNVSKHLWAGAVAAMISRTVVAPLERLKLEYIVRGEQRNLFELMHAIATTQGLKGFWKGNFVNILRTAPFKAVNFYAYDSYRKQLLKWSGNEESANFERFIAGAFAGVTATIMCIPMDTLLVSDQDKDGSSWW

SEQ ID NO: 160279 - protein, 590 aa, Zea Mays
MDLLDARHRHTPDLSSSQDAASNMGLPLAGAAYQPYVSELLSFSIERLHKEPELLRVDAERVRRQMQEVAVENYAAFIAASEALSFVRAQLESFDGHLEAMIEEIPNLTSGCTEFVESAQQILEERKLNQTLLANHTTLLDLLEIPQLMDTCIRNGNYDEALDLEAFVSKIWKLHPDLPVVQGLATEVKKTVQSLVSQLLQKLRSNIQLPECLRIVAHLRRIGVFSESELRLQFLRCREAWLSGILEDLDQRNVYDYLKGMVTCHRVHLFDVVNQYRAIFNNDKSGNDENYDGGLLFSWAMQQVSNHLTTLQVMLPNITEGGSLSNILEQCMYCAMGLGLVGLDFRGLLPPIFENAVLNLFSKNMSTAVENFQVILDSHCWVPMPSVGFVANGVVDETSDDVTPPSVLMEHPPLAVFVNGVSAAMNELRPCAPLSLKVVLAQEVVKGLHAVSDSLVRYKAMRMLRGNESALFLSLCQAFIEVAYPYCAACFGRCYPNGATLISERQGTFDAVRQLLTVPARSNSSSIERRQSGGIERRQSGAIERKQSVESTGIAVTDNGLSADGPGLETNSSAATTTSPVDDGPPATLD

SEQ ID NO: 160280 - protein, 101 aa, Zea Mays
MAMSGDVDIQVHSMGAARNFRVSVTHCPRACVQCMYYSDPPPTCCTYVILILIDRTNLRKAGRPLWTVVYIYVIVALRSLSIDQSSRERERETLTCLSRSH

SEQ ID NO: 160281 - protein, 57 aa, Zea Mays
MGAMCVSHAVLASPEDFPTELCSGSVNTFLHLQCLRCRFSEALLLASSLAMVHCFGW

SEQ ID NO: 160282 - protein, 403 aa, Zea Mays
MASYDGDEDSGRRRPSQHRPSGGGSGDLASSAKLVAEAAKLALQDHSLEKVDKGRVAGAAADLLHAASQYGKLEGKPVGGYLEKAEEYLHQYGRKDGAGGKHQGDGEGKYGKNPGGGHGGGRYEEDEYKKKPGGGSGYGGGRYEEEEGYKKKPGSGGYGGGKYEDEDDYRKKPSSGSYGGGRYEDEDDYKKKPTSGGYGGGRYEQEDNYKKPTGGGFGDGRYEQEDEYKRPLSGGGSSYGGGRYEDEDDYRKKPSAGGYGGGGRYEDEYSKKPAGGHGGGRYEEDDEYRKPSGGGYGYGASSGGGHGGRYEEEDYKKKPSGHSGGRYEEEEGNKKASGYSGGKYGKEEDDKKKKHGEDGSESGGIGDYLKLAQGFMKKQDGEGDSGGGMGDYLKLAEGFLKKR

SEQ ID NO: 160283 - protein, 74 aa, Zea Mays
MEKALTKLGSFTISRKAKQELSAIGDDISGTRSRSLIYCASTTSLQVSSLVTSSATSTTNRPRSWWCTCPSPAR

SEQ ID NO: 160284 - protein, 169 aa, Zea Mays
MGFIKPIASIKRISVSVMLAPDLPLCAIGDEKRLMQTILNISGNAVKFTKEGHITLVASIMKADSLREFRTPEFHPTASDEHFYLKVQIQAVELVLRIYLMYSQSLLILKVEETEGLMVVVLALPYARGLLVLWEGTSGSTTKEPEEVAPQHSSSSWACVTTQTPTSNS

SEQ ID NO: 160285 - protein, 391 aa, Zea Mays
MEQDQSVVVGSADSGAAAFGFATGNPPSLAVTGGSAVAPDGGAQAADASAYQAEHTALNGTVGDMGNYPSTGAAENGEAVPNETGEPVPELSYEEAEEARLWSVVTANSLDFNAWTALIEETEKNAENNILKIRKVYDSFLAEFPLCFGYWKKYADHEARLDGVSKVIEVYERAVLAVTYSVDIWYNYCQFAISTYDDSDIIRRLFERGLAYVGTDYHSNILWDEYIKYEESLEAWSHLADIYTRVLEHPIQQLDRYFNCLKELASKHSLSEILTAEEASLYVVTSETTAQAPDGEAHPDDVDKLGQPEISSSTDAESLAKYVSMREEMYRKAKEYESKIIGFELAIRRPYFHVKPLDNPELENWHNYLDYIEKEEDINKYLDEASFVMGY

SEQ ID NO: 160286 - protein, 390 aa, Zea Mays
MEQDQSVVVGSADSGAAAFGFATGNPPSLAVTGGSAVAPDGGAQAADASAYQAEHTALNGTVGDMGNYPSTGAAENGEAVPNETGEPVPELSYEEEEARLWSVVTANSLDFNAWTALIEETEKNAENNILKIRKVYDSFLAEFPLCFGYWKKYADHEARLDGVSKVIEVYERAVLAVTYSVDIWYNYCQFAISTYDDSDIIRRLFERGLAYVGTDYHSNILWDEYIKYEESLEAWSHLADIYTRVLEHPIQQLDRYFNCLKELASKHSLSEILTAEEASLYVVTSETTAQAPDGEAHPDDVDKLGQPEISSSTDAESLAKYVSMREEMYRKAKEYESKIIGFELAIRRPYFHVKPLDNPELENWHNYLDYIEKEEDINKYLDEASFVMGY

SEQ ID NO: 160287 - protein, 387 aa, Zea Mays
MEQDQSVVVGSADSGAAAFGFATGNPPSLAVTGGSAVAPDGGAQAADASAYQAEHTALNGTVGDMGNYPSTGAAENGEAVPNETGEPVPELSYEEAVLSAEEARLWSVVTANSLDFNAWTALIEETEKNAENNILKIRKVYDSFLAEFPLCFGYWKKYADHEARLDGVSKVIEVYERAVLAVTYSVDIWYNYCQFAISTYDDSDIIRRLFERGLAYVGTDYHSNILWDEYIKYEESLEAWSHLADIYTRVLEHPIQQLDRYFNCLKELASKHSLSEILTAEEASLYVVTSETTAQAPDGEAHPDDVDKLGQPEISSSTDAESLAKYVSMREEMYRKAKEYESKIIGFELAIRRPYFHVKPLDNPELENWHNYLDYIEKEEDINKLPL

SEQ ID NO: 160288 - protein, 408 aa, Zea Mays
MEQDQSVVVGSADSGAAAFGFATGNPPSLAVTGGSAVAPDGGAQAADASAYQAEHTALNGTVGDMGNYPSTGAAENGEAVPNETGEPVPELSYEEAVLSAEEARLWSVVTANSLDFNAWTALIEETEKNAENNILKIRKVYDSFLAEFPLCFGYWKKYADHEARLDGVSKVIEVYERAVLAVTYSVDIWYNYCQFAISTYDDSDIIRRLFERGLAYVGTDYHSNILWDEYIKYEESLEAWSHLADIYTRVLEHPIQQLDRYFNCLKELASKHSLSEILTAEEASLYVVTSETTAQAPDGEAHPDDVDKLGQPEISSSTDAESLAKYVSMREEMYRKAKEYESKIIGFELAIRRPYFHVKPLDNPELENWHNYLDYIEKEEDINKVCFYTSRNPLSLFTSFYYRTLGIL

SEQ ID NO: 160289 - protein, 423 aa, Zea Mays
MFGFDEAKYSKLSFGSGRSGFMYMIPNTSFEFLISYMQVIKLYERCVIACASYSEFWIRYVQCMEDKRSLDLANNALARATHVFVKKQPEIHLFSARFKELNGDIFGARAEYQHLYSDLCPGFLEAIVKHSNMEHRLGDKELSCSVYEKVIAAEKGKEQSQLLPTLLIQYSRFLFLAIRDLEKAREILTVLHEQLNLTKPVLEAVIHLESIFPCEKRIEFLDSLVEKFVTPESSQGELASLVDKEEISSIFLEFLDLFGDAKSIRKASTRHTTLFSCKRSILPSKKRKADDAVVSDRDKFAKTGSVQSATGTDPNASNPPVWPATSETSGHQWGASYAQQAAYPAYGTYDYSHQMPQPAPQTAAYGAYPPTYSVQAYTQQSYTQPAAIPAAPVPAVVPAPTPASAYPQQPAAAPQPYYGTTYY

SEQ ID NO: 160290 - protein, 394 aa, Zea Mays
MEQDQSVVVGSADSGAAAFGFATGNPPSLAVTGGSAVAPDGGAQAADASAYQAEHTALNGTVGDMGNYPSTGAAENGEAVPNETGEPVPELSYEEAVLSAEEARLWSVVTANSLDFNAWTALIEETEKNAENNILKIRKVYDSFLAEFPLCFGYWKKYADHEARLDGVSKVIEVYERAVLAVTYSVDIWYNYCQFAISTYDDSDIIRRLFERGLAYVGTDYHSNILWDEYIKYEESLEAWSHLADIYTRVLEHPIQQLDRYFNCLKELASKHSLSEILTAEEASLYVVTSETTAQAPDGEAHPDDVDKLGQPEISSSTDAESLAKYVSMREEMYRKAKEYESKIIGFELAIRRPYFHVKPLDNPELENWHNYLDYIEKEEDINKWSFWVHVYDT

SEQ ID NO: 160291 - protein, 103 aa, Zea Mays
MTSRILFLSGLGLTIGLKSTMQFFTKPKNYKGTISFGAGFFLVLIGWPFFGMLLEAYGFIVLFSGFWPTLSVFLQRIPIIGWIFQQPFVTSFLDRYRGKRVPV

SEQ ID NO: 160292 - protein, 84 aa, Zea Mays
MFGFDNWSEINYAVLHQAKELQGYYLIWCWFFSGSHWVAVFWHALRGIWLYCTLQWVLANTFCVLAEDSYHRLDFPTTICDIVP

SEQ ID NO: 160293 - protein, 128 aa, Zea Mays
MVSFEMNDLKKIGLGLTGFGIFFSFLGIVFFFDKGLIAMDSFPVRFGFDNWSEINYAVLHQAKELQGYYLIWCWFFSGSHWVAVFWHALRGIWLYCTLQWVLANTFCVLAEDSYHRLDFPTTICDIVP

SEQ ID NO: 160294 - protein, 282 aa, Zea Mays
MLQPCLHVQWFLWQETDPKPPFGRIAGSMDRLCVTWLRSLSLGFRTDFLQSRTMKDALTKNGWVNDISGSISAQFLSEYFMVWDLIQGFQLRPGVSDQHRWTPSASKSAYHRFFEGMVTFEPAARVWKSWAPPRCKFFIWLASLNRCWTADRLARRGLDHPTKCLLCDQEEETMQHILLQCVFAREVWFHTLSLIGLQHLTPGTAESSFQDWWHRSGTTVQKAQKKGFNSAVILVAWWLWKHRNSCVFDGATPDISRITQDIRVDAKMWCLAGATGLKGLWP

SEQ ID NO: 160295 - protein, 73 aa, Zea Mays
MGATKTYQSRKKYDVCCLSRYSYLACLLSFSSVWCLSISLMRLITNKIDVFQFSLYTVMSTQNLQTFPYITVN

SEQ ID NO: 160296 - protein, 71 aa, Zea Mays
MFASRPVVHPLEVAAPAHPVQQPAPGVLMKDLPGMPGTPGGLGLRVLQLLFAAISLAVMSSTADFASVSAF

SEQ ID NO: 160297 - protein, 517 aa, Zea Mays
MCTRPAHAHTCVAASGSGSSSPGGCAGIAASELVSDITVRIGTTKFYLHKFPLLSKCARFQKLIPTTGDENIEIHIHDIPGGAKAFGVCAKFCYGMIVTLNAYNVIAARCAAEYLEMNETVDKGNLIYKIDVFLSSSIFRSWKDSIIVLGTTKAHLPWAEDLKLVSQCIDSVASKASIDVSKVEWSYTYNRKKLPTENGHDSPWNGVNQRQVVPKDWWVEDLTDLDIDAYKQVITAVKTKGMVAKDVIGEAIKAYTYKKLPSLSKVSMIHGDAKVRAMLVTITCLLPSEKGSVSCSFLLKLLKATNLLKCGDMCRKELMKRIARQLEEASVSDLLIPAVDEDTSVYDIDLILSIVEEFIRQDSKNAQRHNGGEVNDHVSAPSASMITVAKIVDGYLAEVAKDPNIPVYKFFSLAETVSANSRPVHDGLYRAIDMYLKEHPSLGKSDKKRLCALMDCRKLSPDACAHAVQNERLPLRVVVQVLYHEQTRASAAATVRADSIGIGSYESSRSTTKSAAV

SEQ ID NO: 160298 - protein, 58 aa, Zea Mays
MNYMYVAAWCYNKSRRIGFTLLMLKHHSFDRDASRAFVSGNFTGDGLTDSLQGLSSSE

SEQ ID NO: 160299 - protein, 181 aa, Zea Mays
MEPTRSCPYYSRFWAQCLMSRKGGHIMVLEEVIITLLGGMHHEHLFLEILQVNSVVDWRKFYFERYIFAGKLIGRYYDSEGNPTKYLKGVEVKAKRGTQLLEKQKSDEAKIPGCNSKWSQQEGGEVWCDAGYPRLVRRPGDIALTGQVSQRCACFQENELDKAGLVVYEGCDYLSQSCKVN

SEQ ID NO: 160300 - protein, 161 aa, Zea Mays
MNYMDASRAFVSGNFTGDGLTDSLQGLSSSEVNSVVDWRKFYFERYIFAGKLIGRYYDSEGNPTKYLKGVEVKAKRGTQLLEKQKSDEAKIPGCNSKWSQQEGGEVWCDAGYPRLVRRPGDIALTGQVSQRCACFQENELDKAGLVVYEGCDYLSQSCKVN

SEQ ID NO: 160301 - protein, 897 aa, Zea Mays
MIFPMTTGDIDPAVLASLPPSMQLDLLVQMRERVMAENRQKYQKIKKEPAKFSELQIQSYLKTVAFRREIDQVQKSSSGKGSGGVQTSKIASEANREFIFSSSFTGDKQMLAQRGEKEHNVENTRSKKEIHSSVFASNPTSSLGTMKPPNSKTLSDFGPDVETYRDERGRIRVSRVRAMGIRMTRDIQRNLDFIKENEQVKSKGQTQTNFHNGSTGNEEPPDFPEHLFESNKLQSSCSPDVDLSETDRDNHQTSSQIGTDIISESSCYGNKEAIEISFSVDQTEVKDGDEDIFLQLVSGMAPNNIFSGNNCLVKKMEESVDSECIWEDGVIEAGTSPVKIDMKDHKSSLPENCSDDEMEWEEGDSFVPGVASSSEHNPCNAPKGDLEEAALVQEAIRRSLEDFEKKASENVSTGDIQASVEDRSLQFSNNVPKISESLGENDSHSGVPVVDEINNETRTEINYDKDDMVQGTGLLGTERQESESQPPLVNNDWHADMHRAHPLGSVPPCTTFTSDLAEKPSVSAETNGEDVMIFTTKIPGTALGDCDKTSNLNIMNSDQSKCSKDIASTGESLSHQKNLLIDELLAVTAEQKENATQVDLKFATSEVDYTQICGNDDNHTISASYVDAELSRLRQEQIYLGHERRKLESHAESVSSEMFAECQELLQMFGLPYIIAPMEAEAQCAYMEINNLVDGVVTDDSDVFLFGARNVYKNIFDDRKYVETYFMKDIESELGLSREQLIRMALLLGSDYTEGVSGIGIVNAIEVVHAFPEEDGLQKFKEWIESPDPSIFGKLHMEISGRSKKRKLDENDSDGKGKGLEPECIQGSDDKQSSNEDEHVKEIFMSKHRNVSKNWHVPATFPSEKVVNAYISPQVDSSTEPFSWGRPDLGLLRRNQN

SEQ ID NO: 160302 - protein, 1252 aa, Zea Mays
MQLDLLVQMRERVMAENRQKYQKIKKEPAKFSELQIQSYLKTVAFRREIDQVQKSSSGKGSGGVQTSKIASEANREFIFSSSFTGDKQMLAQRGEKEHNVENTRSKKEIHSSVFASNPTSSLGTMKPPNSKTLSDFGPDVETYRDERGRIRVSRVRAMGIRMTRDIQRNLDFIKENEQVKSKGQTQTNFHNGSTGNEEPPDFPEHLFESNKLQSSCSPDVDLSETDRDNHQTSSQIGTDIISESSCYGNKEAIEISFSVDQTEVKDGDEDIFLQLVSGMAPNNIFSGNNCLVKKMEESVDSECIWEDGVIEAGTSPVKIDMKDHKSSLPENCSDDEMEWEEGDSFVPGVASSSEHNPCNAPKGDLEEAALVQEAIRRSLEDFEKKASENVSTGDIQASVEDRSLQFSNNVPKISESLGENDSHSGVPVVDEINNETRTEINYDKDDMVQGTGLLGTERQESESQPPLVNNDWHADMHRAHPLGSVPPCTTFTSDLAEKPSVSAETNGEDVMIFTTKIPGTALGDCDKTSNLNIMNSDQSKCSKDIASTGESLSHQKNLLIDELLAVTAEQKENATQVDLKFATSEVDYTQICGNDDNHTISASYVDAELSRLRQEQIYLGHERRKLESHAESVSSEMFAECQELLQMFGLPYIIAPMEAEAQCAYMEINNLVDGVVTDDSDVFLFGARNVYKNIFDDRKYVETYFMKDIESELGLSREQLIRMALLLGSDYTEGVSGIGIVNAIEVVHAFPEEDGLQKFKEWIESPDPSIFGKLHMEISGRSKKRKLDENDSDGKGKGLEPECIQGSDDKQSSNEDEHVKEIFMSKHRNVSKNWHVPATFPSEKVVNAYISPQVDSSTEPFSWGRPDLGLLRRLCWERFGWGKEKADELLLPVLREYNKHETQLRMEAFYSFNERFAKIRSKRIKKAIKGITGKSFLDADESEQDNPSTSKTIKKKEASSSSHARGREKRKNDYGVMGSQEDNIIDNTNSLAETVENTRENNNTTKIKRGSSCGRPKGRGRSRTTAGSDATINQEDYEIEYSTSASDEDSCKRHSNSYGSEGRALRRSSRKRKQVTYMEDGHEAYGNDVPMHQNDENNPGQPAAAADVAGEDTGFNIYHQDTSELNSSQMHTGAGITEDINEDSQRFELREDNQVDSTPKDYLFNGGGFCMEGEGDEQEPACDQSGAEVEPGPSGPCGAMDEVSESASISTAMECTENARMEARGASSSQQRRKASRGLSAMPTLIKRRRKS

SEQ ID NO: 160303 - protein, 1244 aa, Zea Mays
MRERVMAENRQKYQKIKKEPAKFSELQIQSYLKTVAFRREIDQVQKSSSGKGSGGVQTSKIASEANREFIFSSSFTGDKQMLAQRGEKEHNVENTRSKKEIHSSVFASNPTSSLGTMKPPNSKTLSDFGPDVETYRDERGRIRVSRVRAMGIRMTRDIQRNLDFIKENEQVKSKGQTQTNFHNGSTGNEEPPDFPEHLFESNKLQSSCSPDVDLSETDRDNHQTSSQIGTDIISESSCYGNKEAIEISFSVDQTEVKDGDEDIFLQLVSGMAPNNIFSGNNCLVKKMEESVDSECIWEDGVIEAGTSPVKIDMKDHKSSLPENCSDDEMEWEEGDSFVPGVASSSEHNPCNAPKGDLEEAALVQEAIRRSLEDFEKKASENVSTGDIQASVEDRSLQFSNNVPKISESLGENDSHSGVPVVDEINNETRTEINYDKDDMVQGTGLLGTERQESESQPPLVNNDWHADMHRAHPLGSVPPCTTFTSDLAEKPSVSAETNGEDVMIFTTKIPGTALGDCDKTSNLNIMNSDQSKCSKDIASTGESLSHQKNLLIDELLAVTAEQKENATQVDLKFATSEVDYTQICGNDDNHTISASYVDAELSRLRQEQIYLGHERRKLESHAESVSSEMFAECQELLQMFGLPYIIAPMEAEAQCAYMEINNLVDGVVTDDSDVFLFGARNVYKNIFDDRKYVETYFMKDIESELGLSREQLIRMALLLGSDYTEGVSGIGIVNAIEVVHAFPEEDGLQKFKEWIESPDPSIFGKLHMEISGRSKKRKLDENDSDGKGKGLEPECIQGSDDKQSSNEDEHVKEIFMSKHRNVSKNWHVPATFPSEKVVNAYISPQVDSSTEPFSWGRPDLGLLRRLCWERFGWGKEKADELLLPVLREYNKHETQLRMEAFYSFNERFAKIRSKRIKKAIKGITGKSFLDADESEQDNPSTSKTIKKKEASSSSHARGREKRKNDYGVMGSQEDNIIDNTNSLAETVENTRENNNTTKIKRGSSCGRPKGRGRSRTTAGSDATINQEDYEIEYSTSASDEDSCKRHSNSYGSEGRALRRSSRKRKQVTYMEDGHEAYGNDVPMHQNDENNPGQPAAAADVAGEDTGFNIYHQDTSELNSSQMHTGAGITEDINEDSQRFELREDNQVDSTPKDYLFNGGGFCMEGEGDEQEPACDQSGAEVEPGPSGPCGAMDEVSESASISTAMECTENARMEARGASSSQQRRKASRGLSAMPTLIKRRRKS

SEQ ID NO: 160304 - protein, 1194 aa, Zea Mays
MGVHGLWELLAPVGRRVSVETLAGKRVAVDASIWMVQFMRAMRDDSGEMVRDAHLLGFLRRICKLLFLRVRPVFVFDGATPALKRRTLAARRRHRDAAQAKVRKTAEKLLLSHLKARKLEELAEQIRSDRAKHDAKGKQVESSNGGETEKTSQNQIGDTNNSEGNVASINQEKVDGMLAASLAAEEDTDFTDEGTHHLTSAPLPEGDEIDEDEDDDEGMIFPMTTGDIDPAVLASLPPSMQLDLLVQMRERVMAENRQKYQKIKKEPAKFSELQIQSYLKTVAFRREIDQVQKSSSGKGSGGVQTSKIASEANREFIFSSSFTGDKQMLAQRGEKEHNVENTRSKKEIHSSVFASNPTSSLGTMKPPNSKTLSDFGPDVETYRDERGRIRVSRVRAMGIRMTRDIQRNLDFIKENEQVKSKGQTQTNFHNGSTGNEEPPDFPEHLFESNKLQSSCSPDVDLSETDRDNHQTSSQIGTDIISESSCYGNKEAIEISFSVDQTEVKDGDEDIFLQLVSGMAPNNIFSGNNCLVKKMEESVDSECIWEDGVIEAGTSPVKIDMKDHKSSLPENCSDDEMEWEEGDSFVPGVASSSEHNPCNAPKGDLEEAALVQEAIRRSLEDFEKKASENVSTGDIQASVEDRSLQFSNNVPKISESLGENDSHSGVPVVDEINNETRTEINYDKDDMVQGTGLLGTERQESESQPPLVNNDWHADMHRAHPLGSVPPCTTFTSDLAEKPSVSAETNGEDVMIFTTKIPGTALGDCDKTSNLNIMNSDQSKCSKDIASTGESLSHQKNLLIDELLAVTAEQKENATQVDLKFATSEVDYTQICGNDDNHTISASYVDAELSRLRQEQIYLGHERRKLESHAESVSSEMFAECQELLQMFGLPYIIAPMEAEAQCAYMEINNLVDGVVTDDSDVFLFGARNVYKNIFDDRKYVETYFMKDIESELGLSREQLIRMALLLGSDYTEGVSGIGIVNAIEVVHAFPEEDGLQKFKEWIESPDPSIFGKLHMEISGRSKKRKLDENDSDGKGKGLEPECIQGSDDKQSSNEDEHVKEIFMSKHRNVSKNWHVPATFPSEKVVNAYISPQVDSSTEPFSWGRPDLGLLRRLSCAWRHFIHSMRDLQKFAAKGLRKPSRALQAKAFLTQMNLSRIIPVLARRSRRKRPAPQAMPEVEKKGKTIMESWEVKKII

SEQ ID NO: 160305 - protein, 924 aa, Zea Mays
MIFPMTTGDIDPAVLASLPPSMQLDLLVQMRERVMAENRQKYQKIKKEPAKFSELQIQSYLKTVAFRREIDQVQKSSSGKGSGGVQTSKIASEANREFIFSSSFTGDKQMLAQRGEKEHNVENTRSKKEIHSSVFASNPTSSLGTMKPPNSKTLSDFGPDVETYRDERGRIRVSRVRAMGIRMTRDIQRNLDFIKENEQVKSKGQTQTNFHNGSTGNEEPPDFPEHLFESNKLQSSCSPDVDLSETDRDNHQTSSQIGTDIISESSCYGNKEAIEISFSVDQTEVKDGDEDIFLQLVSGMAPNNIFSGNNCLVKKMEESVDSECIWEDGVIEAGTSPVKIDMKDHKSSLPENCSDDEMEWEEGDSFVPGVASSSEHNPCNAPKGDLEEAALVQEAIRRSLEDFEKKASENVSTGDIQASVEDRSLQFSNNVPKISESLGENDSHSGVPVVDEINNETRTEINYDKDDMVQGTGLLGTERQESESQPPLVNNDWHADMHRAHPLGSVPPCTTFTSDLAEKPSVSAETNGEDVMIFTTKIPGTALGDCDKTSNLNIMNSDQSKCSKDIASTGESLSHQKNLLIDELLAVTAEQKENATQVDLKFATSEVDYTQICGNDDNHTISASYVDAELSRLRQEQIYLGHERRKLESHAESVSSEMFAECQELLQMFGLPYIIAPMEAEAQCAYMEINNLVDGVVTDDSDVFLFGARNVYKNIFDDRKYVETYFMKDIESELGLSREQLIRMALLLGSDYTEGVSGIGIVNAIEVVHAFPEEDGLQKFKEWIESPDPSIFGKLHMEISGRSKKRKLDENDSDGKGKGLEPECIQGSDDKQSSNEDEHVKEIFMSKHRNVSKNWHVPATFPSEKVVNAYISPQVDSSTEPFSWGRPDLGLLRRIRTKEKIPSGYVGKGLGGAKRKLMNCCFQF

SEQ ID NO: 160306 - protein, 1273 aa, Zea Mays
MIFPMTTGDIDPAVLASLPPSMQLDLLVQMRERVMAENRQKYQKIKKEPAKFSELQIQSYLKTVAFRREIDQVQKSSSGKGSGGVQTSKIASEANREFIFSSSFTGDKQMLAQRGEKEHNVENTRSKKEIHSSVFASNPTSSLGTMKPPNSKTLSDFGPDVETYRDERGRIRVSRVRAMGIRMTRDIQRNLDFIKENEQVKSKGQTQTNFHNGSTGNEEPPDFPEHLFESNKLQSSCSPDVDLSETDRDNHQTSSQIGTDIISESSCYGNKEAIEISFSVDQTEVKDGDEDIFLQLVSGMAPNNIFSGNNCLVKKMEESVDSECIWEDGVIEAGTSPVKIDMKDHKSSLPENCSDDEMEWEEGDSFVPGVASSSEHNPCNAPKGDLEEAALVQEAIRRSLEDFEKKASENVSTGDIQASVEDRSLQFSNNVPKISESLGENDSHSGVPVVDEINNETRTEINYDKDDMVQGTGLLGTERQESESQPPLVNNDWHADMHRAHPLGSVPPCTTFTSDLAEKPSVSAETNGEDVMIFTTKIPGTALGDCDKTSNLNIMNSDQSKCSKDIASTGESLSHQKNLLIDELLAVTAEQKENATQVDLKFATSEVDYTQICGNDDNHTISASYVDAELSRLRQEQIYLGHERRKLESHAESVSSEMFAECQELLQMFGLPYIIAPMEAEAQCAYMEINNLVDGVVTDDSDVFLFGARNVYKNIFDDRKYVETYFMKDIESELGLSREQLIRMALLLGSDYTEGVSGIGIVNAIEVVHAFPEEDGLQKFKEWIESPDPSIFGKLHMEISGRSKKRKLDENDSDGKGKGLEPECIQGSDDKQSSNEDEHVKEIFMSKHRNVSKNWHVPATFPSEKVVNAYISPQVDSSTEPFSWGRPDLGLLRRLCWERFGWGKEKADELLLPVLREYNKHETQLRMEAFYSFNERFAKIRSKRIKKAIKGITGKSFLDADESEQDNPSTSKTIKKKEASSSSHARGREKRKNDYGVMGSQEDNIIDNTNSLAETVENTRENNNTTKIKRGSSCGRPKGRGRSRTTAGSDATINQEDYEIEYSTSASDEDSCKRHSNSYGSEGRALRRSSRKRKQVTYMEDGHEAYGNDVPMHQNDENNPGQPAAAADVAGEDTGFNIYHQDTSELNSSQMHTGAGITEDINEDSQRFELREDNQVDSTPKDYLFNGGGFCMEGEGDEQEPACDQSGAEVEPGPSGPCGAMDEVSESASISTAMECTENARMEARGASSSQQRRKASRGLSAMPTLIKRRRKS

SEQ ID NO: 160307 - protein, 405 aa, Zea Mays
MIEALFMNNSTPTAPPRDAGRKTTVPPFRQEERVLDPKKAQNIAILLRALNVTRDEVSDALLDGNTEYLGTELLETLVKMAPTKEEELKLQDYNDDTSKLGSAERFLKSVLDIPFAFKRVDAMLYRANFESEINYLMKSFETLEAACEDLRGSRLFLKLLEAVLRTGNRMNVGTNRGEAKAFKLDTLLKLADVKGTDGKTTLLHFVVQEIVRSEDAKSEKESAMITRSSKDEQLRKQGLKLVSGLSSELGNVKKAAMMDFDVLHGYVNKLETGLEKIKSVLQLERQCTQGQKFFSTMQSFLKKAEAEIEKVRGEEKRALMRVKDITEYFHGDTVKEEPHPLRIFMVVRDFLSTLDHVCKEVGRLQQDRTVVGSARSFRIPATSLPILNVYGQRRENDSDDDNSSF

SEQ ID NO: 160308 - protein, 909 aa, Zea Mays
MPPTTVMLLPACTVLLLCCRLSPAAASSPGDVGGGGARRLLHQPLFPIEWTPPPSPQPDFSSDPATPDGPPGAFFPPTPPVAPAGGGGTTTTSSPTTVASNVPAGASSGSGDGGHHGGPAKGTIVAAGAAATAAIALLAFACAFLIALRARRRGDSQKLLGPDRGSARHHSAPSAADFLYVGTVEPTTPGRHHGSPAADLIGSPYRKLRSERARRDEPTDNLSPELRPLPPLRRAATMGSSDDAYYTPRQRSGGSGGGGVGGETWSEASASSPPTTTTASRRSLPSLTSDCFPPVTAIAAPTPPPARSRRTPPRTRFSAGSTPDIKQPPSPSEPTSRRRLLKPLPPEGPRIAMPMPITATTAEDSIGSASMRKQDYVADGIVGNDEPRPKLKPLHWDKVRATSDRAMVWDQLKSSCSFQLDEGMIEALFMNNSTPTAPPRDAGRKTTVPPFRQEERVLDPKKAQNIAILLRALNVTRDEVSDALLDGNTEYLGTELLETLVKMAPTKEEELKLQDYNDDTSKLGSAERFLKSVLDIPFAFKRVDAMLYRANFESEINYLMKSFETLEAACEDLRGSRLFLKLLEAVLRTGNRMNVGTNRGEAKAFKLDTLLKLADVKGTDGKTTLLHFVVQEIVRSEDAKSEKESAMITRSSKDEQLRKQGLKLVSGLSSELGNVKKAAMMDFDVLHGYVNKLETGLEKIKSVLQLERQCTQGQKFFSTMQSFLKKAEAEIEKVRGEEKRALMRVKDITEYFHGDTVKEEPHPLRIFMVVRDFLSTLDHVCKEDSKAEGSDKSQSHKTEFWKEQSAPAMPGLAAEADVALAFVMRHTFNGGRSKGWGNCGCGLEKLPTFKAKVSVGELMKVWRRRDLPLKSGAPLDFARHHTTFLGCSEYKPRQGSKTKRPRAKSVTSQ

SEQ ID NO: 160309 - protein, 581 aa, Zea Mays
MGAIRTSIKSMPQGQSSRCIEELTSDLTETLNWMADCSFEDDVSKLREPSIARKSIFCQKAELLGRHLSEVYASILDSITVTVSNSTLVGKSVERLVNAVRRNFSHLVRNKSKNINGFISSIMGKNVSKKLHANRQKIPSFSWIFCLFCRLYISCRSLYQQSIGLMPPDVAIDATKLVGNPFIVCSGKEWTNPTNILGKGYFALIDENSNSLLDVIESLSESLSTNCASFAPLVYIFHVMVLQRLNDLNRQIKAFQFLLEDDAWQIDNKDIGNTRLLKESCSLEAAKLMSFVMNYVKLLSSGETGPFGSYDVSSSWDLSLCSLDEGSFPIATWQLLCENIDVWSSHVSKKDLKNFFSNLIRFSFTQKRSSLDKENNGTQSSGREMTLHSVSIGVLCDTIIYEKKVILKNLASSFCHALKKSFSFVTNSDGDNVFLDTSPDLMETISNLENEKLIGTGSGATHAHCLDKHWICEDFLNFFSAVPGFHANSKAFIRLINYILHLERLLLLKLLGLRCESCNPMKLLRLFICCRRALINLILKFGKECPEARQYLSFSNKNEDCNWDTCYHKGQQVCYQNRRLP

SEQ ID NO: 160310 - protein, 1673 aa, Zea Mays
METAAATARPGAARKRRWNQSQPCQGEGPSDLKFARLRFDGDGGAKGAWEHLDLVLSLQSKELSLERKIELAVEFLTTLPNNSSCSIQLLRLVSFIGNWLQSILNFPENSKKILHIFDPALDSRCWAILRVCVEKKPSISISLNLLKSLSRVASHGLGRVDSNTSCPDNESIELFEQVFDCMSLLFSSNTRAFFNAGVDLWASCAIEVVNLAQKVSAKKDNFCPVLQKLANCLLGQFACFLRFYANPKNIFHAFVDKVLGPLLELLVLLNSQAHSSEHKQTGTMLKIVEDVFSNGLFHPQHLSGYFGLRSLNKSSAAKDIKGSYHRHLFQRFKGIKTENKAVLLAGFGYLFQLFVRRARNQRTTVAPSRTTLGTLHKSNDGSEEPQHRESLFEVFIMFMEPIVLECKSYSQKDFSKLGVTRLVEVHCMLKSINVMLITLIEEKIYVPTEDTLEGSHFNFLQDIYSVLILISEKMYKFWMSAVHLEDVNIKKIVPLMFAEIISAVGNFLEIEYKVLGDDLVKLWLMIFALSAINTSSKDIEPCFLLASKISSLSAQVICTFSELRQVSRSIFSLCDAVRAFRVEGPDGVHGSFSVASLSSQECLGSLTTLLSSETLMGAIRTSIKSMPQGQSSRCIEELTSDLTETLNWMADCSFEDDRLNDLNRQIKAFQFLLEDDAWQIDNKDIGNTRLLKESCSLEAAKLMSFVMNYRSSLDKENNGTQSSGREMTLHSVSIGVLCDTIIYEKKVILKNLASSFCHALKKSFSFVTNSDGDNVFLDTSPDLMETISNLENEKLIGTGSGATHAHCLDKHWICEDFLNFFSAVPGFHANSKAFIRLINYILHLERLLLLKLLGLRCESCNPMKLLRLFICCRRALINLILKFGKECPEARQYLSFSNKNGNSYSLVWFLRSVQEIVGSSHKIFDECTDEVNRLMFSLLDKTSELFSTLASLNSSVYLFDLKKQIESSLDGSPIKKETSEHNDQAFDIVEVSALECVRSMAELLQKTATGIPVTIKDSKCVIKIEDCRNTVCWKRLSCSMSCIGGFLQGLNSALESTFNDHPIASPEDRKMLLQYCSRFSSYVAKFGTFVDICVHVLFMDNKDSASIDLVSVHLPQELDCANGFLNIEAIMDELTKCGSHGVDLSKIQYMENVLLENLLKGECPLISFTLREIYSISAAIIKFHGYLSFSSDVSRQTCSPVEQLSLGTMLGIAFITLQKVADMSSWPHMFCLVWIDGVLRYLEVLGSAFTLSELNISIELYTQIINALLRAVGKCILLQQKNATLPTHEIGSSTKTLQLQNASGYAFPKDFIDTQNRLNSLKSRLRLVLGKFVSIASNTHLNAALQVIERALVGVNHCSHSIYQIYTGNPDGGTVSSDVAAGIDCLYMILDFVPGNKRVFKRTVPGLVGALFNIILHLQSPHIFYSQNLPPQGSVFHPDAGATVLMCVEVITSFVGRHSFQIDASHVSQCLLVPVTLFKEFKHLLAKYCNQSVQHHGDHAEYILDRQFSVDIYAACCKLLCTTLRHQQREIGWCVALLEDSVSILLGCLESTDSKMINVAGYFAWNMEEALKCASFFRRIYEEMRQQRETLGKHAMHFLAGYISMFSGQGPFQTGITREIDEVLRPGVYSLIDICEESDFQQLHTYLGEGPCRTTLADLVRDYKLHFQYQGKI

SEQ ID NO: 160311 - protein, 1191 aa, Zea Mays
MGAIRTSIKSMPQGQSSRCIEELTSDLTETLNWMADCSFEDDVSKLREPSIARKSIFCQKAELLGRHLSEVYASILDSITVTVSNSTLVGKSVERLVNAVRRNFSHLVRNKSKNINGFISSIMGKNVSKKLHANRQKIPSFSWIFCLFCRLYISCRSLYQQSIGLMPPDVAIDATKLVGNPFIVCSGKEWTNPTNILGKGYFALIDENSNSLLDVIESLSESLSTNCASFAPLVYIFHVMVLQRLNDLNRQIKAFQFLLEDDAWQIDNKDIGNTRLLKESCSLEAAKLMSFVMNYVKLLSSGETGPFGSYDVSSSWDLSLCSLDEGSFPIATWQLLCENIDVWSSHVSKKDLKNFFSNLIRFSFTQKRSSLDKENNGTQSSGREMTLHSVSIGVLCDTIIYEKKVILKNLASSFCHALKKSFSFVTNSDGDNVFLDTSPDLMETISNLENEKLIGTGSGATHAHCLDKHWICEDFLNFFSAVPGFHANSKAFIRLINYILHLERLLLLKLLGLRCESCNPMKLLRLFICCRRALINLILKFGKECPEARQYLSFSNKNGNSYSLVWFLRSVQEIVGSSHKIFDECTDEVNRLMFSLLDKTSELFSTLASLNSSVYLFDLKKQIESSLDGSPIKKETSEHNDQAFDIVEVSALECVRSMAELLQKTATGIPVTIKDSKCVIKIEDCRNTVCWKRLSCSMSCIGGFLQGLNSALESTFNDHPIASPEDRKMLLQYCSRFSSYVAKFGTFVDICVHVLFMDNKDSASIDLVSVHLPQELDCANGFLNIEAIMDELTKCGSHGVDLSKIQYMENVLLENLLKGECPLISFTLREIYSISAAIIKFHGYLSFSSDVSRQTCSPVEQLSLGTMLGIAFITLQKVADMSSWPHMFCLVWIDGVLRYLEVLGSAFTLSELNISIELYTQIINALLRAVGKCILLQQKNATLPTHEIGSSTKTLQLQNASGYAFPKDFIDTQNRLNSLKSRLRLVLGKFVSIASNTHLNAALQVIERALVGVNHCSHSIYQIYTGNPDGGTVSSDVAAGIDCLYMILDFVPGNKRVFKRTVPGLVGALFNIILHLQSPHIFYSQNLPPQGSVFHPDAGATVLMCVEVITSFVGRHSFQIDASHVSQCLLVPVTLFKEFKHLLAKYCNQSVQHHGDHAEYILDRQFSVDIYAACCKLLCTTLRHQQRFEDD

SEQ ID NO: 160312 - protein, 81 aa, Zea Mays
MFIATMKPFCCLLSAAVFGVFACLYGLRADRGLQDLLGPRNRSPPATSLLPFVSGLPLYLHQSEGSEATPLGGEVPCQQNA

SEQ ID NO: 160313 - protein, 92 aa, Zea Mays
MPCCSTKCPICILLYSNLVCCCWSSLYFPPLLQGDVEAADPGNKAAAEPVGDVAAAEHESFNQGNGPRVHHWNKLETTSVISPLIFTLSGSS

SEQ ID NO: 160314 - protein, 94 aa, Zea Mays
MRGDVEAIDPGNKAAAEPVGDVAALSSRLARRLLHGSWCPPRCQGICLDQSRGGRGVRQFKTYLLHILEKETPGVSKLEFHSLQRIWVLFNLLL

SEQ ID NO: 160315 - protein, 88 aa, Zea Mays
MRGDVEAIDPGNKAAAEPVGDVAALSSRLARRLLHGSWCPPRCQGICLDQSRGRTFMLWTQTQVDVVFDNSKHTYYIYWKRKPQAFQS

SEQ ID NO: 160316 - protein, 83 aa, Zea Mays
MNANEVLHYLSFNQGNGPRVHHWNKLETTSVISPLIFTLSGRTGAYKISSGQGIVPLRRPPSSLSSQAFHCISIKAKDQRLLR

SEQ ID NO: 160317 - protein, 105 aa, Zea Mays
MPCCSTKCPICILLYSNLVCCCWSSLYFPPLLQGDVEAADPGNKAAAEPVGDVAAAEHESFNQGNGPRVHHWNKLETTSVISPLIFTLSGICMLGIVLIYLSLLN

SEQ ID NO: 160318 - protein, 117 aa, Zea Mays
MPCCSTKCPICILLYSNLVCCCWSSLYFPPLLQGDVEAADPGNKAAAEPVGDVAAAEHESFNQGNGPRVHHWNKLETTSVISPLIFTLSVWCLSEATPFYLKGFSHGCAEFAMVGSS

SEQ ID NO: 160319 - protein, 101 aa, Zea Mays
MRGDVEAIDPGNKAAAEPVGDVAALSSRLARRLLHGSWCPPRCQGICLDQSREHSCYGHKLRWTWCSTIQNIPITYIGKGNPRRFKVRVSQLAANLEQGRQ

SEQ ID NO: 160320 - protein, 281 aa, Zea Mays
MKIQNQQHQGNSAKQFSTNKDNITVYRSVKDVTKLMSSTTELGGGFEGEGKTYFSVAVDSISSMLRHASVSSISGLLSNLRSHEQVSSIFWMIHSDLHEPKVPRAFECLSTMVACVEPALVDPVCGESPGNMSILEQNYSKAKFIVRLKRRNGRVKHLYENLYIEGNDIKFDSAPSVSIEVNQSLVPKVQFNLELSEKERSDRANVVLPFEHQGNGQPIHIYDGRRSLPEAQRDPNLTAPPLVDEVKNPKSGTAKGEIHYFRDSDDEQPDSDEDPDDDLDI

SEQ ID NO: 160321 - protein, 190 aa, Zea Mays
MIHSDLHEPKVPRAFECLSTMVACVEPALVDPVCGESPGNMSILEQNYSKAKFIVRLKRRNGRVKHLYENLYIEGNDIKFDSAPSVSIEVNQSLVPKVQFNLELSEKERSDRANVVLPFEHQGNGQPIHIYDGRRSLPEAQRDPNLTAPPLVDEVKNPKSGTAKGEIHYFRDSDDEQPDSDEDPDDDLDI

SEQ ID NO: 160322 - protein, 258 aa, Zea Mays
MRRAVTPSSHISSADDPKASTFAVDDWVITVREVFGPVPTHEESMAATLDLKDAFEITMEASEAIMICPRNEWPKKYVVYGMSKKEDNNENLVVSSGTSGRVVQAFTLLQESPEAQVVVASLASDKNVWDAVMKNEKVIKFYKTYESKLSKCSSVASSVSGHEVEDGEAASLQSNTYLPQSAGESVKDYLEKMKALVSEMMANLSNIMQDLVATSDEGRSKGEIKTLTTSSCKDFSNAPSAFVLLAVASIMVVLLKRV

SEQ ID NO: 160323 - protein, 226 aa, Zea Mays
MWMHIDDANYTKASVGVAVSDSPTGPFTYLYSKRPHDCESRDMTIFKDDDGKAYLIYSSEDNSELHIGPLTDDYLDVTDVMRRLLIAQHREAPALFKHEGTYYMVTSGCTGWAPNTALAHAATSVMGPWETLGNPCVGGNEVFRSTTFFSQSTFVLPVPGLPGSFIFMADRWNPSDLRDSRYVWLPLTIGGVPDEAADYSFMFPLWSRVSIYWHKRWRLPEEWRDS

SEQ ID NO: 160324 - protein, 234 aa, Zea Mays
MAVGKNKRISKGKKGGKKKTVDPFSKKDWYDIKAPSVFSVRNIGKTLVSRTQGTRIASDGLKHRVFEVCLADLQGDEDQAYRKIRLRAEDVQGRNVLTNFWGMNFTTDKLRSLVKKWQTLIEAHVDVKTTDNYMLRLFCIGFTKRRPNQVKRTCYAQASQIRQIHRKMDEIMINQASTCDLKELVSKFIPEVIGKKIEKSTSSIFPLQNVFIRKVKILMAPKFDLGKLMERTLV

SEQ ID NO: 160325 - protein, 162 aa, Zea Mays
MGNCQAAETATVLIQHPGGGRTERAYWALSAGAVMAANPGHYVAAVITVPQPGGAGDDGAASASAAAPVKHLKLLRPDDTLLLGRVYRLVSFEGTTARAARVVHGHGTGSERAYVRGRVRPPVTSRVRIWFGPECYCFTVAAGQLFRLAPSFSHVAFCCRSN

SEQ ID NO: 160326 - protein, 151 aa, Zea Mays
MVYQRSGYTLRTSGCALYARSRCGHFREGTRKRCGKRGKGERSAHVSLHHTAWPTRRSGSPSQSTVNGHRPPENADDDGVEDERAAVPSPERCEVLVSAIAGVLASTLREHDERVAIIVRLHDGDVAATDRLNGGGQSSNPVKKLDAPNTT

SEQ ID NO: 160327 - protein, 449 aa, Zea Mays
MASARGNNKGGSYNEYEQQKLENIERNKRRLEEFNIPAIINSLGQQQNRSRKTSKKVQNRNIVSTERPNLRPRLQRNNCQFDEEHVLADLEPVGDFLSNNEDLQIGDQSNGTVRKKGRGITKKDDIFSRTPDMPKLKISLNDYGQPIGENARQLSSVIGCQVRKKISIACVDWRLVDVKKKYELWTEIKSYFDIDDAALNWVTRTAGRKWKEFKANIKELYFDPELTIDDVGECPDKRISDDDWKFLYNYWKTSEFQTLSKVGKANRQKLQLHHTTGSAKLKDLIEIYPELKERTIQEGDAYAILCGLKEPKGYVRLMGLGPTPQDVGTPGLKCYAPTRLQMEVMARKKAESDRDALEQRVFELQAQMEQRAQQDRDARLNETGDAGLDEGEEDYVSEDDVDDNLHDQVHGLTSSRTTAHKKEPHQGVMKLLALNMMLLLEKMSYYMPC

SEQ ID NO: 160328 - protein, 667 aa, Zea Mays
MEVEATPTTAVSSSGVAAQLPPPGPPAKKKRALPGMPDPDAEVIALSPKTLLATNRFVCEICNKGFQRDQNLQLHRRGHNLPWKLRQRSGKEVRKRVYVCPEPSCVHHDPSRALGDLTGIKKHFCRKHGEKKWKCDKCSKKYAVQSDWKAHVKTCGSREYRCDCGTLFSRRDSFITHRAFCDALAEESAKARAEAPSAEDGSSAAAVVPPPAPPPAPAPLRQQPPPPAPHHAEPRNETDTNATEAVQFAPPPPPPPPPPPPPPPQLQVPVLSQASVSAAANVGASSSSSSVAGTSQSLLGGMFAPSSMASAPQYADLGGRPERAHPAKPPPLCLATDASSSIFSAAPAVTAERQQFAPPPPSPSPSAHMSATALLQKAAQMGATSSSSSFLRGLGLDVSSSSPGASSSGQQHQHQEAMRVSLPDASLQQWPPRLELEPAPMLSAGLGLGLPYDSTGAQVSLPELMMGQSSLFSGKPATLDFLGLGMSPSGASAGRGLPAFVQPIGGMAGTGAGAAETFGAGRGAQATPWERNPTRYEETHSLSYKNAALHLLPPESRRLPLSLPDCFLALVVLPPLPRHLSARHSGNAKVDRENKWDWLQPGTISQQVAMNIHQACCLLNGFQGSVSSAQSLRVVVQAFLHYSYQCRLCGARLSPVFFLPPVVGSIV

SEQ ID NO: 160329 - protein, 132 aa, Zea Mays
MASQTSLVVNARVSEVDVALVVEVEVEVVGEVEAHALGLRCEQRGQPGLAADFEQAEVGVGDVQVPSLIETEPERAVADMLAGRYSSGEAFGPPWSSCVQHGKAIANGTHRSPSQKTTRPSATPVYGPAGRR

SEQ ID NO: 160330 - protein, 474 aa, Zea Mays
MSGAQLFMKQDLKITDTQIEILAGIINIYSLVGSLAAGRTSDWLGRRYTMVLAAAIFFAGALIMGLAPSYTILMLGRFVAGVGVGYALMIAPVYTAEVSPTSARGLLTSFPEVFINTGVLLGYVSNYAFHGLPVHLSWRVMFLVGAVPPIFLALGVLAMPESPRWLVMQGRIGDARRVLAKTSNSPAEAEERLADIKNAIGIPDGVGDNDDDVVVVARRNKGSHGEGVWRDLLIRPTPPVRRILIACLGLQFFQQASGIDSVVLYSPRVFEKAGLRSNNNSLGATMAVGATKTLFILVATFFLDRVGRRPLLLTSAGGMVVSLVTLASALRAIDRLPEGQATSLAGVSIAAVLTFVASFSIGMGPIAWVYSSEIFPLRLRAQGCALGTAMNRVMSGTITMSFISLYKAITFAGSFYLYAGIAAAGWLFMFFFLPETRGSNLEDTEKLFGGGDHDEDKEDGHDAQKSTELSSSQQ

SEQ ID NO: 160331 - protein, 480 aa, Zea Mays
MSGAQLFMKEDLKITDTQIEILAGVINIYSLFGSLAAGLTSDWLGRRYTMVLAAAIFFTGALLMGFAPGYGFLMVGRFVAGIGVGFALMIAPVYTAEVAPTSARGFLTSFPEVFNNFGILLGYVSNFAFARLPVHLSWRAMFLVGAVPPVFLGVAVLAMPESPRWLVMRGRIDDARRVLQKTSDSPAEAEERLLDIKKVVGIPEGVSDADDVAAIVRASGKGSSSSRHDGVWKELLINPSRPVRRMLMAGLGLMFIQQATGVDCVVMYSPRVFERAGIKSKTNSLGASMAVGACKTFFIPISTLLLDRIGRRPLLLASGGGMAIFLFTLATSLHMMDRRPEGEATALGAVSIAAMLSFVASFASGLGPVAWVYCSEIYPLRLRAQAAAIGTGLNRIMSGATTMSFLSLSNTITISGSFYLYACIAAAGWVFMYFFLPETMGKSLEDTVKLFGKDADDEDVSDIRRHVPTKKPSTELSAQH

SEQ ID NO: 160332 - protein, 205 aa, Zea Mays
MNHGGGADNGVSPGNVPVCYYGAAGRVPAALERRVRAAELFMRCAACGLAVLAAALLGADRQTRTFFSVEKAARFTDMQSLVFLVIANGMAACYSLLQGGRCLVSILTGGGVLINRPMAWAIFSCDQASISIIIIIVAVSLYAFSWSLSLCSCMHVCLFVIVEWLVNCSAIASSNKFRGRGSTQPDAKNTCDQNKRCWTALTFKQ

SEQ ID NO: 160333 - protein, 437 aa, Zea Mays
MPANMISKILEKSSVLPLVDDVIAPIHVKTAGGAPRTSVLRNPNMEKLQKGYLFPEISIKREAHLKKYPDAKVISLGIGDTTEPIPSVVTSAMAENLRKVIAEEVYPDMGIQESEVFISDGAQCDIARLQTLFGPNVTIAVQDPTFPGYVDNGVIVGQTGSADEAGKYAGIAYMRCAPENHFFPDLSRVPRTDVIFFCSPNNPTGHAASAAQLRELVDFARRNGSIIVFDTAYAWYVSSSSEAAGDGDKTKPRSIYEVPGAREVAIEISSFSKFAGFTGVRLGWAVVPDELRYADGSPVARDFDRIVCTCFNGASSVAQAGGLACLSTEEGRDAVRRVVGVYKENARVLVDTFASLGKEVYGGTDSPYVWVRFPGRRSWDVFAEILDKTHVITVPGSGFGPGGEGFIRVSAFNSRDRVLEAAARLKKFLPGLSAVPL

SEQ ID NO: 160334 - protein, 77 aa, Zea Mays
MHIHASYLHRRMQLRSACLNKYSEKFIKFCDLVLCTVVLAFAFSFFGRTLPYPSRLQLLIQEHTESLHDETAVSVRT

SEQ ID NO: 160335 - protein, 88 aa, Zea Mays
MPSSNSLLIAYWIIASLNSFMLLYIYVTKPHNWIFHIKHYNVIVNVLAFYSCPCITIIVLPTITIGSTHHLICQAQCIIHHFHVNNFL

SEQ ID NO: 160336 - protein, 637 aa, Zea Mays
MSRPNTRNKNKRPRADESNSPSVAVFKKIHSTGDISKSDICQLYMVWKPLCHGCHGNSKDSPNCFCGLIPIGNGVRKSGLWQKTQEIIRGLGPNPSSDLRDSSETPAGLTNLGATCYANSILQCLYMNTSFRSGIFSLDLDVLKKHPVLDQLVRLFAQLQSSKMAFIDSTPFIKALELDNGVQQDSHEFLTLFLSLLEQSLSHSKVPGTREIVQHLFRGSVSHVTRCSSCGKDSAASSKSEDFYELELNIKGFNNLEESLDDYFSEEGLVGENQYFCESCQKRVDATRCIKLRSLPPVVNFQLKRYVFLPKTTTKKKISSSFSFPGQLDMGKRLSNPTSSYTYELAAILIHKGTAANSGHYVAHIKDESNGQWWEFDDETVSKLGLHPFGENLGKTSNKDDRKPQGISIEGSVTNNNNGHQEAASSSSPGEMFSSTDAYMLMYKCTNKDGNATESNKIMEFNNSLLPHHFLDEINEQNASCMKSCEEYQSKKGSHLAYITERRQEVKSILIEAPANPEDNSYFWISTDWLRQWADNITPPLSIDNGPIQCEHGKVPVSKLTSMKRLSAAAWQKLFSKYGGGPTLSGDDFCMVCLKDGAKNAVSADVYRDRKESFKNLAEAALAGSCSDSPSYFISKA

SEQ ID NO: 160337 - protein, 511 aa, Zea Mays
MKRLSAAAWQKLFSKYGGGPTLSGDDFCMVCLKDGAKNAVSADVYRDRKESFKNLAEAALAGSCSDSPSYFISKAWLTHWLRRKNAGILSDADNGPTSALRCRHGYLLPEHAPGAKRVSVPESLWLFLYQTISEKVDDVVTFPSDCQPCKICSQELSDVASVEGNLRAVKLEQRYKHEKLISGKSFALRPGEKYYLVPSSWLSEWRAYITTTGKNISSLPEPQSLEAVVSSLICEKHSRLLQKPLDLVCKRGSITQKTSNNDGLTIIPEYDWKLFSEEWSATPGKGISAEIAFSKDAQDKVHGSSEAMPITDGNLDQSLYGANDDFGAREPYVRTDPEVCEECVGERESCALVQKLNYQNEDIHVYFVRGKAPPKSIKEASKDVPVSDRRISKRSRRTSSGNSISLKVSGSTSVYQLKLMIWESLGIVKENQKLHKGNVEIEGDLATLADKSIFPGDVLWVRDSEIFENRDIADEISEQKGDILQVEEGFRGTLLTSSVSAQLCQGITFSE

SEQ ID NO: 160338 - protein, 479 aa, Zea Mays
MIELSRTQDEEVGDGTTSVIVLAGEMLHVAQAFIDKNYHPTVICRAYTKALDDAIAVLDKIAMAVDVNDRGAMLGLVKSSIGTKFTGQFGDLIADLAIDATTTAGVDLGQGMREVDIKKYIKVEKVPGGQLEDSRVLKGVMINKDVVAPGKMRRKIVNPRIILLDCPVEYKKGENQTNAELMKEEDWQVLLEMEEEYIKNLCGQILKFKPDLVITEKGLSDLAIHYLSKAGVSAIRRLRKTDNNRIAKACGAVIVNRPEELQESDVGTRAGLFEVKKIGDEFFSFIVDCKDPKACTVLLRGASKDVLNEVERNLQDAMSVARNILKNPKLLPGGGATELTVSATLKQKSSSVEGVEKWPYEAAALAFEAIPRTLAQNCGLNVIRIMTQLQGKHANGENAWVGIDGRTGDIVDMKERKIWDSYSVKAQTFKTAIEAACMLLRIDDIVSGIKKKQAPGASAPKQPQIETEGDADNEQMIPE

SEQ ID NO: 160339 - protein, 542 aa, Zea Mays
MALHAPVLVLKDSLKRESGAKVHQANIQAAKAVADIIRTTLGPRSMLKMLLDASGGIVVTNDGNAILREIDIAHPAAKSMIELSRTQDEEVGDGTTSVIVLAGEMLHVAQAFIDKNYHPTVICRAYTKALDDAIAVLDKIAMAVDVNDRGAMLGLVKSSIGTKFTGQFGDLIAGMREVDIKKYIKVEKVPGGQLEDSRVLKGVMINKDVVAPGKMRRKIVNPRIILLDCPVEYKKGENQTNAELMKEEDWQVLLEMEEEYIKNLCGQILKFKPDLVITEKGLSDLAIHYLSKAGVSAIRRLRKTDNNRIAKACGAVIVNRPEELQESDVGTRAGLFEVKKIGDEFFSFIVDCKDPKACTVLLRGASKDVLNEVERNLQDAMSVARNILKNPKLLPGGGATELTVSATLKQKSSSVEGVEKWPYEAAALAFEAIPRTLAQNCGLNVIRIMTQLQGKHANGENAWVGIDGRTGDIVDMKERKIWDSYSVKAQTFKTAIEAACMLLRIDDIVSGIKKKQAPGASAPKQPQIETEGDADNEQMIPE

SEQ ID NO: 160340 - protein, 54 aa, Zea Mays
MNSCRLLPCFKNLLDVACMHTQHIRQSNLSFLLFQIFSNLTFKNPLLFQYHRSL

SEQ ID NO: 160341 - protein, 305 aa, Zea Mays
MGVRFSGVGKGGRGGRQGSAIPPQESRPIGIAEMNSSGEYDAAFAATIAAAAFAIAAREDKLAAQKNSVPIEEVTPSLSPVNRAEGTKKPAGGNKIARWFSGKEPIEHDDDDEGPVNVSVRRPLKPAPGKPEDVPADHHKVAPRMLETSLGVRKGSGSSSRSAERKWSKEFEQEQAVQKAPSAVRPATSYRSGRNGEGAAGVAATGGTGSKADEWEKAKLGRVREEYEKMMETIAEWETEKKTELDRKREKALEEYNLEMTRISKISGGARAMAEERKYNDRKKIREKARKMRSTGKPPRTCACF

SEQ ID NO: 160342 - protein, 449 aa, Zea Mays
MQLRISPSMRSITISSSNGVVDSMKVRVAPQPPPPPPPLHGAARRGGGGGGGWYWRAVAFPLVVALGCLLPFAFILAAVPALEAGGSKCSSVDCLGRRIGPSFLGRQGGDSTRLVQDLYRTFDQVNNEESPSDEKLPESFRDFLLEMKDNHYDARTFAVRLKATMENMDKEVKRSRLAEQLYKHYAATAIPKGIHCLSLRLTDEYSSNAHARKQLPPPELLPLLSDNSFQHYILASDNILAASVVVSSTLFPNLNKVVFLDDDIVVQRDLSPLWAINLEGKVNGAVETCRGEDSWVMSKRFRTYFNFSHPVIARSLDPDECAWAYGMNIFDLAVWRKTNIRDTYHFWLKENLKSGLTLWKFGTLPPALIAFRGHVHGIDPSWHLLGLGYQDKTDIESVRRAAVIHYNGQCKPWLDIAFKNLQPFWTNHVNYSNDFVRNCHILEPERVKE

SEQ ID NO: 160343 - protein, 481 aa, Zea Mays
MQLRISPSMRSITISSSNGVVDSMKVRVAPQPPPPPPPLHGAARRGGGGGGGWYWRAVAFPLVVALGCLLPFAFILAAVPALEAGGSKCSSVDCLGRRIGPSFLGRQGGDSTRLVQDLYRTFDQVNNEESPSDEKLPESFRDFLLEMKDNHYDARTFAVRLKATMENMDKEVKRSRLAEQLYKHYAATAIPKGIHCLSLRLTDEYSSNAHARKQLPPPELLPLLSDNSFQHYILASDNILAASVVVSSTVRSSSVPEKVVFHVITDKKTYPGMHSWFALNSVSPAIVEVKGVHQFDWLTRENVPVLEAIESHRGVRNHYHGDHGTVSSASDNPRMLASKLQARSPKYISLLNHLRIYLPELFPNLNKVVFLDDDIVVQRDLSPLWAINLEGKVNGAVETCRGEDSWVMSKRFRTYFNFSHPVIARSLDPDECAWAYGMNIFDLAVWRKTNIRDTYHFWLKEVMHFTPTYPFPSLTRCSIVR

SEQ ID NO: 160344 - protein, 404 aa, Zea Mays
MQLRISPSMRSITISSSNGVVDSMKVRVAPQPPPPPPPLHGAARRGGGGGGGWYWRAVAFPLVVALGCLLPFAFILAAVPALEAGGSKCSSVDCLGRRIGPSFLGRQGGDSTRLVQDLYRTFDQVNNEESPSDEKLPESFRDFLLEMKDNHYDARTFAVRLKATMENMDKEVKRSRLAEQLYKHYAATAIPKGIHCLSLRLTDEYSSNAHARKQLPPPELLPLLSDNSFQHYILASDNILAASVVVSSTVRSSSVPEKVVFHVITDKKTYPGMHSWFALNSVSPAIVEVKGVHQFDWLTRENVPVLEAIESHRGVRNHYHGDHGTVSSASDNPRMLASKLQARSPKYISLLNHLRIYLPEVPCHWLPICSTSVFTGLFKHFILMCQPDSIVMLLAYLYDGHYVI

SEQ ID NO: 160345 - protein, 338 aa, Zea Mays
MAAASFARALCLHMLLLFLVVGSARCKTVKRDVKALNEIKSSLGWRVVYSWVGDDPCGHGDLPPWSGVTCSQQGDYRVVTELEVYAVSIVGPFPTAVTNLLDLRRLDLHNNKLTGPIPPQIGRLKHLRILNLRWNKLQDVLPPEIGELKKLTHLYLSFNNFKGEIPVELANLPELRYLYLHENRFTGRIPPELGTLKNLRHLDVGNNHLTGTLRDFIGNGNGFPSLRNLYLNNNELTGVLPDQIANLTNLEILHLSNNKMIGSISPKLVHIPRLIYLYLDNNNFIGRIPEGLYRHPFLKELYIEGNHFRPGTRSKGTHKELDASLKTHVRMCRIDDVA

SEQ ID NO: 160346 - protein, 282 aa, Zea Mays
MAFRRILSTAVRRRSAVAAAAAGNAREASTAVAAAPGVLAPDATAVRAPVMPYDRIADAVNARLRRLEHPDPRFLRYASPVPSHADHMAILAAPETRVTTLPNGLRIATESSLAARTATVGVWIDAGSRYENEEAVGVAHFVEHMLFKGTGKRSAAQLELEIEDMGGHLNAYTSREQTTYYAKVLDKDVPRAMEVLSDILQNSNLDQARIEREREVILREMGEVEGQSEEVIFDHLHATAFQYTSLGRPILGSAENVKSITKEDLENYIATHYTAPRMLQAM

SEQ ID NO: 160347 - protein, 488 aa, Zea Mays
MAFRRILSTAVRRRSAVAAAAAGNAREASTAVAAAPGVLAPDATAVRAPVMPYDRIADAVNARLRRLEHPDPRFLRYASPVPSHADHMAILAAPETRVTTLPNGLRIATESSLAARTATVGVWIDAGSRYENEEAVGVAHFVEHMLFKGTGKRSAAQLELEIEDMGGHLNAYTSREQTTYYAKVLDKDVPRAMEVLSDILQNSNLDQARIEREREVILREMGEVEGQSEEVIFDHLHATAFQYTSLGRPILGSAENVKSITKEDLENYIATHYTAPRMVITAAGNVKHEDIVEQAKKLFNKLSTDPTTTNMLVAKQPASFTGSESAGGGKHMGSELVQKAAINDIAESVMSFNMNYKDTGLFGVYAVAKADCLDDLAFAIMHEMSKLSYRVTEEDVIRARNQLKSSIQLHLDGSTAVVEDIGRQLLTYGRRIPTPELFARIDAVDASTVKRVANRFIFDQDVAIAAMGPIQGLPDYNWFRRRTYMLRY

SEQ ID NO: 160348 - protein, 499 aa, Zea Mays
MSTAAATKTPTKPLAAAARTPTKPQPPAVAKTPCLSRARPSHASENSNPNIPGTPPPPQSTPSKPVLKSPPPAGARSATARKKPSTPAPPPERERRFLVAKKGARRRRNVATVGGGGGEIDFDKCREAAREALRASQGDFFRKELAASTATGEEQLGQEAEEVKQVAEEGVEGGALEERPEEGTDAELEGSSKVRAMRSKAMAKTVTSVPEPGSGRVKNMVQAFESLLNISERSGDGSRALPGLQLWKEESESNLGFPPLSVFSSADFQNAGSDRLCSSLDGNTVRLTWDSRTSAGEGRSRRNSSESIRSRTSAGERRSRRNSSESLRSSWNKKLKVTSQHPFKLRTEQRGKFKEQQFVQKVQEMLVEEENKRIHIAQGLPWTTDEPEPAVKERTEPVDLVLHSDVRALERAEFDQHVLERNKFAEQQRLEWERQQELEEEERIRQLRRTELVPKAQPMPYFDRPFIPKRSTKPATVPMEPKFHLRPEKISCNVWSLES

SEQ ID NO: 160349 - protein, 225 aa, Zea Mays
MSVPMYNKQNSLGTPPPHKTNPFSDSEGPSRAQSVPVRRTNQSVQELEDYAITKARETTHKVNDCVRAAEAIREDATQTMLTLHRQGEQIMRSHQVAADIEQDLTVSEKLLGSLGGLFSKSWRPKRNHQIKGPVSGNNYSATTANDTEQRGKLGIAPARQEYPSHVQTTPVSAMEKVQAERTKQDDALSDLCSTLGQLKEMAVDMGTEIDRLKGANQRGRRLLGK

SEQ ID NO: 160350 - protein, 468 aa, Zea Mays
MEGRRRQKEYEGAVKTDGRGQTIWDTFAHTFGKISDFSNADVAVDQYHRFEEDVQLMADMGMDAYRFSIAWSRILPNGTGQVNQAGIDHYNKVINALLSKGIQPYVTLYHWDLPQALEDRYNGWLDRQIVNDFAAYAETCFKAFGDRVKHWITLNEPHTVAVQGYDAGLHAPGRCSVLLHLYCRTGNSGTEPYIVAHNFILAHATVSDMYRRKYKAAQNGELGIAFDVIWYEPMTNSTIDIEATKRAQEFQLGWFADPFFFGDYPATMRARVGERLPKFTADEAALVKGALDFMGINHYTTFYTRHNDTNIIGRLLNDTLADTGTISLPFDKNGKPIGDRANSIWLYIVPSGIRKLMNYVKERYNSPTVYITENGMDDGNSPFTSLQNALKDSKRIKYHNGYLNNVAASIKEDGCDVRGYFAWSLLDNWEWAAGYTSRFGLYFVDYKDNLKRHPKNSVQWFKTLLSSS

SEQ ID NO: 160351 - protein, 235 aa, Zea Mays
MTNSTIDIEATKRAQEFQLGWFADPFFFGDYPATMRARVGERLPKFTADEAALVKGALDFMGINHYTTFYTRHNDTNIIGRLLNDTLADTGTISLPFDKNGKPIGDRANSIWLYIVPSGIRKLMNYVKERYNSPTVYITENGMDDGNSPFTSLQNALKDSKRIKYHNGYLNNVAASIKEDGCDVRGYFAWSLLDNWEWAAGYTSRFGLYFVDYKDNLKRHPKNSVQWFKTLLSSS

SEQ ID NO: 160352 - protein, 212 aa, Zea Mays
MKQRMQIQGTQKSWASAVAKGNISQTHGIEMYGYYNGMFHAGCSIWRDHGLKGLYAGYWSTLARDVPFAGLMVTFYEAMKKMSEYGKTKYLPHSDLHVSNSFEGLVLGGLAGGCSAYLTTPLDVIKTRLQVQGSTSRYNGWLDAITKTWTSEGVRGLFKGSVPRIIWYVPASAFTFMAVEFLRDHFNDKVDADAHEVTSLSMDTKSEVEKSA

SEQ ID NO: 160353 - protein, 255 aa, Zea Mays
MSMKRHFAIFTTASLPWMTGTSINPLFRAAYLAKDGDKDVTLVIPWLCLRDQELVYPNNIVFDSPSEQESYVRHWIEERIDFRPSFSIKFYPGKFSKEMRSILPVGDITECIPDEVADVAVLEEPEHLNWYHHGRRWKNKFRRVIGIVHTNYLAYVRREKNGQVIACFLKYANTWVTRIYCHKIIRLSGATQNLPRMGRKPSQRGHTTSGRWYGVRDTGSFLICCPNIRASWLVLKWIYMAAEKILMRSVNLPNV

SEQ ID NO: 160354 - protein, 274 aa, Zea Mays
MSMKRHFAIFTTASLPWMTGTSINPLFRAAYLAKDGDKDVTLVIPWLCLRDQELVYPNNIVFDSPSEQESYVRHWIEERIDFRPSFSIKFYPGKFSKEMRSILPVGDITECIPDEVADVAVLEEPEHLNWYHHGRRWKNKFRRVIGIVHTNYLAYVRREKNGQVIACFLKYANTWVTRIYCHKIIRLSGATQNLPRSVICNVHGVNPKFLEVGKLKLRQLQNGEKAFTKGAYYIGKMVWSKGYRELLDLLSKYQSKLVGLEVDLYGSGEDSDEV

SEQ ID NO: 160355 - protein, 776 aa, Zea Mays
MDMDGDEDSPSKQPLTPETSLPVTVECTGNVNVSKFSDVSTEDNAKTADATEDNAKTAHATEDGGSTFQLIQGYGSDDSANEADAGPGSANTLVTLPEDNLHGHLSDSNTEFDYQKHVNAKGNVNTPHGTEQNGKAENYHLKVESNPVKHGTDVLGHLAKEDTSGSEIEGGQSSKRHGRIQKKRTRSISPQGRSGSPVGANKSSPSQSSSPGKQSRPPFAKRLHSADDGNDSEGRVVQQEGLSLTSKLDSSSNDLIGKVGDAAAVGVALGQHCHSDNLISEHSQLMAAGATHKMQMPCPPSESLSDLNVSSSAGGPILTNQPAAGVPYVSVETTKSSMTSKHLQSHPQSLSPPEHMPSSNMIQLPGQPSFATSEFPQMQFHHKVVAPANEFLQNQMRSYPPQDVSHPRPFDFHHHTLPPAVPSNQQPSTIPVENAPVPHHNRWPEYSGGVGLSYSSHRPPYGQHQPPGNLDSGSNLVYPSFQRYPSNLPVSNNIGPLSDADLTKSSIKPHYNPFASTFDKTDPSLDIGPPVSPNAVGSVSTTAEHMNTLSPFGRSRAHAHGNSAEPVPNRQKLLHQEFASGAPYDPLVDSIEPSSSSINKVDLRKEKNWSAADRRDASKFMNLEVDSENMHGLGVVAESEVEGLGEVAADTETGVVENASPEFLGGKDWNSDIPVDFDNDQTLDKNKKGKDSRSMKLFKSAIADFVKEVLKPSWRQGNMSKEAFKTIVRKTVDKVSGSVPSSHIPKTPAKIKHYVQSSQRKVTKLVMGYVDKYVKP

SEQ ID NO: 160356 - protein, 254 aa, Zea Mays
MGRGKVELKRIENKISRQVTFAKRRNGLLKKAYELSLLCDAEVALIIFSGRGRLFEFSSSSCMYKTLERYRSSNYSQEVKTPLDTEIKYQDYLKLRTRVEFLQTTQRNILGEDLGPLSMKELEQLEDQIEISLKHISSRKNQMLLDQLFDLKSKEQELLDLNKDLRKQVMQWPPNISVYTYLQETRPENALRVSWEEGGHSGASGNVLDPYQGLLQHLDNDPSLQFGYHHQAYMDQLNNEDLVDPNEHGRSGWI

SEQ ID NO: 160357 - protein, 93 aa, Zea Mays
MGRGKVELKRIENKISRQVTFAKRRNGLLKKAYELSLLCDAEVALIIFSGRGRLFEFSSSSCMYKTLERYRSSNYSQEVKTPLDTEVDLFFAS

SEQ ID NO: 160358 - protein, 99 aa, Zea Mays
MVLKIISVTVRTIQKDAEEKKASFNPRPYFRLFINWLYDLTTTDGHHDGSNFQVLTAFANAFHLLQPLRVPAWRSVHHFGLLMNLPFYVGVFNYCVIFT

SEQ ID NO: 160359 - protein, 115 aa, Zea Mays
MVLKYSSVEITPNKGSILSKIISVTVRTIQKDAEEKKASFNPRPYFRLFINWLYDLTTTDGHHDGSNFQVLTAFANAFHLLQPLRVPAWRSVHHFGLLMNLPFYVGVFNYCVIFT

SEQ ID NO: 160360 - protein, 330 aa, Zea Mays
MAECVNSCIPTECAADPSGRQGRCEKRYVPSVTSALIVGSILGLLQAVFLVLSARFVLNIMGVKSGSPMQGPAVRYLTIRSLGAPAVLLSLAMQGVFRGFKDTKTPLYATVVGDAANIILDPILMFVCHMGVTGAAIAHVVSQYMITLILLCRLVQRVHVIPPSIKSLKFGRFLGCGFLLLARVVAVTFCVTLAASLAARHGPTVMAGFQICCQLWLATSLLADGLAVAGQAVLASAFAKNDSKKVAAATSRVLQLSIVLGMGLTVVLGLAMRFGAGIFTSDVPVIQVIHRGIPFVAGTQTINSLAFVFDGINFGASDYRYSAYSMEEEA

SEQ ID NO: 160361 - protein, 88 aa, Zea Mays
MYTIILQSVRKLLVKSCIDLYHWLPAAISLYVKLLDLYMLCFLWSREANTSQPFVSAFCPVFTWSSRILVCVMTKWQAQSWYCCLVSN

SEQ ID NO: 160362 - protein, 139 aa, Zea Mays
MAGKAGGLKGVALIGGSANSTVAGVIHFFEDPSTRYTEVRGKVTGLTPGRHGFHIHVFGDTTNGCNSTGPHFNPHNKPHGAPFDDERHLGDLGNIVANEDGDAEVFIRDLQISLSGPHSILGRAVVVHADPDDLGRGQN

SEQ ID NO: 160363 - protein, 154 aa, Zea Mays
MAGKAGGLKGVALIGGSANSTVAGVIHFFEDPSTRYTEVRGKVTGLTPGRHGFHIHVFGDTTNGCNSTGPHFNPHNKPHGAPFDDERHLGDLGNIVANEDGDAEVFIRDLQISLSGPHSILGRAVVVHADPDDLGRAHFRFLNSCSSVEASSYV

SEQ ID NO: 160364 - protein, 435 aa, Zea Mays
MKNDVMLKRVAAFSKRLLQVALQRPPQYACGCLFILSEVLKAKPPLWGIVLQNESVDDGDEHFEDILEIPEDSSVASAVLHKHNEKVAAHEKHNLDAADGIDSVKQVNLVDENNASTDSSRQHAFYDPRHREPSYCNADRVSWWELTVLASHVHPSVSTMARTLLSGNNIVYSGDPLTDLSLPAFLDKFMEKKPKGNRIAEGRWHGGSQIAPAKKLNLNHHLIGEELLELAENEVPPEDIVFHRFYLNKTGTVKRKTKQKDSVLDEDAGELLADNDADEASDESGDEILDLGDGLADDGEYDYDDLDSNAFEEEKDLLRDDSDVEFDDVSDDTASGDEGSENDDDIPILAGDSDGNLSDDEMVDAGKGGVSYTKKRRAGKKSGLSPFASLDDYEHLMVGDADATTAKRKHMATGRAGGEKKPKLRPRKKRSRSSE

SEQ ID NO: 160365 - protein, 581 aa, Zea Mays
MSSGDTKGDTYSKDSKKKVGKIEGGNNKMDSRSKGNNEVGSTAGSDLELDSRILSALLTGVNRALPYVASSEVDDIVEVQTPILFRLVHAENFNVGVQALMLLFQISIKNNIASDRLYRALYSKLLSPSAVTSSKPELFLGLLVKAMKNDVMLKRVAAFSKRLLQVALQRPPQYACGCLFILSEVLKAKPPLWGIVLQNESVDDGDEHFEDILEIPEDSSVASAVLHKHNEKVAAHEKHNLDAADGIDSVKQVNLVDENNASTDSSRQHAFYDPRHREPSYCNADRVSWWELTVLASHVHPSVSTMARTLLSGNNIVYSGDPLTDLSLPAFLDKFMEKKPKGNRIAEGRWHGGSQIAPAKKLNLNHHLIGEELLELAENEVPPEDIVFHRFYLNKTGTVKRKTKQKDSVLDEDAGELLADNDADEASDESGDEILDLGDGLADDGEYDYDDLDSNAFEEEKDLLRDDSDVEFDDVSDDTASGDEGSENDDDIPILAGDSDGNLSDDEMVDAGKGGVSYTKKRRAGKKSGLSPFASLDDYEHLMVGDADATTAKRKHMATGRAGGEKKPKLRPRKKRSRSSE

SEQ ID NO: 160366 - protein, 635 aa, Zea Mays
MRWILFSSDHMLDLGPSTRLYVNFLSQILLTNKGDGPKIAKRLVDVYIALFKVLMSSGDTKGDTYSKDSKKKVGKIEGGNNKMDSRSKGNNEVGSTAGSDLELDSRILSALLTGVNRALPYVASSEVDDIVEVQTPILFRLVHAENFNVGVQALMLLFQISIKNNIASDRLYRALYSKLLSPSAVTSSKPELFLGLLVKAMKNDVMLKRVAAFSKRLLQVALQRPPQYACGCLFILSEVLKAKPPLWGIVLQNESVDDGDEHFEDILEIPEDSSVASAVLHKHNEKVAAHEKHNLDAADGIDSVKQVNLVDENNASTDSSRQHAFYDPRHREPSYCNADRVSWWELTVLASHVHPSVSTMARTLLSGNNIVYSGDPLTDLSLPAFLDKFMEKKPKGNRIAEGRWHGGSQIAPAKKLNLNHHLIGEELLELAENEVPPEDIVFHRFYLNKTGTVKRKTKQKDSVLDEDAGELLADNDADEASDESGDEILDLGDGLADDGEYDYDDLDSNAFEEEKDLLRDDSDVEFDDVSDDTASGDEGSENDDDIPILAGDSDGNLSDDEMVDAGKGGVSYTKKRRAGKKSGLSPFASLDDYEHLMVGDADATTAKRKHMATGRAGGEKKPKLRPRKKRSRSSE

SEQ ID NO: 160367 - protein, 616 aa, Zea Mays
MAEPTPKSKRTKKAKKPSAREGDGEDMDTLKSDVATFASSLGLLPGAGDSNGGFDDSDFRKSGPMYKSSKFPSKQPHQKPDNTANPHLNPRPTKKPHPLELRDSYAATKPGAVNTNYPLMKAAALSGQWYTDADELEARVLGGRKQVPPAVGLQEMQGIVERKRELAEKLMLQYAREYDAVRRGHGDLKLLDISAKSGTSADKVSAFTCLVEDNPIANMKALDSLLGMITSKVGKRYAFTGFDAIKELFLMRLLPDRKLKSLIQRPLDILPETKDGYSLLLFWHWEDCLKQRYERFVMALEDAVKDMLPNLKDKAMKTVFMLLKSKSEQERRLLTALVNKLGDPERRAASSAAYLLTCLLAAHPNMKMVVIDEVDSFLFRPHVGLRAKYQAVNFLSQILLTNKGDGPKIAKRLVDVYIALFKVLMSSGDTKGDTYSKDSKKKVGKIEGGNNKMDSRSKGNNEVGSTAGSDLELDSRILSALLTGVNRALPYVASSEVDDIVEVQTPILFRLVHAENFNVGVQALMLLFQISIKNNIASDRLYRALYSKLLSPSAVTSSKPELFLGLLVKAMKNDVMLKRVAAFSKRLLQVALQRPPQYACGCLFILSEVLKAKPPL

SEQ ID NO: 160368 - protein, 387 aa, Zea Mays
MAEPTPKSKRTKKAKKPSAREGDGEDMDTLKSDVATFASSLGLLPGAGDSNGGFDDSDFRKSGPMYKSSKFPSKQPHQKPDNTANPHLNPRPTKKPHPLELRDSYAATKPGAVNTNYPLMKAAALSGQWYTDADELEARVLGGRKQVPPAVGLQEMQGIVERKRELAEKLMLQYAREYDAVRRGHGDLKLLDISAKSGTSADKVSAFTCLVEDNPIANMKALDSLLGMITSKVGKRYAFTGFDAIKELFLMRLLPDRKLKSLIQRPLDILPETKDGYSLLLFWHWEDCLKQRYERFVMALEDAVKDMLPNLKDKAMKRGVLCLRSIQGAWCLWLHRNRAVFDGASPSLSTIQRLLMDEVECWCMAGAKQIESLGLLAVFLVPNAVKV

SEQ ID NO: 160369 - protein, 857 aa, Zea Mays
MGTPRAGSPASPVTGDHYLDLLVRFVARNAGALLDGTVTLRLHPVGLHYVASRLEALRELEAVGAGAPVDYLRAYVADLGDHRALEQLRRILRLLTSLKVVAPGPRRDPAPLSILPFARLRVLELRGCDLSTSAARGLLELRHTLEKLVCFNSTDALRHVFASRIMDIKDSPVWSKLSYVSCASNGVVLMDESLQLLPATETLDLSRNKFAKVDNLQKCTKLRNLDLGFNHLRSISSLSEVSSRIVKLVVRNNALTTVNGIENLKSLMGLDLSYNIISIFSELEILGTLPLLQNLWLEGNPICCARWYRAHVFSFFRNPENLKLDDKGMNTQEYWEKQVLFACRQNQPAGYGFYFPAIDDHEDEDILNLKMRKFSRLVSIVEEERNLCDGVEQQSTHCDSDSSKKDETAAVDHDLIIASLINTAEMLKKEKSSNWLCEFKEWMDDNTEKTEGDNLSVGLTNGNGKYIKQKKRQKAHKETSNNMSDLVQVSEGGSSSNLLESDSSFTDNAFSGSNGVIKQSSNELNFDQDHLKMHLNSFQRPPPLELVATSQTDPFSELENGSRNMLANGTPSNTMSKLIESSPPHTYSSPQSPPQYKEDILHRRLFMEEEFLQISGHLHSIGSLGSGSSCSDGSSSDFGSCNSEDDYEEIQTKMELSLNGQMVLFPSVNGDDHEANNNLEHFSGENTLSDHPEEGEPSCSDHREFDIEEFHNSNQRNGHLGHYLGHLIGQKGKEKFKWRVFPFKNHNGTKLENPKMNDDQVAEHVLVEGNGQLTCNPSKSTHKEGSKSHSSNILHKNNSSVCTINTGEHNTLEDFFNLEIADKDGFETCEQVACCAHMFQDSSGLVQRNHAKNFGQL

SEQ ID NO: 160370 - protein, 1082 aa, Zea Mays
MGTPRAGSPASPVTGDHYLDLLVRFVARNAGALLDGTVTLRLHPVGLHYVASRLEALRELEAVGAGAPVDYLRAYVADLGDHRALEQLRRILRLLTSLKVVAPGPRRDPAPLSILPFARLRVLELRGCDLSTSAARGLLELRHTLEKLVCFNSTDALRHVFASRIMDIKDSPVWSKLSYVSCASNGVVLMDESLQLLPATETLDLSRNKFAKVDNLQKCTKLRNLDLGFNHLRSISSLSEVSSRIVKLVVRNNALTTVNGIENLKSLMGLDLSYNIISIFSELEILGTLPLLQNLWLEGNPICCARWYRAHVFSFFRNPENLKLDDKGMNTQEYWEKQVLFACRQNQPAGYGFYFPAIDDHEDEDILNLKMRKFSRLVSIVEEERNLCDGVEQQSTHCDSDSSKKDETAAVDHDLIIASLINTAEMLKKEKSSNWLCEFKEWMDDNTEKTEGDNLSVGLTNGNGKYIKQKKRQKAHKETSNNMSDLVQVSEGGSSSNLLESDSSFTDNAFSGSNGVIKQSSNELNFDQDHLKMHLNSFQRPPPLELVATSQTDPFSELENGSRNMLANGTPSNTMSKLIESSPPHTYSSPQSPPQYKEDILHRRLFMEEEFLQISGHLHSIGSLGSGSSCSDGSSSDFGSCNSEDDYEEIQTKMELSLNGQMVLFPSVNGDDHEANNNLEHFSGENTLSDHPEEGHYLGHLIGQKGKEKFKWRVFPFKNHNGTKLENPKMNDDQVAEHVLVEGNGQLTCNPSKSTHKEGSKSHSSNILHKNNSSVCTINTGEHNTLEDFFNLEIADKDGFETCEQVACCAHMFQDSSGLVQREVALLRSSQNKLYLLLLDMVFDGQEIMPRILGSYSLQSLEKVSIGLGLQALRVHMSDDTTHLFITRTSKEAQDVLWLLSVTNFPKLNHKIHFQSWENIQVKLFEKCIIRRTANTGIFLYSMLMFWRNDVEEDSLFIRSIFVIEGSILVCIEDLDQFGGIPYDSNPPYFSLDASCSISNIREVVMDQRNNKCLTLILDNGRPGEFHNSIQNPQNKQSEEIGTVHTWKLKWFSEEASLKFISVIKALSSTAAISSLHVKCIS

SEQ ID NO: 160371 - protein, 1046 aa, Zea Mays
MGTPRAGSPASPVTGDHYLDLLVRFVARNAGALLDGTVTLRLHPVGLHYVASRLEALRELEAVGAGAPVDYLRAYVADLGDHRALEQLRRILRLLTSLKVVAPGPRRDPAPLSILPFARLRVLELRGCDLSTSAARGLLELRHTLEKLVCFNSTDALRHVFASRIMDIKDSPVWSKLSYVSCASNGVVLMDESLQLLPATETLDLSRNKFAKVDNLQKCTKLRNLDLGFNHLRSISSLSEVSSRIVKLVVRNNALTTVNGIENLKSLMGLDLSYNIISIFSELEILGTLPLLQNLWLEGNPICCARWYRAHVFSFFRNPENLKLDDKGMNTQEYWEKQVLFACRQNQPAGYGFYFPAIDDHEDEDILNLKMRKFSRLVSIVEEERNLCDGVEQQSTHCDSDSSKKDETAAVDHDLIIASLINTAEMLKKEKSSNWLCEFKEWMDDNTEKTEGDNLSVGLTNGNGKYIKQKKRQKAHKETSNNMSDLVQVSEGGSSSNLLESDSSFTDNAFSGSNGVIKQSSNELNFDQDHLKMHLNSFQRPPPLELVATSQTDPFSELENGSRNMLANGTPSNTMSKLIESSPPHTYSSPQSPPQYKEDILHRRLFMEEEFLQISGHLHSIGSLGSGSSCSDGSSSDFGSCNSEDDYEEIQTKMELSLNGQMVLFPSVNGDDHEANNNLEHFSGENTLSDHPEEGEPSCSDHREFDIEEFHNSNQRNGHLGHYLGHLIGQKGKEKFKWRVFPFKNHNGTKLENPKMNDDQVAEHVLVEGNGQLTCNPSKSTHKEGSKSHSSNILHKNNSSVCTINTGEHNTLEDFFNLEIADKDGFETCEQVACCAHMFQDSSGLVQREVALLRSSQNKLYLLLLDMVFDGQEIMPRILGSYSLQSLEKVSIGLGLQALRVHMSDDTTHLFITRTSKEAQDVLWLLSVTNFPKLNHKIHFQSWENIQVKLFEKCIIRRTANTGIFLYSMLMFWRNDVEEDSLFIRSIFVIEGSILVCIEDLDQFGGIPYDSNPPYFSLDASCSISNIREVGGSPWKPRLSHTKAYV

SEQ ID NO: 160372 - protein, 305 aa, Zea Mays
MCSQLWRCRGFARFVNVRDDTGATPLHLAARQGWRRCVHVLLENGAIVSASSGAFGFSGSTPLHLAARDGNLDCVRQLLSWGADRLQRDSVGRIPYEVAAKRGHVACAALLNPSSAEPLVWPSALKFISELEPDAKSLLEAALMEANRERERRTLKGAKNALPSPSHPDDGAHGTAIAEGEGRGAEADERKAEEGEGRKKKKKGKSKRKHRSPSDSDSNSSGASVFDSESESWVTGSEYSSGSSSSYSSSDSEGKKRQHRRKQKKRRHRRDNTSSSSSSESESASDSDSDDKGRRRKSKRRAGRC

SEQ ID NO: 160373 - protein, 126 aa, Zea Mays
MEPRSRNAGEGAHLQTHRPDPSPPCRHPVPRRAGARRAPTAARPPRARAPQRIAAESPSPLLLFRTSSRSGRPCFLLRRRLPQYHHVNLQRMSNRGSKNLQKIITTPPPPPPPHKILLVNIEYMYV

SEQ ID NO: 160374 - protein, 63 aa, Zea Mays
MLLKNSSHVNTISICFRFASYHLECVLFWVIITIEPDPSVAWMIILTIKLLQTSKTYKHKMKN

SEQ ID NO: 160375 - protein, 267 aa, Zea Mays
MCDCYTPQGEPIPTNKRYSAAKVFSHPDVAAEVPWYGIEQEYTLLQKDVSWPLGWPVGGYPGPQGPYYCAAGADKAFGRDVVDAHYKACLYAGINISGINGEVMPGQWEFQVGPSVGISAGDEIWVARYILERITEMAGIVLSLDPKPIKGDWNGAGAHTNYSTKSMREAGGYEVIKAAIDKLGKRHKEHIAAYGEGNERRLTGRHETADINTFKWGVANRGASIRVGRDTEREGKGYFEDRRPASNMDPYVVTGMIAETTILWNGN

SEQ ID NO: 160376 - protein, 118 aa, Zea Mays
MQSAAFKILRTRLKTVPFSENIKRTSSANPYSQILQVTEDGNRNQDTQNYSAINFPSLLQQFEHMQLQHRNHLKDQLQSRKSASALTLSQEIQRYEAAHSSSLSEINRPPSRTSKGIL

SEQ ID NO: 160377 - protein, 240 aa, Zea Mays
MVQALNLILLTSTELGELRSLLKKSLVDSCGKDLFQSLYASWRHSPMATISLCLLAQAYSHASCVIQSLGEEDINVKFLVQLDKLIRLLETPVFAYLRLQLLEPGKHTWLLKTLYGLLMLLPQQSAAFKILRTRLKTVPFSENIKRTSSANPYSQILQVTEDGNRNQDTQNYSAINFPSLLQQFEHMQLQHRNHLKDQLQSRKSASALTLSQEIQRYEAAHSSSLSEINRPPSRTSKGIL

SEQ ID NO: 160378 - protein, 455 aa, Zea Mays
MAEILVRRAGSTDEFTRLTSITWINEFVKLGGEQLVPYYADILGAILPCISDEEEKIRVVARETNEELRAIKADPTEGFDIGAILSIAKRELNSEHEATRTEALHWFFTLLDQYRAEFLAYLNDIFDPLLNALSDPSDVVVLLVLEVHARIAEESHHFHHLVSYLICTFHNNHFLLEKRGALIVRRLCVLLGAEKVYREFSTILESEVDLDFASVMVQALNLILLTSTELGELRSLLKKSLVDSCGKDLFQSLYASWRHSPMATISLCLLAQAYSHASCVIQSLGEEDINVKFLVQLDKLIRLLETPVFAYLRLQLLEPGKHTWLLKTLYGLLMLLPQQSAAFKILRTRLKTVPFSENIKRTSSANPYSQILQVTEDGNRNQDTQNYSAINFPSLLQQFEHMQLQHRNHLKDQLQSRKSASALTLSQEIQRYEAAHSSSLSEINRPPSRTSKGIL

SEQ ID NO: 160379 - protein, 645 aa, Zea Mays
MDIVDLEERSMREIAGLYRKFSFDVQIVPPVLNSFLDQDSRVRYYACEALYNIAKVVRGDFIIYFNKIFDALCKLSADSDANVQSAAHLLDRLVKDIVTESDQFSIEEFIPLLRERMNVLNPYVRQFLVGWITVLDSVPDIDMLGFLPDFLDGLFNMLSDSSHEIRQQADAALSEFLQEIKNSPNVDYGRMAEILVRRAGSTDEFTRLTSITWINEFVKLGGEQLVPYYADILGAILPCISDEEEKIRVVARETNEELRAIKADPTEGFDIGAILSIAKRELNSEHEATRTEALHWFFTLLDQYRAEFLAYLNDIFDPLLNALSDPSDVVVLLVLEVHARIAEESHHFHHLVSYLICTFHNNHFLLEKRGALIVRRLCVLLGAEKVYREFSTILESEVDLDFASVMVQALNLILLTSTELGELRSLLKKSLVDSCGKDLFQSLYASWRHSPMATISLCLLAQAYSHASCVIQSLGEEDINVKFLVQLDKLIRLLETPVFAYLRLQLLEPGKHTWLLKTLYGLLMLLPQQSAAFKILRTRLKTVPFSENIKRTSSANPYSQILQVTEDGNRNQDTQNYSAINFPSLLQQFEHMQLQHRNHLKDQLQSRKSASALTLSQEIQRYEAAHSSSLSEINRPPSRTSKGIL

SEQ ID NO: 160380 - protein, 500 aa, Zea Mays
MNVLNPYVRQFLVGWITVLDSVPDIDMLGFLPDFLDGLFNMLSDSSHEIRQQADAALSEFLQEIKNSPINEFVKLGGEQLVPYYADILGAILPCISDEEEKIRVVARETNEELRAIKADPTEGFDIGAILSIAKRELNSEHEATRTEALHWFFTLLDQYRAEFLAYLNDIFDPLLNALSDPSDVVVLLVLEVHARIAEESHHFHHLVSYLICTFHNNHFLLEKRGALIVRRLCVLLGAEKVYREFSTILESEVDLDFASVMVQALNLILLTSTELGELRSLLKKSLVDSCGKDLFQSLYASWRHSPMATISLCLLAQAYSHASCVIQSLGEEDINVKFLVQLDKLIRLLETPVFAYLRLQLLEPGKHTWLLKTLYGLLMLLPQQSAAFKILRTRLKTVPFSENIKRTSSANPYSQILQVTEDGNRNQDTQNYSAINFPSLLQQFEHMQLQHRNHLKDQLQSRKSASALTLSQEIQRYEAAHSSSLSEINRPPSRTSKGIL

SEQ ID NO: 160381 - protein, 474 aa, Zea Mays
MLGFLPDFLDGLFNMLSDSSHEIRQQADAALSEFLQEIKNSPINEFVKLGGEQLVPYYADILGAILPCISDEEEKIRVVARETNEELRAIKADPTEGFDIGAILSIAKRELNSEHEATRTEALHWFFTLLDQYRAEFLAYLNDIFDPLLNALSDPSDVVVLLVLEVHARIAEESHHFHHLVSYLICTFHNNHFLLEKRGALIVRRLCVLLGAEKVYREFSTILESEVDLDFASVMVQALNLILLTSTELGELRSLLKKSLVDSCGKDLFQSLYASWRHSPMATISLCLLAQAYSHASCVIQSLGEEDINVKFLVQLDKLIRLLETPVFAYLRLQLLEPGKHTWLLKTLYGLLMLLPQQSAAFKILRTRLKTVPFSENIKRTSSANPYSQILQVTEDGNRNQDTQNYSAINFPSLLQQFEHMQLQHRNHLKDQLQSRKSASALTLSQEIQRYEAAHSSSLSEINRPPSRTSKGIL

SEQ ID NO: 160382 - protein, 258 aa, Zea Mays
MAADALSIIPGAVLRNLSDKLYEKRKNAALEIEGIVKQLAMAGEHERISAVISLLTNDFTYSPQTNHRKGGLIGLAAVTVGLTSEAAQHLEQIVPPVLNSFLDQDSRVRYYACEALYNIAKVVRGDFIIYFNKIFDALCKLSADSDANVQSAAHLLDRLVKDIVTESDQFSIEEFIPLLRERMNVLNPYVRQFLVGWITVLDSVPDIDMLGFLPDFLDGLFNMLSDSSHEIRQQADAALSEFLQEIKNSPALLMNSLG

SEQ ID NO: 160383 - protein, 711 aa, Zea Mays
MAADALSIIPGAVLRNLSDKLYEKRKNAALEIEGIVKQLAMAGEHERISAVISLLTNDFTYSPQTNHRKGGLIGLAAVTVGLTSEAAQHLEQIVPPVLNSFLDQDSRVRYYACEALYNIAKVVRGDFIIYFNKIFDALCKLSADSDANVQSAAHLLDRLVKDIVTESDQFSIEEFIPLLRERMNVLNPYVRQFLVGWITVLDSVPDIDMLGFLPDFLDGLFNMLSDSSHEIRQQADAALSEFLQEIKNSPNVDYGRMAEILVRRAGSTDEFTRLTSITWINEFVKLGGEQLVPYYADILGAILPCISDEEEKIRVVARETNEELRAIKADPTEGFDIGAILSIAKRELNSEHEATRTEALHWFFTLLDQYRAEFLAYLNDIFDPLLNALSDPSDVVVLLVLEVHARIAEESHHFHHLVSYLICTFHNNHFLLEKRGALIVRRLCVLLGAEKVYREFSTILESEVDLDFASVMVQALNLILLTSTELGELRSLLKKSLVDSCGKDLFQSLYASWRHSPMATISLCLLAQAYSHASCVIQSLGEEDINVKFLVQLDKLIRLLETPVFAYLRLQLLEPGKHTWLLKTLYGLLMLLPQQSAAFKILRTRLKTVPFSENIKRTSSANPYSQILQVTEDGNRNQDTQNYSAINFPSLLQQFEHMQLQHRNHLKDQLQSRKSASALTLSQEIQRYEAAHSSSLSEINRPPSRTSKGIL

SEQ ID NO: 160384 - protein, 215 aa, Zea Mays
MVQALNLILLTSTELGELRSLLKKSLVDSCGKDLFQSLYASWRHSPMATISLCLLAQAYSHASCVIQSLGEEDINVKFLVQLDKLIRLLETPVFAYLRLQLLEPGKHTWLLKTLYGLLMLLPQQSAAFKILRTRLKTVPFSENIKRTSSANPYSQILQVTEDGNRNQDTQNYSAINFPSLLQQFEHMQLQHRNHLKDQLQSRKSASALTLSQELC

SEQ ID NO: 160385 - protein, 605 aa, Zea Mays
MSKRAWVDEHVLTMLIVAYSKWGKVEDAVELLGRMEALDMRPNEKTLSVLVHGLARQGRVDVAMNMFGKMASYGFSVDLAMYSVLIEGLCHGNEMGKAVKLFEDMKRDRITPDVRLLKKIIEAFCRQGDFSTVGPFINENAVHLKPGSAVLLYNVILDGLINHGEVEAAYQLLSSMVRGDQRVSDDDTVGVHIFVITEDVKPNSDSFNIVVCGLCKVKKLDLALALTKDMVGLGCKGKLLMFNDLILELCNSGKLDEAYEIFNQMKDLGLKPSEFTYNSLLYGICRRKDTSAAADLLREMRANAHKPWIKNCTDMVQQLCLSGRITEALQFLDGMLELGFLPDIVTYSAAMNGMCKVGDIENALGLFLDISSKCYLPDVVAHNILINGFRKAGKFDEAQEIMEEMLSKGMLPSVVTYNLMIDIWCKSGSIDKAITCVYKMIDEEKPPTVVTYTSLLDGLCNAGRPDEAIVLWCKMREKGCSPNGIAYTALVNGLCKCGRMETAVNYYEEMKTKGFDLDIFSLLNLTNLLIAQGQASKGCELLKVVLQKDVVHNNHLKMVDLVNKAAKELSKDGSISSDIMIIIDAWLVSRGQGMHNEDGNKSDFS

SEQ ID NO: 160386 - protein, 80 aa, Zea Mays
MKQSINQCFNMTECVPWVWQFTNISQAIKEQLQEQNCLKAYLGLRRCGSRRCVAANSRRCPAVRSGSTKRLIPSFFHTPR

SEQ ID NO: 160387 - protein, 374 aa, Zea Mays
MFQSSVLQSRHEDLYGAAPSGFRTVVRLVPVATLHLPLRVPVQVLEKRLNDQFVMRRALEKALGYKPCAIHASSENCIPKPTEELIKEIAVLELEVICLEQHLLTLYRKAFEQQFSPASSACDMESNKQPARSFSGILSEAPELSFSTPRKHHQLNQSSRMVLARKSTPTASTSETSNEKINIGRSHSSLLHRSVRVSPSANNLARALKPCHTSPLSFVEEGKCMDPGVVSLADILGTRVADHVPQTPNKISEDMIKCITAVYMRLRDVPAVQHAFFPSPCSSFSSASGLSSKYTADIWSPRCRKESFVEEWQDNGLGNGESRELALPYDSVVEVSALCKGDQRSADVKDMLRKYMLHSVGHLCSFSKALISAG

SEQ ID NO: 160388 - protein, 77 aa, Zea Mays
MQSACTRTPKRSVLSSCGQCKVHLKRILQSLVPQWWRMIYVWFITSIIGHKAAWYKSIKQKCFTSPASYDRPTLSPV

SEQ ID NO: 160389 - protein, 173 aa, Zea Mays
MRAEAESRVGEATEAEATAGGGVVPKQASKDEAEADGGGLRAAEALLRVADGGEPAAAAGAAGAPRAQVRPTPTGAAVVRDAGRRGGGRRSGAAAAVVHADADAGRRHAEPVPVLRPPGRARRRRQGRAQAQGSRHPPLLQPLHPLRRLLMMRAGQHAATQRSGSKQSTAPCR

SEQ ID NO: 160390 - protein, 355 aa, Zea Mays
MDLSSDDVKAANMRPAVAAADGTSTLLRGWREFMRSGAPARFLCYEDGKWIGITGEAESSSGVDVRSGERHGVDAKKMKAWENAAVRLEENDMYYQVVSKLFLSYGMAQRGAAITEVRKIAPGARTVAFREQGQRLAYARCTATGTAKFAWYGASEDDVAAVVERGFVRNNAPRLGARKHGDGVHLSPAQCPYTSAMLAKADGSDEAHIVLCRVLMGRPEAVPAGSSQFCPSSRSYDSAVDKLENPQWYVVWNMDMNTRILPEYVVSFKCSKLQQMRESSEATSKLKKPAPVARDMFPTLLAEIQQIVPDKCDLLQESYKNFKMGQIKKDQFIQFLRNYVGDEVLKTVAKKLRRC

SEQ ID NO: 160391 - protein, 75 aa, Zea Mays
MLALTRKFASHRALGESTEAATSMAMFRCGSLIFRNKSKEELNQSTHLDTGFGEMQLFKWIKMVLKSLTQRVPSF

SEQ ID NO: 160392 - protein, 179 aa, Zea Mays
MGSDATATAQMFCFDTVARHIVGRPCETVLKQATEAAPIPPDLAQIVSLKFTFRVTASNQTFAQREKQPTVLQINSIVVVHGRQHSLPSGIQNTIDQGPSTPNKEATLKLLEESPSTAMERLSTKVSKDVGKKLTYSTQDEDIIGSQVLDVAQGTNADKVTSLSTKAYLNKQNITLILF

SEQ ID NO: 160393 - protein, 189 aa, Zea Mays
MGSDATATAQMFCFDTVARHIVGRPCETVLKQATEAAPIPPDLAQIVSLKFTFRVTASNQTFAQREKQPTVLQINSIVVVHGRQHSLPSGIQNTIDQGPSTPNKEATLKLLEESPSTAMERLSTKVSKDVGKKLTYSTQDEDIIGSQVLDVAQGTNADKGIPTDKGKEIEPHLQSPPKRHKQGPLTIKE

SEQ ID NO: 160394 - protein, 252 aa, Zea Mays
MGAMMASITSELLFFLPFILLALLALYTTTVAKCHGTHPWRRQKKKRPNLPPGARGWPLVGETFGYLRAHPATSVGRFMERHVARYGKIYRSSLFGERTVVSADAGLNRYILQNEGRLFECSYPRSIGGILGKWSMLVLVGDAHREMRAISLNFLSSVRLRAVLLPEVERHTLLVLRSWPPSDGTFSAQHEAKKFTFNLMAKNIMSMDPGEEETERLRLEYITFMKGVVSAPLNFPGTAYWKALKLPMVHGF

SEQ ID NO: 160395 - protein, 58 aa, Zea Mays
MCNLLMFAKERSQGCCHLCGPVLFSHGVLLCRPLLEMVQTFSHVCNLRDPPSSESQNL

SEQ ID NO: 160396 - protein, 57 aa, Zea Mays
MKDQGKSSERSQGCCHLCGPVLFSHGVLLCRPLLEMVQTFSHVCNLRDPPSSESQNL

SEQ ID NO: 160397 - protein, 204 aa, Zea Mays
MFQVKKKQFFRNFITITLFGAVGTLISFTVISLGALGLISRLNIGALELGDYLALGAIFSATDSVCTLQVLSQDETPFLYSLVFGEGVVNDTTSVVLFNAIQNFDHGNISGAKLLNFIGSFLYLFGSSTILGVASGLLSAYTIKKLYFGRHSTDHEVSIMMLMAYLSYMLAEKVRGSQPSMPLQHCRLSSRLFCFFMLVWMHWI

SEQ ID NO: 160398 - protein, 169 aa, Zea Mays
MSIIIRTSNLMILGTYFLFAIAKSNHVNFIVPIGAMSMYSYFCPEPLCKGKWKEMDWHTAGWIFLNTFIDRRRRRRRSSTSRLSTADRSFVSLAPGCMNAQYMLQHRRPWPCRLRRSLPCALRGPREWPTRTFIGLPTLSSLLFSPARSPSLPSLRLPIGYCLLASGFN

SEQ ID NO: 160399 - protein, 182 aa, Zea Mays
MHSLVMLMLMYYWMDHRHAFATLSFIFETFLFLYVGMDALDIEKWKIVGQTYRHTLSLFLSLHCSTRRSFFWICIFYHVQPGKVYRFEQHHFSLGAGFKSCFCFPTILSIKFDQKTPNGKISFRQQVIVWWAGLMRGVVSIVLAYNKVNLVFGLSGLSFGLELCYCFCFLYPFQNIGHFLLS

SEQ ID NO: 160400 - protein, 794 aa, Zea Mays
MIKELSPSSDEVIIVTSSLMKDMNSKTDMYRANAIRVLCRIIDGTLLTQIERYLKQAIVDKNPVVASASLVSGIHLAQANPEIVKRWSNEVQEAVQSRAPLVQFHGLALLHQIRQNDRLAVSKLVSSLTRGSVRSPLAQCLLIRYTSQVMCESSMNTQNGDRPFFDFLESSLRHKAEMVALEAARKITEMDVTSRELAPAITLLQLYLSSSKPVLRFAAVRTLNKVARTRPLAVTNCNVDLESLLSDQNRSIATLAITTLLKTGNESSVDRLIKQITLFMSDIADEFKIVVVEAIRSLCLKFPLKYRSMLNFLSNSLREEGGFEYKKAIVDSIVTLVSEIPDAKEIGLLHLCEFIEDCEFTYLSSQILHFLGNEGPRTSDPSRYIRYIYNRVILENATVRASAVSTLAKFGALVDTLKPQIFVLLQRCLFDTEDEVRDRATLYLQTLSGEVAIGNDEKDVKDFLFGSFDVPLANLEASLRTYEPSEEPFDISLVSREVRSLPPKEKAAPGKRPPAGAAAAAAPVSTVDAYQKMLSFIPEFSGFGRLFKSSEPMELTEAETEYAVSVVKHIYDGYIVLQYNCANTIEEQLLEDVTVCVDASDAEEFSEICSKPLASLPYNSPGQVFVAFEKPERVPVVGKFLNLLKFTVKEVDTTTGEADEDGVEDEYQLEDFEIVSADYMLRVVVSNFRNAWENMDPDSERVDEYGLGVRESLAEAVNAVINILGMQPCEGTEVVPKNARSHTCLLSGVFIGNMKVLVRLSFGLSGPNEVAMKLAVRSDDPEVSDKIHEIVASG

SEQ ID NO: 160401 - protein, 583 aa, Zea Mays
MNQSSCTKINGENSVHFNAVTEFSPMDSSDLCTSDQSKSSRRGPRSREDFPQDQSCWYDDCGDESGRIGELQWKSRERTRSINRSRNAASTSNNRTRERQSYNSCSCGHLEDYGVMDSCFLPTARSGKETKIARKSGVEKPRVQYHRCYTLDSFIVSKGNRAGSTQKNAIPKQIWEPMDARRKTKLHNTVHDSGSVNDVDSLKHVVFDNSGSQNFGVGCESQPQASESSRDECNSDQPCANGGRNQTISCASSTLMVNQQNCCAGNDEGSRHDEELMMNSAGSDSSSSCMSEGDRESSSSSTTSSSAQNPESSSESEESPERINSTVGTQSSRAAASRSLLEACAGNGFREYQPKATGLAHNDMFGYNVSPVQDQLLHYQSMYPPQHRPITMGFHDGSWAAPTNGNFQYARPSHLYSSPLVFGIPGNHFIDYPYMAPAFSHIPPEPIHKAASSFRAMPLSLPFQNGHRQAASLTQRDMNLERRPAKLTKPTGKDPPENKNKSGLKDLPEDKSKSWDADASFSLFQFNLPIASPVTPSSKDKSGELAARTPLAQVQAQLCSREQADVKEYSLFSSKDNGIFSFM

SEQ ID NO: 160402 - protein, 947 aa, Zea Mays
MSLHIGFDSKRFCRECRRNVIREFKELKELKRMRREPHCTSWFCVADTAFQCEVFEDAVIVDWRQCLSEPDESYDHFEWAIGTDEGESDIFGFENVGMNAQVHRNGIDLDQFEDYFITLRAWRLDGQFTELCVKAHALKGQSCVHHRLVVGDGFVTMTKGESIRSFFEHAEEAEEEDEDDDMDRDGNDFDGDGAHPQKHAKSPELAREFLLDAAAVIFKEQVEKAFREGTAQQNAHSIFVSLALKLLEQRVHVACKEIITLEKQNKLLEEEEKEKREEQERRLKRRTREREKKNRRKERLKEKENNKGKKLVESKSRNDILSSAPSNSTTSINDYSTNTLDSRDSVKEDEDSAEVVNLCSPDSCMNQSSCTKINGENSVHFNAVTEFSPMDSSDLCTSDQSKSSRRGPRSREDFPQDQSCWYDDCGDESGRIGELQWKSRERTRSINRSRNAASTSNNRTRERQSYNSCSCGHLEDYGVMDSCFLPTARSGKETKIARKSGVEKPRVQYHRCYTLDSFIVSKGNRAGSTQKNAIPKQIWEPMDARRKTKLHNTVHDSGSVNDVDSLKHVVFDNSGSQNFGVGCESQPQASESSRDECNSDQPCANGGRNQTISCASSTLMVNQQNCCAGNDEGSRHDEELMMNSAGSDSSSSCMSEGDRESSSSSTTSSSAQNPESSSESEESPERINSTVGTQSSRAAASRSLLEACAGNGFREYQPKATGLAHNDMFGYNVSPVQDQLLHYQSMYPPQHRPITMGFHDGSWAAPTNGNFQYARPSHLYSSPLVFGIPGNHFIDYPYMAPAFSHIPPEPIHKAASSFRAMPLSLPFQNGHRQAASLTQRDMNLERRPAKLTKPTGKDPPENKNKSGLKDLPEDKSKSWDADASFSLFQFNLPIASPVTPSSKDKSGELAARTPLAQVQAQLCSREQADVKEYSLFSSKDNGIFSFM

SEQ ID NO: 160403 - protein, 117 aa, Zea Mays
MAASLAYLAQQPRRQFAQPRESPLRHALGVLDIMPQQACSSSPGSPPHREQPRRRSVQPRRLRVLLRRQSAQSPSRCRRNPRPLSLSRFARRFSTESQTNMHACTTPIGFRPGPRDD

SEQ ID NO: 160404 - protein, 231 aa, Zea Mays
MKISNYANIVLLALKVYATIKSGSIAIAASTLDSLLDLMAGGILWFTHLSMKSINVYKYPIGKLRVQPVGIIIFAAVMATLGFQVFIQAVEKLVVNEAPDKLNQVQLLWLYSIMIFATIVKLGLWLYCRTSGNKIVRAYAKVNNLFHFSTWHECFLLNLNIVYQIFVMVWFPQDHYFDVVTNVVGLAAAVLGDRFYWWIDPIGAIVLAVYTISNWSGTVWENAGLCYLGGV

SEQ ID NO: 160405 - protein, 235 aa, Zea Mays
MQIFVKTLTGKTITLEVESSDTIDNVKAKIQDKEGIPPDQQRLIFAGKQLEDGRTLADYNIQKESTLHLVLRLRGGMQIFVKTLTGKTITLEVESSDTIDNVKAKIQDKEGIPPDQQRLIFAGKQLEDGRTLADYNIQKESTLHLVLRLRGGIIEPSLQALARKYNQDKMICRKVEVVEGVFAKNTGQRDGCWIQNELSQFNICTMYTKGDTDAMHGCTLGLSTAARRSVVTATS

SEQ ID NO: 160406 - protein, 176 aa, Zea Mays
MQIFVKTLTGKTITLEVESSDTIDNVKAKIQDKEGIPPDQQRLIFAGKQLEDGRTLADYNIQKESTLHLVLRLRGGMQIFVKTLTGKTITLEVESSDTIDNVKAKIQDKEGIPPDQQRLIFAGKQLEDGRTLADYNIQKESTLHLVLRLRGGIIEPSLQALARKYNQDKMICRNSG

SEQ ID NO: 160407 - protein, 244 aa, Zea Mays
MQKQIDILVQYDVHIHTRQRHVTSAAISRTFEGHRRPSVSSPCHALIQHGHMTRGPSLFTMRAVRRAKVARASRPARRHHGQHHRRQQPPEPLRQPHYAPAEVRRRRPRRHRPRRALRGAHVRARAVPVRDGAAVQLQRDEPAGPDAGQGVPGVPLPAVPEGRQRVGAQRPRPDHAGHLRQQLLHQHRGAPWDAAVRPGAAVDARRAHGADRRTVRRQPEGVLQELRQVHGQHGEHPGADGESG

SEQ ID NO: 160408 - protein, 485 aa, Zea Mays
MKGMSALTLSASVPSFQPPQCVGSICPQPTLSQYLLYFVGLYMIALGAGGIKPCVSSFGADQFDDTDPVEKAKKGAFFNWFYFCINIGSLISGTVLIWVQENCGYSIGFGIPTFFIALAIGSFFIGSDIYRFQIPGGSPLTRACQVVVAATHKRKTDLPVDSSLLYELDGKTSAIEGSHIHLYCTFVLTLHAFKLVSWNFLDTATFFQNYESFLDKAAVILWNECDGPRNSWRLCTVTQVEELKILLRMFPIWATGIVFFTVCAQNSSMFIEQGMTLDNQIGPFKIPAATLSSLDVISVVVWVPIYERLVVPIARRFSGKERGFSELQRMGIGLFVSTVAVAVAALVEINRLQVAVAEDLVHQKVPVPMSILWQAPQYLLVGVGEVFTSIGQAEFFYNQSPDAMRSLCSAFALVTVSLGSYLSSFILSLVSYFTTRNGQLGWIPDNLNEGHLDRFFWLIAGLSSLNFLVFIYYAQQYKCKIASVA

SEQ ID NO: 160409 - protein, 237 aa, Zea Mays
MFPIWATGIVFFTVCAQNSSMFIEQGMTLDNQIGPFKIPAATLSSLDVISVVVWVPIYERLVVPIARRFSGKERGFSELQRMGIGLFVSTVAVAVAALVEINRLQVAVAEDLVHQKVPVPMSILWQAPQYLLVGVGEVFTSIGQAEFFYNQSPDAMRSLCSAFALVTVSLGSYLSSFILSLVSYFTTRNGQLGWIPDNLNEGHLDRFFWLIAGLSSLNFLVFIYYAQQYKCKIASVA

SEQ ID NO: 160410 - protein, 365 aa, Zea Mays
MESSLVEERRQNLLVRATEPEDLARYTGDGSVDFRGFPILKHNTGNWRACSLILGTEVCERLAYYGISKSLVTYLSTRLHEGNVSAARNFTTWQGTCYLTPLIGATLADSYWGKYRTIAVFSTIYFLGMSALTLSASVPSFQPPQCVGSICPQPTLSQYLLYFVGLYMIALGAGGIKPCVSSFGADQFDDTDPVEKAKKGAFFNWFYFCINIGSLISGTVLIWVQENCGYSIGFGIPTFFIALAIGSFFIGSDIYRFQIPGGSPLTRACQVVVAATHKRKTDLPVDSSLLYELDGKTSAIEGSRKLEHSSEFSLCLGTSWTQQPFFRTMKVSLTKRQSFCGMNVMVLAIHGDFAQSHKLKSLKYY

SEQ ID NO: 160411 - protein, 458 aa, Zea Mays
MSALTLSASVPSFQPPQCVGSICPQPTLSQYLLYFVGLYMIALGAGGIKPCVSSFGADQFDDTDPVEKAKKGAFFNWFYFCINIGSLISGTVLIWVQENCGYSIGFGIPTFFIALAIGSFFIGSDIYRFQIPGGSPLTRACQVVVAATHKRKTDLPVDSSLLYELDGKTSAIEGSRKLEHSSEFSFLDKAAVILWNECDGPRNSWRLCTVTQVEELKILLRMFPIWATGIVFFTVCAQNSSMFIEQGMTLDNQIGPFKIPAATLSSLDVISVVVWVPIYERLVVPIARRFSGKERGFSELQRMGIGLFVSTVAVAVAALVEINRLQVAVAEDLVHQKVPVPMSILWQAPQYLLVGVGEVFTSIGQAEFFYNQSPDAMRSLCSAFALVTVSLGSYLSSFILSLVSYFTTRNGQLGWIPDNLNEGHLDRFFWLIAGLSSLNFLVFIYYAQQYKCKIASVA

SEQ ID NO: 160412 - protein, 291 aa, Zea Mays
MREDSHAVPADTCSFLNSFLDKAAVILWNECDGPRNSWRLCTVTQVEELKILLRMFPIWATGIVFFTVCAQNSSMFIEQGMTLDNQIGPFKIPAATLSSLDVISVVVWVPIYERLVVPIARRFSGKERGFSELQRMGIGLFVSTVAVAVAALVEINRLQVAVAEDLVHQKVPVPMSILWQAPQYLLVGVGEVFTSIGQAEFFYNQSPDAMRSLCSAFALVTVSLGSYLSSFILSLVSYFTTRNGQLGWIPDNLNEGHLDRFFWLIAGLSSLNFLVFIYYAQQYKCKIASVA

SEQ ID NO: 160413 - protein, 145 aa, Zea Mays
MEVEDDDNTAAPSAWPSSSRRRHLLQFLLHASMRLDLRPIVKYAALTFFAGRFLPALPRKMGFCGARSGRIVRSWLLEPLRDSNLELFALVAVWIASKIHDQKPMSVKSLKALGDRIIADQHFMCRDFASAELVFLEVNPGYDYY

SEQ ID NO: 160414 - protein, 187 aa, Zea Mays
MGSRVKDNSEQGQGNDARSKCTQSSVVEPTQPSSGSVVLNPMMPFWPVPPPMAGPATTLNMGVDYWGTPASVPMHGKVIAAPTSAPSSNSRDIVLSDPTIQDGRELKRQKRKQSNRESARRSRLRKQAEWEEVANRADLLKQENSSLKEELKQLQEKCDGLTSENTSLHEKLKALEDEKSNGNWYKD

SEQ ID NO: 160415 - protein, 308 aa, Zea Mays
MMSPYGTPPPYAAMYAQGTPYQQAPMPPGSHPYSPYPMQLPNGTVQTPTSGAGGTATDKSNKNKRKASLKRSKGSLGSLDVVAVKNNKSPAKPSTSSSNEGSSQSESGSGSSSEGSSTNSKSGSRVKDNSEQGQGNDARSKCTQSSVVEPTQPSSGSVVLNPMMPFWPVPPPMAGPATTLNMGVDYWGTPASVPMHGKVIAAPTSAPSSNSRDIVLSDPTIQDGRELKRQKRKQSNRESARRSRLRKQAEWEEVANRADLLKQENSSLKEELKQLQEKCDGLTSENTSLHEKLKALEDEKSNGNWYKD

SEQ ID NO: 160416 - protein, 284 aa, Zea Mays
MGKGGVGKSSTVNSIVGERVASVSAFQSEGLRPMMCSRTRAGFTLNIIDTPGLIEGGYINEQAVDIIKRFLLGKTIDVLLYVDRLDAYRMDTLDEQVIRAITNSFGKDIWRRSLVVLTHAQLSPPDGIDYNDFFTRRSEALLRYIHSGAGINKREYGDFPLPIALVENSGRCKTNEHGEKILPDGTLWVPNLMKEITVVISNGSSPTHVDQKLIDGPNPNNRRKLFIPLILAVEYFLVVKGIRRAIHADIANGKVDDWEQRYRDLVGSRDLVEQKGSTSRNRKA

SEQ ID NO: 160417 - protein, 195 aa, Zea Mays
MDTLDEQVIRAITNSFGKDIWRRSLVVLTHAQLSPPDGIDYNDFFTRRSEALLRYIHSGAGINKREYGDFPLPIALVENSGRCKTNEHGEKILPDGTLWVPNLMKEITVVISNGSSPTHVDQKLIDGPNPNNRRKLFIPLILAVEYFLVVKGIRRAIHADIANGKVDDWEQRYRDLVGSRDLVEQKGSTSRNRKA

SEQ ID NO: 160418 - protein, 290 aa, Zea Mays
MASPIPREWVGLQQFPAATQTKLHELLGKLKEESEGLRPMMCSRTRAGFTLNIIDTPGLIEGGYINEQAVDIIKRFLLGKTIDVLLYVDRLDAYRMDTLDEQVIRAITNSFGKDIWRRSLVVLTHAQLSPPDGIDYNDFFTRRSEALLRYIHSGAGINKREYGDFPLPIALVENSGRCKTNEHGEKILPDGTLWVPNLMKEITVVISNGSSPTHVDQKLIDGPNPNNRRKLFIPLILAVEYFLVVKGIRRAIHADIANGKVDDWEQRYRDLVGSRDLVEQKGSTSRNRKA

SEQ ID NO: 160419 - protein, 428 aa, Zea Mays
MKKLLGPRFSLDAKNSKDTIAAMLRWWSLLEKFSCTASKLHLKPRRFKTFVEALGKQLLKDRNKSRRKRSRVDMCLPSPSPIISKAPGNENPPVKFLSVDAQNGSRVASPKGSIFKQVAEPISNKPGTTKGELSATRTVKQKRKAGGAVASAAYKKWERAAMAGVSLVADAAEELERNTINPGIFCNVDARTLTSLSERLSSIDGISTNHMKEADSQAPVKLKLQLFPINEATRKALEKDDHNPHLELTLSSRKKISSVLEHLNRKWGNSNIASGELILFPYCANQEDLATYQRWTTRDTVAVADVFLSVNSPSVFRLRYGWVSLVELGAGVSEISLTHFEDCMIPEVIQVKSPSGDKACVQSDGTFLSNCIHDQYPCSSMLLHIVRCCIVCIMMYCVIVPVLSLGPLTAIINTSPDTDLGLEFQFLS

SEQ ID NO: 160420 - protein, 405 aa, Zea Mays
MSLTHALVFNHETVLFPVPTPIQTPPYSAPFSAYLFFCPSTVREALSRVATRRPPPPSGLRRVLRRSTPTIYRVYMCTPMSYTGSAPEPSDPNRKPAKKQTRQWAAWTHQEEEIFFNALRQVGKNFDKITHRVQSKNKDQVRHYYYRLVRRMKKLLGPRFSLDAKNSKDTIAAMLRWWSLLEKFSCTASKLHLKPRRFKTFVEALGKQLLKDRNKSRRKRSRVDMCLPSPSPIISKAPGNENPPVAEPISNKPGTTKGELSATRTVKQKRKAGGAVASAAYKKWERAAMAGVSLVADAAEELERNTINPGIFCNVDARTLTSLSERLSSIDGISTNHMKEADSQAPVKLKLQLFPINEATRKALEKDDHNPHLELTLSSRKKISSVLEHLNRKWEVDNKRYCCSS

SEQ ID NO: 160421 - protein, 233 aa, Zea Mays
MQPLPQFSGSRNCQPPPPSLLTMAWRPAPSISTCGGLTPSPAEVIFTELAAPPSPTQVARSPPPSETQPSSPAAPPPVAHPSTPAARLGCLLPQRCAGPAQQLHRRPLSVSLIVTAILGTGALAVARPSRHRVRSRPAPPLGRVAPPRCRHSPWSVFPPSWPASHAVPRLCLPACPRSPSPVSPPVSPWLPSPPRRPPTPPRRTLPPPWFMCLPIVCASHFTPDIFPGALLWP

SEQ ID NO: 160422 - protein, 59 aa, Zea Mays
MAKTKNTNLHRRLYILFIRNQRKINKYPNKYPFSSPTIYTENFVQHLIKQSQKHPCVIF

SEQ ID NO: 160423 - protein, 319 aa, Zea Mays
MVVVLGANKKYSFGGSSCLAKYCAKKLPPTTTVVAIQDGKAVFVREAPRPPLGAEPKPVLRTVLHPSVGLEPKVIIPNPNRRARSMSMDLDAPCCGHGAADAPASRCLDDATKGDGGVAPEQRLGWPLLRRAHAAAAASAAPVQTPGGKNHEPRKQSVVHWVMSLPRRSAPSESAEPHAGAGLESELKAMLGGSGARCRWFRYEELYDSTNHFSAENLIGNGGNSRVYRGSLACGRQVAIKLCKASAEASKDFLREVDIITKLQHHRIVPLIGVCVEGRNLISVYRYLPRGSLEDNGKGQSRRCRGRTGTRLRWGSRRL

SEQ ID NO: 160424 - protein, 107 aa, Zea Mays
MAVQSVPHPYLRKQEGAPRFFGYFSTGKRERKKSCLWHSSSRTPLPLVGRDHDGDQTFLMSSSSLARPPFRPVTLVSSAPLVSLHGLFLSKASSAKDAGYFIRSDLA

SEQ ID NO: 160425 - protein, 123 aa, Zea Mays
MSCAGDCCWLAGAAAFPVGLLRLREAVGLTRGFVAFVCCASLFCAGHRRRRGSGPRSCTRHRSKACGGCWTGSTTRCRPPTPPRWASTSSEAARNEAPAALCSYLRTYLCVGVFSYYSLLSSQ

SEQ ID NO: 160426 - protein, 62 aa, Zea Mays
MQILMVGLDTTGKTTILYKLKLGEIITTIPAIGHIQRNTLDKVLDTVAKGGQTSSKIGLSYA

SEQ ID NO: 160427 - protein, 64 aa, Zea Mays
MGLAFGKLFSRSSPIRICRSLWSASTPLVKPPSSISSSLVRSSHSEEHIGQGSRHCCKRRTDLK

SEQ ID NO: 160428 - protein, 586 aa, Zea Mays
MSRMAPPSPPQSLKPPTLPFSPPKKPPPMPVYKDLHFNRDLSATKKLQAGVDLVARLLGVTLGPKGRNVVLGNKYGPPKIVNDGETVLKEIELEDPLENLGVKLVRQAGARTNDIAGDGCTTSIILAQGLIAEGMKVLAAGINPVQVARGIEKTAAALVSELRLMSRVIEDHEIAHVAAVSAGNDYAVGNMIYDAFQRVGRQGMVRIENGRGTENSLEVLEGMQFERGYLSPYFVTDRGNMTVEFTDCQILLVDKKITDASEIIRILDSAVKENYPLLIIAEDVEEQAMADLIKNKLKGTIKVAAVKAFSFGEQKTQCLDDIAIMTGGTLVRDDMGHILEKAGKEVLGSASKVVITKDSTLIVTDGSNRRAVEERVAMIKGQIENSKESYNKKILGERIARLCGAIAVIQVGAQTIIEMKDKKLRIEDALNTTRAAIEEGVVVGGGCSLLRLSEKIDAIKESSLDNIEQEVGADIFKQALSYPTSLIAKNAGVNGDFVIKKVLLNDDANYGYNAAKNCYEDLMAAGILDATKVVRCCIEHAAVVAKSFLTSDVVIVEAKEGKPIRIRPPMPPRHLIPPMPASSIRV

SEQ ID NO: 160429 - protein, 109 aa, Zea Mays
MPMPGPFSISDLPLSTSVPTTVDLSALFDPPPPQWATAQQPHHHHQQPPQHHQLRQPAPYGAGASVRPGGGPGMAESSGGDELQSLARELLDRHRSGGVKLEHPPPHSR

SEQ ID NO: 160430 - protein, 241 aa, Zea Mays
MATAAHQVAATFLSFLSSSTHHLAPSSVSLGTTSVLPVSLRAAGTRGPRLAYRLRGRRVGAAVAQLPTTHPEVVSGEKKIRWSSRAVRSFAMAELEARKMRYPTTGTEGLLMGILVEGTSGAAKLLRANGITLLKVREEAANVLGKSEMFYFSPMHPPLTEAAQRALDWAVNEKLKSAYHHLMIYSRMSEDGEVNANHLLLGIWSDDESAGHKILYSLGFDDVKASLLAKTADEEAAMSPR

SEQ ID NO: 160431 - protein, 123 aa, Zea Mays
MATAAHQVAATFLSFLSSSTHHLAPSSVSLGTTSVLPVSLRAAGTRGPRLAYRLRGRRVGAAVAQLPTTHPEVVSGEKKIRWSSRAVRSFAMAELEARKMRYPTTGTEGLLMGILVEVHYFRN

SEQ ID NO: 160432 - protein, 542 aa, Zea Mays
MMSFRSKDAHAQTRLNWPWRSQSPLSAQLLVDIPPEIELSDYRRLPSSRSESPSGLLHDEGVKEEPIPDLDIFFERLYEYFCAKGLRCIITKWIIEILNVLFMVCCIGFFFLFVDWDTLIHLKCGVEALESGEKPCDLMKAIKHDPLVPFTLPKMITVGSMVIMTAYGLTNFLKFFVQLRSTLNVRQFYYDRLKVNDLEIQTISWPKIIEKVVLLQKSQKLCVVRDLSEHDIIMRIMRKENYLIGMVNKGILSFPIHSCVPGAGPTGSHEHGRRNYLILPKSLEWTLNWCIFQSMFDSKFCVRKEFLTSPDVLRKRLIFVGIAMLILSPCLVIFPLVYVILRHAEEIYNHPSTASSRRWSNLSRWIFREYNEVDHFFRHRMNNSAVHSLNYLKQFPTPLVSIMAKFVSFVSGGLAGALIIIGFVGESILEGHIFGRNLLWYTIVFGTIAAISRKVVADELQVFDPEGAMCLAVHQTHYMPKRWRGKENSELYTIIMLLEEMASIFITPYLLISEVPKRVDDILRFISDFTIYVDGVGDSKLV

SEQ ID NO: 160433 - protein, 683 aa, Zea Mays
MMSFRSKDAHAQTRLNWPWRSQSPLSAQLLVDIPPEIELSDYRRLPSSRSESPSGLLHDEGVKEEPIPDLDIFFERLYEYFCAKGLRCIITKWIIEILNVLFMVCCIGFFFLFVDWDTLIHLKCGVEALESGEKPCDLMKAIKHDPLVPFTLPKMITVGSMVIMTAYGLTNFLKFFVQLRSTLNVRQFYYDRLKVNDLEIQTISWPKIIEKVVLLQKSQKLCVVRDLSEHDIIMRIMRKENYLIGMVNKGILSFPIHSCVPGAGPTGSHEHGRRNYLILPKSLEWTLNWCIFQSMFDSKFCVRKEFLTSPDVLRKRLIFVGIAMLILSPCLVIFPLVYVILRHAEEIYNHPSTASSRRWSNLSRWIFREYNEVDHFFRHRMNNSAVHSLNYLKQFPTPLVSIMAKFVSFVSGGLAGALIIIGFVGESILEGHIFGRNLLWYTIVFGTIAAISRKVVADELQVFDPEGAMCLAVHQTHYMPKRWRGKENSELYTIIMLLEEMASIFITPYLLISEVPKRVDDILRFISDFTIYVDGVGDVCRSLLLFLLLFSSYFCLAYATLNTFISLCFNSLSLFNFKKHGNRNYGSPFNALKGLRSSQGKMEKSFLRVSIHHVSQMLMANNSYLTSKSSKKGKYVNKLLHNIKHWRLQALWQALEVKGMIPSNNSIAIFMATLRPPCLLFIT

SEQ ID NO: 160434 - protein, 876 aa, Zea Mays
MMSFRSKDAHAQTRLNWPWRSQSPLSAQLLVDIPPEIELSDYRRLPSSRSESPSGLLHDEGVKEEPIPDLDIFFERLYEYFCAKGLRCIITKWIIEILNVLFMVCCIGFFFLFVDWDTLIHLKCGVEALESGEKPCDLMKAIKHDPLVPFTLPKMITVGSMVIMTAYGLTNFLKFFVQLRSTLNVRQFYYDRLKVNDLEIQTISWPKIIEKVVLLQKSQKLCVVRDLSEHDIIMRIMRKENYLIGMVNKGILSFPIHSCVPGAGPTGSHEHGRRNYLILPKSLEWTLNWCIFQSMFDSKFCVRKEFLTSPDVLRKRLIFVGIAMLILSPCLVIFPLVYVILRHAEEIYNHPSTASSRRWSNLSRWIFREYNEVDHFFRHRMNNSAVHSLNYLKQFPTPLVSIMAKFVSFVSGGLAGALIIIGFVGESILEGHIFGRNLLWYTIVFGTIAAISRKVVADELQVFDPEGAMCLAVHQTHYMPKRWRGKENSELVRREFETLFPYTIIMLLEEMASIFITPYLLISEVPKRVDDILRFISDFTIYVDGVGDVCRNYGSPFNALKGLRSSQGKMEKSFLSFQSVYPSCEPNADGKQFLSNLQKFKERQVRQQALAQYQALEASGFVAGTRGQRDDTFQQLHSDIHGHAEATLPPVYNLSPLGLLDTDQRMHPYILDWYYTCHPPHSDRAEGPQFDQAFPETGVSTSPPARETSEIEEVGDWDNELYERVQSHLGASTSSALFWNTPGKDHGTEENTNSNWWAHAPAYPSGPQGSFIEPPDFGNRYMTNPHSSNHSGGTSEGSTSDLEQSNSRSRSSWRSPQALSKTRYMDDSDIEEGLSLHFADVHQKDEDDRHLVVRDHQDPAPSGLPVRIIPRSSDPV

SEQ ID NO: 160435 - protein, 573 aa, Zea Mays
MMSFRSKDAHAQTRLNWPWRSQSPLSAQLLVDIPPEIELSDYRRLPSSRSESPSGLLHDEGVKEEPIPDLDIFFERLYEYFCAKGLRCIITKWIIEILNVLFMVCCIGFFFLFVDWDTLIHLKCGVEALESGEKPCDLMKAIKHDPLVPFTLPKMITVGSMVIMTAYGLTNFLKFFVQLRSTLNVRQFYYDRLKVNDLEIQTISWPKIIEKVVLLQKSQKLCVVRDLSEHDIIMRIMRKENYLIGMVNKGILSFPIHSCVPGAGPTGSHEHGRRNYLILPKSLEWTLNWCIFQSMFDSKFCVRKEFLTSPDVLRKRLIFVGIAMLILSPCLVIFPLVYVILRHAEEIYNHPSTASSRRWSNLSRWIFREYNEVDHFFRHRMNNSAVHSLNYLKQFPTPLVSIMAKFVSFVSGGLAGALIIIGFVGESILEGHIFGRNLLWYTIVFGTIAAISRKVVADELQVFDPEGAMCLAVHQTHYMPKRWRGKENSELVRREFETLFPYTIIMLLEEMASIFITPYLLISEVPKRVDDILRFISDFTIYVDGVGDVCRSQELPREDGEIILKFPECLSIM

SEQ ID NO: 160436 - protein, 508 aa, Zea Mays
MMSFRSKDAHAQTRLNWPWRSQSPLSAQLLVDIPPEIELSDYRRLPSSRSESPSGLLHDEGVKEEPIPDLDIFFERLYEYFCAKGLRCIITKWIIEILNVLFMVCCIGFFFLFVDWDTLIHLKCGVEALESGEKPCDLMKAIKHDPLVPFTLPKMITVGSMVIMTAYGLTNFLKFFVQLRSTLNVRQFYYDRLKVNDLEIQTISWPKIIEKVVLLQKSQKLCVVRDLSEHDIIMRIMRKENYLIGMVNKGILSFPIHSCVPGAGPTGSHEHGRRNYLILPKSLEWTLNWCIFQSMFDSKFCVRKEFLTSPDVLRKRLIFVGIAMLILSPCLVIFPLVYVILRHAEEIYNHPSTASSRRWSNLSRWIFREYNEVDHFFRHRMNNSAVHSLNYLKQFPTPLVSIMAKFVSFVSGGLAGALIIIGFVGESILEGHIFGRNLLWYTIVFGTIAAISRKVVADELQVFDPEGAMCLAVHQTHYMPKRWRGKENSELVRREFETLFPLMITSGV

SEQ ID NO: 160437 - protein, 305 aa, Zea Mays
MILPLAVAASAADQGRTHRVVSELTHGTSQGEVSKAEFQEALSDILLGMAAGLKRDPLVILRMDGEDLRDFAAGSRYEPTAAAVFSQVVDLGSEVASPRQCVLAALQKLSVDHGVPPASDAWVAKHIVEPALQQLLPADQPGQQPASRDDLFQQLKKLLGAVADRLQEQPVIVAHTENHYDGSGVKRLLANKFELDKLLDSVWKNLAAEDKNKASKGCLITALDKMADAASLPYYSAVKEVDAVVEESIKTAGVEEGKAVDEAEFKKSLTEILRAIMLRLNDSPVFVSTDVVVHEPLSGTSSSVN

SEQ ID NO: 160438 - protein, 257 aa, Zea Mays
MPISCRLAFGYAYPAYECYKTVELNKPQIEQLIFWCQYWLPFYSEAKVLFFVYLWYPKTKGTTYVYGTFFKPYISQHENEIDRNLLELRARATDMVVLYFHKAASVGQNTFFDVLKYVAAQSPSRKSRLHPHQEPQQQQPQVQVELQQPQPQKQAAPVMRRGASIAARQAAMAQQSLETIPVPSSPKIKRQTSGRPGSVASTKPAAAASTPKPGGSPKKEGAEELDPALEETPMEETIRVTRAKLRRRTATEDSAGN

SEQ ID NO: 160439 - protein, 185 aa, Zea Mays
MPISCRLAFGYAYPAYECYKTVELNKPQIEQLIFWCQYWILVALLTVLERFGDFTISWLPFYSEAKVLFFVYLWYPKTKGTTYVYGTFFKPYISQHENEIDRNLLELRARATDMVVLYFHKAASVGQNTFFDVLKYVAAQSPSRKSRLHPHQVWSNVFSFLSKKNPLNNLLLSVHHVYTDTQNFF

SEQ ID NO: 160440 - protein, 461 aa, Zea Mays
MPQRRCSPVSRLRSMPHLPVQSSSGSISMLSRKSYKPPKKPLTEKEIDELCDEWEPEPLCPPVKEGARIDTPMLESAAGPHTIVDGKEVVNFASANYLGLIGNEKIIDSCIGSLEKYGVGSCGPRGFYGTIDVHLDCESKIAKFLGTPDSILYSYGISTIFSVIPAFCKKGDIIVADEGVHWAVQNGLHLSRSTVVYFKHNDMVSLASTLEKLTHGNKRAEKIRRYIVVESIYQNSGQIAPLDEIVRLKEKYRFRVILEESHSFGVLGKSGRGLAEHYGVPIEKIDIITAGMGNALATDGGFCTGSVRVVDHQRLSSSGYVFSASLPPYLATAAVSAVNYLEQNPAVLANLRSNIALLHKELSDTPGLEIFSHVLSPIVFLKLKKSTGSPTTDLDLLETIAGRVLKEDSVLIVTSKKSNLDRCKLPVGIRLFVSAGHTESDISRLSSSLKRVSAAVLSDCF

SEQ ID NO: 160441 - protein, 406 aa, Zea Mays
MDMALPVVNATAAVLARVSAAFNAPLARAVVFGVHIDGHLVVEGLLIAVIVFQLSRKSYKPPKKPLTEKEIDELCDEWEPEPLCPPVKEGARIDTPMLESAAGPHTIVDGKEVVNFASANYLGLIGNEKIIDSCIGSLEKYGVGSCGPRGFYGTIDVHLDCESKIAKFLGTPDSILYSYGISTIFSVIPAFCKKGDIIVADEGVHWAVQNGLHLSRSTVVYFKHNDMVSLASTLEKLTHGNKRAEKIRRYIVVESIYQNSGQIAPLDEIVRLKEKYRFRVILEESHSFGVLGKSGRGLAEHYGVPIEKIDIITAGMGNALATDGGFCTGSVRVVDHQRLSSSGYVFSASLPPYLATAAVSAVNYLEQNPAVLANLRSNIALLHKGKLILLLINYFFDQVVLLIFLD

SEQ ID NO: 160442 - protein, 511 aa, Zea Mays
MEVVASAPGKVLIAGGYLVLERPNAGLVLSTTARFYAVVRPLRDSLPADAWAWAWTDVKVTSPQLSREATYKLSLTKSTLQLTSARESTNPFVEQAIQFSVAAAKATIIDKERKDVVDKLLLQGLNITILGCNDFYSYRKQIEARGLPLTPEALLSLPPFSSITFNSEVANGTMTGEKCKPEVAKTGLGSSAAMTTSVVAALLHYLGVVSLSCPGQSSGDNTTTRELDLVHSIAQSAHCIAQGKIGSGFDVSAAVYGSQRYVRFSPEILSSQATGGTFLPDVVSDIVTQRWDHENKQFSLPPLMTLLLGEPGTGGSSTPSMVGSVKRWQKSDSEKCKDTWSKLAFANSALENQLRILKGLSENHREAYESVVLSCSHLTYEKWTEVATNQHQELIIKSLLAARDACLEIRLHMREMGIAAGVPIEPDSQTRLLDATMNMEGVLLAGVPGAGGFDAVFSVTLGDASNAVANAWSSAGVLPLLVREDCRGVSLEDADPRTREENKEFNGFPWN

SEQ ID NO: 160443 - protein, 392 aa, Zea Mays
MKLILMLSLMTSLRDMLEDNFKIEARGLPLTPEALLSLPPFSSITFNSEVANGTMTGEKCKPEVAKTGLGSSAAMTTSVVAALLHYLGVVSLSCPGQSSGDNTTTRELDLVHSIAQSAHCIAQGKIGSGFDVSAAVYGSQRYVRFSPEILSSQATGGTFLPDVVSDIVTQRWDHENKQFSLPPLMTLLLGEPGTGGSSTPSMVGSVKRWQKSDSEKCKDTWSKLAFANSALENQLRILKGLSENHREAYESVVLSCSHLTYEKWTEVATNQHQELIIKSLLAARDACLEIRLHMREMGIAAGVPIEPDSQTRLLDATMNMEGVLLAGVPGAGGFDAVFSVTLGDASNAVANAWSSAGVLPLLVREDCRGVSLEDADPRTREVSAAVSSIQIN

SEQ ID NO: 160444 - protein, 95 aa, Zea Mays
MGRLRLVGINPFACTSRQISQKPRPSRVRPTQRTFSSPPRRRRTSASDRWRAGTRGPRARWARSRCCRRARVRGTARRGGRGSRRSTARSSPTRR

SEQ ID NO: 160445 - protein, 194 aa, Zea Mays
MASRVTRLLLHRRLTTAAEASARRAPQAPCAGAAVSKDVVKAEASSLKNSRWHITRSNTSGPLTTRYECRKVFPCSVRPSASYSTQASDQKGKQEGKDLSNVEHPFDDITYNIPEKPVTFTEGASYSLVILAGLGIAGLAGYAVFKELIFEPKESRQGLATLLLDMARKLETVQLGKEFQIRFGQMRMVLNMWR

SEQ ID NO: 160446 - protein, 50 aa, Zea Mays
MASRVTRLLLHRRLTTAAEASARRAPQAPCAGAAVSKDVVKAEGQFPPLN

SEQ ID NO: 160447 - protein, 891 aa, Zea Mays
MPKPGGFPPLGAHGPFQPAPTPVPPLAGWMSNPPAITHPAVSGGAIGFGTPTNPAVLLKHPRTPTTGNPGMDYPSGDSDHISKRTRPVGMSEESHNYQQDDFHKAVARTLSQGSAPMSMDFHPLQQTLLLVGTNVGDIGLWDVGTKERLVVRNFKVWDLGKCTMTLQAALVKDPAVSVNRIIWSPDGTLFGVAYSRHIVQIYSYNGGDDIRQHLEIDAHVGGVNDIAFAHPNKQLCIITCGDDKTIKVWEATSGAKQFTFEGHEAPVYSVCPHYKENIQFIFSTALDGKIKAWLYDNLGSRVDYDAPGHWCTTMAYSADGSRLFSCGTSKDGESHLVEWNESEGAVKRTYQGFRKRSMGVVQFDTTRNRFLAAGDEFMIKIWDMDSTGLLTTIDADGGLTASPRIRFNKEGTLLAVSTADNGIKILANADGLRLLRTLENRSFDASRNASEAVTKPLINPLTAAANAAAASSSGAGAPSAITAMNGDSRSLVDVKPRIADESLDKSKVWKLMEITESSQCRSIKLADNMRTSKISRLIYTNSGLAILALTSSAVHLLWKWPRSDRNSGKATASVSPTLWQPPSGILMTNDTTDNNPEEAVHCFALSKNDSYVMSASGGKISLFNMMTFKTMTTFMPAPPAATFLAFHPQDNNIIAIGMDDSTIQIYNVRIDEVKSKLRGHSKRITGLAFSNVLNVLVSSGADAQLCVWNTDGWEKQKNRFLQIPSGRQSNILDTRVQFHQDQMHFLVVHETQIAIYETTKLEPVKQWPVRENSPPITHATFSCDSQLIYASFMDATVGIFNGSSLRLQCRILPASYLPPNISPSVHPVVVAAHPSEASQFALGLTDGGVFVLEPLESERKWGNPPPVENGSASNLSTPPPNGASSSDQPER

SEQ ID NO: 160448 - protein, 945 aa, Zea Mays
MENLGTRKVLNWQHQLCKNPRPNPDIKTLFVDHSCGQPNGARAPSPANSPLLGSMPKPGGFPPLGAHGPFQPAPTPVPPLAGWMSNPPAITHPAVSGGAIGFGTPTNPAVLLKHPRTPTTGNPGMDYPSGDSDHISKRTRPVGMSEESHNYQQDDFHKAVARTLSQGSAPMSMDFHPLQQTLLLVGTNVGDIGLWDVGTKERLVVRNFKVWDLGKCTMTLQAALVKDPAVSVNRIIWSPDGTLFGVAYSRHIVQIYSYNGGDDIRQHLEIDAHVGGVNDIAFAHPNKQLCIITCGDDKTIKVWEATSGAKQFTFEGHEAPVYSVCPHYKENIQFIFSTALDGKIKAWLYDNLGSRVDYDAPGHWCTTMAYSADGSRLFSCGTSKDGESHLVEWNESEGAVKRTYQGFRKRSMGVVQFDTTRNRFLAAGDEFMIKIWDMDSTGLLTTIDADGGLTASPRIRFNKEGTLLAVSTADNGIKILANADGLRLLRTLENRSFDASRNASEAVTKPLINPLTAAANAAAASSSGAGAPSAITAMNGDSRSLVDVKPRIADESLDKSKVWKLMEITESSQCRSIKLADNMRTSKISRLIYTNSGLAILALTSSAVHLLWKWPRSDRNSGKATASVSPTLWQPPSGILMTNDTTDNNPEEAVHCFALSKNDSYVMSASGGKISLFNMMTFKTMTTFMPAPPAATFLAFHPQDNNIIAIGMDDSTIQIYNVRIDEVKSKLRGHSKRITGLAFSNVLNVLVSSGADAQLCVWNTDGWEKQKNRFLQIPSGRQSNILDTRVQFHQDQMHFLVVHETQIAIYETTKLEPVKQWPVRENSPPITHATFSCDSQLIYASFMDATVGIFNGSSLRLQCRILPASYLPPNISPSVHPVVVAAHPSEASQFALGLTDGGVFVLEPLESERKWGNPPPVENGSASNLSTPPPNGASSSDQPER

SEQ ID NO: 160449 - protein, 227 aa, Zea Mays
MGLSQCLSNQSSTDLVQGDDPVAIDFTGMGKGEAWVNGQSIGRYWPTNLAPQSGCVNSCNYRGAYSSSKCLKKCGQPSQTLYHVPRSFLQPGSNDLVLFEHFGGDPSKISFVMRQTGSVCAQVSEAHPAQIDSWSSQQPMQRYGPALRLECPKEGQVISSVKFASFGTPSGTCGSYSHGECSSTQALSIVQEACIGVSSCSVPVSSNYFGNPCTGVTKSLAVEAACS

SEQ ID NO: 160450 - protein, 346 aa, Zea Mays
MHVWFLRHCCSSVMTLSGLVRQPKWGHLRDVHKAIKLCEPALIATDPSYTSLGPNVEAAVYKVGSVCAAFLANIDGQSDKTVTFNGKMYRLPAWSVSILPDCKNVVLNTAQINSQTTGSEMRYLESSNVASDGSFVTPELAVSDWSYAIEPVGITKDNALTKAGLMEQINTTADASDFLWYSTSITVKGDEPYLNGSQSNLAVNSLGHVLQVYINGKIAGSAQGSASSSLISWQKPIELVPGKNKIDLLSATVGLSNYGAFFDLVGAGITGPVKLSGLNGALDLSSAEWTYQIGLRGEDLHLYDPSEASPEWVSANAYPINHPLIWYKVMILSRLTSREWGKVKHG

SEQ ID NO: 160451 - protein, 551 aa, Zea Mays
MYGSFDMHVWFLRHCCSSVMTLSGLVRQPKWGHLRDVHKAIKLCEPALIATDPSYTSLGPNVEAAVYKVGSVCAAFLANIDGQSDKTVTFNGKMYRLPAWSVSILPDCKNVVLNTAQINSQTTGSEMRYLESSNVASDGSFVTPELAVSDWSYAIEPVGITKDNALTKAGLMEQINTTADASDFLWYSTSITVKGDEPYLNGSQSNLAVNSLGHVLQVYINGKIAGSAQGSASSSLISWQKPIELVPGKNKIDLLSATVGLSNYGAFFDLVGAGITGPVKLSGLNGALDLSSAEWTYQIGLRGEDLHLYDPSEASPEWVSANAYPINHPLIWYKTKFTPPAGDDPVAIDFTGMGKGEAWVNGQSIGRYWPTNLAPQSGCVNSCNYRGAYSSSKCLKKCGQPSQTLYHVPRSFLQPGSNDLVLFEHFGGDPSKISFVMRQTGSVCAQVSEAHPAQIDSWSSQQPMQRYGPALRLECPKEGQVISSVKFASFGTPSGTCGSYSHGECSSTQALSIVQEACIGVSSCSVPVSSNYFGNPCTGVTKSLAVEAACS

SEQ ID NO: 160452 - protein, 746 aa, Zea Mays
MPSSSVGYDFEGRKDLAAFVKTVADAGLYVHLRIGPYVCAEWNYGGFPLWLHFIPGIKFRTDNEPFKAEMQRFTAKIENEYGNIDSAYGAPGKAYMRWAAGMAVSLDTGVPWVMCQQADAPDPLINTCNGFYCDQFTPNSAAKPKMWTENWSGWFLSFGGAVPYRPVEDLAFAVARFYQRGGTFQNYYMYHGGTNLDRSSGGPFIATSYDYDAPIDEYGLVRQPKWGHLRDVHKAIKLCEPALIATDPSYTSLGPNVEAAVYKVGSVCAAFLANIDGQSDKTVTFNGKMYRLPAWSVSILPDCKNVVLNTAQINSQTTGSEMRYLESSNVASDGSFVTPELAVSDWSYAIEPVGITKDNALTKAGLMEQINTTADASDFLWYSTSITVKGDEPYLNGSQSNLAVNSLGHVLQVYINGKIAGSAQGSASSSLISWQKPIELVPGKNKIDLLSATVGLSNYGAFFDLVGAGITGPVKLSGLNGALDLSSAEWTYQIGLRGEDLHLYDPSEASPEWVSANAYPINHPLIWYKTKFTPPAGDDPVAIDFTGMGKGEAWVNGQSIGRYWPTNLAPQSGCVNSCNYRGAYSSSKCLKKCGQPSQTLYHVPRSFLQPGSNDLVLFEHFGGDPSKISFVMRQTGSVCAQVSEAHPAQIDSWSSQQPMQRYGPALRLECPKEGQVISSVKFASFGTPSGTCGSYSHGECSSTQALSIVQEACIGVSSCSVPVSSNYFGNPCTGVTKSLAVEAACS

SEQ ID NO: 160453 - protein, 291 aa, Zea Mays
MLGHDLATDPSSTLRMVTSRVSSAPLGLVCSLSFDRGFKEKNNIFINVDRCMKYSTFCYAPRNPNITPLATASFGDMADSSIFTFPRIHVKDPYQRLGISREASEEEIRAARIYLISKYGGHSQALMQLSVPMIGLSCRVSLIGKKPKTNLKKKIRELSQSRAVKAIQGRFQTPRSKVIWQTAITFVLLGVLTLAFPTEEGPTLQVAISCAANIYFIYQRVKSGWRAFFYGLGSFFASLFLGTFLMVSLIPPVLPGPRNLEVSTACVTYVLLFVSPTFLKSCVEACQLASE

SEQ ID NO: 160454 - protein, 59 aa, Zea Mays
MHSLSKVGLFYQLVGKSLRVLVSCPLYSLWFLNLNTKQLDRNHHWFGVCVCVSWQESSN

SEQ ID NO: 160455 - protein, 171 aa, Zea Mays
MYHFISGYTALVAGTEDGIKEPQATFSACFGAAFIMLHPTKYAAMLAEKMQKYGATGWLVNTGWSGGRYGVGKRIRLPYTRKIIDAIHSGELLTANYQKTEVFGLEIPTEINGVPSEILDPINTWTDKAAYKENLLRLGGLFKKNFEVFASYKIGDDSSLTDEILAAGPNF

SEQ ID NO: 160456 - protein, 455 aa, Zea Mays
MDEKTFLINRERAVDYLNSLEKVFVNDQYLNWDPENRIKVRIISARAYHSLFMHNMCIRPTDEELEDFGTPDFTIYNAGQFPCNRYTHYMTSSTSIDLNLARREMVIMGTQYAGEMKKGLFGVMHYLMPKRGILSLHSGCNMGKDGDVALFFGLSGTGKTTLSTDHNRLLIGDDEHCWSDNGVSNIEGGCYAKCIDLAQEKEPDIWNAIKFGTVLENVVFDEHTREVDYADNSVTENTRAAYPIEYIPNAKIPCVGPHPKNVILLACDAFGVLPPVSKLNLAQTMYHFISGYTALVAGTEDGIKEPQATFSACFGAAFIMLHPTKYAAMLAEKMQKYGATGWLVNTGWSGGRYGVGKRIRLPYTRKIIDAIHSGELLTANYQKTEVFGLEIPTEINGVPSEILDPINTWTDKAAYKENLLRLGGLFKKNFEVFASYKIGDDSSLTDEILAAGPNF

SEQ ID NO: 160457 - protein, 419 aa, Zea Mays
MQPPLQAQGAMANVAAILTVPCSAGRRPKRSSQPRGCGSVSVSVSVRASSGANTVTLLDYGAGNVRSVRNAIRYLGFDIRDVQSPEDIVAAERLVFPGVGAFGSAMDVLNRTGMANALREYIQRDRPFLGICLGLQLLFDSSEENGPVSGLGVIPGVVRRFDSSNGLIVPHIGWNALQITKDTPLLQGADGQHVYFVHSYRVLPSDANRNWISSICNYGDSFISSISMGNIQAVQFHPEKSGATGLSILKEFLRPNSLGTKVPARRKASKLAKRVIACLDVRSNDKGDLVVTKGDQYDVRDHTSSKEVRNLGKPVDLASQYYIDGADEVSFLNITGFRDFPLGDLPMLEVLRCASEKVFVPLTVGGGIRDFTDANGRYYSSLEVASEYFRSGADKISIGSDAVYAAEAFLQTGFFLCIR

SEQ ID NO: 160458 - protein, 356 aa, Zea Mays
MGNIQAVQFHPEKSGATGLSILKEFLRPNSLGTKVPARRKASKLAKRVIACLDVRSNDKGDLVVTKGDQYDVRDHTSSKEVRNLGKPVDLASQYYIDGADEVSFLNITGFRDFPLGDLPMLEVLRCASEKVFVPLTVGGGIRDFTDANGRYYSSLEVASEYFRSGADKISIGSDAVYAAEAFLQTGVKTGKSSLEQISRVYGNQAVVVSIDPRRVYVKSQEDVPFKTVKVSTKGPSGEEYAWYQCTVNGGRDSRAIGAYELAKAVEELGAGEILLNCIDCDGQGCGFDIDLVKMVSDAVTIPVIASSGAGAVQHFSEIFEKTNASAALAAGIFHRKEVPILAVKEHLVNAGVEVRV

SEQ ID NO: 160459 - protein, 247 aa, Zea Mays
MQPPLQAQGAMANVAAILTVPCSAGRRPKRSSQPRGCGSVSVSVSVRASSGANTVTLLDYGAGNVRSVRNAIRYLGFDIRDVQSPEDIVAAERLVFPGVGAFGSAMDVLNRTGMANALREYIQRDRPFLGICLGLQLLFDSSEENGPVSGLGVIPGVVRRFDSSNGLIVPHIGWNALQITKDTPLLQGADGQHVYFVHSYRVLPMLIETGFPPYATMVTALYPPSQWATFRQFNFTQKRVELPDFLF

SEQ ID NO: 160460 - protein, 336 aa, Zea Mays
MQPPLQAQGAMANVAAILTVPCSAGRRPKRSSQPRGCGSVSVSVSVRASSGANTVTLLDYGAGNVRSVRNAIRYLGFDIRDVQSPEDIVAAERLVFPGVGAFGSAMDVLNRTGMANALREYIQRDRPFLGICLGLQLLFDSSEENGPVSGLGVIPGVVRRFDSSNGLIVPHIGWNALQITKDTPLLQGADGQHVYFVHSYRVLPSDANRNWISSICNYGDSFISSISMGNIQAVQFHPEKSGATGLSILKEFLRPNSLGTKVPARRKASKLAKRVIACLDVRSNDKGDLVVTKGDQYDVRDHTSSKEVRNLGKPVDLASQYYIDGADELLEYNWFP

SEQ ID NO: 160461 - protein, 365 aa, Zea Mays
MQPPLQAQGAMANVAAILTVPCSAGRRPKRSSQPRGCGSVSVSVSVRASSGANTVTLLDYGAGNVRSVRNAIRYLGFDIRDVQSPEDIVAAERLVFPGVGAFGSAMDVLNRTGMANALREYIQRDRPFLGICLGLQLLFDSSEENGPVSGLGVIPGVVRRFDSSNGLIVPHIGWNALQITKDTPLLQGADGQHVYFVHSYRVLPSDANRNWISSICNYGDSFISSISMGNIQAVQFHPEKSGATGLSILKEFLRPNSLGTKVPARRKASKLAKRVIACLDVRSNDKGDLVVTKGDQYDVRDHTSSKEVRNLGKPVDLASQYYIDGADEVSFLNITGFRDFPLGDLPMLEILLKFGGSIRIFQVRC

SEQ ID NO: 160462 - protein, 390 aa, Zea Mays
MQPPLQAQGAMANVAAILTVPCSAGRRPKRSSQPRGCGSVSVSVSVRASSGANTVTLLDYGAGNVRSVRNAIRYLGFDIRDVQSPEDIVAAERLVFPGVGAFGSAMDVLNRTGMANALREYIQRDRPFLGICLGLQLLFDSSEENGPVSGLGVIPGVVRRFDSSNGLIVPHIGWNALQITKDTPLLQGADGQHVYFVHSYRVLPSDANRNWISSICNYGDSFISSISMGNIQAVQFHPEKSGATGLSILKEFLRPNSLGTKVPARRKASKLAKRVIACLDVRSNDKGDLVVTKGDQYDVRDHTSSKEVRNLGKPVDLASQYYIDGADEVSFLNITGFRDFPLGDLPMLEVLRCASEKVFVPLTVGGGIRDFTDANGRYYSSLEVASEYFR

SEQ ID NO: 160463 - protein, 162 aa, Zea Mays
MELEYKEIQSVAAENKSVIGRPAEFALVDADGTTAFLQKALKFIEDYGKNEFSPEEDAHVIGDCIKCILREMPSSPIPAPCCTALVRAYRTDKTKRLDAMNRVIYEVFPEPNRQLLQRILKTVRTLQMLIPSLTLTRNILQTMTSLKIMMAPLVLVKMLKKI

SEQ ID NO: 160464 - protein, 366 aa, Zea Mays
MKYSQNQIVNCCRDNDIPEDYDGSSGSGEDVEEDLNDDTEHSYGMKVECDSNIRIDNANDKARKGLPTEEDGCSSDNDKAHITKLENKKTHLQSKLTEEEKENTVLQANLEKRKEALHKRRVALEKEVENLRDQLLKERSLRASLESGLMNMRRGQVSFPSTIDTKTKADLEEVAAVEADIMNLKQKVSDLRGQLNNQVQLSSTSLCESCNNKRSINADKLVEGEQNAALSPQIASVEAPPIVGSYSVPDMFWATNQMVQKMLYSKGEIAKDGQDGSLTSRWNFAQRPHSNSPVMSRVQGSDAYSSTKTEESGGAPSSALAKLTTRLNFLKERRALLASEMQNLDLGRSQAQRHTAPPKAETPTEK

SEQ ID NO: 160465 - protein, 217 aa, Zea Mays
MNMRRGQVSFPSTIDTKTKADLEEVAAVEADIMNLKQKVSDLRGQLNNQVQLSSTSLCESCNNKRSINADKLVEGEQNAALSPQIASVEAPPIVGSYSVPDMFWATNQMVQKMLYSKGEIAKDGQDGSLTSRWNFAQRPHSNSPVMSRVQGSDAYSSTKTEESGGAPSSALAKLTTRLNFLKERRALLASEMQNLDLGRSQAQRHTAPPKAETPTEK

SEQ ID NO: 160466 - protein, 256 aa, Zea Mays
MKVECDSNIRIDNANDKVENLRDQLLKERSLRASLESGLMNMRRGQVSFPSTIDTKTKADLEEVAAVEADIMNLKQKVSDLRGQLNNQVQLSSTSLCESCNNKRSINADKLVEGEQNAALSPQIASVEAPPIVGSYSVPDMFWATNQMVQKMLYSKGEIAKDGQDGSLTSRWNFAQRPHSNSPVMSRVQGSDAYSSTKTEESGGAPSSALAKLTTRLNFLKERRALLASEMQNLDLGRSQAQRHTAPPKAETPTEK

SEQ ID NO: 160467 - protein, 751 aa, Zea Mays
MSAPEFRTSYQQSPENVGQLKVCQCGSGDSNFQITNKSDGGENSPTTCPNCQVLKSGNLLLSSKGIGWTVWKKRWFILTRTSLVFFRSDPNVPPPRGSEPIVTLGGIDLNNTASMIVKEERKLITVVFPDGRDGRTFTLKAETTEDLNEWRSALENALAQAPSVVNTAGQLPVVSTDITEPVEAAVEQSENKSVIGRPAEFALVDADGTTAFLQKALKFIEDYGKNEFSPEEDAHVIGDCIKCILREMPSSPIPAPCCTALVRAYRTDKTKRLDAMNRVIYEVFPEPNRQLLQRILKMMQIVGSHKAVNRMSSSALAACMAPLLLRPLLLGECEIDSEFSMAGDGSFQLLQAAAAANHAQAIVIIMLEEYDQIFDDIEDGSYSSDAYTESDIDKEYSTDNDIPEDYDGSSGSGEDVEEDLNDDTEHSYGMKVECDSNIRIDNANDKARKGLPTEEDGCSSDNDKAHITKLENKKTHLQSKLTEEEKENTVLQANLEKRKEALHKRRVALEKEVENLRDQLLKERSLRASLESGLMNMRRGQVSFPSTIDTKTKADLEEVAAVEADIMNLKQKVSDLRGQLNNQVQLSSTSLCESCNNKRSINADKLVEGEQNAALSPQIASVEAPPIVGSYSVPDMFWATNQMVQKMLYSKGEIAKDGQDGSLTSRWNFAQRPHSNSPVMSRVQGSDAYSSTKTEESGGAPSSALAKLTTRLNFLKERRALLASEMQNLDLGRSQAQRHTAPPKAETPTEK

SEQ ID NO: 160468 - protein, 391 aa, Zea Mays
MSAPEFRTSYQQSPENVGQLKVCQCGSGDSNFQITNKSDGGENSPTTCPNCQVLKSGNLLLSSKGIGWTVWKKRWFILTRTSLVFFRSDPNVPPPRGSEPIVTLGGIDLNNTASMIVKEERKLITVVFPDGRDGRTFTLKAETTEDLNEWRSALENALAQAPSVVNTAGQLPVVSTDITEPVEAAVEQSENKSVIGRPAEFALVDADGTTAFLQKALKFIEDYGKNEFSPEEDAHVIGDCIKCILREMPSSPIPAPCCTALVRAYRTDKTKRLDAMNRVIYEVFPEPNRQLLQRILKMMQIVGSHKAVNRMSSSALAACMAPLLLRPLLLGECEIDSEFSMAGDGSFQLLQAAAAANHAQAIVIIMLEEYDQIFDVPAFPWTCFSLQACSI

SEQ ID NO: 160469 - protein, 754 aa, Zea Mays
MSAPEFRTSYQQSPENVGQLKVCQCGSGDSNFQITNKSDGGENSPTTCPNCQVLKSGNLLLSSKGIGWTVWKKRWFILTRTSLVFFRSDPNVPPPRGSEPIVTLGGIDLNNTASMIVKEERKLITVVFPDGRDGRTFTLKVACAETTEDLNEWRSALENALAQAPSVVNTAGQLPVVSTDITEPVEAAVEQSENKSVIGRPAEFALVDADGTTAFLQKALKFIEDYGKNEFSPEEDAHVIGDCIKCILREMPSSPIPAPCCTALVRAYRTDKTKRLDAMNRVIYEVFPEPNRQLLQRILKMMQIVGSHKAVNRMSSSALAACMAPLLLRPLLLGECEIDSEFSMAGDGSFQLLQAAAAANHAQAIVIIMLEEYDQIFDDIEDGSYSSDAYTESDIDKEYSTDNDIPEDYDGSSGSGEDVEEDLNDDTEHSYGMKVECDSNIRIDNANDKARKGLPTEEDGCSSDNDKAHITKLENKKTHLQSKLTEEEKENTVLQANLEKRKEALHKRRVALEKEVENLRDQLLKERSLRASLESGLMNMRRGQVSFPSTIDTKTKADLEEVAAVEADIMNLKQKVSDLRGQLNNQVQLSSTSLCESCNNKRSINADKLVEGEQNAALSPQIASVEAPPIVGSYSVPDMFWATNQMVQKMLYSKGEIAKDGQDGSLTSRWNFAQRPHSNSPVMSRVQGSDAYSSTKTEESGGAPSSALAKLTTRLNFLKERRALLASEMQNLDLGRSQAQRHTAPPKAETPTEK

SEQ ID NO: 160470 - protein, 188 aa, Zea Mays
MSAPEFRTSYQQSPENVGQLKVCQCGSGDSNFQITNKSDGGENSPTTCPNCQVLKSGNLLLSSKGIGWTVWKKRWFILTRTSLVFFRSDPNVPPPRGSEPIVTLGGIDLNNTASMIVKEERKLITVVFPDGRDGRTFTLKAETTEDLNEWRSALENALAQAPSVVNTAGQLPVVSTDITEPVEAAVEQ

SEQ ID NO: 160471 - protein, 249 aa, Zea Mays
MSAPEFRTSYQQSPENVGQLKVCQCGSGDSNFQITNKSDGGENSPTTCPNCQVLKSGNLLLSSKGIGWTVWKKRWFILTRTSLVFFRSDPNVPPPRGSEPIVTLGGIDLNNTASMIVKEERKLITVVFPDGRDGRTFTLKAETTEDLNEWRSALENALAQAPSVVNTAGQLPVVSTDITEPVEAAVEQSENKSVIGRPAEFALVDADGTTAFLQKALKFIEDYGVKVEGILRQSADVEEVKRRVQDYEK

SEQ ID NO: 160472 - protein, 254 aa, Zea Mays
MSAPEFRTSYQQVSSSQSPENVGQLKVCQCGSGDSNFQITNKSDGGENSPTTCPNCQVLKSGNLLLSSKGIGWTVWKKRWFILTRTSLVFFRSDPNVPPPRGSEPIVTLGGIDLNNTASMIVKEERKLITVVFPDGRDGRTFTLKAETTEDLNEWRSALENALAQAPSVVNTAGQLPVVSTDITEPVEAAVEQSENKSVIGRPAEFALVDADGTTAFLQKALKFIEDYGVKVEGILRQSADVEEVKRRVQDYEK

SEQ ID NO: 160473 - protein, 268 aa, Zea Mays
MLVAAPATKGSPTKDLTAVEPGDEVAQSVFDAGGAMGSVSVCQANGNHQPPPPQAEAEQVVEDGVAVDRINGNYQPLELVAEAGQVVEEGDAGVTMEGVASIALLPTGAISGHFIRLPDSICYGLHGTHQHFHCYTQHFLETKSISCERECSRGEDYRLIKLTIIDFKSKREKVLVVECRGHDAARLQNIDHLHGWEDDIVGLVEKEHGNQKVLLSFECETLKADKDAEDHIAKYMPNLCGLDAVVNIGKMSISGINLDEDAEPRGDN

SEQ ID NO: 160474 - protein, 109 aa, Zea Mays
MLVAAPATKGSPTKDLTAVEPGDESKREKVLVVECRGHDAARLQNIDHLHGWEDDIVGLVEKEHGNQKVLLSFECETLKADKDAEDHIAKYMPNLCGLDAVGNGNVNGI

SEQ ID NO: 160475 - protein, 85 aa, Zea Mays
MIWFQGAVTKGPDRAVLQRWPKTCRKAARAEFFSKSFLLHTVEEGSGKGRVDAGVRWRRSRGNVSLQLRSCWWRRRPQKAHPPRI

SEQ ID NO: 160476 - protein, 126 aa, Zea Mays
MGSVSVCQANGNHQPPPPQAEAEQVVEDGVAVDRINGNYQPLELVAEAGQVVEEGDAGVTMEGVASIALLPTGAISGHFIRLPDSICYGLHGTRIHLSPFPLQQLLVPSKFHAWEKYCYVILISKF

SEQ ID NO: 160477 - protein, 62 aa, Zea Mays
MVGLMDYCSSWTEALRSKMKQKALQECDFYCSKYAECARGRTFSVVWQCRKQAKELNECLHQ

SEQ ID NO: 160478 - protein, 179 aa, Zea Mays
MAPSQSRAVAILLHPICSLSDIHQWPAGLSWPCLAASALLVHRGRASPPPACMFSVDCPSAPVLSGVRCDLPVRAIRPRPPSSCQFIGCTRLLSAAAPPIQSSTLLQKVWIALLVLYSAHCSVAVLYSVHCCAVVLYSAIFIGWLRQSQAAVVPPAVHAPIAVGENQSDPKVHLKRKIK

SEQ ID NO: 160479 - protein, 93 aa, Zea Mays
MYCRRTCSNSCSPTLKELFFFKVVKRRPWVPMALAPRQVCSSPLCNITIVTIFCTHNTKLHIYIHPRLSDLSLSFVLPLLIFHNNPIGKACKS

SEQ ID NO: 160480 - protein, 309 aa, Zea Mays
MALTVFETTEQQLLPCQQAVEQGAGRWRGRRCGRREGYRHAEGDGPRRRRRPAGEGRHMEHDSGAEAAAARRAQAGAVRAPARAPLVQPAHPEEPGDLHREPGLGDRLGRLLRRRRLRDRALVPGLRRRARGGGGGGGGGGGPTRGPAQGVPAAAADDEEDEVEVVDRGTVVEVKVSAQPQARSGRGPRVHRSALVINKFVGAEPVTSCEIDGDGDGATAPQHPVARRSTGSTTTAVAALAAASALSAAAAPPDSGDDAVPGATCGENKLLMTAKRHSSKEELMKHMRRCSGQLSPSLFVWEGCIATSS

SEQ ID NO: 160481 - protein, 723 aa, Zea Mays
MAQSLELLLIQFLMPDNDARRQAEEQIRRLARDPQVVPALVHHLRTAKTPNVRQLAAVLLRKKITSHWPKLPADSKASLKQALIDSITLDHSHPVRRASANVVSIIAKYAIPAGEWPELLPFLFQCSQSPQEDHREVALILFSSLTETIGATFQSHLNNLQPILLKCLQDETSSRVRIAALKAVGSFIEYVNDGGDIPYQAKEPLDRDMTSRLKGLQFVPLCNYFWSLVKHTLNAFEFEVLVEQTPTKRCSNPAHTPIHHIKHQVKQQQTNKCDCSGVSEGATKFTFRGGGTRLQEAHGSEVWSSCRTGLEEGRSGRVRGRLEEARRKGKEGQEEVKMFRDFVPSILNISRQCLANGEEDVASIAFEIFDELIESPAPLLGDSVRSIVQFSLEVSANQDLEINIRQQAIQIISWLVKFKASFLKKHKLVVPILQVMCPLLTETANEDEDSDLAADRSAAEVIDTMAINLPRHVLAPVLEFASLSFHHINPKYREAAVTSLGVISEGCCEHLKDKLEDCLKIVLEALKDQEQMVRGAASFALGQFAEHLQPEILSHYASVLPCILNALEDPSDEVKEKSYYALAAFCEDMGEDILPYLEPLICRLVMSLQSSPRNLQETCMSAIGSVAAAAEQAFTPYAEKVLEMMKGFMVLINDEDLCARARATEVVGIVAMAVGRARIEAILPPFIEASISGFGLDYSELREYTHGFFSNVAEILGDSFTQH

SEQ ID NO: 160482 - protein, 696 aa, Zea Mays
MAQSLELLLIQFLMPDNDARRQAEEQIRRLARDPQVVPALVHHLRTAKTPNVRQLAAVLLRKKITSHWPKLPADSKASLKQALIDSITLDHSHPVRRASANVVSIIAKYAIPAGEWPELLPFLFQCSQSPQEDHREVALILFSSLTETIGATFQSHLNNLQPILLKCLQDETSSRVRIAALKAVGSFIEYVNDGGDIVKMFRDFVPSILNISRQCLANGEEDVASIAFEIFDELIESPAPLLGDSVRSIVQFSLEVSANQDLEINIRQQAIQIISWLVKFKASFLKKHKLVVPILQVMCPLLTETANEDEDSDLAADRSAAEVIDTMAINLPRHVLAPVLEFASLSFHHINPKYREAAVTSLGVISEGCCEHLKDKLEDCLKIVLEALKDQEQMVRGAASFALGQFAEHLQPEILSHYASVLPCILNALEDPSDEVKEKSYYALAAFCEDMGEDILPYLEPLICRLVMSLQSSPRNLQETCMSAIGSVAAAAEQAFTPYAEKVLEMMKGFMVLINDEDLCARARATEVVGIVAMAVGRARIEAILPPFIEASISGFGLDYSELREYTHGFFSNVAEILGDSFTQYLPHVVPLVFSSCNLDDGSAVDIDDADSIENGFGGVSSDDDVNDEPRVRNISVRTGVLDEKAAATQAIGFFALHTKSAYAPYPLGRLQQFIHMENNRSATPTIFCIKSRMIF

SEQ ID NO: 160483 - protein, 1033 aa, Zea Mays
MAQSLELLLIQFLMPDNDARRQAEEQIRRLARDPQVVPALVHHLRTAKTPNVRQLAAVLLRKKITSHWPKLPADSKASLKQALIDSITLDHSHPVRRASANVVSIIAKYAIPAGEWPELLPFLFQCSQSPQEDHREVALILFSSLTETIGATFQSHLNNLQPILLKCLQDETSSRVRIAALKAVGSFIEYVNDGGDIVKMFRDFVPSILNISRQCLANGEEDVASIAFEIFDELIESPAPLLGDSVRSIVQFSLEVSANQDLEINIRQQAIQIISWLVKFKASFLKKHKLVVPILQVMCPLLTETANEDEDSDLAADRSAAEVIDTMAINLPRHVLAPVLEFASLSFHHINPKYREAAVTSLGVISEGCCEHLKDKLEDCLKIVLEALKDQEQMVRGAASFALGQFAEHLQPEILSHYASVLPCILNALEDPSDEVKEKSYYALAAFCEDMGEDILPYLEPLICRLVMSLQSSPRNLQETCMSAIGSVAAAAEQAFTPYAEKVLEMMKGFMVLINDEDLCARARATEVVGIVAMAVGRARIEAILPPFIEASISGFGLDYSELREYTHGFFSNVAEILGDSFTQYLPHVVPLVFSSCNLDDGSAVDIDDADSIENGFGGVSSDDDVNDEPRVRNISVRTGVLDEKAAATQAIGFFALHTKSAYAPYPLGRLQQFIHMENNRSATPTIFCIKSRMDVLEKQKDVLDTVLNIYIKTMTEDDDKEVVAQACMSVADIVKDCGFAAIEPYMLRLAEVTLVLLRQESSCQQVESDGEDDGDIDHDEVLMDAVSDLLPAFAKVMGSYFDPIFAKLFDPLMKFAKSPHPPQDKTMVVATLAEVAQEMGAPISAYVDKIMPLVLKELASSDATNRRNAAFCAGEICKNGGAAALKYYGDILRSLHNLFSNSESDDAVRDNAAGAIARMIMVQPQSIPLNQVLPVFIKALPLKEDHEESMTVYGCVCGLLLSSHPQILPLVPDVIHVFAQVVVSPDESDEVKTNIGKAISHLISVYGQQMQPILSALPPAHANALASFASRR

SEQ ID NO: 160484 - protein, 570 aa, Zea Mays
MGPPFSAQDPAPSPSGGSGSGSSRRRLRRLDRRNASKNISYNATNYCQYPPSPQVASAPGSGRASLAGSLACSIDVVNSFRIGGNGDGGRDLRFLCESLGLSGPDDFAIPLADWEAHKAVRSSTSASGSPNSARTNHDSPQRDSPFCQVGAEEPAQAADADPELLAGTGRDGPIEAPERPARLDPPPESTFPDVRRAVGEGGIKGVRPPPVLKPPPSMALPAVCGVGSTWDILRSFAPDEKEDAPASRTVRRFGHRAAEEKDDDEDGAVLLMLDDLRLEESSEGFTGTSSLSTTNDDETSSTTTESMFYISPNGRFRRRIRSWNRGMLLGSGSFGTVYEGISDEGVFFAVKEVNLFDKGSNAKQCIFQLEQEIALLSQFEHENIVQYYGTDKEDSKLYIFLELLTQGSLALLYQRDIKCANILVHANGSVKLADFGLAKEITKFNAVKSCKGTVYWMAPEVVNPKKTYGPAADIWSLGCTVLEMLTRQIPYPGLEWTQALYRIGKGESPAIPSSLSKDARDFISQCVKPNPEDRPSAIKLLEHPFVNKPIRSVWSLRTSSRSNSSTRGIN

SEQ ID NO: 160485 - protein, 578 aa, Zea Mays
MGPPFSAQDPAPSPSGGSGSGSSRRRLRRLDRRNASKNISYNATNYCQYPPSPQVASAPGSGRASLAGSLACSIDVVNSFRIGGNGDGGRDLRFLCESLGLSGPDDFAIPLADWEAHKAVRSSTSASGSPNSARTNHDSPQRDSPFCQVGAEEPAQAADADPELLAGTGRDGPIEAPERPARLDPPPESTFPDVRRAVGEGGIKGVRPPPVLKPPPSMALPAVCGVGSTWDILRSFAPDEKEDAPASRTVRRFGHRAAEEKDDDEDGAVLLMLDDLRLEESSEGFTGTSSLSTTNDDETSSTTTESMFYISPNGRFRRRIRSWNRGMLLGSGSFGTVYEGISDEGVFFAVKEVNLFDKGSNAKQCIFQLEQEIALLSQFEHENIVQYYGTDKRYRLRDTHVSAYTRQILNGLIYLHEKNIVHRDIKCANILVHANGSVKLADFGLAKEITKFNAVKSCKGTVYWMAPEVVNPKKTYGPAADIWSLGCTVLEMLTRQIPYPGLEWTQALYRIGKGESPAIPSSLSKDARDFISQCVKPNPEDRPSAIKLLEHPFVNKPIRSVWSLRTSSRSNSSTRGIN

SEQ ID NO: 160486 - protein, 440 aa, Zea Mays
MGPPFSAQDPAPSPSGGSGSGSSRRRLRRLDRRNASKNISYNATNYCQYPPSPQVASAPGSGRASLAGSLACSIDVVNSFRIGGNGDGGRDLRFLCESLGLSGPDDFAIPLADWEAHKAVRSSTSASGSPNSARTNHDSPQRDSPFCQVGAEEPAQAADADPELLAGTGRDGPIEAPERPARLDPPPESTFPDVRRAVGEGGIKGVRPPPVLKPPPSMALPAVCGVGSTWDILRSFAPDEKEDAPASRTVRRFGHRAAEEKDDDEDGAVLLMLDDLRLEESSEGFTGTSSLSTTNDDETSSTTTESMFYISPNGRFRRRIRSWNRGMLLGSGSFGTVYEGISDEGVFFAVKEVNLFDKGSNAKQCIFQLEQEIALLSQFEHENIVQYYGTDKEDSKLYIFLELLTQGSLALLYQRYRLRDTHVSAYTRQILNGLIYLHDL

SEQ ID NO: 160487 - protein, 84 aa, Zea Mays
MVLVVVGDQLEYSDDVCGVVLSVRFNEDILSVWNRNASDHQAVMALRDSIKRHLKLPHSYLMEYKPHDASRRDNSSYRNTWLRG

SEQ ID NO: 160488 - protein, 61 aa, Zea Mays
MAVPMAFVDEVEQRLLFCKVYVYNYVDCNSPNTMYIPPAVVPMSLSLRTTPNVGLDPVILF

SEQ ID NO: 160489 - protein, 269 aa, Zea Mays
MDVSCSSLSYAAGSLPPLLTPTSCPLPHTCLLQISPRPTSPASRPAPLAQAFDHRLPPPRTPSRHVARMGVWTEHFLFLLSPLGHLRRCFAPSAPTPEPPLACLAFCTALSTDPPPPPPTKVRALVAGPVALGSVRRPSRAVVMCLRRRAIQMLLDVSFAYALDVLFLESPSLSPGRPRWIPRLSLADAQVADVVHGELGLNFVLEQNTLKSIEIELTEEMAPNLLQTDMVMQFGLLEALEFVQEKMSSFMKLGDGSQKLLILSWAGDP

SEQ ID NO: 160490 - protein, 130 aa, Zea Mays
MWRFFRIGTIVLALHDTSDVFLETAKLCKYTEKELGASLFFGLFAISWLLLRLIYFPFWIIKASSYHSITFWRKLDEFPTALYYIFNTMLLTLLVFHMYWWKLICLMIMRQLNNKGQVTDDVRSDSEDDE

SEQ ID NO: 160491 - protein, 176 aa, Zea Mays
MLFYMCQCGFYIYSIGALVAWETRRKDFAVMMSHHVITSTLIGVSYLTGFFRIGTIVLALHDTSDVFLETAKLCKYTEKELGASLFFGLFAISWLLLRLIYFPFWIIKASSYHSITFWRKLDEFPTALYYIFNTMLLTLLVFHMYWWKLICLMIMRQLNNKGQVTDDVRSDSEDDE

SEQ ID NO: 160492 - protein, 173 aa, Zea Mays
MSDEARQAKIVKFSESIWKLTYYASVQAWVLMIIKQEPWSLDMVQYFDGWPNQPIVSSLMLFYMCQCGFYIYSIGALVAWETRRKDFAVMMSHHVITSTLIGVSYLTGYHSITFWRKLDEFPTALYYIFNTMLLTLLVFHMYWWKLICLMIMRQLNNKGQVTDDVRSDSEDDE

SEQ ID NO: 160493 - protein, 570 aa, Zea Mays
MNSIMSDSKPKCLVIDEIDGALGDGKGAVEVILKMINAEKSNNSDKSTNGEETQARKTSRKSHRTAKLLRPVICICNDIYAPALRQLRQVAKVHVFVQPTISRVVNRLKYICKNEGFKASSIALSALAEYTECDIRSCLNTLQFLNKKRVALNITAIDSQVIGQKDKSKSILDVWKQVLQKKRLKRAGKAESLFNEDKDIDFLFTLISNRGDYEVTMDGIHENFLRLSYHDPMLQKTVKCLDILGVSDSLTQYVYRTQQMPLHAYQPPIAITISRMVAQVEKPNINWPKALQRSRALLLEKKDMLKTWQNQMSPFVSRHLSVESFVEDTASPLLHILSPLSLRPVALNLLSEREKDELVQLVDTMVSYSVTYRNTKFVPQEKANLSVVPHEVSSLSLYPPINDVINFEGYQSEHIGLSLAMKQVLVHEVEKQKIIKDSAGKLLNQSNDGNMKSEALSTIRKKTVANSIRPALHSSKDSSKCNSSTLEMQSNSASIVNDNDSISAKKHSSRAANFFDRFRKERPVDAKTHSDVGLQRATLQRDSRPLIFKYNEGFTNAVKRPVRVRDLLLS

SEQ ID NO: 160494 - protein, 725 aa, Zea Mays
MDMDMEMPDPDELEWMESHGLVPEEEDAYFDDPDEGFVLAPGDSDQPCNSPQPQESAAPRANEAPGGLKRPPPPPPPEQDEEEERSKRRNVEQEDEDWLRYSPPPAPEIVVAEKTISRFASEIHGDSVPVTAPNGERVYAKLAMEGLVGRGISGTRQGVQFSNPNSNHKGLLSESFDSLTRRAEQEALAKALQESTDSIDRVACSATPLVTEKLWVEKYAPNSFTELLSDEHTNREVLLWLKQWDSIVFGSHIRATGDDVLSALRRHSSTIQKNASNRNFFSKSKGGPVASQDGTPLNAQSSNPEGLGGSFSKKSSVDNAPEQKVLLLCGPPGLGKTTLAHVAVRHCGYHVVEINASDDRSASSIETKILDVVQMNSIMSDSKPKCLVIDEIDGALGDGKGAVEVILKMINAEKSNNSDKSTNGEETQARKTSRKSHRTAKLLRPVICICNDIYAPALRQLRQVAKVHVFVQPTISRVVNRLKYICKNEGFKASSIALSALAEYTECDIRSCLNTLQFLNKKRVALNITAIDSQVIGQKDKSKSILDVWKQVLQKKRLKRAGKAESLFNEDKDIDFLFTLISNRGDYEVTMDGIHENFLRLSYHDPMLQKTVKCLDILGVSDSLTQYVYRTQQMPLHAYQPPIAITISRMVAQVEKPNINWPKALQRSRALLLEKKDMLKTWQNQMSPFVSRHLSVESFVEDTASPLLHILSPLSLRPVSCHSLI

SEQ ID NO: 160495 - protein, 150 aa, Zea Mays
MRSACYITEKASQTFDRIRRWRVTLAQNPSLQLIYLLLAPTRINFRRRPFLSVARLAPTPPPLPWPRRRMRPRRRRPSRPSPEAGSRRRRSGARVSKRRRSTTLCSSTRPPMTSCSPRCPSTSRSPHPSSPSVSGSIRSLRIHQLPIQRG

SEQ ID NO: 160496 - protein, 288 aa, Zea Mays
MSVQEYLGKHLLSRKSEEALNTAVRAKAPDPALFIVGHMRREAPTVITRVRARQILDGRSAPAVEVELHTNKAVHRASTASVGALEGAAADAAGASERRKFLARGVAYAVRVINDKVSEALVGMDPQQQAQIDQAIMDLTRRATDFIQMEIDMILCEMQAELGANTMLAVSIAACKAGAAEKEVPLYKHIADLVGKSATTLPVPANTVINGGKHAGNGLPIQEIMILLVGAMNFEEAMQMGSETYHHLKDIILEKCGSDSCNIGDHGGFAPNISRPGSCYCGNREGWV

SEQ ID NO: 160497 - protein, 148 aa, Zea Mays
MSLYNSSSSASVDANILRWLSEKLQLVTIYDLNHESLTLHEMASGGDPGGIVEKMSTLLKEIKDFVQAEDPEMGGKSSPKGNSACPVIPDDFYCPISLDLMKDPVIVATGLMSEVKGMQQQHCLTCVFTKATRGRLLELDTTRTAHGD

SEQ ID NO: 160498 - protein, 313 aa, Zea Mays
MSVQEYLGKHLLSRKSEEALNTAVRAKAPDPALFIVGHMRREAPTVITRVRARQILDGRSAPAVEVELHTNKAVHRASTASVGALEGAAADAAGASERRKFLARGVAYAVRVINDKVSEALVGMDPQQQAQIDQAIMDLTRRATDFIQMEIDMILCEMQAELGANTMLAVSIAACKAGAAEKEVPLYKHIADLVGKSATTLPVPANTVINGGKHAGNGLPIQEIMILLVGAMNFEEAMQMGSETYHHLKDIILEKCGSDSCNIGDHGGFAPNISSISEGLDLVIAAIERAGYNGRIKLTIDVAATDFCVGCMG

SEQ ID NO: 160499 - protein, 147 aa, Zea Mays
MLAVSIAACKAGAAEKEVPLYKHIADLVGKSATTLPVPANTVINGGKHAGNGLPIQEIMILLVGAMNFEEAMQMGSETYHHLKDIILEKCGSDSCNIGDHGGFAPNISSISEGLDLVIAAIERAGYNGRIKLTIDVAATDFCVGCMG

SEQ ID NO: 160500 - protein, 153 aa, Zea Mays
MRTRPQKLTRRCEVTAILVLYGLPRLLTGSILAHELMHGWLRLKGYRNLNAEVEEGICQVMSYLWLESEILPSSSRHAQPSSSSSSSSYPATSSEKGGISHTGKKLGEFFMHQIANDTSTAYGDGFRTAYAAVNKYGLRQTLSHIRLTGGFPV

SEQ ID NO: 160501 - protein, 483 aa, Zea Mays
MKWLCRFLKGPKPGEPSRRRPQVAAGEGEGALWHQRPARPKIDPPRNENEELVDRAIAEPLAEAVKPPREKTHRGEDSNDDEDLTRAVQDSLNMNPYTPYNPYPPSQAQPIGHRVCGGCKHEIGRGHYLSCMGIYWHPQCFRCRSCGHLIRETEFTLLGTDSYHKLCYKELHHPKCDVCLQFIPTNGSGLIEYRAHPFWGQKYCPSHERDRTPRCCSCEKMEVQPRNTKYMSLGDGRGLCMECLGSAVMDTSECQPLYHSIRDYYEGMDMRLDQQIPVLLVERQALNEAMEGESKGPHHMPETRGLCLSEERTVSSILRRPRIGGNRLLGMRTRPQKLTRRCEVTAILVLYGLPRLLTGSILAHELMHGWLRLKGYRNLNAEVEEGICQVMSYLWLESEILPSSSRHAQPSSSSSSSSYPATSSEKGGISHTGKKLGEFFMHQIANDTSTAYGDGFRTAYAAVNKYGLRQTLSHIRLTGGFPV

SEQ ID NO: 160502 - protein, 161 aa, Zea Mays
MLIIFYRGRQIDSQSSEIEKLFEENSALSASYQEAIDVTVQWENQVRDCLKQNEELRSHLEKLRLEQVSLLKVSNIATQSDGQTENSISNPPQMVIENISLKLIKEQSRSEGLSAEIMKLSAELRKAVHAQNNLARLYRPVLRDIESNLMKMKQETYATIQ

SEQ ID NO: 160503 - protein, 72 aa, Zea Mays
MGSTLLIFVVDVFISCHLQDAGAKQFFSWPPFISRVQSRSLYLYHTHVYPIPRLVHLVNWKRCLDAYVSSGS

SEQ ID NO: 160504 - protein, 329 aa, Zea Mays
MEAHASRGRRTLEEIRQKRAAERMQHAVPIAASHVDSHGNQRAGAEHLARVQELENGNTELERENKMLLSKIAEKEVEKDALVNRLNDLERNVVPSLKKSLNDIYLEKDAAVVAKEDALAQLRSMKKRLKEAEEEQYRAEEDSASLRAQLNTLQQQMGHTYSGYTMGTSSEESVAMEKEIQDLQAQLKQESLLRQQEQQQLAEQSQLRQQEQEKLAKEQTRIASLEAEKQQLEDQITMLTKKATEDASEFAARKAFSMQDREKLEQQLHDMALMIERLEGSRQKLLMEIDSQSSEIEKLFEENSALSASYQEAIDVTVQWENQRLSEAK

SEQ ID NO: 160505 - protein, 285 aa, Zea Mays
MGHTYSGYTMGTSSEESVAMEKEIQDLQAQLKQESLLRQQEQQQLAEQSQLRQQEQEKLAKEQTRIASLEAEKQQLEDQITMLTKKATEDASEFAARKAFSMQDREKLEQQLHDMALMIERLEGSRQKLLMEIDSQSSEIEKLFEENSALSASYQEAIDVTVQWENQVRDCLKQNEELRSHLEKLRLEQVSLLKVSNIATQSDGQTENSISNPPQMVIENISLKDQLIKEQSRSEGLSAEIMKLSAELRKAVHAQNNLARLYRPVLRDIESNLMKMKQETYATIQ

SEQ ID NO: 160506 - protein, 439 aa, Zea Mays
MEAHASRGRRTLEEIRQKRAAERMQHAVPIAASHVDSHGNQRAGAEHLARVQELENGNTELERENKMLLSKIAEKEVEKDALVNRLNDLERNVVPSLKKSLNDIYLEKDAAVVAKEDALAQLRSMKKRLKEAEEEQYRAEEDSASLRAQLNTLQQQMGHTYSGYTMGTSSEESVAMEKEIQDLQAQLKQESLLRQQEQQQLAEQSQLRQQEQEKLAKEQTRIASLEAEKQQLEDQITMLTKKATEDASEFAARKAFSMQDREKLEQQLHDMALMIERLEGSRQKLLMEIDSQSSEIEKLFEENSALSASYQEAIDVTVQWENQVRDCLKQNEELRSHLEKLRLEQVSLLKVSNIATQSDGQTENSISNPPQMVIENISLKLIKEQSRSEGLSAEIMKLSAELRKAVHAQNNLARLYRPVLRDIESNLMKMKQETYATIQ

SEQ ID NO: 160507 - protein, 406 aa, Zea Mays
MEAHASRGRRTLEEIRQKRAAERMQHAVPIAASHVDSHGNQRAGAEHLARVQELENGNTELERENKMLLSKIAEKEVEKDALVNRLNDLERNVVPSLKKSLNDIYLEKDAAVVAKEDALAQLRSMKKRLKEAEEEQYRAEEDSASLRAQLNTLQQQMGHTYSGYTMGTSSEESVAMEKEIQDLQAQLKQESLLRQQEQQQLAEQSQLRQQEQEKLAKEQTRIASLEAEKQQLEDQITMLTKKATEDASEFAARKAFSMQDREKLEQQLHDMALMIERLEGSRQKLLMEVRDCLKQNEELRSHLEKLRLEQVSLLKVSNIATQSDGQTENSISNPPQMVIENISLKDQLIKEQSRSEGLSAEIMKLSAELRKAVHAQNNLARLYRPVLRDIESNLMKMKQETYATIQ

SEQ ID NO: 160508 - protein, 290 aa, Zea Mays
MEAHASRGRRTLEEIRQKRAAERMQHAVPIAASHVDSHGNQRAGAEHLARVQELENGNTELERENKMLLSKIAEKEVEKDALVNRLNDLERNVVPSLKKSLNDIYLEKDAAVVAKEDALAQLRSMKKRLKEAEEEQYRAEEDSASLRAQLNTLQQQMGHTYSGYTMGTSSEESVAMEKEIQDLQAQLKQESLLRQQEQQQLAEQSQLRQQEQEKLAKEQTRIASLEAEKQQLEDQITMLTKKATEDASEFAARKAFSMQDREKLEQQLHDMALMIERLEGSRQKLLMETD

SEQ ID NO: 160509 - protein, 254 aa, Zea Mays
MEAHASRGRRTLEEIRQKRAAERMQHAVPIAASHVDSHGNQRAGAEHLARVQELENGNTELERENKMLLSKIAEKEVEKDALVNRLNDLERNVVPSLKKSLNDIYLEKDAAVVAKEDALAQLRSMKKRLKEAEEEQYRAEEDSASLRAQLNTLQQQMGHTYSGYTMGTSSEESVAMEKEIQDLQAQLKQESLLRQQEQQQLAEQSQLRQQEQEKLAKEQTRIASLEAEKQQLEDQITMLTKKATEMLSGNLSLK

SEQ ID NO: 160510 - protein, 528 aa, Zea Mays
MAPEVMQGQKYDAKADLWSVGVILYQLVTGIPPFNGDNQIQLLKNILRTHEIRLPSDCELSHDCIDLCRKLLRLNSVERLTVEEFVHHPFLSEHAPERTLSRTLSEIRDGFPINNISPTRPSSQSSQEDCMPFPLDDESSGQDEGPIPDSKSPMKSYGFPTGKRLDKTSGQSPSKHTSLFSRYVLGNNHAPSSQHHGHTDKMTKESKIHEVQGPKGVYPEDSPIIDSLEFVDQEYVFVSGPHPEGSSSSTNASQQLNLPAKYDNLSVSPPKLTFLSAPMPINGLPINRQQSAGTGSFDSHYSPASVISQGSADISDAMDQPPSDYLTRIRLLEQYASAIAGLVRDEIKGGRHLVAFSIQLIVLATWKQAIHLCNTFVASLARESPSQDIHMKGLSADASHLLANSKLADDVCVQIEKQFLSEVEYAEELASTVGQIADGTEMPDAIEMIFQSALLTGRRGGVDEMFGKAADAMTGYTRAVSMLRFLLIEAPSLALNPPLTLTRSDRHRLRTYIEALNTRLCQMQSQRH

SEQ ID NO: 160511 - protein, 584 aa, Zea Mays
MGDGASGRGGRSGAGRRVGEYELLRPIGSGAYSQVWLGRHRVRGTEVAVKEIAMERLSKKLRESLLSEVDILRRIRHDNVIALHDSVKDHGSIYLILEYCRGGDLHAYLQRHKRVSEKVAKHFIRQLASGLKMLRDNNVVHRDLKPQNILLVENNENTLLKIADFGFAKFLQPFALAETLCGSPLYMAPEVMQGQKYDAKADLWSVGVILYQLVTGIPPFNGDNQIQLLKNILRTHEIRLPSDCELSHDCIDLCRKLLRLNSVERLTVEEFVHHPFLSEHAPERTLSRTLSEIRDGFPINNISPTRPSSQSSQEDCMPFPLDDESSGQDEGPIPDSKSPMKSYGFPTGKRLDKTSGQSPSKHTSLFSRYVLGNNHAPSSQHHGHTDKMTKESKIHEVQGPKGVYPEGMEVISSAIPHFYYEQSLLKLLFHYFVNVDSPIIDSLEFVDQEYVFVSGPHPEGSSSSTNASQQLNLPAKYDNLSVSPPKLTFLSAPMPINGLPINRQQSAGTGSFDSHYSPASVISQGSADISDAMDQPPSDYLTRIRLLEQYASAIAGLVRDEVIFYLLGGTQILCFPYVIFSLSH

SEQ ID NO: 160512 - protein, 387 aa, Zea Mays
MPFPLDDESSGQDEGPIPDSKSPMKSYGFPTGKRLDKTSGQSPSKHTSLFSRYVLGNNHAPSSQHHGHTDKMTKESKIHEVQGPKGVYPEDQEYVFVSGPHPEGSSSSTNASQQLNLPAKYDNLSVSPPKLTFLSAPMPINGLPINRQQSAGTGSFDSHYSPASVISQGSADISDAMDQPPSDYLTRIRLLEQYASAIAGLVRDEIKGGRHLVAFSIQLIVLATWKQAIHLCNTFVASLARESPSQDIHMKGLSADASHLLANSKLADDVCVQIEKQFLSEVEYAEELASTVGQIADGTEMPDAIEMIFQSALLTGRRGGVDEMFGKAADAMTGYTRAVSMLRFLLIEAPSLALNPPLTLTRSDRHRLRTYIEALNTRLCQMQSQRH

SEQ ID NO: 160513 - protein, 424 aa, Zea Mays
MGDGASGRGGRSGAGRRVGEYELLRPIGSGAYSQVWLGRHRVRGTEVAVKEIAMERLSKKLRESLLSEVDILRRIRHDNVIALHDSVKDHGSIYLILEYCRGGDLHAYLQRHKRVSEKVAKHFIRQLASGLKMLRDNNVVHRDLKPQNILLVENNENTLLKIADFGFAKFLQPFALAETLCGSPLYMAPEVMQGQKYDAKADLWSVGVILYQLVTGIPPFNGDNQIQLLKNILRTHEIRLPSDCELSHDCIDLCRKLLRLNSVERLTVEEFVHHPFLSEHAPERTLSRTLSEIRDGFPINNISPTRPSSQSSQEDCMPFPLDDESSGQDEGPIPDSKSPMKSYGFPTGKRLDKTSGQSPSKHTSLFSRYVLGNNHAPSSQHHGHTDKMTKESKIHEVQGPKGVYPEASTATILLHLSFHRDLRI

SEQ ID NO: 160514 - protein, 517 aa, Zea Mays
MAPEVMQGQKYDAKADLWSVGVILYQLVTGIPPFNGDNQIQLLKNILRTHEIRLPSDCELSHDCIDLCRKLLRLNSVERLTVEEFVHHPFLSEHAPERTLSRTLSEIRDGFPINNISPTRPSSQSSQEDCMPFPLDDESSGQDEGPIPDSKSPMKSYGFPTGKRLDKTSGQSPSKHTSLFSRYVLGNNHAPSSQHHGHTDKMTKESKIHEVQGPKGVYPEDQEYVFVSGPHPEGSSSSTNASQQLNLPAKYDNLSVSPPKLTFLSAPMPINGLPINRQQSAGTGSFDSHYSPASVISQGSADISDAMDQPPSDYLTRIRLLEQYASAIAGLVRDEIKGGRHLVAFSIQLIVLATWKQAIHLCNTFVASLARESPSQDIHMKGLSADASHLLANSKLADDVCVQIEKQFLSEVEYAEELASTVGQIADGTEMPDAIEMIFQSALLTGRRGGVDEMFGKAADAMTGYTRAVSMLRFLLIEAPSLALNPPLTLTRSDRHRLRTYIEALNTRLCQMQSQRH

SEQ ID NO: 160515 - protein, 231 aa, Zea Mays
MKCKVQKVFIQKGSADISDAMDQPPSDYLTRIRLLEQYASAIAGLVRDEIKGGRHLVAFSIQLIVLATWKQAIHLCNTFVASLARESPSQDIHMKGLSADASHLLANSKLADDVCVQIEKQFLSEVEYAEELASTVGQIADGTEMPDAIEMIFQSALLTGRRGGVDEMFGKAADAMTGYTRAVSMLRFLLIEAPSLALNPPLTLTRSDRHRLRTYIEALNTRLCQMQSQRH

SEQ ID NO: 160516 - protein, 515 aa, Zea Mays
MLRDNNVVHRDLKPQNILLVENNENTLLKIADFGFAKFLQPFALAETLCGSPLYMAPEVMQGQKYDAKADLWSVGVILYQLVTGIPPFNGDNQIQLLKNILRTHEIRLPSDCELSHDCIDLCRKLLRLNSVERLTVEEFVHHPFLSEHAPERTLSRTLSEIRDGFPINNISPTRPSSQSSQEDCMPFPLDDESSGQDEGPIPDSKSPMKSYGFPTGKRLDKTSGQSPSKHTSLFSRYVLGNNHAPSSQHHGHTDKMTKESKIHEVQGPKGVYPEDQEYVFVSGPHPEGSSSSTNASQQLNLPAKYDNLSVSPPKLTFLSAPMPINGLPINRQQSAGTGSFDSHYSPASVISQGSADISDAMDQPPSDYLTRIRLLEQYASAIAGLVRDEIKGGRHLVAFSIQLIVLATWKQAIHLCNTFVASLARESPSQDIHMKGLSADASHLLANSKLADDVCVQIEKQFLSEVEYAEELASTVGQIADGTEMPDAIEMIFQSALLTGRRGGVSKAQCIPLQN

SEQ ID NO: 160517 - protein, 245 aa, Zea Mays
MARKHQHVAIFTTACLPWMTGTAVNPLFRAAYLAKAGDWEVTLVVPWLSKGDQELVYPNKMRFSLPAEQENYVRRWLEERTGLLPKFDIKFYPGKFSTEKRSILPVGDISQTISDDKADIAVLEEPEHLTWYHHGRRWKSKFQKVIGVVHTNYLEYVKREKNGYISAFILKHINSWVTDIYCHKVIRLSAATQDVPRSVICNVHGVNPKFIEIGKLKHQQLCQREQAFFKGAYYIGKMVGKMLMK

SEQ ID NO: 160518 - protein, 370 aa, Zea Mays
MAEICCEAAAAAAGSDQKGECAGSRAARRRRMEIRRLRVVAEEASAKRRRDMEDAVTARPEFINGHHFFGVFDGHGCSHVATSCGERMHQIVAEEATAAAGSSVSDETARWRGVMEKSYARMDAEAVVSRETAGPAPTCRCEMQLPKCDHVGSTAVVAVVGPRHLVVANCGDSRAVLSSGGATIPLSADHKPDRPDELERIHAAGGRVIFWDGARVFGMLAMSRAIGDSYLKPFVISDPEVLVVERKDGEDEFLILASDGLWDVVSNEVACKVVRTCLRNRAPRGGRERSSPTSNLSPRQSSASGGSSSSGDEEAGGPSGDGAGSESDGESAEDRACAEAAILLTKLALARQSADNVSVVVINLRRRPRS

SEQ ID NO: 160519 - protein, 854 aa, Zea Mays
MSGGFFRGTSADQDTRFSNKQAKLLKTQKFAPELDHLVDTSKVKMDVMKPWIAKRVTELLGFEDEVLINFIYGLLEEKEADGKKIQIQLTGFMEKNTVKFMRELWTLLLSAQQNASGVPQQFLDEKEAEIQQKKAEDDRIAQEIQKKREMEENDSELVKNKVMDGDAGNSRSYGDPVGSALNSTNFNTEEEKNNDFKRSLRAKNRGSRRSRSISLSPRARQRSISPRNNSRSPPRRSHSIDRHHRSSWRSTSPRRSISPRRHSPRSTPSISRRRSPYSRRGSPSLSRYPSPFTRRRSPLRRKSPSSGPLRSLSPRHRRSPARVPRRSPSPASRRSPVRRRFSPGRRTSPSPVRRRPRSPSPGRRRPRSPSPGRRRPRSPSPRRRRPRSPSPGRRRPRSPSPGRRRLRSPSPGRRRPRSPSPGRRRPRSPSPGRRRPRSPSPGRRRPLSPEGRRSTSPYNSRSPNRSRQSLSKDTEKETNGTPSVKDRVVHSRGQEQKSDDNNRDGARIVGNNSPDSEHRLSKSLRPPNYEERNSTRDSSYKNSDKPIPSQGSTDTSGDEEHSRARENARKANSCRRKTKDLSAGLQPKKISAGDSSPRDKSPFILQQSGKVVQKKHPDQLSESSEDELAGRRTKHQTDSPDDSRRKQHSPTRIENDESYSKGGRNSEHVMRGLRDDSDDAIDTKKYLSKVNEDSQSDDGSPLKKTKKKTDGNRHIDSGSSGSEEPDKHRTHSEKRRHKKTHKHKKQYDDSSESDSEPDGKDAKRRRRKEEKRLRKEERRRRREERHRRRAERHASKRKLKNTDTVTMPSDSEKDRDSDSDGDVRKRVSNAGREESDQKKLEIELLDLMIPELFT

SEQ ID NO: 160520 - protein, 882 aa, Zea Mays
MSGGFFRGTSADQDTRFSNKQAKLLKTQKFAPELDHLVDTSKVKMDVMKPWIAKRVTELLGFEDEVLINFIYGLLEEKEADGKKIQIQLTGFMEKNTVKFMRELWTLLLSAQQNASGVPQQFLDEKEAEIQQKKAEDDRIAQEIQKKREMEENDSELDGDAGNSRSYGDPVGSALNSTNFNTEEEKNNDFKRSLRAKNRGSRRSRSISLSPRARQRSISPRNNSRSPPRRSHSIDRHHRSSWRSTSPRRSISPRRHSPRSTPSISRRRSPYSRRGSPSLSRYPSPFTRRRSPLRRKSPSSGPLRSLSPRHRRSPARVPRRSPSPASRRSPVRRRFSPGRRTSPSPVRRRPRSPSPGRRRPRSPSPGRRRPRSPSPRRRRPRSPSPGRRRPRSPSPGRRRPRSPSPGRRRPRSPSPGRRRPRSPSPGRRRPRSPSPGRRRPWSRSPIRRQSPSPKRQRTSPSSPKTRSANRPLSPEGRSPYNSRSPNRSRQSLSKDTEKETNGTPSVKDRVVHSRGQEQKSDDNNRDGARIVGNNSPDSEHRLSKSLRPPNYEERNSTRDSSYKNSDKPIPSQGSTDTSGDEEHSRARENARKANSCRRKTKDLSAGLQPKKISAGDSSPRDKSPFILQQSGKVVQKKHPDQLSESSEDELAGRRTKHQTDSPDDSRRKQHSPTRIENDESYSKGGRNSEHVMRGLRDDSDDAIDTKKYLSKVNEDSQSDDGSPLKKTKKKTDGNRHIDSGSSGSEEPDKHRTHSEKRRHKKTHKHKKQYDDSSESDSEPDGKDAKRRRRKEEKRLRKEERRRRREERHRRRAERHASKRKLKNTDTVTMPSDSEKDRDSDSDGDVRKRVSNAGREESDQKKLEIELREKALESLRAKKAINN

SEQ ID NO: 160521 - protein, 860 aa, Zea Mays
MSGGFFRGTSADQDTRFSNKQAKLLKTQKFAPELDHLVDTSKVKMDVMKPWIAKRVTELLGFEDEVLINFIYGLLEEKEADGKKIQIQLTGFMEKNTVKFMRELWTLLLSAQQNASGVPQQFLDEKEAEIQQKKAEDDRIAQEIQKKREMEENDSELVKNKVMDGDAGNSRSYGDPVGSALNSTNFNTEEEKNNDFKRSLRAKNRGSRRSRSISLSPRARQRSISPRNNSRSPPRRSHSIDRHHRSSWRSTSPRRSISPRRHSPRSTPSISRRRSPYSRRGSPSLSRYPSPFTRRRSPLRRKSPSSGPLRSLSPRHRRSPARVPRRSPSPASRRSPVRRRFSPGRRTSPSPVRRRPRSPSPGRRRPRSPSPGRRRPRSPSPRRRRPRSPSPGRRRPRSPSPGRRRLRSPSPGRRRPRSPSPGRRRPRSPSPGRRRPRSPSPGRRRPLSPEGRRSTSPYNSRSPNRSRQSLSKDTEKETNGTPSVKDRVVHSRGQEQKSDDNNRDGARIVGNNSPDSEHRLSKSLRPPNYEERNSTRDSSYKNSDKPIPSQGSTDTSGDEEHSRARENARKANSCRRKTKDLSAGLQPKKISAGDSSPRDKSPFILQQSGKVVQKKHPDQLSESSEDELAGRRTKHQTDSPDDSRRKQHSPTRIENDESYSKGGRNSEHVMRGLRDDSDDAIDTKKYLSKVNEDSQSDDGSPLKKTKKKTDGNRHIDSGSSGSEEPDKHRTHSEKRRHKKTHKHKKQYDDSSESDSEPDGKDAKRRRRKEEKRLRKEERRRRREERHRRRAERHASKRKLKNTDTVTMPSDSEKDRDSDSDGDVRKRVSNAGREESDQKKLEIELREKALESLRAKKAINN

SEQ ID NO: 160522 - protein, 191 aa, Zea Mays
MRGLRDDSDDAIDTKKYLSKVNEDSQSDDGSPLKKTKKKTDGNRHIDSGSSGSEEPDKHRTHSEKRRHKKTHKHKKQYDDSSESDSEPDGKDAKRRRRKEEKRLRKEERRRRREERHRRRAERHASKRKLKNTDTVTMPSDSEKDRDSDSDGDVRKRVSNAGREESDQKKLEIELREKALESLRAKKAINN

SEQ ID NO: 160523 - protein, 861 aa, Zea Mays
MSGGFFRGTSADQDTRFSNKQAKLLKTQKFAPELDHLVDTSKVKMDVMKPWIAKRVTELLGFEDEVLINFIYGLLEEKEADGKKIQIQLTGFMEKNTVKFMRELWTLLLSAQQNASGVPQQFLDEKEAEIQQKKAEDDRIAQEIQKKREMEENDSELVKNKVMDGDAGNSRSYGDPVGSALNSTNFNTEEEKNNDFKRSLRAKNRGSRRSRSISLSPRARQRSISPRNNSRSPPRRSHSIDRHHRSSWRSTSPRRSISPRRHSPRSTPSISRRRSPYSRRGSPSLSRYPSPFTRRRSPLRRKSPSSGPLRSLSPRHRRSPARVPRRSPSPASRRSPVRRRFSPGRRTSPSPVRRRPRSPSPGRRRPRSPSPGRRRPRSPSPRRRRPRSPSPGRRRPRSPSPGRRRLRSPSPGRRRPWSRSPIRRQSPSPKRQRTSPSSPKTRSANRPLSPEGRRSTSPYNSRSPNRSRQSLSKDTEKETNGTPSVKDRVVHSRGQEQKSDDNNRDGARIVGNNSPDSEHRLSKSLRPPNYEERNSTRDSSYKNSDKPIPSQGSTDTSGDEEHSRARENARKANSCRRKTKDLSAGLQPKKISAGDSSPRDKSPFILQQSGKVVQKKHPDQLSESSEDELAGRRTKHQTDSPDDSRRKQHSPTRIENDESYSKGGRNSEHVMRGLRDDSDDAIDTKKYLSKVNEDSQSDDGSPLKKTKKKTDGNRHIDSGSSGSEEPDKHRTHSEKRRHKKTHKHKKQYDDSSESDSEPDGKDAKRRRRKEEKRLRKEERRRRREERHRRRAERHASKRKLKNTDTVTMPSDSEKDRDSDSDGDVRKRVSNAGREESDQKKLEIELREKALESLRAKKAINN

SEQ ID NO: 160524 - protein, 168 aa, Zea Mays
MAGDRLSWAGLLKWSLSYVDGAGPSRAVREEERRWLADAVEQHMMMDVVSRMREIALLMSTPPAVLEAQGITHDDIEDLLSELQVHVESIDMANDLHSVGGLVPVIKYLRNSNARIRAKAADVVTTVVQNNPTSQQLVMEASGFEPLLSNFRSDPDLTARIKALGALS

SEQ ID NO: 160525 - protein, 58 aa, Zea Mays
MIPSKQSSRPSLLRALTAWTMSPLVNIWNRFLRMCLRMGSGLMLSYGSLPWTKAWYSS

SEQ ID NO: 160526 - protein, 367 aa, Zea Mays
MLNKQGQQPRANGGADAPLLPLGPAAATSAAPEQGGLPRSSSMANAAVAAHARPNSMAERARLARMPHPEPALKCPRCESTNTKFCYYNNYSLSQPRHFCKTCRRYWTRGGSLRNVPVGGGCRRNKRSSKSSSSSAGSSSSKMSPSGRLLGGPSATPSTTPGTTGAIITPGLSSFSHHLPFLGSMHPSGPNLGLAFSAGLPLVGMQHLDTVDQFPVASGGGTTIGASLEQWRVRQQQQQFPFMTGGILDLSQPPTYQFGLEANRGGSGSAAVAFNSGQTTTTSATTGRQEGSSKKMGDSKGEDMSLQKQYMVPLRHGSGSHGVWDGSAGGTGSNGGGTGNGGSSWPMNMIPGFHSSSTSGCNDSGLS

SEQ ID NO: 160527 - protein, 385 aa, Zea Mays
MVFPSPSVQVYLDPHPPNWNNQQGQQPRANGGADAPLLPLGPAAATSAAPEQGGLPRSSSMANAAVAAHARPNSMAERARLARMPHPEPALKCPRCESTNTKFCYYNNYSLSQPRHFCKTCRRYWTRGGSLRNVPVGGGCRRNKRSSKSSSSSAGSSSSKMSPSGRLLGGPSATPSTTPGTTGAIITPGLSSFSHHLPFLGSMHPSGPNLGLAFSAGLPLVGMQHLDTVDQFPVASGGGTTIGASLEQWRVRQQQQQFPFMTGGILDLSQPPTYQFGLEANRGGSGSAAVAFNSGQTTTTSATTGRQEGSSKKMGDSKGEDMSLQKQYMVPLRHGSGSHGVWDGSAGGTGSNGGGTGNGGSSWPMNMIPGFHSSSTSGCNDSGLS

SEQ ID NO: 160528 - protein, 91 aa, Zea Mays
MLLPPYLSDILHILSYMPKGLNFIEHTINIGWKEHQRARPIIVDPALQVPNKTEVVTTKEKRSSSWVMLSRSFLEFCLRWDNLPRTLLIAF

SEQ ID NO: 160529 - protein, 215 aa, Zea Mays
MPKGLNFIEHTINIGWKEHQRARPIIVDPALQVPNKTEVVTTKEKRSSSWVMLSRSFLEFCLRWDNLPRTLLMYFTNFLSSSEGYFHTVICNSEHYQNTTVNSDLRFMAWDKPPLTHPVNLTTEHFDAMANNGAPFAHSFANDNSVLDMIDAKLLGRAPGRFTPGGWCLGSSVGGKDPCTFLGRSFILRPTKGSAKLEKLLKLLEPDNFRPKQCK

SEQ ID NO: 160530 - protein, 125 aa, Zea Mays
MCSWTGPNMMCIINFMICCNGRMFFHKTVDATGQIQNAEFFYDCINEVVVKDVGESYVVQIVTDNGSNYNKACKQLIAEYPHITWQICAAHTINLMLKDIARYDEVDEQLYSTKRICRFLYKHNR

SEQ ID NO: 160531 - protein, 184 aa, Zea Mays
MFLATRSIFPKMFQTLRRPTTRMLQSIKDCFPSKLAKLSCICCAVALALRQTSTPYVCLPPQAIGLGENKTSVRCQQEWTSNNYCKGIHHTPWKQVSLAPGRGWPHGHMHFVFFRANAELRDNNLQPCPCFIAVRFQSGVFRDSGREWDLPDKLSRRAMLRSRIRQPESPIMPFQEWHPTNASA

SEQ ID NO: 160532 - protein, 450 aa, Zea Mays
MASTAARRLRELQAQTGNKTCVDCAQRNPQWASVSYGVFMCLECSGKHRGLGVHISFVRSVTMDSWTEAQLRKMEAGGNDRLNAFLTARGVPKETPHVAKYNSNAAAAYRDRIAALAEGKPWTDPPVVKETPGSGAPAPARKPPVHTSAASGGGGWDDWDDDFRPDMRRNQSVGSFAAAGAQSGRQPPRSKSTQDMYTRQQLEASAANKEDFFARRMAENESKPDGIPPSQGGKYVGFGSSPPPSANRNGGAAQGDVMQGFGRLSLVAASAAQSAASAVQVGTKEIQSKMRDGGYDQKVNETVSVVANKTAEIGSRTWGIMRGVMALASQKVEEYAKEGGVGGWGEDWQHSEQKSEPYQRFEHETNGNSWNSSQNSSSKNNSSSWDDWDDPGKKDEPAKPHQSSDSWAGWDDGKDDGFDSPSYNNHSTSNKGSNQNGTSGGTFWTEGGFR

SEQ ID NO: 160533 - protein, 565 aa, Zea Mays
MSITSGKKRKDYLDAVASDGCLTQSSQGLAAGEMIYSLRDYLKDSVSNSISNLNWSASKRRSGRRFRQGDTGTSTPTFSGSPGKGGFGHSTDTSEKKGTEETHSENTGDPLSIDGVKSDSPLPTAVTTNHSKHDSTNLGLSLSSPVKITQRPLRNCSIDSKSKESKTRDTTLHPLIFKEDGLADNTLLTYKLKNGEALKQGYKRGTCIICNCCNQEFSPSHFEEHAGMGRRRQPYHNIYTLEGLSLHKLALQLQDHLNPNGFDNASVSSVSDYHNLTSSGCGREPSTTSGPIVPLKRTLQERVVETESCYFCGYGHTTIGNINPDTIIFCNQCERPCHIKCYNNRVVKKKVPLEILKEYMCFHFLCCQECQSLRARLEEGLEKCVGITFLRRIRSNICWRLLSGMDASRDVKLYMPQVIDIFKDAFMDSTDEHSDIISDMVNGKNGDQEKDFRGMYCALLTASTHVVSAAILKVRIEQIAELVLIATRSECRKKGYFILLLKSIEANLRAWNVSLLTAPVDPEMAQIWSEKLGFTILSAEEKESMLESHPLVMFKNLVLVQKSLA

SEQ ID NO: 160534 - protein, 659 aa, Zea Mays
MHDALVGVTETEYQLDSDLRDVRGLLSTGLLEGFRVTYMKDEVEEVGRINGQGYSCGCSKCNYNSNIMNACEFEEHYGQSFDNQIDHIFLDTGISLFRVVEALKPCKLNMLGDFIEEKIGFPPNLDEYNKWKASFQKRKDYLDAVASDGCLTQSSQGLAAGEMIYSLRDYLKDSVSNSISNLNWSASKRRSGRRFRQGDTGTSTPTFSGSPGKGGFGHSTDTSEKKGTEETHRLSLSSPVKITQRPLRNCSIDSKSKESKTRDTTLHPLIFKEDGLADNTLLTYKLKNGEALKQGYKRGTCIICNCCNQEFSPSHFEEHAGMGRRRQPYHNIYTLEGLSLHKLALQLQDHLNPNGFDNASVSSVSDYHNLTSSGCGREPSTTSGPIVPLKRTLQERVVETESCYFCGYGHTTIGNINPDTIIFCNQCERPCHIKCYNNRVVKKKVPLEILKEYMCFHFLCCQECQSLRARLEEGLEKCVGITFLRRIRSNICWRLLSGMDASRDVKLYMPQVIDIFKDAFMDSTDEHSDIISDMVNGKNGDQEKDFRGMYCALLTASTHVVSAAILKVRIEQIAELVLIATRSECRKKGYFILLLKSIEANLRAWNVSLLTAPVDPEMAQIWSEKLGFTILSAEEKESMLESHPLVMFKNLVLVQKSLA

SEQ ID NO: 160535 - protein, 530 aa, Zea Mays
MSITSGKKRKDYLDAVASDGCLTQSSQGLAAGEMIYSLRDYLKDSVSNSISNLNWSASKRRSGRRFRQGDTGTSTPTFSGSPGKGGFGHSTDTSEKKGTEETHRLSLSSPVKITQRPLRNCSIDSKSKESKTRDTTLHPLIFKEDGLADNTLLTYKLKNGEALKQGYKRGTCIICNCCNQEFSPSHFEEHAGMGRRRQPYHNIYTLEGLSLHKLALQLQDHLNPNGFDNASVSSVSDYHNLTSSGCGREPSTTSGPIVPLKRTLQERVVETESCYFCGYGHTTIGNINPDTIIFCNQCERPCHIKCYNNRVVKKKVPLEILKEYMCFHFLCCQECQSLRARLEEGLEKCVGITFLRRIRSNICWRLLSGMDASRDVKLYMPQVIDIFKDAFMDSTDEHSDIISDMVNGKNGDQEKDFRGMYCALLTASTHVVSAAILKVRIEQIAELVLIATRSECRKKGYFILLLKSIEANLRAWNVSLLTAPVDPEMAQIWSEKLGFTILSAEEKESMLESHPLVMFKNLVLVQKSLA

SEQ ID NO: 160536 - protein, 821 aa, Zea Mays
MFGNLAIGFLLVIRYNQKGFPFEKHVGAESKNQNGNILLINDKLLYDLFHELRNWPPCAEEFWATAGVLMTVPATEASSAPQGQQAGAPASWEPNGVQVDGVTVDPPLPGRGAMVMLTEEEKASLCLLGLKQSSSTAELDTICGIEGPAAEQIKDEAGGDHVMHDALVGVTETEYQLDSDLRDVRGLLSTGLLEGFRVTYMKDEVEEVGRINGQGYSCGCSKCNYNSNIMNACEFEEHYGQSFDNQIDHIFLDTGISLFRVVEALKPCKLNMLGDFIEEKIGFPPNLDEYNKWKASFQKRKDYLDAVASDGCLTQSSQGLAAGEMIYSLRDYLKDSVSNSISNLNWSASKRRSGRRFRQGDTGTSTPTFSGSPGKGGFGHSTDTSEKKGTEETHRLSLSSPVKITQRPLRNCSIDSKSKESKTRDTTLHPLIFKEDGLADNTLLTYKLKNGEALKQGYKRGTCIICNCCNQEFSPSHFEEHAGMGRRRQPYHNIYTLEGLSLHKLALQLQDHLNPNGFDNASVSSVSDYHNLTSSGCGREPSTTSGPIVPLKRTLQERVVETESCYFCGYGHTTIGNINPDTIIFCNQCERPCHIKCYNNRVVKKKVPLEILKEYMCFHFLCCQECQSLRARLEEGLEKCVGITFLRRIRSNICWRLLSGMDASRDVKLYMPQVIDIFKDAFMDSTDEHSDIISDMVNGKNGDQEKDFRGMYCALLTASTHVVSAAILKVRIEQIAELVLIATRSECRKKGYFILLLKSIEANLRAWNVSLLTAPVDPEMAQIWSEKLGFTILSAEEKESMLESHPLVMFKNLVLVQKSLA

SEQ ID NO: 160537 - protein, 463 aa, Zea Mays
MTVPATEASSAPQGQQAGAPASWEPNGVQVDGVTVDPPLPGRGAMVMLTEEEKASLCLLGLKQSSSTAELDTICGIEGPAAEQIKDEAGGDHVMHDALVGVTETEYQLDSDLRDVRGLLSTGLLEGFRVTYMKDEVEEVGRINGQGYSCGCSKCNYNSNIMNACEFEEHYGQSFDNQIDHIFLDTGISLFRVVEALKPCKLNMLGDFIEEKIGFPPNLDEYNKWKASFQKRKDYLDAVASDGCLTQSSQGLAAGEMIYSLRDYLKDSVSNSISNLNWSASKRRSGRRFRQGDTGTSTPTFSGSPGKGGFGHSTDTSEKKGTEETHSENTGDPLSIDGVKSDSPLPTAVTTNHSKHDSTNLGLSLSSPVKITQRPLRNCSIDSKSKESKTRDTTLHPLIFKEDGLADNTLLTYKLKNGEALKQGYKRGTCIICNCCNQEFSPSHFEEHAGMGRRRQPGENFMFQ

SEQ ID NO: 160538 - protein, 297 aa, Zea Mays
MWNCSSLLLQYGDDYAARCESSSSPAGAVGLDRILAAEYGRFDSLDLSPPPPLHGLQAQTLFAIHGSSENCLGIGANPIYSTEARPAFSQLSFTQPAADTAAHYSMKWTAAGETATGGGGSRLRGSKRLKTKTPATAQGPQHHGQRCSPKPTTSQSIKAPPCKRSQKLGDKITALQQLVSPYGKTDTASVLHEAATCIKHLHEQIQVSRWRIVLLLTQNGHATDARARGATDLQQVTFSSVTAGHGRRRGRRDGSAPARPVRGVAVPGRRAARVGRGRARQPRHGRPLALARHSVSL

SEQ ID NO: 160539 - protein, 785 aa, Zea Mays
MVPSGLFGWASPHVQPLTPVSEVSEPPESPSPYGDGPAGDAGVGTREGEGAGAGEEEVEDDEVEPPPAAVSFWRLFEFADGVDWALMAAGALAAAAHGAALVVYLHYFGRALNLLDSERVGSSLYGRGEELLHRFKEHALYIVFIAAGVFVAGWIAGGISNIFLHRLAENIQDAYAEAASIAEQAILYIRTLYAFTNETLAKYSYATSLQATLRYGILISLVQGIGLGFTYGLAICSCALQLWVGRHLIHRGKADGGEVVVALFSVILSGLGLNQAATNFYSFEQGRIAAYRLYEMISRSTSSTNQEGATLPQVQGNIEFRNVYFSYLSRPEIPILSGFFLTVPARKTVALVGRNGSGKSSIIPLMERFYDPTLGEVLLDGENIKNLKVEWLRSQIGLVTQEPALLSLSIRENIAYGRSGTFDQIEEAAKTAHAHGFISSLEKGYETQVGLAGVALTDEQKIKISIARAVLSNPSILLLDEVTGGLDFEAEKAVQEALDVLMLGRSTIIIARRLCLIKNADYIAVMEEGHLVEMGTHDELLNLDGLYAELLRCEEATKLPKRMPTKNSRERKSLQAEDTSVSQYFQESSSPKMAKSPSLQRTHGMLQFWRSDTNRNSHDSPKDPSPPSEQTIDNGIPMVAIETERTPSIKRQDSFEMKLPDLPKVDVHRIQRQSSKNSDPDSPISPLLTSDPKNERSHSQTFSRPQSERDDTSSEHSELDEVQHQKPPSFWRLATLSIAEWPYALLGTIGAAVFGSFNPLLAYTIALIVSAYYQIEIRDMRHEVR

SEQ ID NO: 160540 - protein, 208 aa, Zea Mays
MVSSALRRCLPCHASLCHAFPPHPLLAAAGVFRRSFQSGDGETMDEFEERLFGGKDTDKGSLYEKLDRAENTGRRYNMGSGMGGLTGLSDKSRSGLSKGGFTWLSDSSSSGFPGFPASGDRSNSGWMDGYDSFNDGLNDTIANAARNIQMEEDEDVDGDWEDDFEFRPDVRFRQGSTYSVRCRTLTLENLQPQRTLLDDSLKQLQRRY

SEQ ID NO: 160541 - protein, 273 aa, Zea Mays
MKAFIRYMISSNIGEVASIFLTSALGIPEGLIPVQLLWVNLVTDGPPATALGFNPPDKDIMKKPPRRSDDSLITPWILFRYMVIGLYVGVATVGIFIIWYTHGSFLGIDLASDGHTLVSYSQLSNWGQCSSWEGFKVSPFTAGARTFSFDANPCDYFQGGKIKATTLSLSVLVAIEMFNSLNALSEDGSLLSMPPWVNPWLLLAMSVSFGLHFLILYVPFLAQVFGIVPLSLNEWLLVIAVALPVVLIDEVLKFVGRCLTARARKQSGKRKAE

SEQ ID NO: 160542 - protein, 320 aa, Zea Mays
MSEHATVKRHGRWSHGLPARDLVPGDIVELRVGDKVPADMRVLQLISSTLRVEQGSLTGETASVNKTSHKIELEDTDIQGKECMVFAGTTVVNGSAVCVVTGTGMATEIGKIHAQIQEASQEEDDTPLKKKLNEFGEALTAIIGVICALVWLINLKYFLSWEYVDGWPRNFKFSFEKCTYYFEIAVALAVAAIPEGLPAVITTCLALGTRKMAQKNALVRKLPSVETLGCTTVICSDKTGTLTTNQMSAVKLVAIGRWPDTLRSFKVDGTTYDPTDGKIHDWPSLSMDENLQMIAKIAAVCNDASIAHAEHQYVATGMPT

SEQ ID NO: 160543 - protein, 667 aa, Zea Mays
MRGGAHEGRRQWRQVDACARNISARLDFDANGYGDLMDMIFLQLSSMARDMCTQVRMEAFAALGKMQRVSEGVLLQSLEKKVMKTDRMGVSIINGQKLPPKLKIPCAAGIFSHGVEDEFYEVRRTACKSLGALAKFSTQYTEKALDLLMDMMNDDTEAVRLQALEALFSMATYGCLSVQEKHMHMFLGLLVDANVLIRDAARKIFGLVNMPKLQIFKSAVDGLVTSLEKYPEEEDIYGIMFSIGKNHGSFSANIAKHLAKEITMASDGELILDKPRVKALLIVSISAPFSDDKHKQLGIPSIIFSYAIPLLEKISCALGEVDQDSLLSYLYHKGGMPFWENRSVSAEFGESESCNVETVKIGAHIENTAKEAKCLDEVLVMKSILEIVEGVWTMRMSCNVCEVRTIFRTCKEELRLLAENSSGSIGALLSFLSEYLDAILFIVEIWQLIQLDKPYTCGLTSLDILLERLDMSVRRMKYCYIGLNRVLEVQVLELSLIAHLCRLSKIAVCSKVVLGKVLWVINRLEDLCADGSCELSDFSGEIKKACDTNRIGDNLIGNINNLFQLFHLKPTTDFGMLKVISAMLRVCDNDSENPLQYICGLPVGVSFKISLWNISGHHRLWLRMTIGESVQHTFLEFSRFEGNDEGSAPTRVDMEDRVIVWFNSLMN

SEQ ID NO: 160544 - protein, 656 aa, Zea Mays
MRGGAHEGRRQWRQVDACARNISARLDFDANGYGDLMDMIFLQVRMEAFAALGKMQRVSEGVLLQSLEKKVMKTDRMGVSIINGQKLPPKLKIPCAAGIFSHGVEDEFYEVRRTACKSLGALAKFSTQYTEKALDLLMDMMNDDTEAVRLQALEALFSMATYGCLSVQEKHMHMFLGLLVDANVLIRDAARKIFGLVNMPKLQIFKSAVDGLVTSLEKYPEEEDIYGIMFSIGKNHGSFSANIAKHLAKEITMASDGELILDKPRVKALLIVSISAPFSDDKHKQLGIPSIIFSYAIPLLEKISCALGEVDQDSLLSYLYHKGGMPFWENRSVSAEFGESESCNVETVKIGAHIENTAKEAKCLDEVLVMKSILEIVEGVWTMRMSCNVCEVRTIFRTCKEELRLLAENSSGSIGALLSFLSEYLDAILFIVEIWQLIQLDKPYTCGLTSLDILLERLDMSVRRMKYCYIGLNRVLEVQVLELSLIAHLCRLSKIAVCSKVVLGKVLWVINRLEDLCADGSCELSDFSGEIKKACDTNRIGDNLIGNINNLFQLFHLKPTTDFGMLKVISAMLRVCDNDSENPLQYICGLPVGVSFKISLWNISGHHRLWLRMTIGESVQHTFLEFSRFEGNDEGSAPTRVDMEDRVIVWFNSLMN

SEQ ID NO: 160545 - protein, 493 aa, Zea Mays
MKSMHNQKTKQFLGLLVDANVLIRDAARKIFGLVNMPKLQIFKSAVDGLVTSLEKYPEEEDIYGIMFSIGKNHGSFSANIAKHLAKEITMASDGELILDKPRVKALLIVSISAPFSDDKHKQLGIPSIIFSYAIPLLEKISCALGEVDQDSLLSYLYHKGGMPFWENRSVSAEFGESESCNVETVKIGAHIENTAKEAKCLDEVLVMKSILEIVEGVWTMRMSCNVCEVRTIFRTCKEELRLLAENSSGSIGALLSFLSEYLDAILFIVEIWQLIQLDKPYTCGLTSLDILLERLDMSVRRMKYCYIGLNRVLEVQVLELSLIAHLCRLSKIAVCSKVVLGKVLWVINRLEDLCADGSCELSDFSGEIKKACDTNRIGDNLIGNINNLFQLFHLKPTTDFGMLKVISAMLRVCDNDSENPLQYICGLPVGVSFKISLWNISGHHRLWLRMTIGESVQHTFLEFSRFEGNDEGSAPTRVDMEDRVIVWFNSLMN

SEQ ID NO: 160546 - protein, 770 aa, Zea Mays
MGDPHPLSSAHLTAAASSAREHRGPTNERLAASDPSTSFAKRPRVAAEPSDSGGCVPCVEADVRALVSVSGGIYPLARAGALRGLTAVLEKVDTSSCVSAAITDCCYKCAVELMRDDDNGVRLAVVRLVDACARNISARLDFDANGYGDLMDMIFLQVRMEAFAALGKMQRVSEGVLLQSLEKKVMKTDRMGVSIINGQKLPPKLKIPCAAGIFSHGVEDEFYEVRRTACKSLGALAKFSTQYTEKALDLLMDMMNDDTEAVRLQALEALFSMATYGCLSVQEKHMHMFLGLLVDANVLIRDAARKIFGLVNMPKLQIFKSAVDGLVTSLEKYPEEEDIYGIMFSIGKNHGSFSANIAKHLAKEITMASDGELILDKPRVKALLIVSISAPFSDDKHKQLGIPSIIFSYAIPLLEKISCALGEVDQDSLLSYLYHKGGMPFWENRSVSAEFGESESCNVETVKIGAHIENTAKEAKCLDEVLVMKSILEIVEGVWTMRMSCNVCEVRTIFRTCKEELRLLAENSSGSIGALLSFLSEYLDAILFIVEIWQLIQLDKPYTCGLTSLDILLERLDMSVRRMKYCYIGLNRVLEVQVLELSLIAHLCRLSKIAVCSKVVLGKVLWVINRLEDLCADGSCELSDFSGEIKKACDTNRIGDNLIGNINNLFQLFHLKPTTDFGMLKVISAMLRVCDNDSENPLQYICGLPVGVSFKISLWNISGHHRLWLRMTIGESVQHTFLEFSRFEGNDEGSAPTRVDMEDRVIVWFNSLMN

SEQ ID NO: 160547 - protein, 466 aa, Zea Mays
MGDPHPLSSAHLTAAASSAREHRGPTNERLAASDPSTSFAKRPRVAAEPSDSGGCVPCVEADVRALVSVSGGIYPLARAGALRGLTAVLEKVDTSSCVSAAITDCCYKCAVELMRDDDNGVRLAVVRLVDACARNISARLDFDANGYGDLMDMIFLQLSSMARDMCTQVRMEAFAALGKMQRVSEGVLLQSLEKKVMKTDRMGVSIINGQKLPPKLKIPCAAGIFSHGVEDEFYEVRRTACKSLGALAKFSTQYTEKALDLLMDMMNDDTEAVRLQALEALFSMATYGCLSVQEKHMHMFLGLLVDANVLIRDAARKIFGLVNMPKLQIFKSAVDGLVTSLEKYPEEEDIYGIMFSIGKNHGSFSANIAKHLAKEITMASDGELILDKPRVKALLIVSISAPFSDDKHKQLGIPSIIFSYAIPLLEKISCALGEVDQDSLLSYLYHKGGMPFWENRKHCKGSQMSR

SEQ ID NO: 160548 - protein, 540 aa, Zea Mays
MQPCYSLKYFVAIVGKYFVATSQRSSSQYHCTSVLKKEYWHRYYSEKSLLIVICTVEHFLGLLVDANVLIRDAARKIFGLVNMPKLQIFKSAVDGLVTSLEKYPEEEDIYGIMFSIGKNHGSFSANIAKHLAKEITMASDGELILDKPRVKALLIVSISAPFSDDKHKQLGIPSIIFSYAIPLLEKISCALGEVDQDSLLSYLYHKGGMPFWENRSVSAEFGESESCNVETVKIGAHIENTAKEAKCLDEVLVMKSILEIVEGVWTMRMSCNVCEVRTIFRTCKEELRLLAENSSGSIGALLSFLSEYLDAILFIVEIWQLIQLDKPYTCGLTSLDILLERLDMSVRRMKYCYIGLNRVLEVQVLELSLIAHLCRLSKIAVCSKVVLGKVLWVINRLEDLCADGSCELSDFSGEIKKACDTNRIGDNLIGNINNLFQLFHLKPTTDFGMLKVISAMLRVCDNDSENPLQYICGLPVGVSFKISLWNISGHHRLWLRMTIGESVQHTFLEFSRFEGNDEGSAPTRVDMEDRVIVWFNSLMN

SEQ ID NO: 160549 - protein, 409 aa, Zea Mays
MRGGAHEGRRQWRQVDACARNISARLDFDANGYGDLMDMIFLQLSSMARDMCTQVRMEAFAALGKMQRVSEGVLLQSLEKKVMKTDRMGVSIINGQKLPPKLKIPCAAGIFSHGVEDEFYEVRRTACKSLGALAKFSTQYTEKALDLLMDMMNDDTEAVRLQALEALFSMATYGCLSVQEKHMHMFLGLLVDANVLIRDAARKIFGLVNMPKLQIFKSAVDGLVTSLEKYPEEEDIYGIMFSIGKNHGSFSANIAKHLAKEITMASDGELILDKPRVKALLIVSISAPFSDDKHKQLGIPSIIFSYAIPLLEKISCALGEVDQDSLLSYLYHKGGMPFWENRSVSAEFGESESCNVETVKIGAHIENTAKEAKCLDEVLVMKSILEIVEGVWTMRMSCNVCEVRTIFRY

SEQ ID NO: 160550 - protein, 645 aa, Zea Mays
MSQGSAEMDCSDDDVNTVSRIPTTNKPHDESLGNVPISKDGINTNNNLSIELKKEHDSDMHQDCSSMTNKVTIDAIDGDKCIKTKVGVFSHAGQQGFRNEVSASENSKDKRSLNSEKNTPVNNTDHSMQDAKTAAGSSTTDLQKSSALPKSASPKMQPTKQPPKTLDSRLGKTRSPDIKSEMSQNGMQAGSCSENHAKLAALKTEHQNESEEVGRHSDLHPRDSVLGEDSELDGASSSQQHSEYSKKTASEKSERDKSKPDSCNISVQNEKDGQLGANLRELGYAYVNRNERWERFMESEREKSNGECHGGRHASDVMNKRMTNHRGGWRGAGSRGHLRNFRGPRMRNEFADESIGGNRHSFEDEPGHTRGPHRRRHSPPHGCLMRDTDIDEFYGREIPEYRLPARGQIEDLPDSMMDDRFFMPYSHRHRGQGDHGFIHRDRDRSHSPAAQRRVGHVHFHRGRSPEAMRRSPPPVMRTDRTYMPHRHHNGSHDERGAMQRNDRRCAMEGDASGFEPPLHPSHLAEFHTVEELVGRRKYRERRPYLHSTVSDEDEMLPYRTEDDMEFAEGGTDLLHSQLDRLMKTTSLAFGWTGLADASATDLGLRRTQHLFASVSHSIYCFVFAALFSQDMVLQRLKHTAPSLSL

SEQ ID NO: 160551 - protein, 332 aa, Zea Mays
MHESGSGFYHHRTIQHQKAQVTPAAAISTINSGIGRNMCSTLNMSNSYGLSHKSGPADVTLDLQLKPPTRPELGINWKGLAPAPELSLSLFGKPMDEPEFPSTPNALFHSGTAGSSKKVSGEAAATLGSDKAPVEKIVTPVPCNVNPLNTTSATVSGIDQLPSNNLVKKEPEEISQQHIIDGAKKPNPLERQSVGQVIGCAESEKTDSAPQGARKIGFDLNSDIFANSSIHNESDVAAVDAPIPAKTLPDTCHDTSMPAVPEVDKFVKHEESTSATLSPVVETGNGHTTLLVEAKSQRSQGNVASPAVGLSESSSQPTVSTVCKPTAGHIRA

SEQ ID NO: 160552 - protein, 548 aa, Zea Mays
MSLAKKEEVCSHRLVPRLDEPAVGVPIKKRPFFLSDRSVASAIPLSTKPPSPTNTMPVAATGSGCREEPFFNIANSDRKVITKGKGIPDTQIQDHVNTSLTALSMTNGNGVLFNASSEIPSIADSATRTSAPDDELQLQNFLALDLQLPSRQSGKNNNYSSLRKDEKLGQSRSEHYNNVPVANEINASGNSIVGRLPNLDLNIPPDPADSLEGLPKMHESGSGFYHHRTIQHQKAQVTPAAAISTINSGIGRNMCSTLNMSNSYGLSHKSGPADVTLDLQLKPPTRPELGINWKGLAPAPELSLSLFGKPMDEPEFPSTPNALFHSGTAGSSKKVSGEAAATLGSDKAPVEKIVTPVPCNVNPLNTTSATVSGIDQLPSNNLVKKEPEEISQQHIIDGAKKPNPLERQSVGQVIGCAESEKTDSAPQGARKIGFDLNSDIFANSSIHNESDVAAVDAPIPAKTLPDTCHDTSMPAVPEVDKFVKHEESTSATLSPVVETGNGHTTLLVEAKSQRSQGNVASPAVGLSESSSQPTVSTVCKPTAGHIRA

SEQ ID NO: 160553 - protein, 508 aa, Zea Mays
MSLAKKEEVCSHRLVPRLDEPAVGVPIKKRPFFLSDRSVASAIPLSTKPPSPTNTMPVAATGSGCREEPFFNIANSDRKVITKDSATRTSAPDDELQLQNFLALDLQLPSRQSGKNNNYSSLRKDEKLGQSRSEHYNNVPVANEINASGNSIVGRLPNLDLNIPPDPADSLEGLPKMHESGSGFYHHRTIQHQKAQVTPAAAISTINSGIGRNMCSTLNMSNSYGLSHKSGPADVTLDLQLKPPTRPELGINWKGLAPAPELSLSLFGKPMDEPEFPSTPNALFHSGTAGSSKKVSGEAAATLGSDKAPVEKIVTPVPCNVNPLNTTSATVSGIDQLPSNNLVKKEPEEISQQHIIDGAKKPNPLERQSVGQVIGCAESEKTDSAPQGARKIGFDLNSDIFANSSIHNESDVAAVDAPIPAKTLPDTCHDTSMPAVPEVDKFVKHEESTSATLSPVVETGNGHTTLLVEAKSQRSQGNVASPAVGLSESSSQPTVSTVCKPTAGHIRA

SEQ ID NO: 160554 - protein, 227 aa, Zea Mays
MEALPPTLTSASEQPPLYDGTTRLYMSYVCPYAQRAWITRNYKGLQEKIKLVPMNMADKPGWYKEVYPNNQVPSLEHNKRVIGESLDLIKYIDSNFDGPKLTITDDPERQRFAEELLGYSDAFNRAFLDALRSEGAMTTEAVAALDKIDSALLKFDDGPFFLGQLNLVDIAYAPFIEGFQIFFAGMKNCDITQGRVHIQKFIEIDACTQTKQDPQVLLALTKKKFGI

SEQ ID NO: 160555 - protein, 218 aa, Zea Mays
MEALPPTLTSASEQPPLYDGTTRLYMSYVCPYAQRAWITRNYKGLQEKIKLVPMNMADKPGWYKEVYPNNQVPSLEHNKRVIGESLDLIKYIDSNFDGPKLTITDDPERQRFAEELLGYSDAFNRAFLDALRSEGAMTTEAVAALDKIDSALLKFDDGPFFLGQLNLIFFAGMKNCDITQGRVHIQKFIEEMNKIDACTQTKQDPQVLLALTKKKFGI

SEQ ID NO: 160556 - protein, 77 aa, Zea Mays
MILQRADPTFRSSLRLNGPMQTVFLIMLYRGEILTRGLVYFRKWTRLMHTHRLNRTHSFYLSRQRSGLGLLKACGRG

SEQ ID NO: 160557 - protein, 204 aa, Zea Mays
MNSLAFPSCPSALTPASTTAPASSPFPSPRIKIRCPRQEDAAHYHLRLRDRSSSQTVIVAMAAAAPASSVKEVLPSPLTSASEPPPLFDGTTRLYVAYHCPYAQRAWIARNYKDKIKIVAIDLADRPTWYKEKVYPENKVPSLEHNNQVKGESLDLVKYIDSNFEGPSLLPEDPSKKQFAEELLAYTDAFNKALYFCIVSKEVH

SEQ ID NO: 160558 - protein, 282 aa, Zea Mays
MAAQTTVQCRLPNVPEVIGGGGMRTVECLRGRLLAERVASKAAKEDADQLTKRLDELEKKLAGEVRVRNRAERRLRRAIKKLESLKILDVELSEGSIGSLSSNGRSDHQAPEAEERNGPGSLTTRGSVLASGPSGDPDADADRESSEGSCTQVNSSSRDGSWCSVASEQSRPGSCMDLAGNTTNCGSEGSCGDHDSEREHLDASSGCGSAKSEEAFYESDDRLALSRGLVEPPPAAAGEGPRTQDNDTHAGEVRAMDHEEEEETNKLAIVLADPQPQSQGDV

SEQ ID NO: 160559 - protein, 97 aa, Zea Mays
MNKILFYCLLITMSAVREWAASQNSKVLEAVAVNNLGKWKTATQMTALTLLLASRDPSLPAQGALVAPGVALLYVSTGLAVWSLVVYMRKIWRILLK

SEQ ID NO: 160560 - protein, 263 aa, Zea Mays
MPTSVATHASLLLKAAAAKPCFSARAAARIPAPSHRPRPPAGRRLPTTVAALAAAARRFRWPSAAASARGLCAAPHFGGEGMGSDAGAGGRKRRVPAVNGLAKDAPAVNGMRKEEPVAAPPRLLTLPTVLTIGRVAAVPLLISTFYMEGPWAAMATTGIFLAAAVTDWLDGYIARKITMSAVREWAASQNSKVLEAVAVNNLGKWKTATQMTALTLLLASRDPSLPAQGALVAPGVALLYVSTGLAVWSLVVYMRKIWRILLK

SEQ ID NO: 160561 - protein, 401 aa, Zea Mays
MGSCFSLEGGRSESIVPAQRSQIPEDEQVEPTVTSELAIPVPEVAESVVMLEALRTGFITDQRPERHIRVRSFTYDEVCAATHGFEVDRFLGQGGFGQVYRGFLESTNQVPGQEVAIKRLDLQGQQGHREFVTEVLILSNVHHPNLVKLVGHCTSHDQRILVYEYMPLGSLNSHIHDLPPGQQPLDWSTRIKILLGAAKGLEHLHHNLNPPVINRDVKCANILLGAGYHPKLSDFGLAKLGPTGDNTHVSTRVMGTPGYCAPEYLMTGKLTVKTDIYSFGVVMLEVLTGRMARDERLPESERNLVAWALNFLRRRELDNLLDPALRGQCPQACLEHAFFVVSRCISESPNTRPSMRDVVASLTVISEFRNRNTRRLERGGRSTPTRTPDRNHRGDDQGEGS

SEQ ID NO: 160562 - protein, 132 aa, Zea Mays
METSFLPTTLPNTRPLPALRTYAPAASIRSQQRPRRSTIRAAITRGRKEETVTTVREQLEGCYLLAGIKYEGLTVKQLQGIRDALPDTCRLLVAKNTLVGKAIEGTPWEALKPCMKEGGACRGDQRLRRRRL

SEQ ID NO: 160563 - protein, 238 aa, Zea Mays
MRGRAAALVWNWSSRAREAGLAGGTGAGTAAHRLDLDRTALPRRARTCPRAGLHGGTKKKREEVDISMLRTGHGHVLRLGTLITLVINNYYYKSSRRLICPCSLPFFIGFYCARRATVTCPSPTPLVLIDRSVLFRSEGRPGGSWRHGRVLPAGALRVPGGGGSAGRHGGGGAQRHGAGVPVLPLPPVPRLAGGSRRRALLPPGLRRRRPRRRLQAHRHGRSQSGAGDRLQLKARGDR

SEQ ID NO: 160564 - protein, 262 aa, Zea Mays
MVQIKEFRIVMPMSMEEYEIGLSYTIMKMEQQNTNSKEGVEVLQQAPFHEDAKLGKGHFTSKVYHLQRALHLPAPSRCTRTRGVRFQRAEQCPLFSKCSLTIDTVTRPDNGCSENLAAREVEIIDIASVSRDYWSKAIGAPSVDLTAFKSQRTERGPLLKGWMDSCHPVMTTYKLVTMDAPIWGLGERLEDCIIAGERALFLACHRLCFAWIDEWYGMTVEQIREMERQTDMLLKKTLKKAGSNKHEGNTKTLKDELVAVGS

SEQ ID NO: 160565 - protein, 100 aa, Zea Mays
MDSCHPVMTTYKLVTMDAPIWGLGERLEDCIIAGERALFLACHRLCFAWIDEWYGMTVEQIREMERQTDMLLKKTLKKAGSNKHEGNTKTLKDELVAVGS

SEQ ID NO: 160566 - protein, 280 aa, Zea Mays
MVQIKEFRIVMPMSMEEYEIGLSYTIMKMEQQNTNSKEGVEVLQQAPFHEDAKLGKGHFTSKVYHLQSKIPSWMKGFAPASALAVHEDSWCAFPKSRTVIKCPLFSKCSLTIDTVTRPDNGCSENAHGLSGEQLAAREVEIIDIASVSRDYWSKAIGAPSVDLTAFKSQRTERGPLLKGWMDSCHPVMTTYKLVTMDAPIWGLGERLEDCIIAGERALFLACHRLCFAWIDEWYGMTVEQIREMERQTDMLLKKTLKKAGSNKHEGNTKTLKDELVAVGS

SEQ ID NO: 160567 - protein, 235 aa, Zea Mays
MVQIKEFRIVMPMSMEEYEIGLSYTIMKMEQQNTNSKEGVEVLQQAPFHEDAKLGKGHFTSKVYHLQSKIPSWMKGFAPASALAVHEDSWCAFPKSRTGARFERRAVSRERSRDHRHRFRVAGLLEQGDRRSERRPDCLQVTADRTRPSSQGMDGLVPSGDDHVQAGDHGRSHMGPRRTPGRLHHCGGEGVVLGMPPAVLRVDRRVVRHDRGADPRDGAADGHAAQEDAEEGREQ

SEQ ID NO: 160568 - protein, 111 aa, Zea Mays
MVQIKEFRIVMPMSMEEYEIGLSYTIMKMEQQNTNSKEGVEVLQQAPFHEDAKLGKGHFTSKVYHLQSKIPSWMKGFAPASALAVHEDSWCAFPKSRTESTVRKERKKMRR

SEQ ID NO: 160569 - protein, 152 aa, Zea Mays
MSPVARSSRAVAGASGAASTTTHSSGGATRRSACAARVSAAARSPVAAGVDSVVVTTTRSGRGDAGSRGRPPPPASCASRLRFTAPAPPAGSARTTWLLPTRPPAAAAADVQSDTDDGAKPVKKPITKQREECSSAFFHSCDPCFLPRAPAA

SEQ ID NO: 160570 - protein, 125 aa, Zea Mays
MDLGAPARRRLPIRLLLVSLTVLVVLTARSSAEVITLTEETFSDKIKEKDTVWFVQFCVPWCKHCKNLGTLWEDLGKVMEGADEIEIGQVDCGVSKPVCSKVDIHSYPTFKVFYEGEEVVKYKVL

SEQ ID NO: 160571 - protein, 200 aa, Zea Mays
MSGAADYQEMVASVPPSLKAITLTHVRYSRGDPLGLFLAWVSLVPVFISLGGFVSHFLFRRELQGLCFAAGLLVSQALNELIKHSVAQSRPSYCELLEACDSHGWPSSHSQYTFFFATYLSLLSLRRSRARQVFAGAVVGLVFGAIWYWIVNTMLVNYFPMIEESAIGRWLYIKDTSHIPDVLKFEYDNARAARKKVATD

SEQ ID NO: 160572 - protein, 294 aa, Zea Mays
MAYVLRDVVVVLGLAAAAARLDSWLVWPLYWAAQGTMFWALFVLGHDCGHGSFSNNPKLNSVVGHILHSSILVPYHGWRISHRTHHQNHGHVEKDESWHPLPERLYKSLDFMTRKLRFTMPFPLLAFPLYLFARSPGKSGSHFNPSSDLFQPNEKKDIITSTASWLAMVGVLAGLTFLMGPVTMLKLYGVPYFVFVAWLDMVTYLHHHGHEDKLPWYRGQEWSYLRGGLTTLDRDYGLINNIHHDIGTHVIHHLFPQIPHYHLIEAPRQQNRFLASTTKNQRSRVLSRGTCLGC

SEQ ID NO: 160573 - protein, 74 aa, Zea Mays
MAFFYNPRSDLPIAPMAELVGPDRPALYPEMTFDEYRVFIRQRGLAGKAQLESLQVKATAGGGGCSAAAASSTS

SEQ ID NO: 160574 - protein, 78 aa, Zea Mays
MGKTKNTGQLLAKCSYFNGLIQLILAVYYLDLSCRDMVLCICWQLLQLLLECPCWRYVAVCLCLGYLHQLFYPTYHVS

SEQ ID NO: 160575 - protein, 61 aa, Zea Mays
MCGSPAVEIETHTHETSGQVRVAPAGQNLHTYPHQPGQVPVGFWVCGLNCHPYLCTSIPKK

SEQ ID NO: 160576 - protein, 57 aa, Zea Mays
MFVFGEIRVVSHLHSFSWLIDCYFKSHVYLGWLGSACLYNYLELLLEWSRFDELPTA

SEQ ID NO: 160577 - protein, 160 aa, Zea Mays
MAEPAKLYRFDKEGNQWKERGTGTVKLLKHKDTAKVRLVMRQAKTLKICANHLVVATTKMQEHAGSDKSCVWHALDFADGELKEEMFAIRFGSVENCKKFKDTVEEIAEQQGKSEEKENDEVSTAASDLAQKLTVAEPSKEENAEKEEAPASDDKKDAKE

SEQ ID NO: 160578 - protein, 187 aa, Zea Mays
MAEPAEHRPAEEEEVAVTTGEEDEDALLDMKAKLYRFDKEGNQWKERGTGTVKLLKHKDTAKVRLVMRQAKTLKICANHLVVATTKMQEHAGSDKSCVWHALDFADGELKEEMFAIRFGSVENCKKFKDTVEEIAEQQGKSEEKENDEVSTAASDLAQKLTVAEPSKEENAEKEEAPASDDKKDAKE

SEQ ID NO: 160579 - protein, 109 aa, Zea Mays
MIDAAWCIVVACGVCSAPSKPGGLDDDSMDELCSCGNGGPPLPLLLSLRPPTAMGSGRASSGAQPPYCRRRGALLAAIVTHRPCRSELVAERGYESSEDHPGTWNLKSQ

SEQ ID NO: 160580 - protein, 80 aa, Zea Mays
MTSVRHPIDKLSLQRIHPRRAAARPRTYCERKTYLAYDSRVEHPFPWYLKVLISSACTVPYSLSVMNTLFNSTTRESTIR

SEQ ID NO: 160581 - protein, 79 aa, Zea Mays
MGMHHVSYVYYCIWTPHFCETKCLSFIASCDRTYCERKTYLAYDSRVEHPFPWYLKIAVVECCFSQGICFLLGPVGELF

SEQ ID NO: 160582 - protein, 57 aa, Zea Mays
MTSVRHPIDKLSLQRIHPRRAAARPRTYCERKTYLAYDSRVEHPFPWCGHSPVIMEG

SEQ ID NO: 160583 - protein, 73 aa, Zea Mays
MTSVRHPIDKLSLQRIHPRRAAARPRTYCERKTYLAYDSRVEHPFPWYLKVWPLSCHHGRMMLPTLCSSDRGS

SEQ ID NO: 160584 - protein, 54 aa, Zea Mays
MTSVRHPIDKLSLQRIHPRRAAARPRTYCERKTYLAYDSRVEHPFPWYLKDRGS

SEQ ID NO: 160585 - protein, 73 aa, Zea Mays
MTSVRHPIDKLSLQRIHPRRAAARPRTYCERKTYLAYDSRVEHPFPWYLKIAVVECCFSQGICFLLGPVGELF

SEQ ID NO: 160586 - protein, 286 aa, Zea Mays
MSPPDSSPSPSPHGSHPMPRQSTSHRHPSITPPHLVRPGPRQDGNDPLVYTPAHSRHKHFWTTYGLVAAGIAVFLLVSAASILCFRAKKMGTVRPWATGLSGQLQKAFVTGVPSLKRSELETACEDFSNIIGSTSTCMLYKGTLSSGVEIAVASSLVTSAKDWSKENESQYRKKITNLSKVSHKNFMNLLGYCEEEHPFTRVMVFEYAPNGTLFEHLHVREAEKLDWMARLRISMGIAYCLEHMHQLQTPAALRNFDSTTVYLTDDFAAKTWRTLCASTAWCCWRY

SEQ ID NO: 160587 - protein, 658 aa, Zea Mays
MATMFGGIVSQEAVKACSGKFHPLYRFFYFDSSESLPTHQLDPKDLKPLNSRYDAQISVFGSKLQKKLRDANVFVVGSGALGCEFLKNLALMGVSCSRKGKITITDDDVIEKSNLSRQFLFRDWNIGHPKSTVAATAASAINSCLHIDALQNRACLETEHVFHDAFWEILDVVINALDNVNARMYMDMRCLYFQKPLLESGTLGTKCNTQVVIPHLTENYGTSRDPPEKQAPMCTVHSFPHNIDHCLTWARSEFEGLLEKTPKEVNSFLSNPAQYAASMKKAGDAQARELLEHVCECLEKECCGTFDDCITWARLKFEDYFSNRVKQLTFTFPEDAATSMGAHFWCAPKRFPHPLEFSAADSSHIQFIMSASILRALSFGISIPDWAKDTDNLADAVSKVAVPEFKPKSGVKIETDVKAENISSASVDDAAVIEDLLSRLKACTKKLPPRFQMKPIQFEKDDDTNFHMDLIAGLANMRARNYGIQEVDKLKAKIIAGRIIPAIATSTAMATGLVCLELYKVLARGHPIEDYRNTFANLALPMLTTSEPLPPTVIKHGDMTWTVWDRWSIEGDITVAELLKWLSDKGLSAYSVSCGTSLLYNIMFTRHKDRLSKKIRDVAKEVAKVDIPEYRKHLDVVVACEDDNGKDVDIPLISIYFR

SEQ ID NO: 160588 - protein, 467 aa, Zea Mays
MATMFGGIVSQEAVKACSGKFHPLYRFFYFDSSESLPTHQLDPKDLKPLNSRYDAQISVFGSKLQKKLRDANVFVVGSGALGCEFLKNLALMGVSCSRKGKITITDDDVIEKSNLSRQFLFRDWNIGHPKSTVAATAASAINSCLHIDALQNRACLETEHVFHDAFWEILDVVINALDNVNARMYMDMRCLYFQKPLLESGTLGTKCNTQVVIPHLTENYGTSRDPPEKQAPMCTVHSFPHNIDHCLTWARSEFEGLLEKTPKEVNSFLSNPAQYAASMKKAGDAQARELLEHVCECLEKECCGTFDDCITWARLKFEDYFSNRVKQLTFTFPEDAATSMGAHFWCAPKRFPHPLEFSAADSSHIQFIMSASILRALSFGISIPDWAKDTDNLADAVSKVAVPEFKPKSGVKIETDVKAENISSASVDDAAVIEDLLSRLKACTKKLPPRFQMKPIQFEKELWHPRG

SEQ ID NO: 160589 - protein, 399 aa, Zea Mays
MVPRSDVGGGGSSNASGVVEIDEDLHSRQLAVYGRETMRQLFASNVLISGLNGLGAEIAKNLALAGVKSVTLHDTGNVEMWDLSGNFFLSEDDIGKNRAVACVAKLQELNNAVLIYTLTEELTTEHLPKFQVVVFTDISLDKAFEFDDYCRNQQPPISFIKTEVRGLFGSVFCDFGPEFSVLDVDGEDARTGIIASISITTDNRTMVSCVDDERLDFQDGDLVVFSEVQGMTELNDGKPRTVMCAGPFSFCIEDTSNFGTYTKGGIVTQVKERKILKFKSLRDSIREPGNFPLSDCSKFTRPPLLHFAFIALDKFRKEFGRFPGVACGLDAQRFVEFTASINEATIDYKIEDELDENLLRLFASGSKAVLNPMATMFGGIVSQEAVKACSGKFHPLYRI

SEQ ID NO: 160590 - protein, 760 aa, Zea Mays
MWDLSGNFFLSEDDIGKNRAVACVAKLQELNNAVLIYTLTEELTTEHLPKFQVVVFTDISLDKAFEFDDYCRNQQPPISFIKTEVRGLFGSVFCDFGPEFSVLDVDGEDARTGIIASISITTDNRTMVSCVDDERLDFQDGDLVVFSEVQGMTELNDGKPRTVMCAGPFSFCIEDTSNFGTYTKGGIVTQVKERKILKFKSLRDSIREPGNFPLSDCSKFTRPPLLHFAFIALDKFRKEFGRFPGVACGLDAQRFVEFTASINEATIDYKIEDELDENLLRLFASGSKAVLNPMATMFGGIVSQEAVKACSGKFHPLYRFFYFDSSESLPTHQLDPKDLKPLNSRYDAQISVFGSKLQKKLRDANVFVVGSGALGCEFLKNLALMGVSCSRKGKITITDDDVIEKSNLSRQFLFRDWNIGHPKSTVAATAASAINSCLHIDALQNRACLETEHVFHDAFWEILDVVINALDNVNARMYMDMRCLYFQKPLLESGTLGTKCNTQVVIPHLTENYGTSRDPPEKQAPMCTVHSFPHNIDHCLTWARSEFEGLLEKTPKEVNSFLSNPAQYAASMKKAGDAQARELLEHVCECLEKECCGTFDDCITWARLKFEDYFSNRVKQLTFTFPEDAATSMGAHFWCAPKRFPHPLEFSAADSSHIQFIMSASILRALSFGISIPDWAKDTDNLADAVSKVAVPEFKPKSGVKIETDVKAENISSASVDDAAVIEDLLSRLKACTKKLPPRFQMKPIQFEKELWHPRG

SEQ ID NO: 160591 - protein, 624 aa, Zea Mays
MFWEISSTVPDLKPLNSRYDAQISVFGSKLQKKLRDANVFVVGSGALGCEFLKNLALMGVSCSRKGKITITDDDVIEKSNLSRQFLFRDWNIGHPKSTVAATAASAINSCLHIDALQNRACLETEHVFHDAFWEILDVVINALDNVNARMYMDMRCLYFQKPLLESGTLGTKCNTQVVIPHLTENYGTSRDPPEKQAPMCTVHSFPHNIDHCLTWARSEFEGLLEKTPKEVNSFLSNPAQYAASMKKAGDAQARELLEHVCECLEKECCGTFDDCITWARLKFEDYFSNRVKQLTFTFPEDAATSMGAHFWCAPKRFPHPLEFSAADSSHIQFIMSASILRALSFGISIPDWAKDTDNLADAVSKVAVPEFKPKSGVKIETDVKAENISSASVDDAAVIEDLLSRLKACTKKLPPRFQMKPIQFEKDDDTNFHMDLIAGLANMRARNYGIQEVDKLKAKIIAGRIIPAIATSTAMATGLVCLELYKVLARGHPIEDYRNTFANLALPMLTTSEPLPPTVIKHGDMTWTVWDRWSIEGDITVAELLKWLSDKGLSAYSVSCGTSLLYNIMFTRHKDRLSKKIRDVAKEVAKVDIPEYRKHLDVVVACEDDNGKDVDIPLISIYFR

SEQ ID NO: 160592 - protein, 505 aa, Zea Mays
MAAALECWSGRPSTDEEMVEQVLMKPHGRSDDSLPTCADSASAGEPTSAPAPPNPKKWQRLGRNFAGAIAAFKNTLSLDGGGLPRDPSPRAEKPPPLLLRGLAQLYSRGAAANQQLPEKLVADLRRHFDALPNSYAQAGFDMKDVLLHARLVEQATGEDQPAVNIEEVHGRGAGDEGTVFQLTFACTAPLSWQSMSGSLDSPSFCCKKIQIFEKRGLTLGVVMILVQTGNEALFKNRVESALKSVAKKQRKNSGGGVKLPFGLCGCQEEGSRNFDEESMFDPDDGQVLDNEPARRPQLPTRLPQSSVFVSVDEWQTIRSGGEELGRWMLRSEEIEFIDWVGANSFRGVYRGKKVWVNKLRGCDMGSAYEVEIRQDLLQLMSCGQRNILQFHGICFNGNHGLCIVTRMMEGGSVHDILTQRNKRLSLRDTVRIALDVADTLAFMNSYGIAYRDLNARKILLDRQGNACLGDMGIVTPCSNVGEVTEYETSGYRWLAPEVSFLDLVY

SEQ ID NO: 160593 - protein, 392 aa, Zea Mays
MAEELVMKTGNEALFKNRVESALKSVAKKQRKNSGGGVKLPFGLCGCQEEGSRNFDEESMFDPDDGQVLDNEPARRPQLPTRLPQSSVFVSVDEWQTIRSGGEELGRWMLRSEEIEFIDWVGANSFRGVYRGKKVWVNKLRGCDMGSAYEVEIRQDLLQLMSCGQRNILQFHGICFNGNHGLCIVTRMMEGGSVHDILTQRNKRLSLRDTVRIALDVADTLAFMNSYGIAYRDLNARKILLDRQGNACLGDMGIVTPCSNVGEVTEYETSGYRWLAPEIIAGDPETVSETWMSNVYSYGMVLWEMITGEEAYSAYSPVQAAVGIAACGLRPEIPRECPPFLRSYPSYKGSRTLDSVLFFSFFLFPPSFYIIIYAIYQFGLAVCMPNHAGNCI

SEQ ID NO: 160594 - protein, 84 aa, Zea Mays
MVMDPRRRRTCDRPKAVSAPEANTELQVNIDKERSITHANAKSKSEKFPPLVRLVSPGCFSTLFLCTLLMLLVVYMESNIFEGE

SEQ ID NO: 160595 - protein, 167 aa, Zea Mays
MDEIMNKVGAYWLGQRANKEISSAGDDLDRRGWSEMAGEQAEGQDAEAAGGPAQGAQPPRGPVPARGDQLRVRARDAAPDGVHPVPLRGRLPRRLRAAVRRHGVWHAGRGPPHGGGRDQDQGARLGQGHRRQGRRRQGPLHRWDQEVAQPGRLRGRQGRHHRRRVLA

SEQ ID NO: 160596 - protein, 196 aa, Zea Mays
MASMLAILRPSAPAPLAGRRARAAAPATARVALSSRSRYSSVRVSLGSEVAVGADALFADYKPTTAFLFPGQGAQTVGMGAEAQSVPAATKLFNQANEILGYDLLDLCTNGPKEKLDSTMISQPAIYVTSLAAVEVLRARDGGQDVINSVDVTCGLSLGEYTALAFAGAFSFEDGLKLVKLRGEAMQMLPIVRWLV

SEQ ID NO: 160597 - protein, 237 aa, Zea Mays
MASMLAILRPSAPAPLAGRRARAAAPATARVALSSRSRYSSVRVSLGSEVAVGADALFADYKPTTAFLFPGQGAQTVGMGAEAQSVPAATKLFNQANEILGYDLLDLCTNGPKEKLDSTMISQPAIYVTSLAAVEVLRARDGGQDVINSVDVTCGLSLGEYTALAFAGAFSFEDGLKLVKLRGEAMQDASDAANSAMVSVIGLDSEKVQELCDAANDEVDENDRVQIANFLCPFLVV

SEQ ID NO: 160598 - protein, 262 aa, Zea Mays
MAAQALLGAPLSCCARPAMLHLAPSRRSSSRRAPHRTPMAAELTACARSGCFAPASRAPLLHAERPLQLLGQPSLALCSSLFLAAELLCARCSCSPSCSLPCAPPSAHALTCLFTARAASSFFPSRSVSPTIAAPLIELQLLRAPLAELALRSGAALRTAAFHLPAQLTALNCPAPRALAPDTSRAIFGSRRLAPSSLFPSGRNKILSHRVIGRCSQLTMEFVRLAICLNVVPEFVVILPMPWPQLPMSLVHVVVSYVIKKP

SEQ ID NO: 160599 - protein, 1267 aa, Zea Mays
MCRAAPEHEEEAPQFGSPVEASSPPRPPLVRDSERDEEETKHNRAVRSCRNWWPPAPRKKLPRQQQKGGGRGVVVSRIARAMPLSRHTVRSEYALGGRDLYRGADQHDPEAVLDGAAMAGLVGVLRQLGDLAEFAAQVFHGLYDEVMSTSARGHGLMLRVQQLEAELPLLEEDSCQRNYLHVVASNRGVDWHPNPRVDHGVVAGGDTPRFIMESVKQCRGPPKLFVLDKYDVGGDGACLKRYTDPSSFRTGSACPTTLLQEGTRDDRRPLRAVVINKIRSPNAADNFSKLETGSSAGALDEVPTNRRRLKFRQLNGSVFQSFRPLMQNLHEKPSSEERLITGDHSKVHVFMVESPEPGAEERDVMVDTSDNMEKGKLTVRRKRSVSEEALSRSSDARSAGSSRGGYDSELDIYVDALTTMDSEDFSAPESGAREQATEEEEEEQRCNGSVTSAVSNGTRDITKKTKEVKENSKKIASKRSKYVGSMELTASKVGILPRELSEKHAPFSGSLRYMAKQLLELRYDGTQDSELYDVEADGVGRDVKYQEISDHAVEAKESDAVHKILSGSPYDDAGLGKCPQEEINHGQEHDVPPTDSPHDSAPDEGNGFQDSNMAYLVGIITSSSSQEGEGCTSTALHENSSMAVLNHVLEHAQERFGEDLDKEVDVDIHTEAISENTSDKCEDLKEVSIYTEQVNVEDMEEINESDVYALDDERAEYIEQQVVSDGSISSPVSSKQSDDPCWITPLTLADEDDTVACKVVDRPEGDHVILSETFKGIDLPNVVTESVINSKHDMPNNGQYYLHPKATFGQDLCLGSYKIVGENGEVPLCSSTTATTTPELTVNTETKHEFHQAVYQEPSNSFNSSAEVFGDPLAPDSRDDAPSVISSFDWMLNGATQKSFNIFPSHPTNGNAEENGSSEDVPPLPPLPPMQWRTNKIQTGPSPLSAKIGRPPRPKPSVKQQQSEASHVLQENSLHKGLSLQNELVQANISSDHEKNQILNIDFRESHHQEGEEYDAQDSNPFASSEVECLAEVASVKSENLHPLQLPELIVVLEEAWSEFGNIKFMPEQEGKFQLSNGLSVWNDLCTSGLSSQKTSEKPEFFADYKGKEFSFAGSDEVADSEENKPNGAVKHLQNPDLPAQQKDDIHDCDGKVTKFSSALEEDSSQSPTHTVSGPPRYPLLPVTSHDRSMIRKAPTLVQPSSMLADEKNTLLEQIKNKSFNLKPVLAKRPDVMGGPKTNLQVVAILERAHAIRQAVADDDDDDNWSE

SEQ ID NO: 160600 - protein, 152 aa, Zea Mays
MRVQYAKTKSDCIAKEDGTYAPKEKRKKQEEKAAEKKRRTEEAQQAGLNAAAAQSNGTGYQASRLGKASQEPPAPPNNILFIQNLPDQTTSMMLQILFQQYPGFREVRMIEAKPGIAFVEFEDDGQSMVAMQALQGFKITPENPMAISYAKK

SEQ ID NO: 160601 - protein, 470 aa, Zea Mays
MPPDSNGSFDGHEIVEVVGEPGTPSGTTARLMDFIPIDIYIPSVERGALSESRRKRRFLDFLRAHPSKDWFLRSTFVGRLRRRSHGHQESADDGSDDGGRRGPRRRFRVPFVRKIKWRKLWTYAVSWCRKPENFAMIIWLAFVGAGLLLLLMLMTGMLDAAIPDDERRKKWTEVINQILNALFTIMCLYQHPKIFHHLVLLLRWRPDGDREEIRKVYCKDGAARPHDRAHMLLVVALLHVTCFAQYYCCALFWSYTRKDRPDWALNIGYGLGTGCPVVAGLYTAYSPLGRKEPDTESSSAAPADAAQQDHHTSRTENDGVEITIYNRRVVVSSPEWSGGLFDCCDDGTVCALSATCTFCVFGWNMERLGFGNICGSATSSRAAAPGGGAAARPWATAPSGCSAGPARWRRRCGPPTSTTWRTTDSWPSWARATGRAAPCFCRSRARRQPRRTHGACRARLSSTTRRTPAG

SEQ ID NO: 160602 - protein, 132 aa, Zea Mays
MQRHGKPDAMMQSWMDQFEADSDNKCWASFQERVSRAPNQVLRYCREPNAKPLWALSSGCPSNADIPSCSYCKGPLCYEFQGHVTKVLATKRSLLGFNCTLQQLRGNNNVCLFLAVQCCRCQKVCRKSETIQ

SEQ ID NO: 160603 - protein, 136 aa, Zea Mays
MQRHGKPDAMMQSWMDQFEADSDNKCWASFQERVSRAPNQVLRYCREPNAKPLWALSSGCPSNADIPSCSYCKGPLCYEFQVMPQLLYFFVVGNQPDSLDWATIAVYTCQGACDQSVSYKEEFAWVQLYPTTTTRQ

SEQ ID NO: 160604 - protein, 226 aa, Zea Mays
MESSAKKLSSLRITSLDGDDDETEDPHQPPPAGPSAAAADSDDDDEEEEAEVTLGVLSKPKHPGLLLRHLFPSKAGGIPAWLDPVNLPSGKSSCCGFCGEPLQFVLQIYAAVEDNVAAFHRTLFMFMCPSMACLLRDQHEQWKHKHGNPCRRFSGVNCHGLMPSTQLNLQSMTGLTNHCVQEPMYATGVVPGKVIKYVVAVRKQDTVLRNIRHCIGVLVIKMIASR

SEQ ID NO: 160605 - protein, 291 aa, Zea Mays
MFMCPSMACLLRDQHEQWKHKHGNPCRSVKVFRCQLPRTNAFYSAQPPKHDRSDKPLCPGAHVCHWCGTWKGDKICSSCKKARYCSEKHQALHWRTGHKNDCLQIISSSAASNSVLPTVGKVPANTFWPEFEIKIDYEGRFDSDSGDENNSKLLVMQRHGKPDAMMQSWMDQFEADSDNKCWASFQERVSRAPNQVLRYCREPNAKPLWALSSGCPSNADIPSCSYCKGPLCYEFQVMPQLLYFFVVGNQPDSLDWATIAVYTCQGACDQSVSYKEEFAWVQLYPTTTTRQ

SEQ ID NO: 160606 - protein, 52 aa, Zea Mays
MDGGGSGNASGGSGGASTCCYYALLGIRKNASATDIRAAYRRLAMTCSHVPI

SEQ ID NO: 160607 - protein, 667 aa, Zea Mays
MEYMQMKYSEDLNLLGRHLFSLAHAASGYHKVLEENRKLYNQVQDLKGSIRVYCRVRPFLPGQASPSTVGSIDEGNITIVTPSKSGKEGRKTFSFNKVFGPSATQAEVFLDTQPLIRSVLDGYNVCIFAYGQTGSGKTYTMSGPKNMTEQTQGVNYRALGDLFKLAEQRKGTFIYDIAVQMIEIYNEQVRDLLVSDGLNKKLEIRNNSQNGLNVPDASLVRVASTMDVMELMNVGQKNRAVGATALNDRSSRSHSCLTVHVQGRDLTSGTIFRGCMHLVDLAGSERVDKSEVTGERLKEAQHINKSLSALGDVIASLAQKNSHVPYRNSKLTQLLQDSLGGQAKTLMFVHISPESDAVGETISTLKFAERVSTVELGAARLNKESGEVRELKEQIARLKSALAAKNLGSEQIISHDSEAFNIKMPSPGFSNTRQGSCDLLSSQSNFRQPMEDVGNIEARANHTLRQKKPSFDLQDLLTASDSPSWPDSNLRVNFQMGDEREAIGGDWIDKVVVNNNNSASDWEGDNTALPDFFYQRYHSGMREKQYQRNNMRQKDDHEYEQQRPRFYSTNTDDSDDIDIATSDSSESDALWQLNVQSMNNSISESGSKVKKPQIKLRDGSDARTPIHSQIPSGSRKVANGSSRSVRQPLSRSDSRRLSSNGRQTGAK

SEQ ID NO: 160608 - protein, 1022 aa, Zea Mays
MSEAVAILSLSASAVVEDVLRQHGCRLSDRDLASRRAEEAAGRRNEAAGWLRRTVGAVAARDLPEEPSEEEFRLGLRNGQILCGALNRVHPGAVPKVVVNTAADSVLQADGAALSAFQYFENVRNFLVAAQEIGLPCFEASDLEQGGKSARVVNCVLALKSYGDWKQCGGTGPWKYGGNLKPSVSGKSGHGRKNSEPFRRSQSINEGEVPYEEAGFNGDAHFDSSDMSTSRPLKMLVSAVLSDKRPDEVPQLLESMLSKLVEEFENRLNSQNELVKAALKSGIDNTKSFSKSKVLVETPPNTSGRKMDTGDIYCNHKKTKKEASREVALKQHLILQQQSKNVEELKSDLITTRAGMEYMQMKYSEDLNLLGRHLFSLAHAASGYHKVLEENRKLYNQVQDLKGSIRVYCRVRPFLPGQASPSTVGSIDEGNITIVTPSKSGKEGRKTFSFNKVFGPSATQAEVFLDTQPLIRSVLDGYNVCIFAYGQTGSGKTYTMSGPKNMTEQTQGVNYRALGDLFKLAEQRKGTFIYDIAVQMIEIYNEQVRDLLVSDGLNKKLEIRNNSQNGLNVPDASLVRVASTMDVMELMNVGQKNRAVGATALNDRSSRSHSCLTVHVQGRDLTSGTIFRGCMHLVDLAGSERVDKSEVTGERLKEAQHINKSLSALGDVIASLAQKNSHVPYRNSKLTQLLQDSLGGQAKTLMFVHISPESDAVGETISTLKFAERVSTVELGAARLNKESGEVRELKEQIARLKSALAAKNLGSEQIISHDSEAFNIKMPSPGFSNTRQGSCDLLSSQSNFRQPMEDVGNIEARANHTLRQKKPSFDLQDLLTASDSPSWPDSNLRVNFQMGDEREAIGGDWIDKVVVNNNNSASDWEGDNTALPDFFYQRYHSGMREKQYQRNNMRQKDDHEYEQQRPRFYSTNTDDSDDIDIATSDSSESDALWQLNVQSMNNSISESGSKVKKPQIKLRDGSDARTPIHSQIPSGSRKVANGSSRSVRQPLSRSDSRRLSSNGRQTGAK

SEQ ID NO: 160609 - protein, 86 aa, Zea Mays
MGDLSVGHSRRWCGRFAAVLCLCAAFCKPDELPMDPLPNLPPARSLQCFEDEQATSTIWSRIWATTLTSMATMMNTALAARLLQLL

SEQ ID NO: 160610 - protein, 151 aa, Zea Mays
MNRARPQTDFLSKDWSIRLQQHQSDHGWQNIFEKHDLYGLLERPGSHLRRLNGSEYINLGRNWQQTRVRIVLACNIMGIDVCIFYIHDMNRRTLNGSKHINISRNCNRRVSTDSASNAMCLAVVIFCIYDMNRSVRIPSYHHLSVTTVNDR

SEQ ID NO: 160611 - protein, 713 aa, Zea Mays
MGDFNYPRLADLGAAISGANKLLCQEVLEELDVCKRLKLTLELVKRELEISKLQESIAKTIEEKITREQRRYLLNELLKAIKKELGLETDDKTTLSEKFRGRIEAKKDRCPPHVLQVMDEELTKLQLLEASSSEFSVTRNYLDWLTVLPWGDYSDENFDVHHAQHILDEDHYGLADVKERILEFIAVGKLRGSSQGKIICLSGPPGVGKTSIGRSIARALNRKFYRFSVGGLADVAEIKGHRRTYVGAMPGKIVQCLRSVGTANPLVLIDEIDKLGKGHSGDPASALLELFDPEQNANFLDHYLDAPVDLSKVLFVCTANVIEMIPSPLLDRMEIIAIAGYITDEKMHIARNYLEKKTREACGIKPEQVEVTNDALLALIENYCREAGVRNLQQQIEKIYRNIALKLVRQGVSNESPQDIMVVEAEKNPVNFDVATKVEDKNSKNSIAEDASVDVSPIDSSLDNINVVPLTTESEVEANNESTHRNMEVLVDKPEEKVVVNASNLGNFVGKPVFQAERIYNQTPVGVVMGLAWNAMGGSTLYIETAKVEESKGKGTLFVTGQLGDVMKESAQIAHTVCRAVLLEKEPNNPFFAKSKLHLHVPAGATPKDGPSAGCTMVTSMLSLAIGKSVKKDLAMTGEVTLTGRILPIGGVKEKTIAARRSGVKTIIFPSANRRDFDELASNVKEGLEVHFVDKYSEIYDLVFTSDTKTQES

SEQ ID NO: 160612 - protein, 877 aa, Zea Mays
MPVYVKDAKLLRTLDENSKKSTPYAGAFLVKNEEDNSIHELKGKELLNCLHDVGTLAQITRIQGDLVVLLGHHRIQISEIVVDEPLTVKVDHLKELPYDKDAVVIKATSFEVISTLKDALRTNSLWKDQVQAYTQHMGDFNYPRLADLGAAISGANKLLCQEVLEELDVCKRLKLTLELVKRELEISKLQESIAKTIEEKITREQRRYLLNELLKAIKKELGLETDDKTTLSEKFRGRIEAKKDRCPPHVLQVMDEELTKLQLLEASSSEFSVTRNYLDWLTVLPWGDYSDENFDVHHAQHILDEDHYGLADVKERILEFIAVGKLRGSSQGKIICLSGPPGVGKTSIGRSIARALNRKFYRFSVGGLADVAEIKGHRRTYVGAMPGKIVQCLRSVGTANPLVLIDEIDKLGKGHSGDPASALLELFDPEQNANFLDHYLDAPVDLSKVLFVCTANVIEMIPSPLLDRMEIIAIAGYITDEKMHIARNYLEKKTREACGIKPEQVEVTNDALLALIENYCREAGVRNLQQQIEKIYRNIALKLVRQGVSNESPQDIMVVEAEKNPVNFDVATKVEDKNSKNSIAEDASVDVSPIDSSLDNINVVPLTTESEVGHNEHSNEAPTKTFAEETAKLPNTFKTPEANNESTHRNMEVLVDKPEEKVVVNASNLGNFVGKPVFQAERIYNQTPVGVVMGLAWNAMGGSTLYIETAKVEESKGKGTLFVTGQLGDVMKESAQIAHTVCRAVLLEKEPNNPFFAKSKLHLHVPAGATPKDGPSAGCTMVTSMLSLAIGKSVKKDLAMTGEVTLTGRILPIGGVKEKTIAARRSGVKTIIFPSANRRDFDELASNVKEGLEVHFVDKYSEIYDLVFTSDTKTQES

SEQ ID NO: 160613 - protein, 828 aa, Zea Mays
MPVYVKDAKLLRTLDENSKKSTPYAGAFLVKNEEDNSIHELKGKELLNCLHDVGTLAQITRIQGDLVVLLGHHRIQISEIVVDEPLTVKVDHLKELPYDKDAVVIKATSFEVISTLKDALRTNSLWKDQVQAYTQHMGDFNYPRLADLGAAISGANKLLCQEVLEELDVCKRLKLTLELVKRELEISKLQESIAKTIEEKITREQRRYLLNELLKAIKKELGLETDDKTTLSEKFRGRIEAKKDRCPPHVLQVMDEELTKLQLLEASSSEFSVTRNYLDWLTVLPWGDYSDENFDVHHAQHILDEDHYGLADVKERILEFIAVGKLRGSSQGKIICLSGPPGVGKTSIGRSIARALNRKFYRFSVGGLADVAEIKGHRRTYVGAMPGKIVQCLRSVGTANPLVLIDEIDKLGKGHSGDPASALLELFDPEQNANFLDHYLDAPVDLSKVLFVCTANVIEMIPSPLLDRMEIIAIAGYITDEKMHIARNYLEKKTREACGIKPEQVEVTNDALLALIENYCREAGVRNLQQQIEKIYRNIALKLVRQGVSNESPQDIMVVEAEKNPVNFDVATKVEDKNSKNSIAEDASVDVSPIDSSLDNINVVPLTTESEVGHNEHSNEAPTKTFAEETAKLPNTFKTPEANNESTHRNMEVLVDKPEEKVVVNASNLGNFVGKPVFQAERIYNQTPVGVVMGLAWNAMGGSTLYIETAKVEESKGKGTLFVTGQLGDVMKESAQIAHTVCRAVLLEKEPNNPFFAKSKLHLHVPAGATPKDGPSAGCTMVTSMLSLAIGKSVKKDLAMTGEVTLTGRILPIGGVHRYFQSKKMLIS

SEQ ID NO: 160614 - protein, 848 aa, Zea Mays
MPVYVKDAKLLRTLDENSKKSTPYAGAFLVKNEEDNSIHELKGKELLNCLHDVGTLAQITRIQGDLVVLLGHHRIQISEIVVDEPLTVKVDHLKELPYDKDAVVIKATSFEVISTLKDALRTNSLWKDQVQAYTQHMGDFNYPRLADLGAAISGANKLLCQEVLEELDVCKRLKLTLELVKRELEISKLQELGLETDDKTTLSEKFRGRIEAKKDRCPPHVLQVMDEELTKLQLLEASSSEFSVTRNYLDWLTVLPWGDYSDENFDVHHAQHILDEDHYGLADVKERILEFIAVGKLRGSSQGKIICLSGPPGVGKTSIGRSIARALNRKFYRFSVGGLADVAEIKGHRRTYVGAMPGKIVQCLRSVGTANPLVLIDEIDKLGKGHSGDPASALLELFDPEQNANFLDHYLDAPVDLSKVLFVCTANVIEMIPSPLLDRMEIIAIAGYITDEKMHIARNYLEKKTREACGIKPEQVEVTNDALLALIENYCREAGVRNLQQQIEKIYRNIALKLVRQGVSNESPQDIMVVEAEKNPVNFDVATKVEDKNSKNSIAEDASVDVSPIDSSLDNINVVPLTTESEVGHNEHSNEAPTKTFAEETAKLPNTFKTPEANNESTHRNMEVLVDKPEEKVVVNASNLGNFVGKPVFQAERIYNQTPVGVVMGLAWNAMGGSTLYIETAKVEESKGKGTLFVTGQLGDVMKESAQIAHTVCRAVLLEKEPNNPFFAKSKLHLHVPAGATPKDGPSAGCTMVTSMLSLAIGKSVKKDLAMTGEVTLTGRILPIGGVKEKTIAARRSGVKTIIFPSANRRDFDELASNVKEGLEVHFVDKYSEIYDLVFTSDTKTQES

SEQ ID NO: 160615 - protein, 493 aa, Zea Mays
MPGKIVQCLRSVGTANPLVLIDEIDKLGKGHSGDPASALLELFDPEQNANFLDHYLDAPVDLSKVLFVCTANVIEMIPSPLLDRMEIIAIAGYITDEKMHIARNYLEKKTREACGIKPEQVEVTNDALLALIENYCREAGVRNLQQQIEKIYRNIALKLVRQGVSNESPQDIMVVEAEKNPVNFDVATKVEDKNSKNSIAEDASVDVSPIDSSLDNINVVPLTTESEVGHNEHSNEAPTKTFAEETAKLPNTFKTPEANNESTHRNMEVLVDKPEEKVVVNASNLGNFVGKPVFQAERIYNQTPVGVVMGLAWNAMGGSTLYIETAKVEESKGKGTLFVTGQLGDVMKESAQIAHTVCRAVLLEKEPNNPFFAKSKLHLHVPAGATPKDGPSAGCTMVTSMLSLAIGKSVKKDLAMTGEVTLTGRILPIGGVKEKTIAARRSGVKTIIFPSANRRDFDELASNVKEGLEVHFVDKYSEIYDLVFTSDTKTQES

SEQ ID NO: 160616 - protein, 883 aa, Zea Mays
MASSSKASDSSSQRSKRSDQGTGREAAPASVVPIHGNLTQLIRQIKSRRLLYIKEKLEANRKTLQRHSCALFDVAAAAEVASRGSDGGNALSQRAAEGQFRLAGSDLAHGIGERDVVYMQEENLASGTLVLSSSGAAAQRTVVRFVKLPLVERIPPYTTWIFLDKIYYDPIGNEALICSDSDEEIPEPEEEKHFFTEGEDQLIWRATQEHGLNREVVNVLCQFIDSTPSEIEERSEVLFEKNEKNSGSSDKIERQLSLDKTMDAVLDSFDNLFCRRCLVFDCRLHGCSQNLVFPSEKQPYSFEPDENKKPCGRQCYLRFPQWREGFQEIHDVGLSGCATYNMESGTVSHKVDVSIMSESEDSNREKGNIRSMTLVGTSGSKIISSVSAEESTTPPSADTSETENASSDMPPSSLRKYKISKRGPRYRERSPGKRQKVFTYDISFASNILNKLSIPEIRDTRLESREPGGDKLQILDESTKKTSSKDICGESPITTTENVGRESKKVSSTKNFLEHTLSCWSALERDLYLKGIEIFGKNSCLIARNLLSGMKTCMEVANYMYNNGAAMAKRPLLNKSISGDFAETEQDYMEQDMVARTRIYRRRGRNRKLKYTWKSAGHPTVRKRIGDGKQWYTQYNPCVCQQMCGKDCPCVENGTCCEKYCGCSKSCKNKFRGCHCAKSQCRSRQCPCFAASRECDPDVCRNCWVSCGDGSLGEPPARGDGYQCGNMKLLLKQQQRILLGRSDVAGWGAFIKNPVNKNDYLGEYTGELISHKEADKRGKIYDRANSSFLFDLNDQYVLDAYRKGDKLKFANHSSNPNCYAKVMLVAGDHRVGIYAKEHIEASEELFYDYRYGPDQAPAWARRPEGSKKDEASVSHHRAHKVAR

SEQ ID NO: 160617 - protein, 869 aa, Zea Mays
MSLKFRGSRASGLVSSIGCDGGLGIWLSLQEKLEANRKTLQRHSCALFDVAAAAEVASRGSDGGNALSQRAAEGQFRLAGSDLAHGIGERDVVYMQEENLASGTLVLSSSGAAAQRTVVRFVKLPLVERIPPYTTWIFLDKNQRMADDQSVVGRRRIYYDPIGNEALICSDSDEEIPEPEEEKHFFTEGEDQLIWRATQEHGLNREVVNVLCQFIDSTPSEIEERSEVLFEKNEKNSGSSDKIERQLSLDKTMDAVLDSFDNLFCRRCLVFDCRLHGCSQNLVFPSEKQPYSFEPDENKKPCGRQCYLRFPQWREGFQEIHDVGLSGCATYNMESGTVSHKVDVSIMSESEDSNREKGNIRSMTLVGTSGSKIISSVSAEESTTPPSADTSETENASSDMPPSSLRKYKISKRGPRYRERSPGKRQKVFTYDISFASNILNKLSIPEIRDTRLESREPGGDKLQILDESTKKTSSKDICGESPITTTENVGRESKKVSSTKNFLEHTLSCWSALERDLYLKGIEIFGKNRNLLSGMKTCMEVANYMYNNGAAMAKRPLLNKSISGDFAETEQDYMEQDMVARTRIYRRRGRNRKLKYTWKSAGHPTVRKRIGDGKQWYTQYNPCVCQQMCGKDCPCVENGTCCEKYCGCSKSCKNKFRGCHCAKSQCRSRQCPCFAASRECDPDVCRNCWVSCGDGSLGEPPARGDGYQCGNMKLLLKQQQRILLGRSDVAGWGAFIKNPVNKNDYLGEYTGELISHKEADKRGKIYDRANSSFLFDLNDQYVLDAYRKGDKLKFANHSSNPNCYAKVMLVAGDHRVGIYAKEHIEASEELFYDYRYGPDQAPAWARRPEGSKKDEASVSHHRAHKVAR

SEQ ID NO: 160618 - protein, 760 aa, Zea Mays
MASSSKASDSSSQRSKRSDQGTGREAAPASVVPIHGNLTQLIRQIKSRRLLYIKEKLEANRKTLQRHSCALFDVAAAAEVASRGSDGGNALSQRAAEGQFRLAGSDLAHGIGERDVVYMQEENLASGTLVLSSSGAAAQRTVVRFVKLPLVERIPPYTTWIFLDKNQRMADDQSVVGRRRIYYDPIGNEALICSDSDEEIPEPEEEKHFFTEGEDQLIWRATQEHGLNREVVNVLCQFIDSTPSEIEERSEVLFEKNEKNSGSSDKIERQLSLDKTMDAVLDSFDNLFCRRCLVFDCRLHGCSQNLVFPSEKQPYSFEPDENKKPCGRQCYLRIRDTRLESREPGGDKLQILDESTKKTSSKDICGESPITTTENVGRESKKVSSTKNFLEHTLSCWSALERDLYLKGIEIFGKNSCLIARNLLSGMKTCMEVANYMYNNGAAMAKRPLLNKSISGDFAETEQDYMEQDMVARTRIYRRRGRNRKLKYTWKSAGHPTVRKRIGDGKQWYTQYNPCVCQQMCGKDCPCVENGTCCEKYCGCSKSCKNKFRGCHCAKSQCRSRQCPCFAASRECDPDVCRNCWVSCGDGSLGEPPARGDGYQCGNMKLLLKQQQRILLGRSDVAGWGAFIKNPVNKNDYLGEYTGELISHKEADKRGKIYDRANSSFLFDLNDQYVLDAYRKGDKLKFANHSSNPNCYAKVMLVAGDHRVGIYAKEHIEASEELFYDYRYGPDQAPAWARRPEGSKKDEASVSHHRAHKVAR

SEQ ID NO: 160619 - protein, 723 aa, Zea Mays
MASSSKASDSSSQRSKRSDQGTGREAAPASVVPIHGNLTQLIRQIKSRRLLYIKEKLEANRKTLQRHSCALFDVAAAAEVASRGSDGGNALSQRAAEGQFRLAGSDLAHGIGERDVVYMQEENLASGTLVLSSSGAAAQRTVVRFVKLPLVERIPPYTTWIFLDKNQRMADDQSVVGRRRIYYDPIGNEALICSDSDEEIPEPEEEKHFFTEGEDQLIWRATQEHGLNREVVNVLCQFIDSTPSEIEERSEVLFEKNEKNSGSSDKIERQLSLDKTMDAVLDSFDNLFCRRCLVFDCRLHGCSQNLVFPSEKQPYSFEPDENKKPCGRQCYLRWREGFQEIHDVGLSGCATYNMESGTVSHKVDVSIMSESEDSNREKGNIRSMTLVGTSGSKIISSVSAEESTTPPSADTSETENASSDMPPSSLRKYKISKRGPRYRERSPGKRQKVFTYDISFASNILNKLSIPEIRDTRLESREPGGDKLQILDESTKKTSSKDICGESPITTTENVGRESKKVSSTKNFLEHTLSCWSALERDLYLKGIEIFGKNSCLIARNLLSGMKTCMEVANYMYNNGAAMAKRPLLNKSISGDFAETEQDYMEQDMVARTRIYRRRGRNRKLKYTWKSAGHPTVRKRIGDGKQWYTQYNPCVCQQMCGKDCPCVENGTCCEKYCGCSKSCKNKFRGCHCAKSQCRSRQCPCFAASRECDPDVCRNCWLWRWFTR

SEQ ID NO: 160620 - protein, 864 aa, Zea Mays
MASSSKASDSSSQRSKRSDQGTGREAAPASVVPIHGNLTQLIRQIKSRRLLYIKEKLEANRKTLQRHSCALFDVAAAAEVASRGSDGGNALSQRAAEGQFRLAGSDLAHGIGERDVVYMQEENLASGTLVLSSSGAAAQRTVVRFVKLPLVERIPPYTTWIFLDKNQRMADDQSVVGRRRIYYDPIGNEALICSDSDEEIPEPEEEKHFFTEGEDQLIWRATQEHGLNREVVNVLCQFIDSTPSEIEERSEVLFEKNEKNSGSSDKIERQLSLDKTMDAVLDSFDNLFCRRCLVFDCRLHGCSQNLVFPSEKQPYSFEPDENKKPCGRQCYLRWREGFQEIHDVGLSGCATYNMESGTVSHKVDVSIMSESEDSNREKGNIRSMTLVGTSGSKIISSVSAEESTTPPSADTSETENASSDMPPSSLRKYKISKRGPRYRERSPGKRQKVFTYDISFASNILNKLSIPEIRDTRLESREPGGDKLQILDESTKKTSSKDICGESPITTTENVGRESKKVSSTKNFLEHTLSCWSALERDLYLKGIEIFGKNSCLIARNLLSGMKTCMEVANYMYNNGAAMAKRPLLNKSISGDFAETEQDYMEQDMVARTRIYRRRGRNRKLKYTWKSAGHPTVRKRIGDGKQWCSKSCKNKFRGCHCAKSQCRSRQCPCFAASRECDPDVCRNCWVSCGDGSLGEPPARGDGYQCGNMKLLLKQQQRILLGRSDVAGWGAFIKNPVNKNDYLGEYTGELISHKEADKRGKIYDRANSSFLFDLNDQYVLDAYRKGDKLKFANHSSNPNCYAKVMLVAGDHRVGIYAKEHIEASEELFYDYRYGPDQAPAWARRPEGSKKDEASVSHHRAHKVAR

SEQ ID NO: 160621 - protein, 885 aa, Zea Mays
MASSSKASDSSSQRSKRSDQGTGREAAPASVVPIHGNLTQLIRQIKSRRLLYIKEKLEANRKTLQRHSCALFDVAAAAEVASRGSDGGNALSQRAAEGQFRLAGSDLAHGIGERDVVYMQEENLASGTLVLSSSGAAAQRTVVRFVKLPLVERIPPYTTWIFLDKRRIYYDPIGNEALICSDSDEEIPEPEEEKHFFTEGEDQLIWRATQEHGLNREVVNVLCQFIDSTPSEIEERSEVLFEKNEKNSGSSDKIERQLSLDKTMDAVLDSFDNLFCRRCLVFDCRLHGCSQNLVFPSEKQPYSFEPDENKKPCGRQCYLRFPQWREGFQEIHDVGLSGCATYNMESGTVSHKVDVSIMSESEDSNREKGNIRSMTLVGTSGSKIISSVSAEESTTPPSADTSETENASSDMPPSSLRKYKISKRGPRYRERSPGKRQKVFTYDISFASNILNKLSIPEIRDTRLESREPGGDKLQILDESTKKTSSKDICGESPITTTENVGRESKKVSSTKNFLEHTLSCWSALERDLYLKGIEIFGKNSCLIARNLLSGMKTCMEVANYMYNNGAAMAKRPLLNKSISGDFAETEQDYMEQDMVARTRIYRRRGRNRKLKYTWKSAGHPTVRKRIGDGKQWYTQYNPCVCQQMCGKDCPCVENGTCCEKYCGCSKSCKNKFRGCHCAKSQCRSRQCPCFAASRECDPDVCRNCWVSCGDGSLGEPPARGDGYQCGNMKLLLKQQQRILLGRSDVAGWGAFIKNPVNKNDYLGEYTGELISHKEADKRGKIYDRANSSFLFDLNDQYVLDAYRKGDKLKFANHSSNPNCYAKVMLVAGDHRVGIYAKEHIEASEELFYDYRYGPDQAPAWARRPEGSKKDEASVSHHRAHKVAR

SEQ ID NO: 160622 - protein, 854 aa, Zea Mays
MASSSKASDSSSQRSKRSDQGTGREAAPASVVPIHGNLTQLIRQIKSRRLLYIKEKLEANRKTLQRHSCALFDVAAAAEVASRGSDGGNALSQRAAEGQFRLAGSDLAHGIGERDVVYMQEENLASGTLVLSSSGAAAQRTVVRFVKLPLVERIPPYTTWIFLDKNQRMADDQSVVGRRRIYYDPIGNEALICSDSDEEIPEPEEEKHFFTEGEDQLIWRATQEHGLNREVVNVLCQFIDSTPSEIEERSEVLFEKNEKNSGSSDKIERQLSLDKTMDAVLDSFDNLFCRRCLVFDCRLHGCSQNLVFPSEKQPYSFEPDENKKPCGRQCYLRFPQWREGFQEIHDVGLSGCATYNMESGTVSHKVDVSIMSESEDSNREKGNIRSMTLVGTSGSKIISSVSAEESTTPPSADTSETENASSDMPPSSLRKYKISKRGPRYRERSPGKRQKVFTYDISFASNILNKLSIPEIRDTRLESREPGGDKLQILDESTKKTSSKDICGESPITTTENVGRESKKVSSTKNFLEHTLSCWSALERDLYLKGIEIFGKNSCLIARNLLSGMKTCMEVANYMYNNGAAMAKRPLLNKSISGDFAETEQDYMEQDMVARTRIYRRRGRNRKLKYTWKSAGHPTVRKRIGDGKQWYTQYNPCVCQQMCGKDCPCVENGTCCEKYCGCGDGSLGEPPARGDGYQCGNMKLLLKQQQRILLGRSDVAGWGAFIKNPVNKNDYLGEYTGELISHKEADKRGKIYDRANSSFLFDLNDQYVLDAYRKGDKLKFANHSSNPNCYAKVMLVAGDHRVGIYAKEHIEASEELFYDYRYGPDQAPAWARRPEGSKKDEASVSHHRAHKVAR

SEQ ID NO: 160623 - protein, 882 aa, Zea Mays
MASSSKASDSSSQRSKRSDQGTGREAAPASVVPIHGNLTQLIRQIKSRRLLYIKEKLEANRKTLQRHSCALFDVAAAAEVASRGSDGGNALSQRAAEGQFRLAGSDLAHGIGERDVVYMQEENLASGTLVLSSSGAAAQRTVVRFVKLPLVERIPPYTTWIFLDKRRIYYDPIGNEALICSDSDEEIPEPEEEKHFFTEGEDQLIWRATQEHGLNREVVNVLCQFIDSTPSEIEERSEVLFEKNEKNSGSSDKIERQLSLDKTMDAVLDSFDNLFCRRCLVFDCRLHGCSQNLVFPSEKQPYSFEPDENKKPCGRQCYLRWREGFQEIHDVGLSGCATYNMESGTVSHKVDVSIMSESEDSNREKGNIRSMTLVGTSGSKIISSVSAEESTTPPSADTSETENASSDMPPSSLRKYKISKRGPRYRERSPGKRQKVFTYDISFASNILNKLSIPEIRDTRLESREPGGDKLQILDESTKKTSSKDICGESPITTTENVGRESKKVSSTKNFLEHTLSCWSALERDLYLKGIEIFGKNSCLIARNLLSGMKTCMEVANYMYNNGAAMAKRPLLNKSISGDFAETEQDYMEQDMVARTRIYRRRGRNRKLKYTWKSAGHPTVRKRIGDGKQWYTQYNPCVCQQMCGKDCPCVENGTCCEKYCGCSKSCKNKFRGCHCAKSQCRSRQCPCFAASRECDPDVCRNCWVSCGDGSLGEPPARGDGYQCGNMKLLLKQQQRILLGRSDVAGWGAFIKNPVNKNDYLGEYTGELISHKEADKRGKIYDRANSSFLFDLNDQYVLDAYRKGDKLKFANHSSNPNCYAKVMLVAGDHRVGIYAKEHIEASEELFYDYRYGPDQAPAWARRPEGSKKDEASVSHHRAHKVAR

SEQ ID NO: 160624 - protein, 730 aa, Zea Mays
MADDQSVVGRRRIYYDPIGNEALICSDSDEEIPEPEEEKHFFTEGEDQLIWRATQEHGLNREVVNVLCQFIDSTPSEIEERSEVLFEKNEKNSGSSDKIERQLSLDKTMDAVLDSFDNLFCRRCLVFDCRLHGCSQNLVFPSEKQPYSFEPDENKKPCGRQCYLRFPQWREGFQEIHDVGLSGCATYNMESGTVSHKVDVSIMSESEDSNREKGNIRSMTLVGTSGSKIISSVSAEESTTPPSADTSETENASSDMPPSSLRKYKISKRGPRYRERSPGKRQKVFTYDISFASNILNKLSIPEIRDTRLESREPGGDKLQILDESTKKTSSKDICGESPITTTENVGRESKKVSSTKNFLEHTLSCWSALERDLYLKGIEIFGKNSCLIARNLLSGMKTCMEVANYMYNNGAAMAKRPLLNKSISGDFAETEQDYMEQDMVARTRIYRRRGRNRKLKYTWKSAGHPTVRKRIGDGKQWYTQYNPCVCQQMCGKDCPCVENGTCCEKYCGCSKSCKNKFRGCHCAKSQCRSRQCPCFAASRECDPDVCRNCWVSCGDGSLGEPPARGDGYQCGNMKLLLKQQQRILLGRSDVAGWGAFIKNPVNKNDYLGEYTGELISHKEADKRGKIYDRANSSFLFDLNDQYVLDAYRKGDKLKFANHSSNPNCYAKVMLVAGDHRVGIYAKEHIEASEELFYDYRYGPDQAPAWARRPEGSKKDEASVSHHRAHKVAR

SEQ ID NO: 160625 - protein, 129 aa, Zea Mays
MAIATTTSSSSLTIRLLHPNPNTNPAPRSLQLLSSRRCARAAVAGGAVPYGAAPRRGIWSIRDDLVVPRSPYFPVDSAAGQERGPSPMVMERFQSVVSQLFQHVRWHYILYKGLSGAVVLLRMIWPTSL

SEQ ID NO: 160626 - protein, 950 aa, Zea Mays
MGFLSAKLLPSCESVCVCCPALRPSSRRPVKRYKKLLAEIFPKTPDGAPNERKIVKLCEYAAKNPLRIPKIAKFLEQRSHKELRSAHVNFVRIITEAYSKLLFICKEQMAYFAISLVNVLTELLESKQENVHILGCQTLANFINSQVDNTYARNIESLVHKVCALSRRQGEDHRLLRAASLQCLSAMIWFMKEHSYIFADFDEIVHSVLENYRTEESNGGGDDRHALQHNWVDEIARSEGRPGVGGGNDVNINTTTIRLRPARNSSALTRDERDSPEVWSHICVQKLAELARESTTMRRILDPMLSYFDMKKQWAPRHGLALLVLSDMAYLEKSSGNEQLILTTIIRHLDHKNVLHDPQTKSDIIQTATSLARQLRSRGFAVELVVAGDLCKHLRKTLEAVESGNVEDQNLNEPLQIVLEDCLMEVVRGINDVRPLYDMMAITLENLPSMPTVARATLGSLLIISHIISLTSVSSNNLMVFPEALLQQILKSMLHTDIDTRVGAHHMFSAIIVRGPSHLRSESEYLYETKKQSRNTSVFASATALLEKLRREKESLSSDKPRNIMHDDVKEMNMHEEDKRKNPAYFSKLVSSFIERCATRSSVEETNIAMLTEDQTNQLLSSFWIQANQTDNTPFNYEAIGHSYSLTVLSSRLKNSSNGNIIQFFQLPLSLRSVALTPSEVLPAYCQRSIFTLAMSMLAFAGKVCHVAELSDLLRCFSSSKIDPYLRIGEDLQLYVRLQSDLGSYGSESDQEIAKSMLSDCRTKVGINDHRVLDVIASALSNFIEMGKDVIVKELTELFTPEEMPLFGSNSALDWANFNAQAFSDESLSFDEECSRTSSVDCGLHESPITNTASSISKITLPQSVPHVLGVGQLLESALHVAGQVAGASVSTSPLPYGTMTSQCEALGLGTRKKLSSWLVNGHESTPDNPMPSLPTAHHSIIPKVRRRHI

SEQ ID NO: 160627 - protein, 944 aa, Zea Mays
MGFLSAKLLPSCESVCVCCPALRPSSRRPVKRYKKLLAEIFPKTPDGAPNERKIVKLCEYAAKNPLRIPKIAKFLEQRSHKELRSAHVNFVRIITEAYSKLLFICKEQMAYFAISLVNVLTELLESKQENVHILGCQTLANFINSQVDNTYARNIESLVHKVCALSRRQGEDHRLLRAASLQCLSAMIWFMKEHSYIFADFDEIVHSVLENYRTEESNGGGDDRHALQHNWVDEIARSEGRPGVGGGNDVNINTTTIRLRPARNSSALTRDERDSPEVWSHICVQKLAELARESTTMRRILDPMLSYFDMKKQWAPRHGLALLVLSDMAYLEKSSGNEQLILTTIIRHLDHKNVLHDPQTKSDIIQTATSLARQLRSRGFAVELVVAGDLCKHLRKTLEAVESGNVEDQNLNEPLQIVLEDCLMEVVRGINDVRPLYDMMAITLENLPSMPTVARATLGSLLIISHIISLTSVSSNNLMVFPEALLQQILKSMLHTDIDTRVGAHHMFSAIIVRGPSHLRSESEYLYETKKQSRNTSVFASATALLEKLRREKESLSSDKPRNIMHDDVKEMNMHEEDKRKNPAYFSKLVSSFIERCATRSSVEETNIAMLTEDQTNQLLSSFWIQANQTDNTPFNYEAIGHSYSLTVLSSRLKNSSNGNIIQFFQLPLSLRSVALTPSEVLPAYCQRSIFTLAMSMLAFAGKVCHVAELSDLLRCFSSSKIDPYLRIGEDLQLYVRLQSDLGSYGSESDQEIAKSMLSDCRTKVGINDHRVLDVIASALSNFIEMGKDVIVKELTELFTPEEMPLFGSNSALDWANFNAQAFSDESLSFDEECSRTSSVDCGLHESPITNTASSISKITLPQSVPHVLGVGQLLESALHVAGQVAGASVSTSPLPYGTMTSQCEALGLGTRKKLSSWLVNGHESTPDNPMPSLPTAHHSIIPK

SEQ ID NO: 160628 - protein, 474 aa, Zea Mays
MYSSLSLHTLNAIISRVLFIIMQQLCFSPIKCISFWPEDGRPYVALGKLYSKQSRYDKARAVYERGCQATQGENPYIWQCWAVLESKGGNIRRARELFDAATVADAKHIAAWHGWAILEIKQGNIKKARTLFEQASQSNPKSCASWLAWAQVEMRAGNNTMARKLFEKAVQASPKNRFSWHVWALFEANEGNIDRARKLLKIGHAVNPRDPVILQSLALLEYNFSSANVARVLFRKASQIDPRHQPVWIAWGWMEWKERNARTARALYQRALSVNSTNECAARCLQAWGVLEQRAGNYTAARRLLRSSLSINSQSEVTWMTWAALEEEQGDPVRAEEIRNLYFQQRTEVVDDASWVIGFLDIIDPALDSVKRLLNLDQPSRPARQDDVKSTTEPCPPTAKSSETSAGNDARNNGSEAMGTLTSDFDLDAFIKKRLALDPSELDAVLEGSDPRGVVSQRRKQRLPRKPLPLLPVP

SEQ ID NO: 160629 - protein, 1194 aa, Zea Mays
MGQIDRHVFRRDYNFFLSRNSTIFDIDIEAFQLKPWRQQGADLTDYFNFSLDEEGWRKYWCSMLSTPLFVQKQLRLGARSLVNETSGLEQESYKLKSAKAMSNVANDSGSEGRNDIGKPKGRAIHVEGSACERVPSADLWRPIQRDSDVVIQVNMTLSPSNQSTSDDSSKLNHKGVATERVFDKEVYDGGSSEGVGSKLDRRDSYFARDQSPSPDYSDVLSGESKENHYFKRSNRHSDFRDFFEATKLQDEHVKSDFYCYPSKPDRENSESCRRGYTPSTDDRNMASKLLWMGEAPFTGRGKSGDLFLGHNSDRDFKSRHKARKGQRRQSLDDRRNAIFVEKEKPTDSYHSTCDRKFVKRRSSSSSLRTNYHNSVCNQSYEQRYSPLEKKALKNDEHYFSDESNYHHRQSLSCDINEGDIDKCFSSAKEWQRDGDHIYHSMVKTDMPDANDGRMYRDRRHELDNADNIHLNDRKIKFEREGNELRRVIEDNQKGSHPVDKDLHTSRHKHVHQKLWKQNLSHRHSGNQDLEKSADQNCLNKDVEIEEGELIEEDHNNIIYKSKLKQENVVLKSVIETSSAEQLQVNNATSKDATCNNRATRESDEKHILEAAKCFSVFMYSSLSLHTLNAIISRVLFIIMQQLCFSPIKPVTYKLQSAVSCCLTHSVRLIYLSESERRTDICPLVRRRTREQLHCQENLENAETTRSCPLPTRGVAACQRLEAGTCGEDGKPPSTPADRITEISNDVHTPAPTPSSVKSSTDSALGGGSNAEPTWRADDLQPCPHPSLPLPSLQGPSPVRHRIREGRPVSPGPSSFTPPSPLKGAPRSTIPTGDLQQTSSTRARPASMAMRLLSPSTPPPRFPSPGQKAPASISASSSSYFSVRLRRARAAAAAAAGAAAAGGSDRRSGRFEGEAMSGAFDRGLAEIARKVPLFEPTADGELAAAAGERPLPINLELWLYRVKVHTRKFEFPEAEKLLDKCISFWPEDGRPYVALGKLYSKQSRYDKARAVYERGCQATQGENPYIWQCWAVLESKGGNIRRARELFDAATVADAKHIAAWHGWAILEIKQGNIKKARNLLGKALKYCGGNEYIYQTLALLEAKAERFEQARTLFEQASQSNPKSCASWLAWAQVEMRAGNNTMARKLFEKAVQASPKNRFSWHGPCNSTVTRATGIQLFICECCSCVIQKSVSD

SEQ ID NO: 160630 - protein, 1031 aa, Zea Mays
MADPLDAAAAFGVSTNDNNVDDVEDLYADLDEQVAAALAAAGESGGSNARDSDPLTDGEGEFPEPDENEAVDLGDGTEGYSSSDDESDDGLRIVLNEDTSAPLPPPPVGRGEGCVAEDEEGDDTSNRVKVSSVNDGGWATVGGLQCKGFVEKTTLPIMGQIDRHVFRRDYNFFLSRNSTIFDIDIEAFQLKPWRQQGADLTDYFNFSLDEEGWRKYWCSMKQLRLGARSLVNETSGLEQESYKLKSAKAMSNVANDSGSEGRNDIGKPKGRAIHVEGSACERVPSADLWRPIQRDSDVVIQVNMTLSPSNQSTSDDSSKLNHKGVATERVFDKEVYDGGSSEGVGSKLDRRDSYFARDQSPSPDYSDVLSGESKENHYFKRSNRHSDFRDFFEATKLQDEHVKSDFYCYPSKPDRENSESCRRGYTPSTDDRNMASKLLWMGEAPFTGRGKSGDLFLGHNSDRDFKSRHKARKGQRRQSLDDRRNAIFVEKEKPTDSYHSTCDRKFVKRRSSSSSLRTNYHNSVCNQSYEQRYSPLEKKALKNDEHYFSDESNYHHRQSLSCDINEGDIDKCFSSAKEWQRDGDHIYHSMVKTDMPDANDGRMYRDRYSPEKKIARHDHSMDVEFSHYTDYRFCEWRSLEVRGRYRDKGKFAKSNDGHFRHANHLELYSGLNNFERDKPATGFPVMSSRNRCIDNKEVCNAKMTQNNCHGYHQKNKQHDSSFCIGNIPRYALRTDTYAEKGHFVLPIKRKLYSDLGSMDQRTLADLPLLKGRLMHGQSIASDRRIYALKLHKSTKKINTEAICSSSDMRNINTLSNICVGRRHELDNADNIHLNDRKIKFEREGNELRRVIEDNQKGSHPVDKDLHTSRHKHVHQKLWKQNLSHRHSGNQDLEKSADQNCLNKDVEIEEGELIEEDHNNIIYKSKLKQENVVLKSVIETSSAEQLQVNNATSKDATCNNRATRESDEKHILEVMEKMQKRRERFKEAIAPKKEVGDKKDLSALACSTDFIQNQRPARKRRWGGNCWMLEMP

SEQ ID NO: 160631 - protein, 1039 aa, Zea Mays
MADPLDAAAAFGVSTNDNNVDDVEDLYADLDEQVAAALAAAGESGGSNARDSDPLTDGEGEFPEPDENEAVDLGDGTEGYSSSDDESDDGLRIVLNEDTSAPLPPPPVGRGEGCVAEDEEGDDTSNRVKVSSVNDGGWATVGGLQCKGFVEKTTLPIMGQIDRHVFRRDYNFFLSRNSTIFDIDIEAFQLKPWRQQGADLTDYFNFSLDEEGWRKYWCSMLSTPLFVQKQLRLGARSLVNETSGLEQESYKLKSAKAMSNVANDSGSEGRNDIGKPKGRAIHVEGSACERVPSADLWRPIQRDSDVVIQVNMTLSPSNQSTSDDSSKLNHKGVATERVFDKEVYDGGSSEGVGSKLDRRDSYFARDQSPSPDYSDVLSGESKENHYFKRSNRHSDFRDFFEATKLQDEHVKSDFYCYPSKPDRENSESCRRGYTPSTDDRNMASKLLWMGEAPFTGRGKSGDLFLGHNSDRDFKSRHKARKGQRRQSLDDRRNAIFVEKEKPTDSYHSTCDRKFVKRRSSSSSLRTNYHNSVCNQSYEQRYSPLEKKALKNDEHYFSDESNYHHRQSLSCDINEGDIDKCFSSAKEWQRDGDHIYHSMVKTDMPDANDGRMYRDRYSPEKKIARHDHSMDVEFSHYTDYRFCEWRSLEVRGRYRDKGKFAKSNDGHFRHANHLELYSGLNNFERDKPATGFPVMSSRNRCIDNKEVCNAKMTQNNCHGYHQKNKQHDSSFCIGNIPRYALRTDTYAEKGHFVLPIKRKLYSDLGSMDQRTLADLPLLKGRLMHGQSIASDRRIYALKLHKSTKKINTEAICSSSDMRNINTLSNICVGRRHELDNADNIHLNDRKIKFEREGNELRRVIEDNQKGSHPVDKDLHTSRHKHVHQKLWKQNLSHRHSGNQDLEKSADQNCLNKDVEIEEGELIEEDHNNIIYKSKLKQENVVLKSVIETSSAEQLQVNNATSKDATCNNRATRESDEKHILEVMEKMQKRRERFKEAIAPKKEVGDKKDLSALACSTDFIQNQRPARKRRWGGNCWMLEMP

SEQ ID NO: 160632 - protein, 1819 aa, Zea Mays
MADPLDAAAAFGVSTNDNNVDDVEDLYADLDEQVAAALAAAGESGGSNARDSDPLTDGEGEFPEPDENEAVDLGDGTEGYSSSDDESDDGLRIVLNEDTSAPLPPPPVGRGEGCVAEDEEGDDTSNRVKVSSVNDGGWATVGGLQCKGFVEKTTLPIMGQIDRHVFRRDYNFFLSRNSTIFDIDIEAFQLKPWRQQGADLTDYFNFSLDEEGWRKYWCSMKQLRLGARSLVNETSGLEQESYKLKSAKAMSNVANDSGSEGRNDIGKPKGRAIHVEGSACERVPSADLWRPIQRDSDVVIQVNMTLSPSNQSTSDDSSKLNHKGVATERVFDKEVYDGGSSEGVGSKLDRRDSYFARDQSPSPDYSDVLSGESKENHYFKRSNRHSDFRDFFEATKLQDEHVKSDFYCYPSKPDRENSESCRRGYTPSTDDRNMASKLLWMGEAPFTGRGKSGDLFLGHNSDRDFKSRHKARKGQRRQSLDDRRNAIFVEKEKPTDSYHSTCDRKFVKRRSSSSSLRTNYHNSVCNQSYEQRYSPLEKKALKNDEHYFSDESNYHHRQSLSCDINEGDIDKCFSSAKEWQRDGDHIYHSMVKTDMPDANDGRMYRDRYSPEKKIARHDHSMDVEFSHYTDYRFCEWRSLEVRGRYRDKGKFAKSNDGHFRHANHLELYSGLNNFERDKPATGFPVMSSRNRCIDNKEVCNAKMTQNNCHGYHQKNKQHDSSFCIGNIPRYALRTDTYAEKGHFVLPIKRKLYSDLGSMDQRTLADLPLLKGRLMHGQSIASDRRIYALKLHKSTKKINTEAICSSSDMRNINTLSNICVGRRHELDNADNIHLNDRKIKFEREGNELRRVIEDNQKGSHPVDKDLHTSRHKHVHQKLWKQNLSHRHSGNQDLEKSADQNCLNKDVEIEEGELIEEDHNNIIYKSKLKQENVVLKSVIETSSAEQLQVNNATSKDATCNNRATRESDEKHILEAAKCFSVFMYSSLSLHTLNAIISRVLFIIMQQLCFSPIKPVTYKLQSAVSCCLTHSVRLIYLSESERRTDICPLVRRRTREQLHCQENLENAETTRSCPLPTRGVAACQRLEAGTCGEDGKPPSTPADRITEISNDVHTPAPTPSSVKSSTDSALGGGSNAEPTWRADDLQPCPHPSLPLPSLQGPSPVRHRIREGRPVSPGPSSFTPPSPLKGAPRSTIPTGDLQQTSSTRARPASMAMRLLSPSTPPPRFPSPGQKAPASISASSSSYFSVRLRRARAAAAAAAGAAAAGGSDRRSGRFEGEAMSGAFDRGLAEIARKVPLFEPTADGELAAAAGERPLPINLELWLYRVKVHTRKFEFPEAEKLLDKCISFWPEDGRPYVALGKLYSKQSRYDKARAVYERGCQATQGENPYIWQCWAVLESKGGNIRRARELFDAATVADAKHIAAWHGWAILEIKQGNIKKARNLLGKALKYCGGNEYIYQTLALLEAKAERFEQARTLFEQASQSNPKSCASWLAWAQVEMRAGNNTMARKLFEKAVQASPKNRFSWHVWALFEANEGNIDRARKLLKIGHAVNPRDPVILQSLALLEYNFSSANVARVLFRKASQIDPRHQPVWIAWGWMEWKERNARTARALYQRALSVNSTNECAARCLQAWGVLEQRAGNYTAARRLLRSSLSINSQSEVTWMTWAALEEEQGDPVRAEEIRNLYFQQRTEVVDDASWVIGFLDIIDPALDSVKRLLNLDQPSRPARQDDVKSTTEPCPPTAKSSETSAGNDARNNGSEAMGTLTSDFDLDAFIKKRLALDPSELDAVLEGSDPRGVVSQRRKQRLPRKPLPLLPVP

SEQ ID NO: 160633 - protein, 303 aa, Zea Mays
MKQEDFDKVISPVSVAHFSQYKLVDLLLKKLEGIGFQTCFPSEIGNSTQDLVLESKILMGHKCTSLDQTDEGILVGASVNNGGMIIERKLHCGLLIGTDGARSTVRELAGISMEGERDLQKLVSVHFLSRDLGRYLSSQRPGMLFFIFNPGAIGVLVAHDLENGEFVLQVPFYPPQQMFEDFSAKVCEQIIFKLVGWEPADVHVLDIKPWAMHAEVAEKYICCNNRVILSGDAAHRFPPAGGFGMNTGVQDVHNLAWKLGLLLNGVASPSILQTYESERRPVRIFSHAFCSSNVYFSTIKLQN

SEQ ID NO: 160634 - protein, 208 aa, Zea Mays
MVKIMQIFLVSFTSSFSYAEGALVVEASCEKTHEGEKLQHSKRASREYIPSAKVGSRLPHMLVREVPASSEGAFSTLDLVSGDKLEFVLIIAPVKESYEIARATLKIADELTLSARVCVMWPRGSTDAEVEESRSELTPWTNYIDVEEVPRVSGGSWWEMCRISRKSVLLVRPDEHIAWLTELDRVRDAESEIRRVFSHVLCLNSHRV

SEQ ID NO: 160635 - protein, 392 aa, Zea Mays
MKQEDFDKVISPVSVAHFSQYKLVDLLLKKLEGIGFQTCFPSEIGNSTQDLVLESKILMGHKCTSLDQTDEGILVGASVNNGGMIIERKLHCGLLIGTDGARSTVRELAGISMEGERDLQKLVSVHFLSRDLGRYLSSQRPGMLFFIFNPGAIGVLVAHDLENGEFVLQVPFYPPQQMFEDFSAKVCEQIIFKLVGWEPADVHVLDIKPWAMHAEVAEKYICCNNRVILSGDAAHRFPPAGGFGMNTGVQDVHNLAWKLGLLLNGVASPSILQTYESERRPVAIFNTELSVENFKAAMSIPTTLGLDPTVANSVHQVINRSLGSIIPRNVQKAVLEGLFSLGRAQVSDYILNEKNPIGSLRLARLRSILDEGKSLQLQFPAEDLGFQRCSSC

SEQ ID NO: 160636 - protein, 714 aa, Zea Mays
MPSITRGGRGGLFSTHRGALLWLRRCQSPLLSTLAGGGGRSDAPHLPVLIVGAGPVGLVLSFLLTKFGIKCAVIEKNVEFTRHPRAHFINNRTMEIFRKLDGLARDIERSQPPVDLWRKFVYCTSLSGSVLGSVDHMKQEDFDKVISPVSVAHFSQYKLVDLLLKKLEGIGFQTCFPSEIGNSTQDLVLESKILMGHKCTSLDQTDEGILVGASVNNGGMIIERKLHCGLLIGTDGARSTVRELAGISMEGERDLQKLVSVHFLSRDLGRYLSSQRPGMLFFIFNPGAIGVLVAHDLENGEFVLQVPFYPPQQMFEDFSAKVCEQIIFKLVGWEPADVHVLDIKPWAMHAEVAEKYICCNNRVILSGDAAHRFPPAGGFGMNTGVQDVHNLAWKLGLLLNGVASPSILQTYESERRPVAIFNTELSVENFKAAMSIPTTLGLDPTVANSVHQVINRSLGSIIPRNVQKAVLEGLFSLGRAQVSDYILNEKNPIGSLRLARLRSILDEGKSLQLQFPAEDLGFHYAEGALVVEASCEKTHEGEKLQHSKRASREYIPSAKVGSRLPHMLVREVPASSEGAFSTLDLVSGDKLEFVLIIAPVKESYEIARATLKIADELTLSARVCVMWPRGSTDAEVEESRSELTPWTNYIDVEEVPRVSGGSWWEMCRISRKSVLLVRPDEHIAWLTELDRVRDAESEIRRVFSHVLCLNSHRV

SEQ ID NO: 160637 - protein, 363 aa, Zea Mays
MPSITRGGRGGLFSTHRGALLWLRRCQSPLLSTLAGGGGRSDAPHLPVLIVGAGPVGLVLSFLLTKFGIKCAVIEKNVEFTRHPRAHFINNRTMEIFRKLDGLARDIERSQPPVDLWRKFVYCTSLSGSVLGSVDHMKQEDFDKVISPVSVAHFSQYKLVDLLLKKLEGIGFQTCFPSEIGNSTQDLVLESKILMGHKCTSLDQTDEGILVGASVNNGGMIIERKLHCGLLIGTDGARSTVRELAGISMEGERDLQKLVSVHFLSRDLGRYLSSQRPGMLFFIFNPGAIGVLVAHDLENGEFVLQVPFYPPQQMFEDFSAKVCEQIIFKLVGWEPADVHVLDIKPWAMHAEVAEKYICCNNRE

SEQ ID NO: 160638 - protein, 369 aa, Zea Mays
MEIFRKLDGLARDIERSQPPVDLWRKFVYCTSLSGSVLGSVDHMKQEGQFSSYHVECFMSCTSLYFDKVISPVSVAHFSQYKLVDLLLKKLEGIGFQTCFPSEIGNSTQDLVLESKILMGHKCTSLDQTDEGILVGASVNNGGMIIERKLHCGLLIGTDGARSTVRELAGISMEGERDLQKLVSVHFLSRDLGRYLSSQRPGMLFFIFNPGAIGVLVAHDLENGEFVLQVPFYPPQQMFEDFSAKVCEQIIFKLVGWEPADVHVLDIKPWAMHAEVAEKYICCNNRVILSGDAAHRFPPAGGFGMNTGVQDVHNLAWKLGLLLNGVASPSILQTYESERRPVRIFSHAFCSSNRGEFQGSYVYSYNPWP

SEQ ID NO: 160639 - protein, 532 aa, Zea Mays
MGHKCTSLDQTDEGILVGASVNNGGMIIERKLHCGLLIGTDGARSTVRELAGISMEGERDLQKLVSVHFLSRDLGRYLSSQRPGMLFFIFNPGAIGVLVAHDLENGEFVLQVPFYPPQQMFEDFSAKVCEQIIFKLVGWEPADVHVLDIKPWAMHAEVAEKYICCNNRVILSGDAAHRFPPAGGFGMNTGVQDVHNLAWKLGLLLNGVASPSILQTYESERRPVRIFSHAFCSSNVAIFNTELSVENFKAAMSIPTTLGLDPTVANSVHQVINRSLGSIIPRNVQKAVLEGLFSLGRAQVSDYILNEKNPIGSLRLARLRSILDEGKSLQLQFPAEDLGFHYAEGALVVEASCEKTHEGEKLQHSKRASREYIPSAKVGSRLPHMLVREVPASSEGAFSTLDLVSGDKLEFVLIIAPVKESYEIARATLKIADELTLSARVCVMWPRGSTDAEVEESRSELTPWTNYIDVEEVPRVSGGSWWEMCRISRKSVLLVRPDEHIAWLTELDRVRDAESEIRRVFSHVLCLNSHRV

SEQ ID NO: 160640 - protein, 281 aa, Zea Mays
MSIPTTLGLDPTVANSVHQVINRSLGSIIPRNVQKAVLEGLFSLGRAQVSDYILNEKNPIGSLRLARLRSILDEGKSLQLQFPAEDLGFHYAEGALVVEASCEKTHEGEKLQHSKRASREYIPSAKVGSRLPHMLVREVPASSEGAFSTLDLVSGDKLEFVLIIAPVKESYEIARATLKIADELTLSARVCVMWPRGSTDAEVEESRSELTPWTNYIDVEEVPRVSGGSWWEMCRISRKSVLLVRPDEHIAWLTELDRVRDAESEIRRVFSHVLCLNSHRV

SEQ ID NO: 160641 - protein, 357 aa, Zea Mays
MEIFRKLDGLARDIERSQPPVDLWRKFVYCTSLSGSVLGSVDHMKQEGQFSSYHVECFMSCTSLYFDKVISPVSVAHFSQYKLVDLLLKKLEGIGFQTCFPSEIGNSTQDLVLESKILMGHKCTSLDQTDEGILVGASVNNGGMIIERKLHCGLLIGTDGARSTVRELAGISMEGERDLQKLVSVHFLSRDLGRYLSSQRPGMLFFIFNPGAIGVLVAHDLENGEFVLQVPFYPPQQMFEDFSAKVCEQIIFKLVGWEPADVHVLDIKPWAMHAEVAEKYICCNNRVILSGDAAHRFPPAGGFGMNTGVQDVHNLAWKLGLLLNGVASPSILQTYESERRPRGEFQGSYVYSYNPWP

SEQ ID NO: 160642 - protein, 346 aa, Zea Mays
MNTGVQDVHNLAWKLGLLLNGVASPSILQTYESERRPVRIFSHAFCSSNVAIFNTELSVENFKAAMSIPTTLGLDPTVANSVHQVINRSLGSIIPRNVQKAVLEGLFSLGRAQVSDYILNEKNPIGSLRLARLRSILDEGKSLQLQFPAEDLGFHYAEGALVVEASCEKTHEGEKLQHSKRASREYIPSAKVGSRLPHMLVREVPASSEGAFSTLDLVSGDKLEFVLIIAPVKESYEIARATLKIADELTLSARVCVMWPRGSTDAEVEESRSELTPWTNYIDVEEVPRVSGGSWWEMCRISRKSVLLVRPDEHIAWLTELDRVRDAESEIRRVFSHVLCLNSHRV

SEQ ID NO: 160643 - protein, 204 aa, Zea Mays
MQNMNRRDVVASLRRKSSGFSRGASIYRGVTKHHQHGRWQARIGRVAGNKDLYLGTFATEQEAAEAYDIAALKFRGENAVTNFEPSRYNLLAIAQRDIPILGRKLIQKPAPEAEDQAALSARSFSQSQQSSNSLPPYFLTNLLQPLPSQHSLAQALPSYNNLGFGEPSLYWPCPCGDPGEQKVQLGSKLEIVDGLVQLANSAAN

SEQ ID NO: 160644 - protein, 368 aa, Zea Mays
MLEGRPEVSELHSIEGAKVPLMRFKFNGILVDFPYVQLPVINAAEAMHAFDPHVLENVDGPSWRCLSGVRANRQIIQLVPNMKKFQYLLRCLKLWARKRGLHCHLLGFFAGIHLAILAAYVCRRHPNASINTLLSLFFDIFVHWPWPLPVSLLDPPVPCRGPDGCSLMPIMLPCIPPEFCSSSTTESTFSKIKEELWRGYALSKDTRSTDFNWSWLFAPFPYGARYKCFLRIVLSAPMGEELRDWVGWVKSRFRNLLLKLESLGVYCDPDPSEQVDHTITDPNVVFFWGLIYRRNIQICISSLKEDFMKSVCNNIYGKEKCAHSDITMSIVGPPQLPKSVFDLSVYSEKLPQHMMGHQLMKQNYNAVS

SEQ ID NO: 160645 - protein, 287 aa, Zea Mays
MQKFQYLLRCLKLWARKRGLHCHLLGFFAGIHLAILAAYVCRRHPNASINTLLSLFFDIFVHWPWPLPVSLLDPPVPCRGPDGCSLMPIMLPCIPPEFCSSSTTESTFSKIKEELWRGYALSKDTRSTDFNWSWLFAPFPYGARYKCFLRIVLSAPMGEELRDWVGWVKSRFRNLLLKLESLGVYCDPDPSEQVDHTITDPNVVFFWGLIYRRNIQICISSLKEDFMKSVCNNIYGKEKCAHSDITMSIVGPPQLPKSVFDLSVYSEKLPQHMMGHQLMKQNYNAVS

SEQ ID NO: 160646 - protein, 277 aa, Zea Mays
MIGVTDGSKNLIRAINNRLSALSFHIREYYWVDMKKINEIYRYKTEEYSHDAINKFNIYPEQIPSWLADWIPVKGGYLIGNLQPAHMDFRFFSLGNLWAIVSSLATQRQAEGILNLIEAKWDDIVANMPLKICYPALEYEEWRIITGSDPKNTPWSYHNGGSWPTLLWQFTLACIKMGRRDLARRAVEVAEKRLSDDKWPEYYDTRTGRFIGKQSRLYQTWSIAGYLSSKMLLDCPEMASILVCDEDFELLEGCACSLNKNARTKCSRRAAKSQVLV

SEQ ID NO: 160647 - protein, 338 aa, Zea Mays
MAAAAISHLRRGAQHHAVLCISLSRRRFSSSAVAAASPLAAAARRLLSTTADSATASTSGEHYKPPPFDPFRAATLSPSAPPLESARLEDEPPSSPPPQDEAAASVAAHEQATLACQELELEGLKAGVEAVKSREESPEEKEAWWLLSRAVVNYCGSAVGTVAANDPSTSQMLNYDQVFIRDFVPSAIAFLLKGESDIVKNFLLHTLQLQSWEKTVDCYSPGQGLMPASFKVRSVPLDGNSEAFEEVLDPDFGESAIGRVAPVDSGLWWIILLRAYGKITGDYALQERVDVQTGIRLILNLCLSDGFDMFPTLLVTDGSCMIDRRMGIHGHPLEIQAS

SEQ ID NO: 160648 - protein, 317 aa, Zea Mays
MFPTLLVTDGSCMIDRRMGIHGHPLEIQALFYSALRCAREMIGVTDGSKNLIRAINNRLSALSFHIREYYWVDMKKINEIYRYKTEEYSHDAINKFNIYPEQIPSWLADWIPVKGGYLIGNLQPAHMDFRFFSLGNLWAIVSSLATQRQAEGILNLIEAKWDDIVANMPLKICYPALEYEEWRIITGSDPKNTPWSYHNGGSWPTLLWQFTLACIKMGRRDLARRAVEVAEKRLSDDKWPEYYDTRTGRFIGKQSRLYQTWSIAGYLSSKMLLDCPEMASILVCDEDFELLEGCACSLNKNARTKCSRRAAKSQVLV

SEQ ID NO: 160649 - protein, 228 aa, Zea Mays
MAAAAISHLRRGAQHHAVLCISLSRRRFSSSAVAAASPLAAAARRLLSTTADSATASTSGEHYKPPPFDPFRAATLSPSAPPLESARLEDEPPSSPPPQDEAAASVAAHEQATLACQELELEGLKAGVEAVKSREESPEEKEAWWLLSRAVVNYCGSAVGTVAANDPSTSQMLNYDQVFIRDFVPSAIAFLLKGESDIVKNFLLHTLQLQSSNTENCSSAISVRRGMH

SEQ ID NO: 160650 - protein, 103 aa, Zea Mays
MRRSLVENSDSEPDFEETEQKTINEPHVNVRSEPLTTRRCALQPWMDGSSSSNSTVDLPDGVPPAPSRSKNDRLSKEEMIATMDEVVQGRKMQVEKATKESED

SEQ ID NO: 160651 - protein, 155 aa, Zea Mays
MVLHVDLNTLDLPVMEGVNELLAISLKSSDFVSFKCICPFKHNTMMDCCDIMMYCFFLENSDSEPDFEETEQKTINEPHVNVRSEPLTTRRCALQPWMDGSSSSNSTVDLPDGVPPAPSRSKNDRLSKEEMIATMDEVVQGRKMQVEKATKESED

SEQ ID NO: 160652 - protein, 100 aa, Zea Mays
MRRSLVDSEPDFEETEQKTINEPHVNVRSEPLTTRRCALQPWMDGSSSSNSTVDLPDGVPPAPSRSKNDRLSKEEMIATMDEVVQGRKMQVEKATKESED

SEQ ID NO: 160653 - protein, 296 aa, Zea Mays
MQLAITYTHYTLSCLKRTGKSCRLRWLNYLRPDLRRGNITPQEQLMILELHSRWGNRWSKIAQHLPGRTDNEIKNYWRTRVQKHAKQLKCDVNSQQFKDVMRYLWMPRLVERIQAAAANNNASGAGVPPAGAAADDTPLSSSWQHGGGADDDGGLYASPELPTDACWPPADCYYYPAAADHQLLNNPAAAAVFPDLSSTTAGSSSPSSDSGAGTAQPWPAPLGGAEWLTTGACCDASSAAAALGGQQQQSCLVGETSWASSELPELGVADFEIGSFDVESIWSMDDSLWFTQAQGV

SEQ ID NO: 160654 - protein, 137 aa, Zea Mays
MCSIYFQLLVNQLEPLTEQQLMGLSNLQQSSQQAEDALSQGMEALQQSLAETLAGSLGPSGSSGNVANYMGQMAMAMGKLGTLENFLRQADNLRQQTLHQMQRILTIRQAARALLAIHDYFSRLRALSSLWLARPRE

SEQ ID NO: 160655 - protein, 187 aa, Zea Mays
MADASSRTDTSTVLDMDDKNQRLENGQSGAMALASNSSDRSDRSDKPMDQKVLRRLAQNREAARKSRLRKKAYVQQLESSKLKLASLEQELQKARQQGIFISSSGDQTHAMSGNGAMTFDLEYSRWQEEENKQINELRTAVNAHASESDLRLIVDGIMAHYDEIFRLKGIAAKADVFHILSAPCESA

SEQ ID NO: 160656 - protein, 153 aa, Zea Mays
MWKTPAERCFLWLGGFRSSELLKLLVNQLEPLTEQQLMGLSNLQQSSQQAEDALSQGMEALQQSLAETLAGSLGPSGSSGNVANYMGQMAMAMGKLGTLENFLRQADNLRQQTLHQMQRILTIRQAARALLAIHDYFSRLRALSSLWLARPRE

SEQ ID NO: 160657 - protein, 132 aa, Zea Mays
MHGLVSSFNSRGVLYRYRRLYSLGHHDLDELLVVDLAITIDVGLADHLIDLLVGQLLAEVGHHVAELRRRDEAVLVLVEHPERLLELLLGVGVLHLAGHEVEELREVDGAVAVRIDLVDHVLELSLGWVLTQ

SEQ ID NO: 160658 - protein, 248 aa, Zea Mays
MYRAKRAALSPKVKRRVGKYELGRTIGEGTFAKVRFAKNTENGEPVAIKILDKEKVKRHRLVEQIKREICIMKLVRHPNVVRLFEVMGSKARIFIVLEYVTGGELFEIIATNGRLKEDEARKYFQQLINAVDYCHSRGVYHRDLKLENLLLDAAGNLKVSDFGLSALTEQVKADGLLHTTCGTPNYVAPEVIEDGGYDGATADIWSCGVILFVLLAGYLPFEDDNIIALYKKKLSLAAPLGFQLGPRT

SEQ ID NO: 160659 - protein, 85 aa, Zea Mays
MTWITSIWKNTIHLLSSDITGGIMNPASAFAWAYARGDHTTFDHLLVYWLAPLQATLLGVWAVTFFTKPKKIKEQKVDENKIKKE

SEQ ID NO: 160660 - protein, 140 aa, Zea Mays
MSPAPSRPRIRPWLVVGDLALAAAWVCAGALVKLLVYGGLGLGGRPEAEAVKVSLSLVYMFLFAWLEAASGGASYNPLTVLAAALASHGGPAVYLFTAFARIPAQLIQVTFPNVGKGARLSVGAHHDMDHKHLEEHNSSP

SEQ ID NO: 160661 - protein, 149 aa, Zea Mays
MSPAPSRPRIRPWLVVGDLALAAAWVCAGALVKLLVYGGLGLGGRPEAEAVKVSLSLVYMFLFAWLEAASGGASYNPLTVLAAALASHGGPAVYLFTAFARIPAQVIGAVLGVKLIQVTFPNVGKGARLSVGAHHDMDHKHLEEHNSSP

SEQ ID NO: 160662 - protein, 302 aa, Zea Mays
MGHPEPFQLYYVSIGNQECSKYYYKDNYVKFYSAIKASYPDIKIISSCDRSAISSDNPADLYDVHVYTSSGDMFSKSRMFDNTARTGPKAIVSEYAVTGNDAGRGTLIAALAEAAFLIGLERNSDVVEMASCAPLFVNDNDQRWNPDAIVFNSWQHYGCPNYWMLHFFKDSSSATLHPSTIQLPNYDQLVTSAITWNNPHDGNTYMKIKVVNFGSKAVSLNISVTGLETDIQTFGSIKTVLTSGWLRDENSFQQPDKVVPAASPITNAGKQMGVILNSYSLTSFDLLLDSESQVRASIQAYD

SEQ ID NO: 160663 - protein, 578 aa, Zea Mays
MGIRACSVCWLFYVLVLVCSLCQILYVGSVAAQTAQLTVDASPQNAQIIPGNMFGIFFEEINHAGAGGLWAELVSNRGFEAGGSNTPSNIDPWLIIGDESNIIVATDRSSCFASNPIALRMEVLCGASETNACPSGGVGIYNPGYWGMGHGFRKDLASMLANLKPRFLKFPGGNYVMGNYLINAFRWSETVGPWEERPGHFNDAWAYWTDDGLGFFEFLQLAEDLGACPVWVVNDGASIYEGVPSATIAAFVKDVVNGIEFARGDPETAWGSVRAAMGHPEPFQLYYVSIGNQECSKYYYKDNYVKFYSAIKASYPDIKIISSCDRSAISSDNPADLYDVHVYTSSGDMFSKSRMFDNTARTGPKAIVSEYAVTGNDAGRGTLIAALAEAAFLIGLERNSDVVEMASCAPLFVNDNDQRWNPDAIVFNSWQHYGCPNYWMLHFFKDSSSATLHPSTIQLPNYDQLVTSAITWNNPHDGNTYMKIKVVNFGSKAVSLNISVTGLETDIQTFGSIKTVLTSGWLRDENSFQQPDKVVPAASPITNAGKQMGVILNSYSLTSFDLLLDSESQVRASIQAYD

SEQ ID NO: 160664 - protein, 367 aa, Zea Mays
MGIRACSVCWLFYVLVLVCSLCQILYVGSVAAQTAQLTVDASPQNAQIIPGNMFGIFFEEINHAGAGGLWAELVSNRGFEAGGSNTPSNIDPWLIIGDESNIIVATDRSSCFASNPIALRMEVLCGASETNACPSGGVGIYNPGYWGMGHGFRKDLASMLANLKPRFLKFPGGNYVMGNYLINAFRWSETVGPWEERPGHFNDAWAYWTDDGLGFFEFLQLAEDLGACPVWVVNDGASIYEGVPSATIAAFVKDVVNGIEFARGDPETAWGSVRAAMGHPEPFQLYYVSIGNQECSKYYYKDNYVKFYSAIKASYPDIKIISSCDRSAISSDNPADLYDVHVICFPNLECLIIQPVPDPRQLLVNML

SEQ ID NO: 160665 - protein, 348 aa, Zea Mays
MGIRACSVCWLFYVLVLVCSLCQILYVGSVAAQTAQLTVDASPQNAQIIPGNMFGIFFEEINHAGAGGLWAELVSNRGFEAGGSNTPSNIDPWLIIGDESNIIVATDRSSCFASNPIALRMEVLCGASETNACPSGGVGIYNPGYWGMNIERTNVYRVTIYIRSSESVELMVSLTSSDGLQNLASHTIMGDKEDFVEWTKVEFDLQSNYINTNSRLQLTTTKSGIIWFDQVSLMPSDTYMGHGFRKDLASMLANLKPRFLKFPGGNYVMGNYLINAFRWSETVGPWEERPGHFNDAWAYWTDDGLGFFEFLQLAEDLGACPVWVVNDGASIYEGVPSATIAAFVKITM

SEQ ID NO: 160666 - protein, 144 aa, Zea Mays
MQLSELVSKVSTECLQHAFTGFEEIDGSQILQGHTIQLGDGSVDSCLTACDGSQKDQDILSISLSAHRGKEIGGMTFDIQEKERGREDLFLDKLSMTPPGQLDRRERGSFSMTRKAAKLDLNINDTTDGPQNCKKIDLNGFNWT

SEQ ID NO: 160667 - protein, 309 aa, Zea Mays
MSSCQMYHHQQQLQSHSHFLSSRQTFPPERHMLLQGGSIPAEPGLVLSTDAKPSSYRPPIKLNTECPFCSSVIGCTMAMDKPLEGNGSPASHLNLGTQTNKSVHIGEALQMQIEVQRRLHEQLEVQRHLQLRIEAQGKYLQSVLEKAQETLSKQNAGSVGVETAKMQLSELVSKVSTECLQHAFTGFEEIDGSQILQGHTIQLGDGSVDSCLTACDGSQKDQDILSISLSAHRGKEIGGMTFDIQEKERGREDLFLDKLSMTPPGQLDRRERGSFSMTRKAAKLDLNINDTTDGPQNCKKIDLNGFNWT

SEQ ID NO: 160668 - protein, 182 aa, Zea Mays
MHNRIEEMYHHQQQLQSHSHFLSSRQTFPPERHMLLQGGSIPAEPGLVLSTDAKPRLKWTPELHERFVEAVNQLGGPDKATPKTIMRLMGVPGLTLYHLKSHLQKYRLSKNIHAQANGVNAKNVIGCTMAMDKPLEGNGSPASHLNLGTQTNKSVHIGEALQMQIEVQRRLHEQLEVQKHKK

SEQ ID NO: 160669 - protein, 651 aa, Zea Mays
MMGGGLMMDQSVVFPGVHNFVDLLQQNGDKNLGFASLMPQTSSGDQCVMGEGDLVDPPPDSFPDAVEDDSDDDVEDIEELERRMWRDRMKLKRLRELQQSRGKDPMASGGGLADGSSKPRQSQEQARRKKMSRAQDGILKYMLKMMEVCRAQGFVYGIIPEKGKPVSGASDNLRAWWKEKVRFDRNGPAAIAKYQADNAVPGAENELASGAASPHSLQELQDTTLGSLLSALMQHCDPPQRRYPLEKGVPPPWWPTGDEEWWPELGIPKDQGPPPYKKPHDLKKAWKVSVLTAVIKHMSPDIEKIRRLVRQSKCLQDKMTAKEISTWLAVVKQEEELYLKMHPGARPPASTGGIASAISFNTTSSEYDVDIVDECKGDEAGNQKTAVTDPTSFNLGAAILSDKFLMPTPMKEETADVEFIQKRNAPAPAEPELMLNNRVYTCNNVQCPHSDYSYGFLDRNARNSHQYTCKYNDPITQSAENKPLPAPPQPQAFQPAFSQANQAANNLDFSLPMDGQRSIAELMNMYDTNFMTSKTMSSSDSVTIMERPNAMPQRIQMDEGFFGQGNGVFDDVNSMMQQQQQQAPPVVQQQQQQQFFIRDDTPFMSQMGDITSTAEFSGSARRVCSLLMRHIIAAALHTNNMTDIFKYFERP

SEQ ID NO: 160670 - protein, 531 aa, Zea Mays
MMGGGLMMDQSVVFPGVHNFVDLLQQNGDKNLGFASLMPQTSSGDQCVMGEGDLVDPPPDSFPDAVEDDSDDDVEDIEELERRMWRDRMKLKRLRELQQSRGKDPMASGGGLADGSSKPRQSQEQARRKKMSRAQDGILKYMLKMMEVCRAQGFVYGIIPEKGKPVSGASDNLRAWWKEKHMSPDIEKIRRLVRQSKCLQDKMTAKEISTWLAVVKQEEELYLKMHPGARPPASTGGIASAISFNTTSSEYDVDIVDECKGDEAGNQKTAVTDPTSFNLGAAILSDKFLMPTPMKEETADVEFIQKRNAPAPAEPELMLNNRVYTCNNVQCPHSDYSYGFLDRNARNSHQYTCKYNDPITQSAENKPLPAPPQPQAFQPAFSQANQAANNLDFSLPMDGQRSIAELMNMYDTNFMTSKTMSSSDSVTIMERPNAMPQRIQMDEGFFGQGNGVFDDVNSMMQQQQQQAPPVVQQQQQQQFFIRDDTPFMSQMGDITSTAEFRFGSGFNMSSTAAAADYPGAAQKNDGTNWFY

SEQ ID NO: 160671 - protein, 373 aa, Zea Mays
MIIVNIVHDISRMFGRGSPRMNLIQAATMKKISPRSTTNKRKKRTSPKDKEKELKRDYKALKEARQQSGVSWDERLCRIEAEEPIWNNLTTSNERLKKFRTKSFPLFEALGELYDGNIAEGTMNFTSIEPSRPPVTQPCQGAATQPSQAAFTLTQPSQIAFTQPSLAAFARPSRTAFRHPSLAAFPQPSQAAFAQPSQTIFTQPSEATFTQPSEATFTQPSEATFTQPSQAAFTQPSQANISQAICDEDDELRVLDPPAPASVSKRAKNVGTGNSRTRINKRTQDGNVVEMMGRFLEMKEKQAEADERATTNANEDDFPIQTCIAIVDGMEEFSDDEKVDSYDVFKDAQNRAIFMTAKDATRIKWLRKKIART

SEQ ID NO: 160672 - protein, 251 aa, Zea Mays
MNFTSIEPSRPPVTQPCQGAATQPSQAAFTLTQPSQIAFTQPSLAAFARPSRTAFRHPSLAAFPQPSQAAFAQPSQTIFTQPSEATFTQPSEATFTQPSEATFTQPSQAAFTQPSQANISQAICDEDDELRVLDPPAPASVSKRAKNVGTGNSRTRINKRTQDGNVVEMMGRFLEMKEKQAEADERATTNANEDDFPIQTCIAIVDGMEEFSDDEKVDSYDVFKDAQNRAIFMTAKDATRIKWLRKKIART

SEQ ID NO: 160673 - protein, 504 aa, Zea Mays
MLGRYTLIPGGQKNPHPRRGRHRRSPRVRAPPLHLPIDLRRPRIFPYELCFSKFAAGHIDVVILDPDECVCHLHGSSTDLARMFGRGSPRMNLIQAATMKKISPRSTTNKRKKRTSPKVGRLRANWNSGLEKGLVEILQDHNNDCYKGQNGWSSEAWNRIVKLFHEKFSYVTFTKCQIQDKEKELKRDYKALKEARQQSGVSWDERLCRIEAEEPIWNNLTTSNERLKKFRTKSFPLFEALGELYDGNIAEGTMNFTSIEPSRPPVTQPCQGAATQPSQAAFTLTQPSQIAFTQPSLAAFARPSRTAFRHPSLAAFPQPSQAAFAQPSQTIFTQPSEATFTQPSEATFTQPSEATFTQPSQAAFTQPSQANISQAICDEDDELRVLDPPAPASVSKRAKNVGTGNSRTRINKRTQDGNVVEMMGRFLEMKEKQAEADERATTNANEDDFPIQTCIAIVDGMEEFSDDEKVDSYDVFKDAQNRAIFMTAKDATRIKWLRKKIART

SEQ ID NO: 160674 - protein, 152 aa, Zea Mays
MGWQGNDPSTDFRGGGLISLENLIFFARNYPNSFQMLLNKVQGQRSDWEYPFAVAGINVSFMLVQMLDLKSSVPSSKYGIRFLELLGRDENAFDHLYCVAFRLLDAQWLVKRASYMEFNEVLKSTRTQLERELVLDDVLEVKDLPSYTMLDE

SEQ ID NO: 160675 - protein, 264 aa, Zea Mays
MFLEERQLHGDFVTKISDMVWRRNGGNVDAVEATTDQGNAVDVAQPEDVREDVVDDGMLRLAATRGWVPGDSSPPLSKRLSAKDWQNERDKRKELNLLKYEALKDELLLLTTGIGAACSLYCLLVFSLETAVSYALGVGFSCLYLQLLCQHADNLSKQDIPQVFLKKKVKKIGITSEDLKNTIEKTLGGGRVALSSPRLVIPAVIFGLSALSDHFKNSFFSFEVLPGMMGFLAYKAAALVQVYRDNEDLRLILPEEEDADSEST

SEQ ID NO: 160676 - protein, 151 aa, Zea Mays
MFLEERQLHGDFVTKISDMVWRRNGGNVDAVEATTDQGNAVDVAQPEDVREDVVDDGMLRLAATRGWVPGDSSPPLSKRLSAKDWQNERDKRKELNLLKYEALKDELLLLTTGIGAACSLYCLLVFSLEVRPHIKRKKHNLNVSVSNLKLL

SEQ ID NO: 160677 - protein, 170 aa, Zea Mays
MFLEERQLHGDFVTKISDMVWRRNGGNVDAVEATTDQGNAVDVAQPEDVREDVVDDGMLRLAATRGWVPGDSSPPLSKRLSAKDWQNERDKRKELNLLKYEALKDELLLLTTGIGAACSLYCLLVFSLEVLPGMMGFLAYKAAALVQVYRDNEDLRLILPEEEDADSEST

SEQ ID NO: 160678 - protein, 207 aa, Zea Mays
MAMGLPGHRCCRLPALGSVTPLCPALARRPLPRTSDLRYSSLEAQAGDTIGEEVLRMFLEERQLHGDFVTKISDMVWRRNGGNVDAVEATTDQGNAVDVAQPEDVREDVVDDGMLRLAATRGWVPGDSSPPLSKRLSAKDWQNERDKRKELNLLKYEALKDELLLLTTGIGAACSLYCLLVFSLEVRPHIKRKKHNLNVSVSNLKLL

SEQ ID NO: 160679 - protein, 96 aa, Zea Mays
MPGGLSYPRRDINPQAPTHILIIPKVKDGLTGLAKAEERHIEILGYLLYVAKVVAKQEGLEDGYRVVINDGPSGCQSVYHIHVHLLGGRQMNWPPG

SEQ ID NO: 160680 - protein, 111 aa, Zea Mays
MWFLFCYRLYNARGTVLPSQVLAFRDINPQAPTHILIIPKVKDGLTGLAKAEERHIEILGYLLYVAKVVAKQEGLEDGYRVVINDGPSGCQSVYHIHVHLLGGRQMNWPPG

SEQ ID NO: 160681 - protein, 254 aa, Zea Mays
MAAAQAISKGSVVSPCGNRAAPGFLARRRGAVAARMAPSAARIGGFWRKNAFPGGRLTLRTRRSRAASPTQMNMNLALGKSMRWWEKGLQPNMREIESAQDLVDALTNAGDRLVVVDFFSPGCGGCRAFHPKICQFAEQNPDVLFLQVNYEEHKSMCHSLHVHVLPLFRFYRGAQGRLCSFSCTNATVRSGSDQLLNNMQRTQNDLYSLLVTLLELNLVNKVVNPGRACWQPNFSFGPKWLILLLYLQNMRGKE

SEQ ID NO: 160682 - protein, 265 aa, Zea Mays
MNKMNLPAPFRMALPTPPLPSQVPVIPHPQPPPGSTTTGELHSADLSSDESELESSDEDIDKRKIKRAKHEAIVGPAVDKNVAHEAVGVKSVALVSNELQVIKKKNPVLQIKITPKPIQKEPPVPSMTENEPDSTHEQLQEKHFVTPQEMSREKLPPEEILSLPMFKNYTPGNPASVLYIKNLAKDVTHDDFYYVFGSVFESMDSARLGLSVKLMQEGRMRGQAFVTFPTVELAQRALNLAHGYVFKGKPMIIQFGRNPAANKAS

SEQ ID NO: 160683 - protein, 202 aa, Zea Mays
MFGFGHHGQNPPAHGGVHQPTFKIFCKSDEGYCLTVRDGNVVLAPANPRDEHQHWYKDMRFSTQVKDEEGNPAFALVNKATGLAIKHSLGQSHPVKLVPFNPEYQDESVLWTESGDVGKGFRCIRMVNNIRLNFDAFHGDKGHGGVRDVGHGFRCVRMVNNIYLNFDAFHGDKDHGGVRDGTNIVLWKWCEGDNQRWKIVPW

SEQ ID NO: 160684 - protein, 170 aa, Zea Mays
MFGFGHHGQNPPAHGGVHQPTFKIFCKSDEGYCLTVRDGNVVLAPANPRDEHQHWYKDMRFSTQVKDEEGNPAFALVNKATGLAIKHSLGQSHPVKLVPFNPEYQDESVLWTESGDVGKGFRCIRMVNNIYLNFDAFHGDKDHGGVRDGTNIVLWKWCEGDNQRWKIVPW

SEQ ID NO: 160685 - protein, 259 aa, Zea Mays
MFGFGHHGQNPPAHGGVHQPTFKIFCKSDEGYCLTVRDGNVVLAPANPRDEHQHWYKDMRFSTQVKDEEGNPAFALVNKATGLAIKHSLGQSHPVKLVPFNPEYQDESVLWTESGDVGKGFRCIRMVNNIRLAPTNPRDEYQHWIKDMRHSNSVKDEEGYPAFALVNRVTGEAIKHSQGEGHPVKLVPYNPGYQDESVLWTESRDVGHGFRCVRMVNNIYLNFDAFHGDKDHGGVRDGTNIVLWKWCEGDNQRWKIVPW

SEQ ID NO: 160686 - protein, 292 aa, Zea Mays
MFGFGHHGQNPPAHGGVHQPTFKIFCKSDEGYCLTVRDGNVVLAPANPRDEHQHWYKDMRFSTQVKDEEGNPAFALVNKATGLAIKHSLGQSHPVKLVPFNPEYQDESVLWTESGDVGKGFRCIRMVNNIRLNFDAFHGDKGHGGVHDGTTVVLWEWAKGDNQSWKILPWGDEYQHWIKDMRHSNSVKDEEGYPAFALVNRVTGEAIKHSQGEGHPVKLVPYNPGYQDESVLWTESRDVGHGFRCVRMVNNIYLNFDAFHGDKDHGGVRDGTNIVLWKWCEGDNQRWKIVPW

SEQ ID NO: 160687 - protein, 112 aa, Zea Mays
MRHSNSVKDEEGYPAFALVNRVTGEAIKHSQGEGHPVKLVPYNPGYQDESVLWTESRDVGHGFRCVRMVNNIYLNFDAFHGDKDHGGVRDGTNIVLWKWCEGDNQRWKIVPW

SEQ ID NO: 160688 - protein, 251 aa, Zea Mays
MISTLRRTGSFVVLHLRYEMDMLAFSGCTHGCSDEETEELTTMRYAYPWWKEKEIDSEKKRLEGLCPLTPEETTLVLRALGFPKDTRIYIASGEIYGGEKRLAILKTEFPNIVRKEILLSDDELRPFQKHSTQMAALDYLVSVASDIFIPSNDGNMAKVVEGHRRFTGFHRTIQLDRKKLVELIDLFEDQELSWEEFSVAVKELHGGRMSQPTVRRIVPGQPKEEDYFYANPHECLGPAKKRRDRLKHMEI

SEQ ID NO: 160689 - protein, 294 aa, Zea Mays
MAKHKASPPAAVRRRIGGAGASAIRWALRVATSIVAWTLLLHLFTFLGIPRPPLPIARPSCLGGRSNSTAADSVVAAGDAGHLALPALPPRRLYKSNGYLLVSCNGGLNQMRAAICDMVTVARYLNLTMVIPELDKQSFWADPSDFGDIFDVNHFIDSLRNEVKIVKELPQKFKEKVPLSMQPISWSSEKYYLRQILPLVRKHKVVRFSKTDSRLANNGLPLKLQKLRCHVNYNALRFAPSIEALGNKMISTLRRTGSFVVLHLRYEMDMLAFSGCTHGCSDEETEELTTMRFF

SEQ ID NO: 160690 - protein, 389 aa, Zea Mays
MRAAICDMVTVARYLNLTMVIPELDKQSFWADPSDFGDIFDVNHFIDSLRNEVKIVKELPQKFKEKVPLSMQPISWSSEKYYLRQILPLVRKHKVVRFSKTDSRLANNGLPLKLQKLRCHVNYNALRFAPSIEALGNKMISTLRRTGSFVVLHLRYEMDMLAFSGCTHGCSDEETEELTTMRYAYPWWKEKEIDSEKKRLEGLCPLTPEETTLVLRALGFPKDTRIYIASGEIYGGEKRLAILKTEFPNIVRKEILLSDDELRPFQKHSTQMAALDYLVSVASDIFIPSNDGNMAKVVEGHRRFTGFHRTIQLDRKKLVELIDLFEDQELSWEEFSVAVKELHGGRMSQPTVRRIVPGQPKEEDYFYANPHECLGPAKKRRDRLKHMEI

SEQ ID NO: 160691 - protein, 309 aa, Zea Mays
MRRYSGAGARQQQQTEAVADRVHRYRRVLMVLLSPVLLISFVLLLMPRAPASASGGVLLAVGGRRWGPRAVEDGLNKYAVIFDAGSSGSRVHVYCFDENLDLVPIGKEIELFKQKKPGLSAAKGPQEAAESLISLLEEAEKVVPAELREQTPVRVGATAGLRALGTQRSEEILQAVRELLHDSSFKSQPNWVTVLDGSQEGAFQWVTINYLLGKLGKPYSNTVGVVDLGGGSVQMAYAISEKDAAKAPLVADGEDSYVKELLLKGTTYYLYVHSYLHYGLLAARGEILKAGEGSDYSDCMLEGHLGMVA

SEQ ID NO: 160692 - protein, 244 aa, Zea Mays
MAYAISEKDAAKAPLVADGEDSYVKELLLKGTTYYLYVHSYLHYGLLAARGEILKAGEGSDYSDCMLEGHLGKYNYGGNTFEASGSPSGASYSKCRALAVRALKVDEPACTHMKCTFGGVWNGGGGDGQKNLFVASFFFDRAAEAGFVDPKAAVAKVKPSDFEETARRVCKLNLKDAHATYPDVSEENIPYLCIDLVYQYTLLVDGFGVDPYQDITLVKKVPYGDSYVEAAWPLGSAIEIASSS

SEQ ID NO: 160693 - protein, 486 aa, Zea Mays
MRRYSGAGARQQQQTEAVADRVHRYRRVLMVLLSPVLLISFVLLLMPRAPASASGGVLLAVGGRRWGPRAVEDGLNKYAVIFDAGSSGSRVHVYCFDENLDLVPIGKEIELFKQKKPGLSAAKGPQEAAESLISLLEEAEKVVPAELREQTPVRVGATAGLRALGTQRSEEILQAVRELLHDSSFKSQPNWVTVLDGSQEGAFQWVTINYLLGKLGKPYSNTVGVVDLGGGSVQMAYAISEKDAAKAPLVADGEDSYVKELLLKGTTYYLYVHSYLHYGLLAARGEILKAGEGSDYSDCMLEGHLGKYNYGGNTFEASGSPSGASYSKCRALAVRALKVDEPACTHMKCTFGGVWNGGGGDGQKNLFVASFFFDRAAEAGFVDPKAAVAKVKPSDFEETARRVCKLNLKDAHATYPDVSEENIPYLCIDLVYQYTLLVDGFGVDPYQDITLVKKVPYGDSYVEAAWPLGSVWRIFSSSFTSHLKLF

SEQ ID NO: 160694 - protein, 512 aa, Zea Mays
MRRYSGAGARQQQQTEAVADRVHRYRRVLMVLLSPVLLISFVLLLMPRAPASASGGVLLAVGGRRWGPRAVEDGLNKYAVIFDAGSSGSRVHVYCFDENLDLVPIGKEIELFKQKKPGLSAAKGPQEAAESLISLLEEAEKVVPAELREQTPVRVGATAGLRALGTQRSEEILQAVRELLHDSSFKSQPNWVTVLDGSQEGAFQWVTINYLLGKLGKPYSNTVGVVDLGGGSVQMAYAISEKDAAKAPLVADGEDSYVKELLLKGTTYYLYVHSYLHYGLLAARGEILKAGEGSDYSDCMLEGHLGKYNYGGNTFEASGSPSGASYSKCRALAVRALKVDEPACTHMKCTFGGVWNGGGGDGQKNLFVASFFFDRAAEAGFVDPKAAVAKVKPSDFEETARRVCKLNLKDAHATYPDVSEENIPYLCIDLVYQYTLLVDGFGVDPYQDITLVKKVPYGDSYVEAAWPLGSYTLTTYTWSIDCSSVQAFSPFHPQLFRILCHSSLVCSVGSSV

SEQ ID NO: 160695 - protein, 436 aa, Zea Mays
MRRYSGAGARQQQQTEAVADRVHRYRRVLMVLLSPVLLISFVLLLMPRAPASASGGVLLAVGGRRWGPRAVEDGLNKYAVIFDAGSSGSRVHVYCFDENLDLVPIGKEIELFKQATAGLRALGTQRSEEILQAVRELLHDSSFKSQPNWVTVLDGSQEGAFQWVTINYLLGKLGKPYSNTVGVVDLGGGSVQMAYAISEKDAAKAPLVADGEDSYVKELLLKGTTYYLYVHSYLHYGLLAARGEILKAGEGSDYSDCMLEGHLGKYNYGGNTFEASGSPSGASYSKCRALAVRALKVDEPACTHMKCTFGGVWNGGGGDGQKNLFVASFFFDRAAEAGFVDPKAAVAKVKPSDFEETARRVCKLNLKDAHATYPDVSEENIPYLCIDLVYQYTLLVDGFGVDPYQDITLVKKVPYGDSYVEAAWPLGSAIEIASSS

SEQ ID NO: 160696 - protein, 237 aa, Zea Mays
MAYAISEKDAAKAPLVADGEDSYVKELLLKGTTYYLYVHSYLHYGLLAARGEILKAGEGSDYSDWKYNYGGNTFEASGSPSGASYSKCRALAVRALKVDEPACTHMKCTFGGVWNGGGGDGQKNLFVASFFFDRAAEAGFVDPKAAVAKVKPSDFEETARRVCKLNLKDAHATYPDVSEENIPYLCIDLVYQYTLLVDGFGVDPYQDITLVKKVPYGDSYVEAAWPLGSAIEIASSS

SEQ ID NO: 160697 - protein, 488 aa, Zea Mays
MRRYSGAGARQQQQTEAVADRVHRYRRVLMVLLSPVLLISFVLLLMPRAPASASGGVLLAVGGRRWGPRAVEDGLNKYAVIFDAGSSGSRVHVYCFDENLDLVPIGKEIELFKQKKPGLSAAKGPQEAAESLISLLEEAEKVVPAELREQTPVRVGATAGLRALGTQRSEEILQAVRELLHDSSFKSQPNWVTVLDGSQEGAFQWVTINYLLGKLGKPYSNTVGVVDLGGGSVQMAYAISEKDAAKAPLVADGEDSYVKELLLKGTTYYLYVHSYLHYGLLAARGEILKAGEGSDYSDCMLEGHLGKYNYGGNTFEASGSPSGASYSKCRALAVRALKVDEPACTHMKCTFGGVWNGGGGDGQKNLFVASFFFDRAAEASLILRLTFLAGFVDPKAAVAKVKPSDFEETARRVCKLNLKDAHATYPDVSEENIPYLCIDLVYQYTLLVDGFGVDPYQDITLVKKVPYGDSYVEAAWPLGSAIEIASSS

SEQ ID NO: 160698 - protein, 448 aa, Zea Mays
MRRYSGAGARQQQQTEAVADRVHRYRRVLMVLLSPVLLISFVLLLMPRAPASASGGVLLAVGGRRWGPRAVEDGLNKYAVIFDAGSSGSRVHVYCFDENLDLVPIGKEIELFKQKKPGLSAAKGPQEAAESLISLLEEAEKVVPAELREQTPVRVGATAGLRALGTQRSEEILQAVTINYLLGKLGKPYSNTVGVVDLGGGSVQMAYAISEKDAAKAPLVADGEDSYVKELLLKGTTYYLYVHSYLHYGLLAARGEILKAGEGSDYSDCMLEGHLGKYNYGGNTFEASGSPSGASYSKCRALAVRALKVDEPACTHMKCTFGGVWNGGGGDGQKNLFVASFFFDRAAEAGFVDPKAAVAKVKPSDFEETARRVCKLNLKDAHATYPDVSEENIPYLCIDLVYQYTLLVDGFGVDPYQDITLVKKVPYGDSYVEAAWPLGSAIEIASSS

SEQ ID NO: 160699 - protein, 284 aa, Zea Mays
MTTRIWKMAFEVTINYLLGKLGKPYSNTVGVVDLGGGSVQMAYAISEKDAAKAPLVADGEDSYVKELLLKGTTYYLYVHSYLHYGLLAARGEILKAGEGSDYSDCMLEGHLGKYNYGGNTFEASGSPSGASYSKCRALAVRALKVDEPACTHMKCTFGGVWNGGGGDGQKNLFVASFFFDRAAEAGFVDPKAAVAKVKPSDFEETARRVCKLNLKDAHATYPDVSEENIPYLCIDLVYQYTLLVDGFGVDPYQDITLVKKVPYGDSYVEAAWPLGSAIEIASSS

SEQ ID NO: 160700 - protein, 370 aa, Zea Mays
MRPEDIDYPRPVVECHACSDLAAEMAAALAAASIVFKDNKAYSQKLVHGATTLFQFARERRGRYSAGGSDAAKFYNSTSYWDEFVWGSSWMYLATGNSSYLTLATHPKLAKHAGAFWGGPDYGVFSWDNKLTGAQVLLSRLRLFLSPGYPYEETLSTFHNQTSIIMCSYLPIFKSFNRTRGGLIQLNHGKPQPLQYVVNAAFLASVFSDYLEAADTPGWYCGPHFYSIEVLRSFARTQIEYILGKNPLKMSYVVGFGNHYPKHVHHRGASIPKNGVHYGCKGGWKWRDTKKPNPNIIVGAMVAGPDRHDGFKDVRKNYNYTEATLAGNAGLVAALVALSGEGHGVDKNTMFSAVPPMFPSPPPPPAPWKP

SEQ ID NO: 160701 - protein, 932 aa, Zea Mays
MDQWQNAPPSWGQSDDPCGESPWEGVTCGGDKVISIKLSTMGIQGSLAADIGQLSDLQSMDLSFNNELGGVLTPTIGNLKQLTTLILSGCSFHGTIPDELGSLPKLSYMALNSNQFSGKIPASLGNLSSLYWFDIADNQLSGPLPVSTDGGMGLDKLIKTRHFHFNKNQLSGPIPDALFSPEMALIHLLFDGNRFTGNIPDSLGFVSTLEVVRLDRNSLSGQVPLNLNNLTKVIELNLANNQLTGTLPDLTRMDLLNYVDLSNNTFDPSPCPAWFWRLPQLSALIIQSGRLYGTVPTRLFSSPQLNQVILDGNAFNGTLDMGRSISSELSLVSFKDNEFASLTVTSSYNGTLALAGNPVCERLPNTPYCSATQRPLSAPYSTSLVKCYSGSCPAGQSLSPQSCLCAYPYQGVMYFRAPFFHDVANDTAFQELESMLWTKLALTPGSVYLQDPFFNSDAYMQVQVKLFPAGSGAYFNRSEVMRIGFDLSNQTFKPPKEFGPYYFIASPYPFPGSEQSSKSKGVIVGIAVGCGVLFVALAGAAAYAFIQRRRAEKAKEELGGPFASWARSEERGGAPRLKGARWFSYEELKRSTNNFAEANELGYGGYGKVYRGMLPTGQFIAIKRAQQGSMQGGHEFKTEIELLSRVHHKNLVGLLGFCFEQGEQMLVYEFMSGGTLRDSLAGKSGLHLDWKKRLRVALGAARGLAYLHELADPPIIHRDVKSSNILMDEHLTAKVADFGLSKLVSDSERGHVSTQVKGTLGYLDPEYYMSQQLTEKSDVYSFGVVMLELIVAKQPIEKGKYIVREAKRVFDADDAEFCGLKDMVDARIMSTNNHLAAFGKFVQLALRCVDEVATARPSMSEVVKEIEMMLQSEGLSSASTSASTSATEFDVTKGAPRHPYNDPPLPKKDKDVSTDSFEYSGGYSFQSKVEPK

SEQ ID NO: 160702 - protein, 892 aa, Zea Mays
MGIQGSLAADIGQLSDLQSMDLSFNNELGGVLTPTIGNLKQLTTLILSGCSFHGTIPDELGSLPKLSYMALNSNQFSGKIPASLGNLSSLYWFDIADNQLSGPLPVSTDGGMGLDKLIKTRHFHFNKNQLSGPIPDALFSPEMALIHLLFDGNRFTGNIPDSLGFVSTLEVVRLDRNSLSGQVPLNLNNLTKVIELNLANNQLTGTLPDLTRMDLLNYVDLSNNTFDPSPCPAWFWRLPQLSALIIQSGRLYGTVPTRLFSSPQLNQVILDGNAFNGTLDMGRSISSELSLVSFKDNEFASLTVTSSYNGTLALAGNPVCERLPNTPYCSATQRPLSAPYSTSLVKCYSGSCPAGQSLSPQSCLCAYPYQGVMYFRAPFFHDVANDTAFQELESMLWTKLALTPGSVYLQDPFFNSDAYMQVQVKLFPAGSGAYFNRSEVMRIGFDLSNQTFKPPKEFGPYYFIASPYPFPGSEQSSKSKGVIVGIAVGCGVLFVALAGAAAYAFIQRRRAEKAKEELGGPFASWARSEERGGAPRLKGARWFSYEELKRSTNNFAEANELGYGGYGKVYRGMLPTGQFIAIKRAQQGSMQGGHEFKTEIELLSRVHHKNLVGLLGFCFEQGEQMLVYEFMSGGTLRDSLAGKSGLHLDWKKRLRVALGAARGLAYLHELADPPIIHRDVKSSNILMDEHLTAKVADFGLSKLVSDSERGHVSTQVKGTLGYLDPEYYMSQQLTEKSDVYSFGVVMLELIVAKQPIEKGKYIVREAKRVFDADDAEFCGLKDMVDARIMSTNNHLAAFGKFVQLALRCVDEVATARPSMSEVVKEIEMMLQSEGLSSASTSASTSATEFDVTKGAPRHPYNDPPLPKKDKDVSTDSFEYSGGYSFQSKVEPK

SEQ ID NO: 160703 - protein, 453 aa, Zea Mays
MIDTIVKRLKDQLFVARSYYPSIAKLKGKETLTRELKQNIQEHERVLSESIVDADLPSFIKTKLERMDQSIARAKSCTVDCNNVDRKLRQILHMTEDEAHFHMKQSAYLYNLGVHTMPKSHHCLNMRLTVEYFKSMPLDPNDSSAHKFNLPDNRHYVILSKNVLAASVVINSTVSSSEDTENVVFHVLTDSQNFYAMKHWFARNSYRESAVNVINYEQIIFENFPEFGTQQLYLPEEFRVLISSLERPTEKSRMEYLSVFSHSHFFLAEIFKDLKKVIVLDDDVVVQRDISFLWNLDMGEKVNGAISFCGLKLGQLRNLLGRTMYDQQSCAWMSGVNVIDLDKWREHNVTENYLQLLRKFGNNDDEASLRASALPISLLSFQHLLYPLDERLILSGLGYDYGIKEELVQNSASLHYNGNMKPWLELGIPDYRKYWKRFLTRDERFMDECNVSP

SEQ ID NO: 160704 - protein, 146 aa, Zea Mays
MVIQETLRLYPAGAFVSRQALQELKLGGVHIPKGVNIYIPVSTMHLDPELWGPDVKEFNPERFSDVRPQLHSYLPFGAGARTCLGQGFAMAELKILISLIVSKFVLKLSPHYQHSPTLKLIVEPELGVDLTLTKVQSVCTKRGTAI

SEQ ID NO: 160705 - protein, 165 aa, Zea Mays
MGVHNRVVHVLPLCSRPRPNLPRIPQPPTLTFHPPRSHSSRSRDPRGAHLPSRSAHLHPPPSILRTATHPAAAIPAALTFHPAARTFILRDRSRISHRRRCSAIKGIRGQQTAWRSPRRAGEEACADTRQDAPAEAEPPPRRPPVFYSSVFAQVRQPLDEMLWLR

SEQ ID NO: 160706 - protein, 187 aa, Zea Mays
MGVHNRVVHVLPLCSRPRPNLPRIPQPPTLTFHPPRSHSSRSRDPRGAHLPSRSAHLHPPPSILRTATHPAAAIPAALTFHPAARTFILRDRSRISHRRRCSAIKGIRGQQTAWRSPRRAGEEACADTRQDAPAEAEPPPRRPPVFYSSVFAQIEEIGWKQLVSATGEGVSCTPVSPSVSYSGYAPS

SEQ ID NO: 160707 - protein, 268 aa, Zea Mays
MKIIPVPCLDDNYAYLIVDESTKKAAAVDPVEPEKVLKAAGEVGAYVDCVLTTHHHWDHAGGNEKMRLQVPGIKVFGGSLDNVKGCTDQVENGMKLSLGKDIEILCLHTPCHTKGHISYYVTSKEGEDPAVFTGDTLFIAGCGKFFEGSAEQMYQSLIVTLGSLPKSTRVYCGHEYTVKNLKFMLTLEPENEKTKQKLEWAEKQREANQPTVPSTIGDEFEINTFMRVDLPEIQAKFSVNSPVEAMREVRKTKDNWRGGNEVYCRAML

SEQ ID NO: 160708 - protein, 459 aa, Zea Mays
MDSKKKRNKKKKGNQGKNAADVTSIAGEAASQNHNHELAPIDHHKGSDADDVMSSVGEELPQYKNHQPNIQADYNGTSAYDTTSSIGECIACYQNNEPMMTQENHKASNAVPADQRSVGLSESSVELDMHRLHEAKLDKLHETIKQLENEKSLWLQKVITMEGELEKLHNEVGCHAQNEVLLEEKLNSLQSGYDVLIKKEEVVDNKVRCIDNINDTLTHQESLLKERLSGLEETNKSLLVQVKVLEEASNNTSEENQMLVKKIYELDSRLQALEAKAAPSEALMIEKFPDNKVMDQVHFANSPLQQQTIDFSEGNKLFAERGLSSPVKLNPDNSYRQIYDIPSNDYASNYTEETSIQLPEIGTSNTIVQGHVDVNEHRFDGPRTIEEIVPVPLDEIQIHEDVPGQPGAADEIDEVPFSDAPIIGAPFRLISFVARRRRNSCSFILPVLEYLSSATSFLN

SEQ ID NO: 160709 - protein, 444 aa, Zea Mays
MDSKKKRNKKKKGNQGKNAADVTSIAGEAASQNHNHELAPIDHHKGSDADDVMSSVGEELPQYKNHQPNIQADYNGTSAYDTTSSIGECIACYQNNEPMMTQENHKASNAVPADQRSVGLSESSVELDMHRLHEAKLDKLHETIKQLENEKSLWLQKVITMEGELEKLHNEVGCHAQNEVLLEEKLNSLQSGYDVLIKKEEVVDNKVRCIDNINDTLTHQESLLKERLSGLEETNKSLLVQVLEEASNNTSEENQMLVKKIYELDSRLQALEAKAAPSEALMIEKFPDNKVMDQVHFANSPLQQQTIDFSEGNKLFAERGLSSPVKLNPDNSYRQIYDIPSNDYASNYTEETSIQLPEIGTSNTIVQGHVDVNEHRFDGPRTIEEIVPVPLDEIQIHEDVPGQPGAADEIDEVPFSDAPIIGAPFRLISFVARYVSGADLVNQK

SEQ ID NO: 160710 - protein, 420 aa, Zea Mays
MDSKKKRNKKKKGNQGKNAADVTSIAGEAASQNHNHELAPIDHHKGSDADDVMSSVGEELPQYKNHQPNIQADYNGTSAYDTTSSIGECIACYQNNEPMMTQENHKASNAVPADQRSVGLSESSVELDMHRLHEAKLDKLHETIKQLENEKSLWLQKVITMEGELEKLHNEVGCHAQNEVLLEEKLNSLQSGYDVLIKKEEVVDNKVRCIDNINDTLTHQESLLKERLSGLEETNKSLLVQVKVLEEASNNTSEENQMLVKKIYELDSRLQALEAKAAPSEALMIEKGNKLFAERGLSSPVKLNPDNSYRQIYDIPSNDYASNYTEETSIQLPEIGTSNTIVQGHVDVNEHRFDGPRTIEEIVPVPLDEIQIHEDVPGQPGAADEIDEVPFSDAPIIGAPFRLISFVARYVSGADLVNQK

SEQ ID NO: 160711 - protein, 328 aa, Zea Mays
MDSKKKRNKKKKGNQGKNAADVTSIAGEAASQNHNHELAPIDHHKGSDADDVMSSVGEELPQYKNHQPNIQADYNGTSAYDTTSSIGECIACYQNNEPMMTQENHKASNAVPADQRSVGLSESSVELDMHRLHEAKLDKLHETIKQLENEKSLWLQKVITMEGELEKLHNEVGCHAQNEVLLEEKLNSLQSGYDVLIKKEEVVDNKVRCIDNINDTLTHQESLLKERLSGLEETNKSLLVQVKVLEEASNNTSEENQMLVKKIYELDSRLQALEAKAAPSEALMIEKSVTKTVMQFPDNKVMDQVHFANSPLQQQTIDFSEESRRVIR

SEQ ID NO: 160712 - protein, 382 aa, Zea Mays
MRRPTLSLALGLGLGLSLVALFAARGAHASIHEYGGGDFAPRANSFFFHGGSEGLYASDHSSNSSASFIRFDTVVFRRTLESASRHEEMQQKTGLVEAIIVEIQDRGKIGGSYLHSDAICCTPELDKEKSCRVGEVIIRPNPENPDWPKRIQTFFDGKNEETTMVTQIVSINKTGMYYLYFMFCDPQLKGLKITGRTVWRNPQGYLPGKMAPMMTFYGFMSLAYLVLGLLWFIQFVRCWKDILQLHYHITAVIALGMCEMAFWYFEYANFNSTGTRPMGITLWAVTFTAVKKTVSRLLLLVVSMGYGVVLPTLGGITSRVAALGFIYFVASEALELVENLGNINDFSGKTRLFLVLPVAVLDATFIIWIFSSLSRTLEKLQI

SEQ ID NO: 160713 - protein, 473 aa, Zea Mays
MRRPTLSLALGLGLGLSLVALFAARGAHASIHEYGGGDFAPRANSFFFHGGSEGLYASDHSSNSSASFIRFDTVVFRRTLESASRHEEMQQKTGLVEAIIVEIQDRGKIGGSYLHSDAICCTPELDKEKSCRVGEVIIRPNPENPDWPKRIQTFFDGKNEETTMVTQIVSINKTGMYYLYFMFCDPQLKGLKITGRTVWRNPQGYLPGKMAPMMTFYGFMSLAYLVLGLLWFIQFVRCWKDILQLHYHITAVIALGMCEMAFWYFEYANFNSTGTRPMGITLWAVTFTAVKKTVSRLLLLVVSMGYGVVLPTLGGITSRVAALGFIYFVASEALELVENLGNINDFSGKTRLFLVLPVAVLDATFIIWIFSSLSRTLEKLQLRRSMAKLELYRKFTNSLAVSVLISIAWIGYEVSFINSKVHLCGPCNVDMIKRSKAMESNCIMGMSGGARAKFYVVFPLLCGDHKIAIFQCN

SEQ ID NO: 160714 - protein, 1032 aa, Zea Mays
MADGQHIQAASEEVDSIHFSFYSDDEIKRISIKKITKSERLDAKNLPVPGGLLDPAMGPINDIDICKSCGQHSVRCPGHFGHIELAKPLFNPLLFMSLKNLLHVTCFHCHKFRLNKEQVDRYVNELELLVKGDIVCAKNLEDSVEEAYLSKEDENMNKTTSGDNSSSVKDKKTWTSIQLKEVLSIFSKIMKKRQKKCAKCDMKSPTISSPIFGWLVKDTKASAVRTNAIADFKLKGDGDIHNSGETGVSGLEEESSSPGMVSKDSINEVRGLSDDTIKELVASSGKKHLLPTEVESILKDLWKNEARFCMLLCDFQKNMSSEPEKRRGYEMFFLSSLLVAPNRFRPSTSSSLGIMEHPQSVLLSKVQESNLALQHNNASSNHMDVLQRWMDLQRSVNVLYDSSKGLARSEKNAHGIRQLLEKKEGILRQKMMGKRVNYACRSVISPDPYLAVNEIGIPPVFATRLTYPEKVTPWNTKRLQEAIRNGADIHPGATHYRDNNSMYKLQAVPAKRRSIAKMLPASRGSICQPGRDPNCEFESKVVYRHLQDGDIVLVNRQPTLHKPSMMAHFVRVLPGEKTLRMHYANCSTYNADFDGDEMNVHVPQDEISRAEAMNIVDANKQYIGPRSGDAVRGLIQDHIVGAVLLTKPDTLLSREEYSQLVFGSCVPSSNCGSHHPAKVSAIEDYDTLELVHPAIWKPRPLWTGKQVITTILNHLTKGCPPFTVEQKGKIPKEYLKEDPSAQKEKEDPSARKEAHSAKKGKREDPSAQKEKDSSVNKEKQEKIQKQKQKDRSELVLYIHNNELIKGIIDKAQFGKYGIVHTVHELYGAYTAGILLSTFSRLFTLFLQLHGFTCGVDDLLLLPEKDKLRSKILSGSEVRSNEVHWKFTGADEDHKGDLVKLHMEVEKAVRSNGESDTATLDNDMKNALNGITTDVNKILFPDGLQKPFPGNCLSLMTTTGAKGGPVNMNQISSLLGQQELEGKRVPRMVSGKTLPCFPPWDISSRAGGFISDRFLTGLRPQEYYFHCMAGREG

SEQ ID NO: 160715 - protein, 1091 aa, Zea Mays
MQAVLLCKRASKPSDPSDYDPTTDTTMKVTPWNTKRLQEAIRNGADIHPGATHYRDNNSMYKLQAVPAKRRSIAKMLPASRGSICQPGRDPNCEFESKVVYRHLQDGDIVLVNRQPTLHKPSMMAHFVRVLPGEKTLRMHYANCSTYNADFDGDEMNVHVPQDEISRAEAMNIVDANKQYIGPRSGDAVRGLIQDHIVGAVLLTKPDTLLSREEYSQLVFGSCVPSSNCGSHHPAKVSAIEDYDTLELVHPAIWKPRPLWTGKQVITTILNHLTKGCPPFTVEQKGKIPKEYLKEDPSAQKEKEDPSARKEAHSAKKGKREDPSAQKEKDSSVNKEKQEKIQKQKQKDRSELVLYIHNNELIKGIIDKAQFGKYGIVHTVHELYGAYTAGILLSTFSRLFTLFLQLHGFTCGVDDLLLLPEKDKLRSKILSGSEVRSNEVHWKFTGADEDHKGDLVKLHMEVEKAVRSNGESDTATLDNDMKNALNGITTDVNKILFPDGLQKPFPGNCLSLMTTTGAKGGPVNMNQISSLLGQQELEGKRVPRMVSGKTLPCFPPWDISSRAGGFISDRFLTGLRPQEYYFHCMAGREGLVDTAVKTSRSGYLQRCLIKCLESLKVSYDHTVRDADGSIVQFCYGEDGVDVLKTSFLNEFKELADNRKAVLAKLGGCSKDPTLSKCNGYITELPPKLIDKAEEFLKHSKECCRYNIEAKELKELLKVKFLSSLVDPGEAVGVVAAQSIGEPSTQMTLNTFHLAGRGDMNVTLGIPRLKEILMTASDNIRTPVMKCPLLEHISEDDAKMVVAKLRRVRVADVVEKIEVCTVPFYNSNGRVSTLYKLQMKLYPQDQLESGLTIDECQATLRTVFVEAMEHAIEKHLDLLYKINEIRAVKIEDTEGSLLNGDEESQSRHADGGDTGTSDDDDQNDNDVDLGTDAEKMKRQEKDEMEYDDDTETEEGMGSESEESDEDPAESGDDSQEADKEHTISKSETTSVDDLPYSVKKGKKSKDDRGTAKLEEKNQNEGRLDDQKQGQIKKRRKKLKHTIHVESSDLDFEIHYAFHDEPHILLAQPLMCRGRPSGRGAWTVHGWQKVGND

SEQ ID NO: 160716 - protein, 1206 aa, Zea Mays
MQAVLLCKRASKPSDPSDYDPTTDTTMKVTPWNTKRLQEAIRNGADIHPGATHYRDNNSMYKLQAVPAKRRSIAKMLPASRGSICQPGRDPNCEFESKVVYRHLQDGDIVLVNRQPTLHKPSMMAHFVRVLPGEKTLRMHYANCSTYNADFDGDEMNVHVPQDEISRAEAMNIVDANKQYIGPRSGDAVRGLIQVSAIEDYDTLELVHPAIWKPRPLWTGKQVITTILNHLTKGCPPFTVEQKGKIPKEYLKEDPSAQKEKEDPSARKEAHSAKKGKREDPSAQKEKDSSVNKEKQEKIQKQKQKDRSELVLYIHNNELIKGIIDKAQFGKYGIVHTVHELYGAYTAGILLSTFSRLFTLFLQLHGFTCGVDDLLLLPEKDKLRSKILSGSEVRSNEVHWKFTGADEDHKGDLVKLHMEVEKAVRSNGESDTATLDNDMKNALNGITTDVNKILFPDGLQKPFPGNCLSLMTTTGAKGGPVNMNQISSLLGQQELEGKRVPRMVSGKTLPCFPPWDISSRAGGFISDRFLTGLRPQEYYFHCMAGREGLVDTAVKTSRSGYLQRCLIKCLESLKVSYDHTVRDADGSIVQFCYGEDGVDVLKTSFLNEFKELADNRKAVLAKLGGCSKDPTLSKCNGYITELPPKLIDKAEEFLKHSKECCRYNIEAKELKELLKVKFLSSLVDPGEAVGVVAAQSIGEPSTQMTLNTFHLAGRGDMNVTLGIPRLKEILMTASDNIRTPVMKCPLLEHISEDDAKMVVAKLRRVRVADVVEKIEVCTVPFYNSNGRVSTLYKLQMKLYPQDQLESGLTIDECQATLRTVFVEAMEHAIEKHLDLLYKINEIRAVKIEDTEGSLLNGDEESQSRHADGGDTGTSDDDDQNDNDVDLGTDAEKMKRQEKDEMEYDDDTETEEGMGSESEESDEDPAESGDDSQEADKEHTISKSETTSVDDLPYSVKKGKKSKDDRGTAKLEEKNQNEGRLDDQKQGQIKKRRKKLKHTIHVESSDLDFEIHYAFHDEPHILLAQIAKKIARTILVKACNNIDHCKIVKPMHNHTRLETAGVNFEVVWNLSEYISVNDITSNDIHAMLKTYGVEAARGTIIKEVSGVFEPYGINVDMRHLSLIADFMTLDGGYRPMNRLGIGQFSTSPFGKMTFETATKFIVDAATHGEADFLECPSASVCLGKPPKVGTGIFGLLQNLELEQPKNI

SEQ ID NO: 160717 - protein, 851 aa, Zea Mays
MADGQHIQAASEEVDSIHFSFYSDDEIKRISIKKITKSERLDAKNLPVPGGLLDPAMGPINDIDICKSCGQHSVRCPGHFGHIELAKPLFNPLLFMSLKNLLHVTCFHCHKFRLNKEQVDRYVNELELLVKGDIVCAKNLEDSVEEAYLSKEDENMNKTTSGDNSSSVKDKKTWTSIQLKEVLSIFSKIMKKRQKKCAKCDMKSPTISSPIFGWLVKDTKASAVRTNAIADFKLKGDGDIHNSGETGVSGLEEESSSPGMVSKDSINEVRGLSDDTIKELVASSGKKHLLPTEVESILKDLWKNEARFCMLLCDFQKNMSSEPEKRRGYEMFFLSSLLVAPNRFRPSTSSSLGIMEHPQSVLLSKVQESNLALQHNNASSNHMDVLQRWMDLQRSVNVLYDSSKGLARSEKNAHGIRQLLEKKEGILRQKMMGKRVNYACRSVISPDPYLAVNEIGIPPVFATRLTYPEKVTPWNTKRLQEAIRNGADIHPGATHYRDNNSMYKLQAVPAKRRSIAKMLPASRGSICQPGRDPNCEFESKVVYRHLQDGDIVLVNRQPTLHKPSMMAHFVRVLPGEKTLRMHYANCSTYNADFDGDEMNVHVPQDEISRAEAMNIVDANKQYIGPRSGDAVRGLIQDHIVGAVLLTKPDTLLSREEYSQLVFGSCVPSSNCGSHHPAKVSAIEDYDTLELVHPAIWKPRPLWTGKQVITTILNHLTKGCPPFTVEQKGKIPKEYLKEDPSAQKEKEDPSARKEAHSAKKGKREDPSAQKEKDSSVNKEKQEKIQKQKQKDRSELVLYIHNNELIKGIIDKAQFGKYGIVHTVHELYGAYTAGILLSTFSRLFTLFLQRRIN

SEQ ID NO: 160718 - protein, 1077 aa, Zea Mays
MQAVLLCKRASKPSDPSDYDPTTDTTMKVTPWNTKRLQEAIRNGADIHPGATHYRDNNSMYKLQAVPAKRRSIAKMLPASRGSICQPGRDPNCEFESKVVYRHLQDGDIVLVNRQPTLHKPSMMAHFVRVLPGEKTLRMHYANCSTYNADFDGDEMNVHVPQDEISRAEAMNIVDANKQYIGPRSGDAVRGLIQDHIVGAVLLTKPDTLLSREEYSQLVFGSCVPSSNCGSHHPAKVSAIEDYDTLELVHPAIWKPRPLWTGKQVITTILNHLTKGCPPFTVEQKGKIPKEYLKEDPSAQKEKEDPSARKEAHSAKKGKREDPSAQKEKDSSVNKEKQEKIQKQKQKDRSELVLYIHNNELIKGIIDKAQFGKYGIVHTVHELYGAYTAGILLSTFSRLFTLFLQLHGFTCGVDDLLLLPEKDKLRSKILSGSEVRSNEVHWKFTGADEDHKGDLVKLHMEVEKAVRSNGESDTATLDNDMKNALNGITTDVNKILFPDGLQKPFPGNCLSLMTTTGAKGGPVNMNQISSLLGQQELEGKRVPRMVSGKTLPCFPPWDISSRAGGFISDRFLTGLRPQEYYFHCMAGREGLVDTAVKTSRSGYLQRCLIKCLESLKVSYDHTVRDADGSIVQFCYGEDGVDVLKTSFLNEFKELADNRKAVLAKLGGCSKDPTLSKCNGYITELPPKLIDKAEEFLKHSKECCRYNIEAKELKELLKVKFLSSLVDPGEAVGVVAAQSIGEPSTQMTLNTFHLAGRGDMNVTLGIPRLKEILMTASDNIRTPVMKCPLLEHISEDDAKMVVAKLRRVRVADVVEKIEVCTVPFYNSNGRVSTLYKLQMKLYPQDQLESGLTIDECQATLRTVFVEAMEHAIEKHLDLLYKINEIRAVKIEDTEGSLLNGDEESQSRHADGGDTGTSDDDDQNDNDVDLGTDAEKMKRQEKDEMEYDDDTETEEGMGSESEESDEDPAESGDDSQEADKEHTISKSETTSVDDLPYSVKKGKKSKDDRGTAKLEEKNQNEGRLDDQKQGQIKKRRKKLKHTIHVESSDLDFEIHYAFHDEPHILLAQRPFHYRKLRYS

SEQ ID NO: 160719 - protein, 1067 aa, Zea Mays
MQAVLLCKRASKPSDPSDYDPTTDTTMKVTPWNTKRLQEAIRNGADIHPGATHYRDNNSMYKLQAVPAKRRSIAKMLPASRGSICQPGRDPNCEFESKVVYRHLQDGDIVLVNRQPTLHKPSMMAHFVRVLPGEKTLRMHYANCSTYNADFDGDEMNVHVPQDEISRAEAMNIVDANKQYIGPRSGDAVRGLIQDHIVGAVLLTKPDTLLSREEYSQLVFGSCVPSSNCGSHHPAKVSAIEDYDTLELVHPAIWKPRPLWTGKQVITTILNHLTKGCPPFTVEQKGKIPKEYLKEDPSAQKEKEDPSARKEAHSAKKGKREDPSAQKEKDSSVNKEKQEKIQKQKQKDRSELVLYIHNNELIKGIIDKAQFGKYGIVHTVHELYGAYTAGILLSTFSRLFTLFLQLHGFTCGVDDLLLLPEKDKLRSKILSGSEVRSNEVHWKFTGADEDHKGDLVKLHMEVEKAVRSNGESDTATLDNDMKNALNGITTDVNKILFPDGLQKPFPGNCLSLMTTTGAKGGPVNMNQISSLLGQQELEGKRVPRMVSGKTLPCFPPWDISSRAGGFISDRFLTGLRPQEYYFHCMAGREGLVDTAVKTSRSGYLQRCLIKCLESLKVSYDHTVRDADGSIVQFCYGEDGVDVLKTSFLNEFKELADNRKAVLAKLGGCSKDPTLSKCNGYITELPPKLIDKAEEFLKHSKECCRYNIEAKELKELLKVKFLSSLVDPGEAVGVVAAQSIGEPSTQMTLNTFHLAGRGDMNVTLGIPRLKEILMTASDNIRTPVMKCPLLEHISEDDAKMVVAKLRRVRVADVVEKIEVCTVPFYNSNGRVSTLYKLQMKLYPQDQLESGLTIDECQATLRTVFVEAMEHAIEKHLDLLYKINEIRAVKIEDTEGSLLNGDEESQSRHADGGDTGTSDDDDQNDNDVDLGTDAEKMKRQEKDEMEYDDDTETEEGMGSESEESDEDPAESGDDSQEADKEHTISKSETTSVDDLPYSVKKGKKSKDDRGTAKLEEKNQNEGRLDDQKQGQIKKRRKKLKHTIHVESSDLDFEIHYAFHDEPHILLAQD

SEQ ID NO: 160720 - protein, 995 aa, Zea Mays
MVPIYIQVQHITGTTIACISYRQSLPNAVPLLRCYLHLEDQFVSQGEILIVSLKARLYIGIFKMVTLYLSIGSTYNADFDGDEMNVHVPQDEISRAEAMNIVDANKQYIGPRSGDAVRGLIQDHIVGAVLLTKPDTLLSREEYSQLVFGSCVPSSNCGSHHPAKVSAIEDYDTLELVHPAIWKPRPLWTGKQVITTILNHLTKGCPPFTVEQKGKIPKEYLKEDPSAQKEKEDPSARKEAHSAKKGKREDPSAQKEKDSSVNKEKQEKIQKQKQKDRSELVLYIHNNELIKGIIDKAQFGKYGIVHTVHELYGAYTAGILLSTFSRLFTLFLQLHGFTCGVDDLLLLPEKDKLRSKILSGSEVRSNEVHWKFTGADEDHKGDLVKLHMEVEKAVRSNGESDTATLDNDMKNALNGITTDVNKILFPDGLQKPFPGNCLSLMTTTGAKGGPVNMNQISSLLGQQELEGKRVPRMVSGKTLPCFPPWDISSRAGGFISDRFLTGLRPQEYYFHCMAGREGLVDTAVKTSRSGYLQRCLIKCLESLKVSYDHTVRDADGSIVQFCYGEDGVDVLKTSFLNEFKELADNRKAVLAKLGGCSKDPTLSKCNGYITELPPKLIDKAEEFLKHSKECCRYNIEAKELKELLKVKFLSSLVDPGEAVGVVAAQSIGEPSTQMTLNTFHLAGRGDMNVTLGIPRLKEILMTASDNIRTPVMKCPLLEHISEDDAKMVVAKLRRVRVADVVEKIEVCTVPFYNSNGRVSTLYKLQMKLYPQDQLESGLTIDECQATLRTVFVEAMEHAIEKHLDLLYKINEIRAVKIEDTEGSLLNGDEESQSRHADGGDTGTSDDDDQNDNDVDLGTDAEKMKRQEKDEMEYDDDTETEEGMGSESEESDEDPAESGDDSQEADKEHTISKSETTSVDDLPYSVKKGKKSKDDRGTAKLEEKNQNEGRLDDQKQGQIKKRRKKLKHTIHVESSDLDFEIHYAFHDEPHILLAQD

SEQ ID NO: 160721 - protein, 73 aa, Zea Mays
MSKLWHAFRLDFGYSTNPCRVPPYCGTPKLPMAHSYLPLSSSGDVTWMLFFSTTNLPAAASANASTTTTRSAS

SEQ ID NO: 160722 - protein, 390 aa, Zea Mays
MDRLTVMAPPLLVLLLLLLSRCSAAASRRGGGWWEEGEGEWRPSEEEEKGKGKGRGLFLLHRVEKVVESEGGQVRVVRGQPWPPASFACREGLMHIGFITMEPKTLFVPQYLDSSITLFVQRGEAKVGYIHKDELVERKLKMGDVLHIDAGSTFYMVNPGKGQRLQIICSVDASDSLGFGPPYQAFFLGGAGDPASVIAGFGPKTLTRAFNATYDELARILLPRTGGPIVYYTADAEPESGAAEEERGQVDGHDGVLDRGARREGAGAWVPGGRGDGGDECGGVDAGAAREPSGDGVRRGAGRGRHGPGGVPERVPGDERGGAPRRRVLDPALLPLLPGGGAGRALRVLRLHHLGAPQPAAVPGRRLLGAPYHARAGDRRRVRRSREGVQ

SEQ ID NO: 160723 - protein, 751 aa, Zea Mays
MSAPKLDRNPSIRDRVEDTLHAHRNELVALLSKYVNKGKGILQPHHILDALDEVQGSGGRALAEGPFLDVLRSAQEAIVLPPFVAIAVRPRPGVWEYVRVNVHELSVEQLTVSEYLRFKEELVDGQHNDPYVLELDFEPFNVSVPRPNRSSSIGNGVQFLNRHLSSIMFRNRDCLEPLLDFLRGHRHKGHVMMLNDRIQSLGRLQSVLTKAEEHLSKLPADTPYSQFAYKFQEWGLEKGWGDTAGHVLEMIHLLLDIIQAPDPSTLEKFLGRIPMIFNVVVVSPHGYFGQANVLGLPDTGGQIVYILDQVRALENEMVLRLKKQGLDVSPKILIDAAGEIAAELQGTPDFIIGNYSDGNLVASLLSYKMGITQCNIAHALEKTKYPDSDIFWKNFDEKYHFSCQFTADIIAMNNADFIITSTYQEIAGSKNTVGQYESHTAFTLPGLYRVVHGIDVFDPKFNIVSPGADMSIYFPHTEKAKRLTSLHGSIENLIYDPEQNDEHIGHLDDRSKPILFSMARLDRVKNITGLVEAFAKCAKLRELVNLVVVAGYNDVNKSKDREEIAEIEKMHELIKTHNLFGQFRWISAQTNRARNGELYRYIADTHGAFVQPAFYEAFGLTVVEAMTCGLPTFATLHGGPAEIIEHGVSGFHIDPYHPEQAANLMADFFERCKQDPDHWVKISGAGLQRIYEKYTWKIYSERLMTLAGVYGFWKYVSKLERLETRRYLEMFYILKFRELAKTVPLAIDQPQ

SEQ ID NO: 160724 - protein, 431 aa, Zea Mays
MERVHIKKRSNTQKDAAGEIAAELQGTPDFIIGNYSDGNLVASLLSYKMGITQCNIAHALEKTKYPDSDIFWKNFDEKYHFSCQFTADIIAMNNADFIITSTYQEIAGSKNTVGQYESHTAFTLPGLYRVVHGIDVFDPKFNIVSPGADMSIYFPHTEKAKRLTSLHGSIENLIYDPEQNDEHIGHLDDRSKPILFSMARLDRVKNITGLVEAFAKCAKLRELVNLVVVAGYNDVNKSKDREEIAEIEKMHELIKTHNLFGQFRWISAQTNRARNGELYRYIADTHGAFVQPAFYEAFGLTVVEAMTCGLPTFATLHGGPAEIIEHGVSGFHIDPYHPEQAANLMADFFERCKQDPDHWVKISGAGLQRIYEKYTWKIYSERLMTLAGVYGFWKYVSKLERLETRRYLEMFYILKFRELAKTVPLAIDQPQ

SEQ ID NO: 160725 - protein, 73 aa, Zea Mays
MHSHANVQLMCGGTVVANATTSITGSFILTPLLGSGTGIAGGGSSTIIATIAGQPFTIINEMIIFTTGLSSLA

SEQ ID NO: 160726 - protein, 136 aa, Zea Mays
MAPTKSHVLLAALLTVVAAVGQTPRAAEGFNIPGLGSMLNPIPVVAGVVPCSIGSSINPALVPGFPNANVQLMCGGTVVANATTSITGSFILTPLLGSGTGIAGGGSSTIIATIAGQPFTIINEMIIFTTGLSSLA

SEQ ID NO: 160727 - protein, 79 aa, Zea Mays
MAPTKSHVLLAALLTVVAAVGQTPRAAEGFNIPGLGSMLNPIPVVAGVVPCSIGSSINPALVPGFPITCRSLILYVSLV

SEQ ID NO: 160728 - protein, 71 aa, Zea Mays
MPQLGSRRGPCRVFPPALLCMSSLTVCGGWVHIYACNVSWFEVWTTRVVLFSVWYLVAEGVCLNSVNCDVG

SEQ ID NO: 160729 - protein, 92 aa, Zea Mays
MSGHTQPEGPHQLDSKHAANSCRKNVPGTSFVSDLRDHIHEFINASADEHRTCFTKTLKRMFDMSKTVTDRSSEAEEAGPESVLPLQTTVSR

SEQ ID NO: 160730 - protein, 309 aa, Zea Mays
MTTSASPLFPNPRKRHLDASPLPRHFHGPQSQTRLSQRHRRRFFLPLPPKARSFASDMGNHMSSAFGWPSDDGRGLLCCWIGKARGLTVAMDVEAGTGLHLVDRRRVTDSRKTTLKEEAVKPPQWKKRRPFYKEALEAAATHYDPRLEAIGIEIRLQKEKLAYIPKSDKAAKEDMSELFKPLTAEEENDVHDCLYSRGSSSKVLVLHEPSNIEVSKEKFQCLRRGCWLNDEVINLYLELLKEREKREPNRFLKCHFFNTFFYKKLACGKNGYDYKSVKRWTSQRKLGYELIECDKVIYLSLCIKMYIGV

SEQ ID NO: 160731 - protein, 281 aa, Zea Mays
MTTSASPLFPNPRKRHLDASPLPRHFHGPQSQTRLSQRHRRRFFLPLPPKARSFASDMGNHMSSAFGWPSDDGRGLLCCWIGKARGLTVAMDVEAGTGLHLVDRRRVTDSRKTTLKEEAVKPPQWKKRRPFYKEALEAAATHYDPRLEAIGIEIRLQKEKLAYIPKSDKAAKEDMSELFKPLTAEEENDVHDCLYSRGSSSKVLVLHEPSNIEVSKEKFQCLRRGCWLNDEVINLYLELLKEREKREPNSLLVEKMVMITNLLKDGPPKGSWDMNSLNAIK

SEQ ID NO: 160732 - protein, 86 aa, Zea Mays
MVGNITSAATVDEQVIDDPGVQRVEVAEQELIEGSYALDHFYLPNNVLYNHFGMNQGVCIVDQPYDSHELTPLVSYAHYSPQLVEL

SEQ ID NO: 160733 - protein, 442 aa, Zea Mays
MELSRWNQMLNRDIEVLKGNANISKMRSFLTRVGLECTDLEAILVKDRVLTNECIDKIIGFALSHQLKNCTNPDPPLSNVQFVLSSESLKHGIDMLESIQSGSKSSTKRKSLKDIATENEFEKRLLADVIPPHEIGVTFEDIGALESVKDTLKELVMLPLQRPELFNRGQLMKPCKGILLFGPPGTGKTMLAKAVATEAGANFINISMSSISSKWLGEGEKFVKAVFSLASKIAPSVIFVDEVDGMLGRRENPGEHEAMRKMKNEFMVNWDGLRTKEKERVLVLAATNRPFDLDEAVIRRLPRRLMVNLPDASNRRKILSVILAKEDLADDVDLEAIANLTEGYSGSDLKNLCVTAAHRPIREILEKEKKERASAETENRPLPLSHTSNDVRALRISDFIHAHEQVCASVSSDSSNMNELVQWNDLYGEGGSRKKTTLSYFM

SEQ ID NO: 160734 - protein, 667 aa, Zea Mays
MLFGGQTSKEPETYKKGDRVRYIGSVQSTGVILDGQSPPDFGSQGEIFLPFEENRSSKVGVRFDKKILGGNDLGGNCEVDHGLFCPVDSLCLDIPGWEVTSKHPLDVIFEFISEEIRHGPFILFLKDTEKICGNNDYYHGLKSKLKHFPAGAFIIGSQIQPANRKEKAKGSSPFLSKFPYSQTILDLALQDIDAINGNNKETSKAAKHLIKLFPNKVILEAPQDEMELSRWNQMLNRDIEVLKGNANISKMRSFLTRVGLECTDLEAILVKDRVLTNECIDKIIGFALSHQLKNCTNPDPPLSNVQFVLSSESLKHGIDMLESIQSGSKSSTKRKSLKDIATENEFEKRLLADVIPPHEIGVTFEDIGALESVKDTLKELVMLPLQRPELFNRGQLMKPCKGILLFGPPGTGKTMLAKAVATEAGANFINISMSSISSKWLGEGEKFVKAVFSLASKIAPSVIFVDEVDGMLGRRENPGEHEAMRKMKNEFMVNWDGLRTKEKERVLVLAATNRPFDLDEAVIRRLPRRLMVNLPDASNRRKILSVILAKEDLADDVDLEAIANLTEGYSGSDLKNLCVTAAHRPIREILEKEKKERASAETENRPLPLSHTSNDVRALRISDFIHAHEQVCASVSSDSSNMNELVQWNDLYGEGGSRKKTTLSYFM

SEQ ID NO: 160735 - protein, 798 aa, Zea Mays
MVETRRSAAAKRPAAGEEDKGAPASPASAPAENAGAGPRAGDDVASSQPPKRAKVGCTEADTEKPLVAPAEVGTVAGPLPNTAGLQALTGAMDKLEALLRPKEGQSNPAGHKRGTNDKDITAKIKRAMDLSEDLSAKIKKTKDNVAGILNKPQAAATSRRQEPWCRLISQYTMHPTLSIYGALFTIGHGAHHDFRLGESSTASPVCRLKQAKRGALLEVFESKVVRVNGKSLDKAAKVTLNGGDEIIFRSPVRHAYIFEQLHQEKSSTPALSSTCSSIQQGQCSHFKDIQGHLSSKGHKVPTIYFGRGRSSLLPSGSSADPLLLNLCKTMEGQSQHSSEDNISSGRFQLIKEDLINATVDASDIFESFDSCPYYLSDHTKCALMSSAYVHLHCKDYLKFTKDISSLSQRVLLSGPTGTDIYQEYLVKALAKNFGARLLTVDSSMLFGGQTSKEPETYKKGDRVRYIGSVQSTGVILDGQSPPDFGSQGEIFLPFEENRSSKVGVRFDKKILGGNDLGGNCEVDHGLFCPVDSLCLDIPGWEVTSKHPLDVIFEFISEEIRHGPFILFLKDTEKICGNNDYYHGLKSKLKHFPAGAFIIGSQIQPANRKEKAKGSSPFLSKFPYSQTILDLALQDIDAINGNNKETSKAAKHLIKLFPNKVILEAPQDEMELSRWNQMLNRDIEVLKGNANISKMRSFLTRVGLECTDLEAILVKDRVLTNECIDKIIGFALSHQLKNCTNPDPPLSNVQFVLSSESLKHGIDMLESIQSGSKSSTKRKSLKMLSLHMKSVLPLRTLEL

SEQ ID NO: 160736 - protein, 1102 aa, Zea Mays
MVETRRSAAAKRPAAGEEDKGAPASPASAPAENAGAGPRAGDDVASSQPPKRAKVGCTEADTEKPLVAPAEVGTVAGPLPNTAGLQALTGAMDKLEALLRPKEGQSNPAGHKRGTNDKDITAKIKRAMDLSEDLSAKIKKTKDNVAGILNKPQAAATSRRQEPWCRLISQYTMHPTLSIYGALFTIGHGAHHDFRLGESSTASPVCRLKQAKRGALLEVFESKVVRVNGKSLDKAAKVTLNGGDEIIFRSPVRHAYIFEQLHQEKSSTPALSSTCSSIQQGQCSHFKDIQGHLSSKGHKVPTIYFGRGSSADPLLLNLCKTMEGQSQHSSEDNISSGRFQLIKEDLINATVDASDIFESFDSCPYYLSDHTKCALMSSAYVHLHCKDYLKFTKDISSLSQRVLLSGPTGTDIYQEYLVKALAKNFGARLLTVDSSMLFGGQTSKEPETYKKGDRVRYIGSVQSTGVILDGQSPPDFGSQGEIFLPFEENRSSKVGVRFDKKILGGNDLGGNCEVDHGLFCPVDSLCLDIPGWEVTSKHPLDVIFEFISEEIRHGPFILFLKDTEKICGNNDYYHGLKSKLKHFPAGAFIIGSQIQPANRKEKAKGSSPFLSKFPYSQTILDLALQDIDAINGNNKETSKAAKHLIKLFPNKVILEAPQDEMELSRWNQMLNRDIEVLKGNANISKMRSFLTRVGLECTDLEAILVKDRVLTNECIDKIIGFALSHQLKNCTNPDPPLSNVQFVLSSESLKHGIDMLESIQSGSKSSTKRKSLKDIATENEFEKRLLADVIPPHEIGVTFEDIGALESVKDTLKELVMLPLQRPELFNRGQLMKPCKGILLFGPPGTGKTMLAKAVATEAGANFINISMSSISSKWLGEGEKFVKAVFSLASKIAPSVIFVDEVDGMLGRRENPGEHEAMRKMKNEFMVNWDGLRTKEKERVLVLAATNRPFDLDEAVIRRLPRRLMVNLPDASNRRKILSVILAKEDLADDVDLEAIANLTEGYSGSDLKNLCVTAAHRPIREILEKEKKERASAETENRPLPLSHTSNDVRALRISDFIHAHEQVCASVSSDSSNMNELVQWNDLYGEGGSRKKTTLSYFM

SEQ ID NO: 160737 - protein, 1101 aa, Zea Mays
MVETRRSAAAKRPAAGEEDKGAPASPASAPAENAGAGPRAGDDVASSQPPKRAKVGCTEADTEKPLVAPAEVGTVAGPLPNTAGLQALTGAMDKLEALLRPKEGQSNPAGHKRGTNDKDITAKIKRAMDLSEDLSAKIKKTKDNVAGILNKPQAAATSRRQEPWCRLISQYTMHPTLSIYGALFTIGHGAHHDFRLGESSTASPVCRLKQAKRGALLEVFESKVVRVNGKSLDKAAKVTLNGGDEIIFRSPVRHAYIFEQLHQEKSSTPALSSTCSSIQQGQCSHFKDIQGHLSSKGHKVPTIYFGRGRSSLLPSGSSADPLLLNLCKTMEGQSQHSSEDNISSGRFQLIKEDLINATVDASDIFESFDSCPYYLSDHTKCALMSSAYVHLHCKDYLKFTKDISSLSQRVLLSGPTGTDIYQEYLVKALAKNFGARLLTVDSSMLFGGQTSKEPETYKKGDRVRYIGSVQSTGVILDGQSPPDFGSQGEIFLPFEENRSSKVGVRFDKKILGGNDLGGNCEVDHGLFCPGWEVTSKHPLDVIFEFISEEIRHGPFILFLKDTEKICGNNDYYHGLKSKLKHFPAGAFIIGSQIQPANRKEKAKGSSPFLSKFPYSQTILDLALQDIDAINGNNKETSKAAKHLIKLFPNKVILEAPQDEMELSRWNQMLNRDIEVLKGNANISKMRSFLTRVGLECTDLEAILVKDRVLTNECIDKIIGFALSHQLKNCTNPDPPLSNVQFVLSSESLKHGIDMLESIQSGSKSSTKRKSLKDIATENEFEKRLLADVIPPHEIGVTFEDIGALESVKDTLKELVMLPLQRPELFNRGQLMKPCKGILLFGPPGTGKTMLAKAVATEAGANFINISMSSISSKWLGEGEKFVKAVFSLASKIAPSVIFVDEVDGMLGRRENPGEHEAMRKMKNEFMVNWDGLRTKEKERVLVLAATNRPFDLDEAVIRRLPRRLMVNLPDASNRRKILSVILAKEDLADDVDLEAIANLTEGYSGSDLKNLCVTAAHRPIREILEKEKKERASAETENRPLPLSHTSNDVRALRISDFIHAHEQVCASVSSDSSNMNELVQWNDLYGEGGSRKKTTLSYFM

SEQ ID NO: 160738 - protein, 247 aa, Zea Mays
MELSMSGSSLRTFGRCVTFLARVASELVLQAHPAKLEMHTLNSSRSAYASISLARDFFDQYHLDAAASAPSSTPLQCSVLLKSLLAVLRTPHAALDRLAVSLPEPDAPKLQITLHCLNGVRKTYWIVCSAEPEVQSLSLDRGRFPSRLAIRPRELARLLSNFQSSLQELTIIATDPASGLPDASGDVGGKAVELRSYNDPTKDDCDTRLHTQLWIDPAEEFVEFVHAGDPVDVTFGVKELKEQQGIG

SEQ ID NO: 160739 - protein, 344 aa, Zea Mays
MELSMSGSSLRTFGRCVTFLARVASELVLQAHPAKLEMHTLNSSRSAYASISLARDFFDQYHLDAAASAPSSTPLQCSVLLKSLLAVLRTPHAALDRLAVSLPEPDAPKLQITLHCLNGVRKTYWIVCSAEPEVQSLSLDRGRFPSRLAIRPRELARLLSNFQSSLQELTIIATDPASGLPDASGDVGGKAVELRSYNDPTKDDCDTRLHTQLWIDPAEEFVEFVHAGDPVDVTFGVKELKAFLTFCEGCEVDILLFFEKTGEPVLLVPRFGLDDGAASDFEATLVLATMTVSQLSDSDDAQQPATSAQNAGEPGAAAPTLVPENVSNHTKIWSELSEEEKRKH

SEQ ID NO: 160740 - protein, 151 aa, Zea Mays
MTTPETIGETAGEVVAVADMHQRKAEMARQADAFIALPGGYGTLEELLEMITWAQLGIHRKPVGLVNVDGYYDPLLAFIDQAVEHGFISPSARHIIVQAPTAQDLMAKLEEYVPYYDRVASGLNWETRAVVVTDAAGAGGSGPAGISVPGI

SEQ ID NO: 160741 - protein, 859 aa, Zea Mays
MESESLDFEDNGDHQPSSEASLASDVVYDDSLVCPCIGSEHQAEIPNLATEDECRKLMASSHNDSIFHGYGYPVVVGLALPITWASPSEVDKTEEVLQTQKCSEFGTKGSTGDVHSQVTSTCATSNDTGICAATFQYPHTVVPVVQIKSDSNQAYDEKMVPCPTQEGQNVTNNSIMQQRETKQLSPLPYSPVALWSDLEAEVFLLGLYIFGKNLNLLSRFLGTKTVGDVLAYYYGKFYRRDTYKRWSDCRKAKTRKCILGERIFQGWRQQELISRLKSKIPKEAHDSLIEVFKSFSDSQTSLNEFVFSLKSTVGAETFVEVVGVGKGKHDLTGFVTDQSKPNHALSVHSDLPTGKDCSSLASEDIIKFLNGDFRRSKTRSNDIFWEAVWPRLLAKGWHSEQPKDVSTTKSCLVFLVPGIKKFSRSKLTKGTHYFDSVSDVLKRVAADPVLLELKVDAINNGLTAEENGSITDVKLNQDSPLDGYQELPKFTIIDTSLVEGEEPFNIRELRNLPADANITFLLSQHSSNMVSYSSSEEEAANDRLSDDQEDCGRVKAEAKEIEMVSAGSLQNMVTANGHSSNVNDKIDLTGIYGIKTKPERRKYLSPVSKRRRLNSCSNEQASRRSFSFSKGGGFEKQKSKPPLISSKPAAVEVGDTFQSKTISSCSTKEKPSEHTADALNSLIDDEQNARMVMEVEAVAEVHSKVIAVQPKFVKERAEFIGPVDLNKLETLHDDKASRSIDTTSLGNLGSMKVDEAPSSSDKNMACDPSGAAGRPVSEAPDPALQVNARRHGTRNRPPTAKALEAVAFGLLGSGKRKGDLKNRATSRPSQRARKSAKDLVPVASSGDAKASCIDAEEQR

SEQ ID NO: 160742 - protein, 372 aa, Zea Mays
MEAKMESESLDFEDNGDHQPSSEASLASDVVYDDSLVCPCIGSEHQAEIPNLATEDECRKLMASSHNDSIFHGYGYPVVVGLALPITWASPSEVDKTEEVLQTQKCSEFGTKGSTGDVHSQVTSTCATSNDTGICAATFQYPHTVVPVVQIKSDSNQAYDEKMVPCPTQEGQNVTNNSIMQQRETKQLSPLPYSPVALWSDLEAEVFLLGLYIFGKNLNLLSRFLGTKTVGDVLAYYYGKFYRRDTYKRWSDCRKAKTRKCILGERIFQGWRQQELISRLKSKIPKEAHDSLIEVFKSFSDSQTSLNEFVFSLKSTVGAETFVEVVGVGKGKHDLTGFVTDQSKPNHALSVHSDLPTVMSLKEWQQILFFLS

SEQ ID NO: 160743 - protein, 65 aa, Zea Mays
MRHRETGKGSKQVISSPPLYHLSLRLWGITTPEKTTNRGYDLRSRGPPALNAQALDTTKYQFPLM

SEQ ID NO: 160744 - protein, 1072 aa, Zea Mays
MSGSPYQPSAERMDQNPSTVAVEPISRNNGFGAPSASDSIKKKKFLSTNDEESIAGSDSLDTSLSGSDSKSLKFQTKVCLSNDLPRENAVIYSGLGLDISPRSSMEESPNGLGGLSPECSNVPFESPRTILQVMTCLPVPGGFLLSPLHGNLLQLRNKVAPVLKNLETHLDMENVSRALEGRSQSFHPLGLIRGNVTKQMRPCSKKKVAVDTKTSKYKGDASATMNNEVNIQVPASQKEKMNTNNKNEFEVGSARKEIPASVKHGELYMQPASSVSTMNAYHVPAPVVIEDHWVRCDICHKLRLLPYGMNPSMLPKKWKCTMLHWLPGMNRCDISEDETTGALNALFAIPATATTLSSGGIMERNKAYPKLKTKIRIDQDEQKSYKKTKIEAWHQIDRGQDHRCDSDGVEVPDEHKALLAKAKAMKGSHETDDMSLCKKNIASGYDSSENVNNVNALDVPFHSEKKEHPSDVDILDLSCKKNAVKKLEIQLNSLHCISNGPQKNLKEKKSNKLKSKEMASKEDSRHGKVQHADAVLSSLGHLNYELGADNKFVTGKESLSEQLETLPAKQVLDLAEAPGRDVAYLQSSTTVSSSSSKISSSRRNTNSQEANDSPIKSASSLPLRDFSIKMISGNRKDGTVDASLGNTHNLARYQNSEVIALNYGQQAGNFEGDQVAGEPNFHGSLQGISDSNIKEIPQSAGAQVSNITGFGRSLDNSLPEASCREDLTVNDTVVGRGDHQLCSGEQKDFNMEVRLPLPDQHCFGRINTESGSVRHESKNIEVRQGSGTAQRLGMLFKKEKSHLRILNRDIQNHVNQVVNFPLKGGKQKVCPTSVKSESLKMKAKLVRFNVETGVQHGSVKQVTSSTLDTSPMRKDGSMITFALKEARDLKHKANDLKNKGQELESTGLYFEAALKFLHVAFLLETPSFDISRQGGGGRSMKMYSETAKLCNFCAYEYERCKKMASAALAYKCVEVAYLKAAYYKHRTATKDQQELQAAVQITRGEPPSPSALDIDNLNSHGSSNASSLKGDNSPHVPGNHLPLAIHNQAQLLRLLAYFSCTLFGKKNWSSCT

SEQ ID NO: 160745 - protein, 1080 aa, Zea Mays
MSGSPYQPSAERMDQNPSTVAVEPISRNNGFGAPSASDSIKKKKFLSTNDEESIAGSDSLDTSLSGSDSKSLKFQTKVCLSNDLPRENAVIYSGLGLDISPRSSMEESPNGLGGLSPECSNVPFESPRTILQVMTCLPVPGGFLLSPLHGNLLQLRNKVAPVLKNLETHLDMENVSRALEGRSQSFHPLGLIRGNVTKQMRPCSKKKVAVDTKTSKYKGDASATMNNEVNIQVPASQKEKMNTNNKNEFEVGSARKEIPASVKHGELYMQPASSVSTMNAYHVPAPVVIEDHWVRCDICHKLRLLPYGMNPSMLPKKWKCTMLHWLPGMNRCDISEDETTGALNALFAIPATATTLSSGSPHTAVTGGIMERNKAYPKLKTKIRIDQDEQKSYKKTKIEAWHQIDRGQDHRCDSDGVEVPDEHKALLAKAKAMKGSHETDDMSLCKKNIASGYDSSENVNNVNALDVPFHSEKKEHPSDVDILDLSCKKNAVKKLEIQLNSLHCISNGPQKNLKEKKSNKLKSKEMASKEDSRHGKVQHADAVLSSLGHLNYELGADNKFVTGKESLSEQLETLPAKQVLDLAEAPGRDVAYLQSSTTVSSSSSKISSSRRNTNSQEANDSPIKSASSLPLRDFSIKMISGNRKDGTVDASLGNTHNLARYQNSEVIALNYGQQAGNFEGDQVAGEPNFHGSLQGISDSNIKEIPQSAGAQVSNITGFGRSLDNSLPEASCREDLTVNDTVVGRGDHQLCSGEQKDFNMEVRLPLPDQHCFGRINTESGSVRHESKNIEVRQGSGTAQRLGMLFKKEKSHLRILNRDIQNHVNQVVNFPLKGGKQKVCPTSVKSESLKMKAKLVRFNVETGVQHGSVKQVTSSTLDTSPMRKDGSMITFALKEARDLKHKANDLKNKGQELESTGLYFEAALKFLHVAFLLETPSFDISRQGGGGRSMKMYSETAKLCNFCAYEYERCKKMASAALAYKCVEVAYLKAAYYKHRTATKDQQELQAAVQITRGEPPSPSALDIDNLNSHGSSNASSLKGDNSPHVPGNHLPLAIHNQAQLLRLLAYFSCTLFGKKNWSSCT

SEQ ID NO: 160746 - protein, 1121 aa, Zea Mays
MSGSPYQPSAERMDQNPSTVAVEPISRNNGFGAPSASDSIKKKKFLSTNDEESIAGSDSLDTSLSGSDSKSLKFQTKVCLSNDLPRENAVIYSGLGLDISPRSSMEESPNGLGGLSPECSNVPFESPRTILQVMTCLPVPGGFLLSPLHGNLLQLRNKVAPVLKNLETHLDMENVSRALEGRSQSFHPLGLIRGNVTKQMRPCSKKKVAVDTKTSKYKGDASATMNNEVNIQVPASQKEKMNTNNKNEFEVGSARKEIPASVKHGELYMQPASSVSTMNAYHVPAPVVIEDHWVRCDICHKLRLLPYGMNPSMLPKKWKCTMLHWLPGMNRCDISEDETTGALNALFAIPATATTLSSGGIMERNKAYPKLKTKIRIDQDEQKSYKKTKIEAWHQIDRGQDHRCDSDGVEVPDEHKALLAKAKAMKGSHETDDMSLCKKNIASGYDSSENVNNVNALDVPFHSEKKEHPSDVDILDLSCKKNAVKKLEIQLNSLHCISNGPQKNLKEKKSNKLKSKEMASKEDSRHGKVQHADAVLSSLGHLNYELGADNKFVTGKESLSEQLETLPAKQVLDLAEAPGRDVAYLQSSTTVSSSSSKISSSRRNTNSQEANDSPIKSASSLPLRDFSIKMISGNRKDGTVDASLGNTHNLARYQNSEVIALNYGQQAGNFEGDQVAGEPNFHGSLQGISDSNIKEIPQSAGAQVSNITGFGRSLDNSLPEASCREDLTVNDTVVGRGDHQLCSGEQKDFNMEVRLPLPDQHCFGRINTESGSVRHESKNIEVRQGSGTAQRLGMLFKKEKSHLRILNRDIQNHVNQVVNFPLKGGKQKVCPTSVKSESLKMKAKLVRFNVETGVQHGSVKQVTSSTLDTSPMRKDGSMITFALKEARDLKHKANDLKNKGQELESTGLYFEAALKFLHVAFLLETPSFDISRQGGGGRSMKMYSETAKLCNFCAYEYERCKKMASAALAYKCVEVAYLKAAYYKHRTATKDQQELQAAVQITRGEPPSPSALDIDNLNSHGSSNASSLKGDNSPHVPGNHLPLAIHNQAQLLRLLAYTNDMNLAFDATRKAESVIASATGCPERGVVGDGLASVKAVLDLNFNNVNELLRLVRVSMESISS

SEQ ID NO: 160747 - protein, 801 aa, Zea Mays
MNRCDISEDETTGALNALFAIPATATTLSSGSPHTAVTGGIMERNKAYPKLKTKIRIDQDEQKSYKKTKIEAWHQIDRGQDHRCDSDGVEVPDEHKALLAKAKAMKGSHETDDMSLCKKNIASGYDSSENVNNVNALDVPFHSEKKEHPSDVDILDLSCKKNAVKKLEIQLNSLHCISNGPQKNLKEKKSNKLKSKEMASKEDSRHGKVQHADAVLSSLGHLNYELGADNKFVTGKESLSEQLETLPAKQVLDLAEAPGRDVAYLQSSTTVSSSSSKISSSRRNTNSQEANDSPIKSASSLPLRDFSIKMISGNRKDGTVDASLGNTHNLARYQNSEVIALNYGQQAGNFEGDQVAGEPNFHGSLQGISDSNIKEIPQSAGAQVSNITGFGRSLDNSLPEASCREDLTVNDTVVGRGDHQLCSGEQKDFNMEVRLPLPDQHCFGRINTESGSVRHESKNIEVRQGSGTAQRLGMLFKKEKSHLRILNRDIQNHVNQVVNFPLKGGKQKVCPTSVKSESLKMKAKLVRFNVETGVQHGSVKQVTSSTLDTSPMRKDGSMITFALKEARDLKHKANDLKNKGQELESTGLYFEAALKFLHVAFLLETPSFDISRQGGGGRSMKMYSETAKLCNFCAYEYERCKKMASAALAYKCVEVAYLKAAYYKHRTATKDQQELQAAVQITRGEPPSPSALDIDNLNSHGSSNASSLKGDNSPHVPGNHLPLAIHNQAQLLRLLAYTNDMNLAFDATRKAESVIASATGCPERGVVGDGLASVKAVLDLNFNNVNELLRLVRVSMESISS

SEQ ID NO: 160748 - protein, 752 aa, Zea Mays
MNRCDISEDETTGALNALFAIPATATTLSSGSPHTAVTGGIMERNKAYPKLKTKIRIDQDEQKSYKKTKIEAWHQIDRGQDHRCDSDGVEVPDEHKALLAKAKAMKGSHETDDMSLCKKNIASGYDSSENVNNVNALDVPFHSEKKEHPSDVDILDLSCKKNAVKKLEIQLNSLHCISNGPQKNLKEKKSNKLKSKEMASKEDSRHGKVQHADAVLSSLGHLNYELGADNKFVTGKESLSEQLETLPAKQVLDLAEAPGRDVAYLQSSTTVSSSSSKISSSRRNTNSQEANDSPIKSASSLPLRDFSIKMISGNRKDGTVDASLGNTHNLARYQNSEVIALNYGQQAGNFEGDQVAGEPNFHGSLQGISDSNIKEIPQSAGAQVSNITGFGRSLDNSLPEASCREDLTVNDTVVGRGDHQLCSGEQKDFNMEVRLPLPDQHCFGRINTESGSVRHESKNIEVRQGSGTAQRLGMLFKKEKSHLRILNRDIQNHVNQVVNFPLKGGKQKVCPTSVKSESLKMKAKLVRFNVETGVQHGSVKQVTSSTLDTSPMRKDGSMITFALKEARDLKHKANDLKNKGQELESTGLYFEAALKFLHVAFLLETPSFDISRQGGGGRSMKMYSETAKLCNFCAYEYERCKKMASAALAYKCVEVAYLKAAYYKHRTATKDQQELQAAVQITRGEPPSPSALDIDNLNSHGSSNASSLKGDNSPHVPGNHLPLAIHNQAQLLRLLAYFSCTLFGKKNWSSCT

SEQ ID NO: 160749 - protein, 1129 aa, Zea Mays
MSGSPYQPSAERMDQNPSTVAVEPISRNNGFGAPSASDSIKKKKFLSTNDEESIAGSDSLDTSLSGSDSKSLKFQTKVCLSNDLPRENAVIYSGLGLDISPRSSMEESPNGLGGLSPECSNVPFESPRTILQVMTCLPVPGGFLLSPLHGNLLQLRNKVAPVLKNLETHLDMENVSRALEGRSQSFHPLGLIRGNVTKQMRPCSKKKVAVDTKTSKYKGDASATMNNEVNIQVPASQKEKMNTNNKNEFEVGSARKEIPASVKHGELYMQPASSVSTMNAYHVPAPVVIEDHWVRCDICHKLRLLPYGMNPSMLPKKWKCTMLHWLPGMNRCDISEDETTGALNALFAIPATATTLSSGSPHTAVTGGIMERNKAYPKLKTKIRIDQDEQKSYKKTKIEAWHQIDRGQDHRCDSDGVEVPDEHKALLAKAKAMKGSHETDDMSLCKKNIASGYDSSENVNNVNALDVPFHSEKKEHPSDVDILDLSCKKNAVKKLEIQLNSLHCISNGPQKNLKEKKSNKLKSKEMASKEDSRHGKVQHADAVLSSLGHLNYELGADNKFVTGKESLSEQLETLPAKQVLDLAEAPGRDVAYLQSSTTVSSSSSKISSSRRNTNSQEANDSPIKSASSLPLRDFSIKMISGNRKDGTVDASLGNTHNLARYQNSEVIALNYGQQAGNFEGDQVAGEPNFHGSLQGISDSNIKEIPQSAGAQVSNITGFGRSLDNSLPEASCREDLTVNDTVVGRGDHQLCSGEQKDFNMEVRLPLPDQHCFGRINTESGSVRHESKNIEVRQGSGTAQRLGMLFKKEKSHLRILNRDIQNHVNQVVNFPLKGGKQKVCPTSVKSESLKMKAKLVRFNVETGVQHGSVKQVTSSTLDTSPMRKDGSMITFALKEARDLKHKANDLKNKGQELESTGLYFEAALKFLHVAFLLETPSFDISRQGGGGRSMKMYSETAKLCNFCAYEYERCKKMASAALAYKCVEVAYLKAAYYKHRTATKDQQELQAAVQITRGEPPSPSALDIDNLNSHGSSNASSLKGDNSPHVPGNHLPLAIHNQAQLLRLLAYTNDMNLAFDATRKAESVIASATGCPERGVVGDGLASVKAVLDLNFNNVNELLRLVRVSMESISS

SEQ ID NO: 160750 - protein, 1222 aa, Zea Mays
MAWLAATVAAVAGPPAPMVTGEWGGGLHGKGRGEAGGTSWGEDDGGGWTPGMLSRAQSLTGSKFGGYGSFLPTYQRSPLLPQSESPHIALNISMSGSPYQPSAERMDQNPSTVAVEPISRNNGFGAPSASDSIKKKKFLSTNDEESIAGSDSLDTSLSGSDSKSLKFQTKVCLSNDLPRENAVIYSGLGLDISPRSSMEESPNGLGGLSPECSNVPFESPRTILQVMTCLPVPGGFLLSPLHGNLLQLRNKVAPVLKNLETHLDMENVSRALEGRSQSFHPLGLIRGNVTKQMRPCSKKKVAVDTKTSKYKGDASATMNNEVNIQVPASQKEKMNTNNKNEFEVGSARKEIPASVKHGELYMQPASSVSTMNAYHVPAPVVIEDHWVRCDICHKLRLLPYGMNPSMLPKKWKCTMLHWLPGMNRCDISEDETTGALNALFAIPATATTLSSGSPHTAVTGGIMERNKAYPKLKTKIRIDQDEQKSYKKTKIEAWHQIDRGQDHRCDSDGVEVPDEHKALLAKAKAMKGSHETDDMSLCKKNIASGYDSSENVNNVNALDVPFHSEKKEHPSDVDILDLSCKKNAVKKLEIQLNSLHCISNGPQKNLKEKKSNKLKSKEMASKEDSRHGKVQHADAVLSSLGHLNYELGADNKFVTGKESLSEQLETLPAKQVLDLAEAPGRDVAYLQSSTTVSSSSSKISSSRRNTNSQEANDSPIKSASSLPLRDFSIKMISGNRKDGTVDASLGNTHNLARYQNSEVIALNYGQQAGNFEGDQVAGEPNFHGSLQGISDSNIKEIPQSAGAQVSNITGFGRSLDNSLPEASCREDLTVNDTVVGRGDHQLCSGEQKDFNMEVRLPLPDQHCFGRINTESGSVRHESKNIEVRQGSGTAQRLGMLFKKEKSHLRILNRDIQNHVNQVVNFPLKGGKQKVCPTSVKSESLKMKAKLVRFNVETGVQHGSVKQVTSSTLDTSPMRKDGSMITFALKEARDLKHKANDLKNKGQELESTGLYFEAALKFLHVAFLLETPSFDISRQGGGGRSMKMYSETAKLCNFCAYEYERCKKMASAALAYKCVEVAYLKAAYYKHRTATKDQQELQAAVQITRGEPPSPSALDIDNLNSHGSSNASSLKGDNSPHVPGNHLPLAIHNQAQLLRLLAYTNDMNLAFDATRKAESVIASATGCPERGVVGDGLASVKAVLDLNFNNVNELLRLVRVSMESISS

SEQ ID NO: 160751 - protein, 369 aa, Zea Mays
MSGSPYQPSAERMDQNPSTVAVEPISRNNGFGAPSASDSIKKKKFLSTNDEESIAGSDSLDTSLSGSDSKSLKFQTKVCLSNDLPRENAVIYSGLGLDISPRSSMEESPNGLGGLSPECSNVPFESPRTILQVMTCLPVPGGFLLSPLHGNLLQLRNKVAPVLKNLETHLDMENVSRALEGRSQSFHPLGLIRGNVTKQMRPCSKKKVAVDTKTSKYKGDASATMNNEVNIQVPASQKEKMNTNNKNEFEVGSARKEIPASVKHGELYMQPASSVSTMNAYHVPAPVVIEDHWVRCDICHKLRLLPYGMNPSMLPKKWKCTMLHWLPGMNRCDISEDETTGALNALFAIPATATTLSSEINKLCFRRHI

SEQ ID NO: 160752 - protein, 123 aa, Zea Mays
MVLAQARRHPWPQFPRCCQLWLPRRRQLWLAGLRARWRWHITSKTYNLVLLDVDSHDRFLKSVCCKHDEVLLIIKVYFKRTEWRLERIRNTFKGIEGSHMWPFQMRILCLGLTVLILILGCRL

SEQ ID NO: 160753 - protein, 52 aa, Zea Mays
MGVEIAADDWSTCRIVLGRGVEQLKGSLPNNIVTSGRSVDVVIADDDTLQID

SEQ ID NO: 160754 - protein, 82 aa, Zea Mays
MGGALASFCALDLAMSFGSNNVHLMTFGQPRVGNAAFASYFAQYVPYTVRMTHERDIVPHLPPYFFFLPKLTYKHFPREVCS

SEQ ID NO: 160755 - protein, 130 aa, Zea Mays
MRFLLWLKVHIGFYSSYNNTVLRPAITNAVRKARKLHGHSDVIVTGHSMGGALASFCALDLAMSFGSNNVHLMTFGQPRVGNAAFASYFAQYVPYTVRMTHERDIVPHLPPYFFFLPKLTYKHFPREVCS

SEQ ID NO: 160756 - protein, 295 aa, Zea Mays
MTDLTALYTWTCSRCNDLTRGFEMTCIIVDVQNCLQAFVGVDHNLNAIIVSIRGTQENSIQNWIKDLIWKQVKLNYPNMPNAKVHIGFYSSYNNTVLRPAITNAVRKARKLHGHSDVIVTGHSMGGALASFCALDLAMSFGSNNVHLMTFGQPRVGNAAFASYFAQYVPYTVRMTHERDIVPHLPPYFFFLPKLTYKHFPREVWEHEVDGNTTYQVCDGSGEDPNCCRSVFALFWSASDHLTYMGVEIAADDWSTCRIVLGRGVEQLKGSLPNNIVTSGRSVDVVIADDDTLQID

SEQ ID NO: 160757 - protein, 172 aa, Zea Mays
MGGALASFCALDLAMSFGSNNVHLMTFGQPRVGNAAFASYFAQYVPYTVRMTHERDIVPHLPPYFFFLPKLTYKHFPREVWEHEVDGNTTYQVCDGSGEDPNCCRSVFALFWSASDHLTYMGVEIAADDWSTCRIVLGRGVEQLKGSLPNNIVTSGRSVDVVIADDDTLQID

SEQ ID NO: 160758 - protein, 341 aa, Zea Mays
MEHDAEARRGFARMGFGCKHYRRRCRIRAPCCGDVFHCRHCHNESTKDGHELDRHDVQSVICLVCDTEQPIAQVCCNCGVCMGEYFCAACNFLDDDVDKEQFHCDDCGICRVGGKENFFHCQKCGSCYSTTLRDRHCCIENSMKNNCPICYEAVPVRFAEGDVGAPLRPHHAPAVLPRDVEARQVLVPHMRHAHLRHGQVLQGPRRRDGGKLLVHGKGMGRVQRLQGHDAGLLRHGGPQVLPLPVPQHLPGGTPRPPVATTTTTSLLLELDAASQDTPGPSSYAIITSSACAFTHRSVPVHDELHNFVPCRYVRTLLLEIGRFIRLGTHYLYHNKTRVTLL

SEQ ID NO: 160759 - protein, 200 aa, Zea Mays
MKNNCPICYEKAVPVRFAEGDVGAPLRPHHAPAVLPRDVEARQVLVPHMRHAHLRHGQVLQGPRRRDGGKLLVHGKGMGRVQRLQGHDAGLLRHGGPQVLPLPVPQHLPGGTPRPPVATTTTTSLLLELDAASQDTPGPSSYAIITSSACAFTHRSVPVHDELHNFVPCRYVRTLLLEIGRFIRLGTHYLYHNKTRVTLL

SEQ ID NO: 160760 - protein, 212 aa, Zea Mays
MRHAHLRHGQVLQGPRRRDGGKLLVHGKEQSSPLVFSYKWHRSRERRLGSGRRRPRPPDAKTLGNKIRRVSGSVPVLIDARVCVCAGAGMGRVQRLQGHDAGLLRHGGPQVLPLPVPQHLPGGTPRPPVATTTTTSLLLELDAASQDTPGPSSYAIITSSACAFTHRSVPVHDELHNFVPCRYVRTLLLEIGRFIRLGTHYLYHNKTRVTLL

SEQ ID NO: 160761 - protein, 339 aa, Zea Mays
MEHDAEARRGFARMGFGCKHYRRRCRIRAPCCGDVFHCRHCHNESTKDGHELDRHDVQSVICLVCDTEQPIAQVCCNCGVCMGEYFCAACNFLDDDVDKEQFHCDDCGICSRRKGELLPLPKVWILLLDDPSRQALLHRELDEEQLPHLLRVPVRFAEGDVGAPLRPHHAPAVLPRDVEARQVLVPHMRHAHLRHGQVLQGPRRRDGGKLLVHGKGMGRVQRLQGHDAGLLRHGGPQVLPLPVPQHLPGGTPRPPVATTTTTSLLLELDAASQDTPGPSSYAIITSSACAFTHRSVPVHDELHNFVPCRYVRTLLLEIGRFIRLGTHYLYHNKTRVTLL

SEQ ID NO: 160762 - protein, 279 aa, Zea Mays
MSYSYPATTPRQHKPLSAPSQPSSDLNPGAPSLPPRLGTASAAVRRPWSTTPRRAAGSPGWASGASTTGGGAGSARPAAATSSTAAIATTSPRKTGTSWIGTTSNRLSASSVTPSSRSRRCAATAASAWGSTSAQPATSWTMTLTRSSSIATIAASAGSCYSTTLRDRHCCIENSMKNNCPICYEYLFDSLRETSVLRCGHTMHLQCFHEMLKHDKFSCPICATPIFDMDKFFKALDAEMEASYLYTGKVSAPYCQPDAVLYDPMQPTFPVLVYSSLLL

SEQ ID NO: 160763 - protein, 326 aa, Zea Mays
MEHDAEARRGFARMGFGCKHYRRRCRIRAPCCGDVFHCRHCHNESTKDGHELDRHDVQSVICLVCDTEQPIAQVCCNCGVCMGEYFCAACNFLDDDVDKEQFHCDDCGICRILLLDDPSRQALLHRELDEEQLPHLLRVPVRFAEGDVGAPLRPHHAPAVLPRDVEARQVLVPHMRHAHLRHGQVLQGPRRRDGGKLLVHGKGMGRVQRLQGHDAGLLRHGGPQVLPLPVPQHLPGGTPRPPVATTTTTSLLLELDAASQDTPGPSSYAIITSSACAFTHRSVPVHDELHNFVPCRYVRTLLLEIGRFIRLGTHYLYHNKTRVTLL

SEQ ID NO: 160764 - protein, 330 aa, Zea Mays
MSYSYPATTPRQHKPLSAPSQPSSDLNPGAPSLPPRLGTASAAVRRPWSTTPRRAAGSPGWASGASTTGGGAGSARPAAATSSTAAIATTSPRKTGTSWIGTTSNRLSASSVTPSSRSRRCAATAASAWGSTSAQPATSWTMTLTRSSSIATIAASAVGGKENFFHCQKCGKEINKSITSHIHHTRGCSGSPSPAIHHPVVFFLFAHAGSCYSTTLRDRHCCIENSMKNNCPICYEYLFDSLRETSVLRCGHTMHLQCFHEMLKHDKFSCPICATPIFDMDKFFKALDAEMEASYLYTGKVSAPYCQPDAVLYDPMQPTFPVLVYSSLLL

SEQ ID NO: 160765 - protein, 246 aa, Zea Mays
MEHDAEARRGFARMGFGCKHYRRRCRIRAPCCGDVFHCRHCHNESTKDGHELDRHDVQSVICLVCDTEQPIAQVCCNCGVCMGEYFCAACNFLDDDVDKEQFHCDDCGICRVGGKENFFHCQKCGSCYSTTLRDRHCCIENSMKNNCPICYEYLFDSLRETSVLRCGHTMHLQCFHEMLKHDKFSCPICATPIFDMDKFFKALDAEMEASYLYTGKVSAPYCQPDAVLYDPMQPTFPVLVYSSLLL

SEQ ID NO: 160766 - protein, 181 aa, Zea Mays
MSYSYPATTPRQHKPLSAPSQPSSDLNPGAPSLPPRLGTASAAVRRPWSTTPRRAAGSPGWASGASTTGGGAGSARPAAATSSTAAIATTSPRKTGTSWIGTTSNRLSASSVTPSSRSRRCAATAASAWGSTSAQPATSWTMTLTRSSSIATIAASAGACVRVSVPLFLFLVFFSSFHCGH

SEQ ID NO: 160767 - protein, 752 aa, Zea Mays
MAIVSSIQEAQKDNLKSFNNYMMQVLEDDWQKEKRDFLQSLSRLSTLPKRNTNLSTSGLGRPASMPPSTSSLHAPSGLPSAEVMPIPNKTIIEKKSSVYAGVVRDLNDSRGRSLPFNPATAFRAAYESLSIDAIGTKSVSMQKVWHLIQALVGEGLTHRNVSRKMSLVVGARHHLEWGHEKYILETINSHPALAALGGSVGNLQKIRAFLRVRLRDQGVLDFDATDLRRQPPVDTTWQQIYFCLRTGYYDEARQVAQSSRTAYNFAPLLADWISTNGAVSPETALAASEECDKMLRMGDRPGRPGYDRKKLLLYAIICGCRRQIERMLKDLPTLFNTIEDFLWFKLSALREYTNASSSNLMNEGLVPYTLDDLQSYLNKFEPSYYTKNGKDPLVYPYILFLSIQLLPAILYLSKEVGEDGYHVDAVHISIALADHSVLPDGIGSGQKIGVMDACAEAASIIRQYGSIYLRNGNIDLALEYYAQAAAAMGGGEASWIGEGHADKQRQRSLMLKQLLMEILLRDGGIQLLLGPSGMGEEGELKKYMMDWRSRQQFLLEAAHRCQEAGLYDKAVEIHKRVGAFAMALQTINKCLSDAVCAMARSMLDGESRAAALIHSGNEILETARYSSEASIQEKDLISEQQTVLRQLEAILHIYRLARAGQTVDALRETIRLPFLHLDPKAPNVTVDIFRNLSPHVQACVPDLLKVALNCIDNVRDTDGTLRAVKSKIANLVASNMSRNWPQDLYQKVAQCI

SEQ ID NO: 160768 - protein, 750 aa, Zea Mays
MATGDARDSSPSPATISAERSTASPKRQKPHSSSAAPEACAPETTSVNPPSPAVMAGVGGSGGGGGDDAEMGGWTGLLHSSTKLLEQAAPTPHFPPLQRNLDQLEALSTKLKAKTIRSEAPSQSLSATRLLAREGINAEQLARDLKSFELKTTFEDVFPSEATTVEEYLQQLHEMAIVSSIQEAQKDNLKSFNNYMMQVLEDDWQKEKRDFLQSLSRLSTLPKRNTNLSTSGLGRPASMPPSTSSLHAPSGLPSAEVMPIPNKTIIEKKSSVYAGVVRDLNDSRGRSLPFNPATAFRAAYESLSIDAIGTKSVSMQKVWHLIQALVGEGLTHRNVSRKMSLVVGARHHLEWGHEKYILETINSHPALAALGGSVGNLQKIRAFLRVRLRDQGVLDFDATDLRRQPPVDTTWQQIYFCLRTGYYDEARQVAQSSRTAYNFAPLLADWISTNGAVSPETALAASEECDKMLRMGDRPGRPGYDRKKLLLYAIICGCRRQIERMLKDLPTLFNTIEDFLWFKLSALREYTNASSSNLMNEGLVPYTLDDLQSYLNKFEPSYYTKNGKDPLVYPYILFLSIQLLPAILYLSKEVGEDGYHVDAVHISIALADHSVLPDGIGSGQKIGVMDACAEAASIIRQYGSIYLRNGNIDLALEYYAQAAAAMGGGEASWIGEGHADKQRQRSLMLKQLLMEILLRDGGIQLLLGPSGMGEEGELKKYMMDWRSRQQFLLEAAHRCQEAGLYDKLWKFTKE

SEQ ID NO: 160769 - protein, 543 aa, Zea Mays
MGCVHGRPSTPSPDHPPQPPEPPAPAAAQEATGKAEQPAAPAEKPAPRERRSLSPRSGPGPSFANRARGEQVAAGWPAWLSAVAGEAIDGWTPRRADSFEKIDKIGQGTYSNVYKARDTVSGKIVALKKVRFDNLEPESVRFMAREILILRRLDHPNVVKLDGLVTSRMSCSLYLVFEYMEHDLAGLAASPEIKFTEPQVKCYMNQLLSGLEHCHDRGVLHRDIKGSNLLLDNNGMLKIADFGLASFFDPDRKQPMTSRVVTLWYRPPELLLGATDYGVGVDLWSAGCILAELLAGRPIMPGQTEVEQMHKIFKLCGSPTEEYWKKSKLPGATIFKTQLPYKRRIRETFEDFPQSALQLIEILLAINPADRLTATSALRSDFFTTEPFACEPSSLPKYPPSKEIDVKRRDEEARRLRATGGRANGDGAKKTRARDRPKAVPAPEANAELQKRRFVTHAAKSKSEKFPPPHQDGAVGVPLDTSNHMDPLYEPPDPSSFSTVFTHEKGAVPTWSGPLVDPAAVVNQKRKHKFGRSSKQPATARAR

SEQ ID NO: 160770 - protein, 450 aa, Zea Mays
MGCVHGRPSTPSPDHPPQPPEPPAPAAAQEATGKAEQPAAPAEKPAPRERRSLSPRSGPGPSFANRARGEQVAAGWPAWLSAVAGEAIDGWTPRRADSFEKIDKIGQGTYSNVYKARDTVSGKIVALKKVRFDNLEPESVRFMAREILILRRLDHPNVVKLDGLVTSRMSCSLYLVFEYMEHDLAGLAASPEIKFTEPQVKCYMNQLLSGLEHCHDRGVLHRDIKGSNLLLDNNGMLKIADFGLASFFDPDRKQPMTSRVVTLWYRPPELLLGATDYGVGVDLWSAGCILAELLAGRPIMPGQTEVEQMHKIFKLCGSPTEEYWKKSKLPGATIFKTQLPYKRRIRETFEDFPQSALQLIEILLAINPADRLTATSALRSDFFTTEPFACEPSSLPKYPPSKEIDVKRRDEEARRFVTLPLISLLRMIQCHKLIYFEFAVTNLLIYKCML

SEQ ID NO: 160771 - protein, 329 aa, Zea Mays
MGCVHGRPSTPSPDHPPQPPEPPAPAAAQEATGKAEQPAAPAEKPAPRERRSLSPRSGPGPSFANRARGEQVAAGWPAWLSAVAGEAIDGWTPRRADSFEKIDKIGQGTYSNVYKARDTVSGKIVALKKVRFDNLEPESVRFMAREILILRRLDHPNVVKLDGLVTSRMSCSLYLVFEYMEHDLAGLAASPEIKFTEPQVKCYMNQLLSGLEHCHDRGVLHRDIKGSNLLLDNNGMLKIADFGLASFFDPDRKQPMTSRVVTLWYRPPELLLGATDYGVGVDLWSAGCILAELLAGRPIMPGQTEKNIGKSPSYLVLQYLRLSCHTKGE

SEQ ID NO: 160772 - protein, 544 aa, Zea Mays
MGCVHGRPSTPSPDHPPQPPEPPAPAAAQEATGKAEQPAAPAEKPAPRERRSLSPRSGPGPSFANRARGEQVAAGWPAWLSAVAGEAIDGWTPRRADSFEKIDKGTYSNVYKARDTVSGKIVALKKVRFDNLEPESVRFMAREILILRRLDHPNVVKLDGLVTSRMSCSLYLVFEYMEHDLAGLAASPEIKFTEPQVKCYMNQLLSGLEHCHDRGVLHRDIKGSNLLLDNNGMLKIADFGLASFFDPDRKQPMTSRVVTLWYRPPELLLGATDYGVGVDLWSAGCILAELLAGRPIMPGQTEVEQMHKIFKLCGSPTEEYWKKSKLPGATIFKTQLPYKRRIRETFEDFPQSALQLIEILLAINPADRLTATSALRSDFFTTEPFACEPSSLPKYPPSKEIDVKRRDEEARRLRATGGRANGDGAKKTRARDRPKAVPAPEANAELQVNIDKRRFVTHAAKSKSEKFPPPHQDGAVGVPLDTSNHMDPLYEPPDPSSFSTVFTHEKGAVPTWSGPLVDPAAVVNQKRKHKFGRSSKQPATARAR

SEQ ID NO: 160773 - protein, 320 aa, Zea Mays
MVSLHGTLIVLQKIDCLHNSAVMELMRGLRNQLTELITGLGAQDLGPMSLGLSHSLSRYKLKFSPEKVDTMIIQAIGLLDDLDKELNTYAMRVREWYGWHFPELTKIVTDNIQYAKVVKMMGNRTNAVNLDFSEILSDEELETQLKEAAVISMGTEVSDLDLSNIRELCDQVLALSEYRAQLYDYLKSRMNTIAPNLTALVGELVGARLIAHGGSLLNLAKQPGSTIQILGAEKALFRALKTKHSTPKYGLIYHASLIGKASQKHKGKISRSLAAKTALAIRYDALGDGEDNSIGTESRLKFLRVENLGNLLVPQRGSPR

SEQ ID NO: 160774 - protein, 412 aa, Zea Mays
MAGCAAARMFAYNASLCACDPGYYYYLSSNGTASCIPMPGGGWGDWQVGSVGAPRNQSLYFLEPVLSVYAIRRLTQSQAVLLEATLASLLCWIAFCAAARFGGRDPRGEKRLFRARYWVSRLDCLFDNSHWAGDQQVLRKRKTELGGTFSVASLIIFTGLLTVLLYQAIKRRSLEMHRVKPANAPDLLSFVNDLEFHISTISSMSCTQAVAPLTVAMGTPGFMDFRVVPLSTLFTYSCTNTSHGPSITLRCNGCRVPPRDHYVSWQFVDLLGQPATAVGFQFNLTARQHGNNQHMSFVSGTMNSDGYTDDVKLKTFRGRDSNVLKIQLFPQIYNNLGNLRLLQPLVQDFTQGSMFSDVSSLNSSLQNPRDGVVNTTLYISYLSDYIVEISNESVVGPGEFHEAMSFTHRLHL

SEQ ID NO: 160775 - protein, 319 aa, Zea Mays
MHRVKPANAPDLLSFVNDLEFHISTISSMSCTQAVAPLTVAMGTPGFMDFRVVPLSTLFTYSCTNTSHGPSITLRCNGCRVPPRDHYVSWQFVDLLGQPATAVGFQFNLTARQHGNNQHMSFVSGTMNSDGYTDDVKLKTFRGRDSNVLKIQLFPQIYNNLGNLRLLQPLVQDFTQGSMFSDVSSLNSSLQNPRDGVVNTTLYISYLSDYIVEISNESVVGPVSVLASIGGLYAFSVAICLCLMSQCEARIKKLRDEDTRMLKILSKRRAQRNWDKLRKFVMYTWGLSNLDPSDRTCQQPEGSVMDSRHMRREAIRQGI

SEQ ID NO: 160776 - protein, 895 aa, Zea Mays
MDAVAHRLGACLPRVPVAWADMAPPPSQTHGKDGGAAEGPRSGLSSFTWRMVTYDLRLRLPSSGSGCRPLPWSMDRSPAAAGLQPLPNRLPATGFRPQPATGVCHLRIRPLGTSVPSLPPTFIVRSPTPGPQLQQYSTSSRNSEEEPSPPNPQPIYCPPGVRPKSRVVARLPQGLLPRSFPLEALHLFKHARQHLADDTFVFKFVLKACAGLGWHRAGAQLHALVVQKGFEFHAYVHIALINVYVMSRCLVEARKVFDEMPVKNVVSWNVMITGFAGWDEVEYARLLFDQMPCRNVVSWTGLIDGYTHACLYAEALTLLRHMMAGGISPSEIIVLAVIPAISNLGGIVMGEMLNGYCEKKGIMSDVRVGNSLIDLYAKIGSVQNSLKVFDEMLDRRNLVSWTSIISGFAMHGLSVEALELFAEMRRAGIKPNRITFLSVINVCSHGGLVQQGLAFFKSMVYEYNIDPEIKHFGYIIDMLGRAGRLCEAEQIIEGLPMEVNVTVWRILLGCFSKYGEVEMGERAIKMISDLERESGGDFLQGYENMRHGIVETHPKQQAPERPAPAPPEKYGVNAAGDQPRRPGCLARRFFSPSPRNFLGSTPYYTTGVFPFGRHSVLSQPAAGAMLYIVGLGLGDERDITVRGLDAVRSCSKIYMEAYTSLLSLGLDPAALANLLYGKEITVADREMVEERVDQVLSEAADTDVAFLVVGDPFGATTHTDLVVRAKKMGVEVKVIHNASVMNAIGVCGLQLYRYGETISIPFFTDEWRPDSFYEKIQNNRQLGLHTLCLLDIRVKEPTWESLARGKKVYEPPRFMTVNTAISQLFEVEEARGGYAYRRETLCIGVARLGSDDQKIVAGPMEKLLDVDFGPPLHCLIIVGETHPLEEEMLEFYMIK

SEQ ID NO: 160777 - protein, 838 aa, Zea Mays
MDAVAHRLGACLPRVPVAWADMAPPPSQTHGKDGGAAEGPRSGLSSFTWRMVTYDLRLRLPSSGSGCRPLPWSMDRSPAAAGLQPLPNRLPATGFRPQPATGVCHLRIRPLGTSVPSLPPTFIVRSPTPGPQLQQYSTSSRNSEEEPSPPNPQPIYCPPGVRPKSRVVARLPQGLLPRSFPLEALHLFKHARQHLADDTFVFKFVLKACAGLGWHRAGAQLHALVVQKGFEFHAYVHIALINVYVMSRCLVEARKVFDEMPVKNVVSWNVMITGFAGWDEVEYARLLFDQMPCRNVVSWTGLIDGYTHACLYAEALTLLRHMMAGGISPSEIIVLAVIPAISNLGGIVMGEMLNGYCEKKGIMSDVRVGNSLIDLYAKIGSVQNSLKVFDEMLDRRNLVSWTSIISGFAMHGLSVEALELFAEMRRAGIKPNRITFLSVINVCSHGGLVQQGLAFFKSMVYEYNIDPEIKHFGYIIDMLGRAGRLCEAEQIIEGLPMEVNVTVWRILLGCFSKYGEVEMGERAIKMISDLERESGGDFLQGYENMRHGIVETHPKQQAPERPAPAPPEKYGVNAAGDQPRRPGCLARRFFSPSPRNFLGSTPYYTTGVFPFGRHSVLSQPAAGAMLYIVGLGLGDERDITVRGLDAVRSCSKIYMEAYTSLLSLGLDPAALANLEKLYGKEITVADREMVEERVDQVLSEAADTDVAFLVVGDPFGATTHTDLVVRAKKMGVEVKVIHNASVMNAIGVCGLQLYRYGETISIPFFTDEWRPDSFYEKIQNNRQLGLHTLCLLDIRVKEPTWESLARGKKVYEPPRFMTVNTAISQLFEVEEARGGYGI

SEQ ID NO: 160778 - protein, 142 aa, Zea Mays
MASISPSLHHPCNSRTGFLGKTHGTRPRLFSAGRVGFVRTLVECKESRIGKQPIEVPPNVTLTLEEQFVKAKGPLGELSLSFPGDVKIVKEESGNLRVYKTAETKRANQMHGLFRDFFSAEGPLSKNTFGKAICKQAQHEEH

SEQ ID NO: 160779 - protein, 117 aa, Zea Mays
MASISPSLHHPCNSRTGFLGKTHGTRPRLFSAGRVGFVRTLVECKESRIGKQPIEVPPNVTLTLEEQFVKAKGPLGELSLSFPGDVKIVKEESGNLRVYKTAETKRANQMHGLFRIR

SEQ ID NO: 160780 - protein, 587 aa, Zea Mays
MRSAISETFPEPNRRLLQRILKMMHTVASHTSENRMTASAVAACMAPLLLRPLLAGECEMDEVFDMDGDDSAQLLAAANAANSAQGIVATLLEEYEGIFHDEHLRCSLSPESQIEDSGTEASTDDGNLEAKGNGFHDAENDVDQEMDDDNGVERILSGKLSESSGYAGSDLYDYKAVNAEESDAERPVKMLEGNLNLSKVQNSLSTENGSANVDSLLSENNPSNPTVGHETLSMGEILSSFDPGISVPTHSPEYSVERQTNKTNGSHPHVKRSNFWGRNNARKGQNSESVDSSGEEELAIQRLEIAKNDLQNRIAKEARGNAILQASLERRKQALHERRLALEQDVSRLQEQLQAERDLRAALEVGLSMSSGQFSSARSMDVKTKAELEEIALAEADVARLKQKVAELHLQLNQQRQHQYGSVVDANDRHHRLPGHFSQQNFVQQGFDMNLAFCNQEKQRNEESSVESSQWRNIKQHVLPYGSSRPLTRKLSFDASSSESRGTEPSTSMSTENTSVSINVPKLAEGIEFGRQPMVTSSTLVELTTRLDFFKERRSQLMEQLHSLDLGRGSAPQGFPFKPPSPWNHPR

SEQ ID NO: 160781 - protein, 621 aa, Zea Mays
MDFWRREMAAQRAWCFKNLLSGRTEFSADEDAHVVGDCVKHVLRELPSSPVPASCCTALLEAFRLETKDARINAMRSAISETFPEPNRRLLQRILKMMHTVASHTSENRMTASAVAACMAPLLLRPLLAGECEMDEVFDMDGDDSAQLLAAANAANSAQGIVATLLEEYEGIFHDEHLRCSLSPESQIEDSGTEASTDDGNLEAKGNGFHDAENDVDQEMDDDNGVERILSGKLSESSGYAGSDLYDYKAVNAEESDAERPVKMLEGNLNLSKVQNSLSTENGSANVDSLLSENNPSNPTVGHETLSMGEILSSFDPGISVPTHSPEYSVERQTNKTNGSHPHVKRSNFWGRNNARKGQNSESVDSSGEEELAIQRLEIAKNDLQNRIAKEARGNAILQASLERRKQALHERRLALEQDVSRLQEQLQAERDLRAALEVGLSMSSGQFSSARSMDVKTKAELEEIALAEADVARLKQKVAELHLQLNQQRQHQYGSVVDANDRHHRLPGHFSQQNFVQQGFDMNLAFCNQEKQRNEESSVESSQWRNIKQHVLPYGSSRPLTRKLSFDASSSESRGTEPSTSMSTENTSVSINVPKLAEGIEFGRQPMVTSSTLEPPEVGG

SEQ ID NO: 160782 - protein, 525 aa, Zea Mays
MMHTVASHTSENRMTASAVAACMAPLLLRPLLAGECEMDEVFDMDGDDSAQLLAAANAANSAQGIVATLLEEYEGIFHDEHLRCSLSPESQIEDSGTEASTDDGNLEAKGNGFHDAENDVDQEMDDDNGVERILSGKLSESSGYAGSDLYDYKAVNAEESDAERPVKMLEGNLNLSKVQNSLSTENGSANVDSLLSENNPSNPTVGHETLSMGEILSSFDPGISVPTHSPEYSVERQTNKTNGSHPHVKRSNFWGRNNARKGQNSESVDSSGEEELAIQRLEIAKNDLQNRIAKEARGNAILQASLERRKQALHERRLALEQDVSRLQEQLQAERDLRAALEVGLSMSSGQFSSARSMDVKTKAELEEIALAEADVARLKQKVAELHLQLNQQRQHQYGSVVDANDRHHRLPGHFSQQNFVQQGFDMNLAFCNQEKQRNEESSVESSQWRNIKQHVLPYGSSRPLTRKLSFDASSSESRGTEPSTSMSTENTSVSINVPKLAEGIEFGRQPMVTSSTLEPPEVGG

SEQ ID NO: 160783 - protein, 636 aa, Zea Mays
MSSAPVAGAAFERYQQRGGGGPAAANGNTVFKSGPLFISSKGIGWKSWKKRWFILTRTSLVFFKSDPSTLPQRGGEVNVTLGGIDLNNSGSVVVREDKKLLTVLFPDGRDGRAFTLKAETSEDLFEWKTALEEALAQAPNAALVMGHNGIFRNDTADTYEGAIPNWREKRPIKSLVTGRPILLALEDIDGSPSFLEKALRFLEKHGIKVEGILRQSADVEEVDRRLQEYEQGRTEFSADEDAHVVGDCVKHVLRELPSSPVPASCCTALLEAFRLETKDARINAMRSAISETFPEPNRRLLQRILKMMHTVASHTSENRMTASAVAACMAPLLLRPLLAGECEMDEVFDMDGDDSAQLLAAANAANSAQGIVATLLEEYEGIFHDEHLRCSLSPESQIEDSGTEASTDDGNLEAKGNGFHDAENDVDQEMDDDNGVERILSGKLSESSGYAGSDLYDYKAVNAEESDAERPVKMLEGNLNLSKVQNSLSTENGSANVDSLLSENNPSNPTVGHETLSMGEILSSFDPGISVPTHSPEYSVERQTNKTNGSHPHVKRSNFWGRNNARKGQNSESVDSSGEEELAIQRLEIAKNDLQNRIAKEARGNAILQASLERRKQALHERRLALEQDVARTTAS

SEQ ID NO: 160784 - protein, 622 aa, Zea Mays
MSSAPVAGAAFERYQQRGGGGPAAANGNTVFKSGPLFISSKGIGWKSWKKRWFILTRTSLVFFKSDPSTLPQRGGEVNVTLGGIDLNNSGSVVVREDKKLLTVLFPDGRDGRAFTLKAETSEDLFEWKTALEEALAQAPNAALVMGHNGIFRREKRPIKSLVTGRPILLALEDIDGSPSFLEKALRFLEKHGIKVEGILRQSADVEEVDRRLQEYEQGRTEFSADEDAHVVGDCVKHVLRELPSSPVPASCCTALLEAFRLETKDARINAMRSAISETFPEPNRRLLQRILKMMHTVASHTSENRMTASAVAACMAPLLLRPLLAGECEMDEVFDMDGDDSAQLLAAANAANSAQGIVATLLEEYEGIFHDEHLRCSLSPESQIEDSGTEASTDDGNLEAKGNGFHDAENDVDQEMDDDNGVERILSGKLSESSGYAGSDLYDYKAVNAEESDAERPVKMLEGNLNLSKVQNSLSTENGSANVDSLLSENNPSNPTVGHETLSMGEILSSFDPGISVPTHSPEYSVERQTNKTNGSHPHVKRSNFWGRNNARKGQNSESVDSSGEEELAIQRLEIAKNDLQNRIAKEARGNAILQASLERRKQALHERRLALEQDVARTTAS

SEQ ID NO: 160785 - protein, 527 aa, Zea Mays
MLCVQLYLRHFLSPIGGCCRVAACMAPLLLRPLLAGECEMDEVFDMDGDDSAQLLAAANAANSAQGIVATLLEEYEGIFHDEHLRCSLSPESQIEDSGTEASTDDGNLEAKGNGFHDAENDVDQEMDDDNGVERILSGKLSESSGYAGSDLYDYKAVNAEESDAERPVKMLEGNLNLSKVQNSLSTENGSANVDSLLSENNPSNPTVGHETLSMGEILSSFDPGISVPTHSPEYSVERQTNKTNGSHPHVKRSNFWGRNNARKGQNSESVDSSGEEELAIQRLEIAKNDLQNRIAKEARGNAILQASLERRKQALHERRLALEQDVSRLQEQLQAERDLRAALEVGLSMSSGQFSSARSMDVKTKAELEEIALAEADVARLKQKVAELHLQLNQQRQHQYGSVVDANDRHHRLPGHFSQQNFVQQGFDMNLAFCNQEKQRNEESSVESSQWRNIKQHVLPYGSSRPLTRKLSFDASSSESRGTEPSTSMSTENTSVSINVPKLAEGIEFGRQPMVTSSTLEPPEVGG

SEQ ID NO: 160786 - protein, 817 aa, Zea Mays
MSSAPVAGAAFERYQQRGGGGPAAANGNTVFKSGPLFISSKGIGWKSWKKRWFILTRTSLVFFKSDPSTLPQRGGEVNVTLGGIDLNNSGSVVVREDKKLLTVLFPDGRDGRAFTLKAETSEDLFEWKTALEEALAQAPNAALVMGHNGIFRREKRPIKSLVTGRPILLALEDIDGSPSFLEKALRFLEKHGIKVEGILRQSADVEEVDRRLQEYEQGRTEFSADEDAHVVGDCVKHVLRELPSSPVPASCCTALLEAFRLETKDARINAMRSAISETFPEPNRRLLQRILKMMHTVASHTSENRMTASAVAACMAPLLLRPLLAGECEMDEVFDMDGDDSAQLLAAANAANSAQGIVATLLEEYEGIFHDEHLRCSLSPESQIEDSGTEASTDDGNLEAKGNGFHDAENDVDQEMDDDNGVERILSGKLSESSGYAGSDLYDYKAVNAEESDAERPVKMLEGNLNLSKVQNSLSTENGSANVDSLLSENNPSNPTVGHETLSMGEILSSFDPGISVPTHSPEYSVERQTNKTNGSHPHVKRSNFWGRNNARKGQNSESVDSSGEEELAIQRLEIAKNDLQNRIAKEARGNAILQASLERRKQALHERRLALEQDVSRLQEQLQAERDLRAALEVGLSMSSGQFSSARSMDVKTKAELEEIALAEADVARLKQKVAELHLQLNQQRQHQYGSVVDANDRHHRLPGHFSQQNFVQQGFDMNLAFCNQEKQRNEESSVESSQWRNIKQHVLPYGSSRPLTRKLSFDASSSESRGTEPSTSMSTENTSVSINVPKLAEGIEFGRQPMVTSSTLEPPEVGG

SEQ ID NO: 160787 - protein, 159 aa, Zea Mays
MIPRKLMDEHYDENHAPINCSLCKETIERESWDLHKGEKCPQRIVACEYCEFELPAVDLHEHQDVCGNRTELCQTCRKYIRLREWTGHEIQCHTNSNGSADTSRAIPERELRPPPPPVRQARPARPAHASPHKRLLFTIAVTGIAVMIGSILFQRDEGF

SEQ ID NO: 160788 - protein, 89 aa, Zea Mays
MDRARNTVPYKLKWFCRHIPSNSRERTTTAAAASATGATSTSCPRFTTQAAPLHNRRHWNSSYDRLHTVPEGRGFLAPVAMDSLCQGAS

SEQ ID NO: 160789 - protein, 192 aa, Zea Mays
MRTGSLSGGRRPVPIVFPSSARPPSLFAHHFLLSSRLTALWGFFSRRPLFFLYARSLLQPPALCPVPYTAERLARLRRNSLSCFSLAALSFSPYWTVSPMALGRPATDSSSLRAGSSSASSPCFLFQLLRSQIFLLRVSLSRGSLSSPAFLSVAPRHGISLLARALPSLPLRALCSPFQARLAPCCSPGRAP

SEQ ID NO: 160790 - protein, 244 aa, Zea Mays
MEGNQIRYRLPHHRHHSILLVPKAVSLLSQHHIMGITIIGLQPHQCLMRDIICNQHPLHRLQINSLLCHQNTNIGRITGVITVHRVLRDIGTMDMIEVITDMIEGIMRTTDNTIMMIEDTAMMIEDITMMIEAITLMIEDISLMTEGITSMRELLGGQCTMRLLTGQDILFHQSYAGPPPIPDHFEAPPGPMHYGRPSDPPPGHCAGWSRPPRISNNYSPSRHSVEPPVSHAAGAGGHGGWRPR

SEQ ID NO: 160791 - protein, 233 aa, Zea Mays
MEGNQIRYRLPHHRHHSILLVPKAVSLLSQHHIMGITIIGLQPHQCLMRDIICNQHPLHRLQINSLLCHQNTNIGRITGVITVHRVLRDIGTMDMIEVITDMIEGIMRTTDNTIMMIEDTAMMIEDITMMIEAITLMIEDISLMTEGITSMRELLGGQCTMRLLTGPPPIPDHFEAPPGPMHYGRPSDPPPGHCAGWSRPPRISNNYSPSRHSVEPPVSHAAGAGGHGGWRPR

SEQ ID NO: 160792 - protein, 728 aa, Zea Mays
MDTENMVSSSYIQNHQEIDDHYVTTKGHDMIKSDRLSVTIMSDERCVINSAPDEPTENVSVLDEMREISLRTNSFSNKQRDAQPQNCYTRSRVPSLRKSRSSISVESRKAQGSDNVWLHSGRGTSNQPVTLGTTCNGSKMLNPPVKADSTCNSEASENGTSETELKSNGTSNLPMNTEVIFRRIRKSDRKPVPHYEDCTTPNKDELRAEYSEILSDSPNSKNEVCKSDGDEHLPLVKRARVRMGRSHLEDSPVDEVDVSNKKPELTTTSDQCDRNGKPASPVNDYSADQVSTVVSSASNPSCKSDMPILSKEGHLPWKNKEYHPKILALDVEAALPPSKRLHRALEAMSANVAENVKNIPEVTGPNEMALNGSLLTANNHSNKSADAVVTVSNKPVIVQCSEPSLDTQFKHTQSGKCTSESTLQNNTIPDSASVPSKENDIMLKENDTNGSWVCSELDNGSCGKTSALCMILNRPGLDVTQTTSVPDRLSSSFEKESENVATSSVKETKPFGSAVCEVDRSAEAEQIDHSNNNVISNTIRHSETIVVDSVNNVGDTASNSSMATKSSSIQSDADTRTSEVHTFSSLALKELNHRKIKDRSTSPDSMPMKELIAVAQARRFSRLTSFPDIFLNAKYIPERATNTPPKEGSHRQLSPSNRIFRSTSGNDNVHSRSPFDIIQQKKLAGHVEANAARRSFKDFLSTLTRTKESISRATRLAIECAKFGIAGN

SEQ ID NO: 160793 - protein, 752 aa, Zea Mays
MPSTKKKPLVYFYGTKQIAFCNYADLEAFTEEKKRSLLAKRHGKGADFLRAVDEIIEVYDSLKEKGSNKDDLAAEVKPGVEKFADNNVCMDTENMVSSSYIQNHQEIDDHYVTTKGHDMIKSDRLSVTIMSDERCVINSAPDEPTENVSVLDEMREISLRTNSFSNKQRDAQPQNCYTRSRVPSLRKSRSSISVESRKAQGSDNVWLHSGRGTSNQPVTLGTTCNGSKMLNPPVKADSTCNSEASENGTSETELKSNGTSNLPMNTEVIFRRIRKSDRKPVPHYEDCTTPNKDELRAEYSEILSDSPNSKNEVCKSDGDEHLPLVKRARVRMGRSHLEDSPVDEVDVSNKKPELTTTSDQCDRNGKPASPVNDYSADQVSTVVSSASNPSCKSDMPILSKEGHLPWKNKEYHPKILALDVEAALPPSKRLHRALEAMSANVAENVKNIPEVTGPNEMALNGSLLTANNHSNKSADAVVTVSNKPVIVQCSEPSLDTQFKHTQSGKCTSESTLQNNTIPDSASVPSKENDIMLKENDTNGSWVCSELDNGSCGKTSALCMILNRPGLDVTQTTSVPDRLSSSFEKESENVATSSVKETKPFGSAVCEVDRSAEAEQIDHSNNNVISNTIRHSETIVVDSVNNVGDTASNSSMATKSSSIQSDADTRTSEVHTFSSLALKELNHRKIKDRSTSPDSMPMKELIAVAQARRFSRLTSFPDIFLNAKYIPERATNTPPKEGSHRQLSPSNRIFRAC

SEQ ID NO: 160794 - protein, 1009 aa, Zea Mays
MAPAKRKRAAAAAAAAAAAAAKWKVGDLVLAKMKGFPAWPAMISEPEQWKMPSTKKKPLVYFYGTKQIAFCNYADLEAFTEEKKRSLLAKRHGKGADFLRAVDEIIEVYDSLKEKGSNKDDLAAEVKPGVEKFADNNVCMDTENMVSSSYIQNHQEIDDHYVTTKGHDMIKSDRLSVTIMSDERCVINSAPDEPTENVSVLDEMREISLRTNSFSNKQRDAQPQNCYTRSRVPSLRKSRSSISVESRKAQGSGNFFDHTNLSSIGSVPNENKERSSRHRHADDKANSGSVSILDNVWLHSGRGTSNQPVTLGTTCNGSKMLNPPVKADSTCNSEASENGTSETELKSNGTSNLPMNTEVIFRRIRKSDRKPVPHYEDCTTPNKDELRAEYSEILSDSPNSKNEVCKSDGDEHLPLVKRARVRMGRSHLEDSPVDEVDVSNKKPELTTTSDQCDRNGKPASPVNDYSADQVSTVVSSASNPSCKSDMPILSKEGHLPWKNKEYHPKILALDVEAALPPSKRLHRALEAMSANVAENVKNIPEVTGPNEMALNGSLLTANNHSNKSADAVVTVSNKPVIVQCSEPSLDTQFKHTQSGKCTSESTLQNNTIPDSASVPSKENDIMLKENDTNGSWVCSELDNGSCGKTSALCMILNRPGLDVTQTTSVPDRLSSSFEKESENVATSSVKETKPFGSAVCEVDRSAEAEQIDHSNNNVISNTIRHSETIVVDSVNNVGDTASNSSMATKSSSIQSDADTRTSEVHTFSSLALKELNHRKIKDRSTSPDSMPMKELIAVAQARRFSRLTSFPDIFLNAKYIPERATNTPPKEGSHRQLSPSNRIFRSTSGNDNVHSRSPFDIIQQKKLAGHVEANAARRSFKDFLSTLTRTKESISRATRLAIECAKFGIAGEESNLYKRVDLFFLVDSITQCSRNQKGGAGDVYPSLIQAVLPRILYAAAPPGNSAWENRKQCLKVLKLWLERRTLSEYIIRHHIKEIETIMRHHLEVLAVLH

SEQ ID NO: 160795 - protein, 774 aa, Zea Mays
MAPAKRKRAAAAAAAAAAAAAKWKVGDLVLAKMKGFPAWPAMISEPEQWKMPSTKKKPLVYFYGTKQIAFCNYADLEAFTEEKKRSLLAKRHGKGADFLRAVDEIIEVYDSLKEKGSNKDDLAAEVKPGVEKFADNNVCMDTENMVSSSYIQNHQEIDDHYVTTKGHDMIKSDRLSVTIMSDERCVINSAPDEPTENVSVLDEMREISLRTNSFSNKQRDAQPQNCYTRSRVPSLRKSRSSISVESRKAQGSGNFFDHTNLSSIGSVPNENKERSSRHRHADDKANSGSVSILDNVWLHSGRGTSNQPVTLGTTCNGSKMLNPPVKADSTCNSEASENGTSETELKSNGTSNLPMNTEVIFRRIRKSDRKPVPHYEDCTTPNKDELRAEYSEILSDSPNSKNEVCKSDGDEHLPLVKRARVRMGRSHLEDSPVDEVDVSNKKPELTTTSDQCDRNGKPASPVNDYSADQVSTVVSSASNPSCKSDMPILSKEGHLPWKNKEYHPKILALDVEAALPPSKRLHRALEAMSANVAENVKNIPEVTGPNEMALNGSLLTANNHSNKSADAVVTVSNKPVIVQCSEPSLDTQFKHTQSGKCTSESTLQNNTIPDSASVPSKENDIMLKENDTNGSWVCSELDNGSCGKTSALCMILNRPGLDVTQTTSVPDRLSSSFEKESENVATSSVKETKPFGSAVCEVDRSAEAEQIDHSNNNVISNTIRHSETIVVDSVNNVGDTASNSSMATKSSSIQSDADTRTSEVQAYILISGVERTEP

SEQ ID NO: 160796 - protein, 800 aa, Zea Mays
MAPAKRKRAAAAAAAAAAAAAKWKVGDLVLAKMKGFPAWPAMISEPEQWKMPSTKKKPLVYFYGTKQIAFCNYADLEAFTEEKKRSLLAKRHGKGADFLRAVDEIIEVYDSLKEKGSNKDDLAAEVKPGVEKFADNNVCMDTENMVSSSYIQNHQEIDDHYVTTKGHDMIKSDRLSVTIMSDERCVINSAPDEPTENVSVLDEMREISLRTNSFSNKQRDAQPQNCYTRSRVPSLRKSRSSISVESRKAQDNVWLHSGRGTSNQPVTLGTTCNGSKMLNPPVKADSTCNSEASENGTSETELKSNGTSNLPMNTEVIFRRIRKSDRKPVPHYEDCTTPNKDELRAEYSEILSDSPNSKNEVCKSDGDEHLPLVKRARVRMGRSHLEDSPVDEVDVSNKKPELTTTSDQCDRNGKPASPVNDYSADQVSTVVSSASNPSCKSDMPILSKEGHLPWKNKEYHPKILALDVEAALPPSKRLHRALEAMSANVAENVKNIPEVTGPNEMALNGSLLTANNHSNKSADAVVTVSNKPVIVQCSEPSLDTQFKHTQSGKCTSESTLQNNTIPDSASVPSKENDIMLKENDTNGSWVCSELDNGSCGKTSALCMILNRPGLDVTQTTSVPDRLSSSFEKESENVATSSVKETKPFGSAVCEVDRSAEAEQIDHSNNNVISNTIRHSETIVVDSVNNVGDTASNSSMATKSSSIQSDADTRTSEVHTFSSLALKELNHRKIKDRSTSPDSMPMKELIAVAQARRFSRLTSFPDIFLNAKYIPERATNTPPKEGSHRQLSPSNRIFRAC

SEQ ID NO: 160797 - protein, 162 aa, Zea Mays
MSIVGLLLLGKVLEPLWGAKELLKFIFIVNLSTSACVFVTTIVLYYITQEETYLYTPVSGFYGVLSGLLVGIKQILPDQELNLFVLKISAKWIPSIVAFTSVVVSFFVKESISYLPIILFGIYMSWIYLRYFQRSLEVGLKGDPSDEFSFSSFFPVFLRERG

SEQ ID NO: 160798 - protein, 321 aa, Zea Mays
MNASAIPSPAGGGRFFTGFTKLCKGLAVIIFLVHILVHLFPSAATYLTLIPARTIPFAWNLITACYIEQTIPGVIMSIVGLLLLGKVLEPLWGAKELLKFIFIVNLSTSACVFVTTIVLYYITQEETYLYTPVSGFYGVLSGLLVGIKQILPDQELNLFVLKISAKWIPSIVAFTSVVVSFFVKESISYLPIILFGIYMSWIYLRYFQRSLEVGLKGDPSDEFSFSSFFPVFLRPVLDPIASIFHKLFCGRSAKPEGTGQTLDGSQFPGLGSIEANRRRERGQRALEQRLAEKPAAVRNTEGTPPPKQQLEDAEDDASDEV

SEQ ID NO: 160799 - protein, 150 aa, Zea Mays
MLMQAILESLKDYEQSNTKNVQSTASDPASKANGTVKDCNGVAAAALEQDASSFDAPDKHTNVPNSGEKVSEGQSTDCNAGKSSASVSASGSSEPLAPTQMVNGQPASVDSQKVTQNANGEDGTRATLVVQKSRTGGLIEKWGSFFKNND

SEQ ID NO: 160800 - protein, 160 aa, Zea Mays
MPHTVEDEDRMLMQAILESLKDYEQSNTKNVQSTASDPASKANGTVKDCNGVAAAALEQDASSFDAPDKHTNVPNSGEKVSEGQSTDCNAGKSSASVSASGSSEPLAPTQMVNGQPASVDSQKVTQNANGEDGTRATLVVQKSRTGGLIEKWGSFFKNND

SEQ ID NO: 160801 - protein, 278 aa, Zea Mays
MPVVIPEGKALPCVIYCHGNSGCRADASEAAIILLPSNITVFTLDFSGSGLSEGEHVTLGWNEREDLKAVVNYLRTDGNVSCIGLWGRSMGAVTSLMYGAEDPSIAGMVLDSPFSNLVDLMMELVDTYKYPLPKFTVKLAIQHMRKIVKRKASFDIMDLDTIQVAKQCFVPALFGHATEDDFILPHHSDKIYESYIGDKNIIKFDGDHNSPRPQFYFDSITIFFHNVLNPPEVAEDHYFMTPHGSLGYRTRHRVSVLSITYRDSQCYYNRRCHCTVAL

SEQ ID NO: 160802 - protein, 466 aa, Zea Mays
METGSGLSEGEHVTLGWNEREDLKAVVNYLRTDGNVSCIGLWGRSMGAVTSLMYGAEDPSIAGMVLDSPFSNLVDLMMELVDTYKYPLPKFTVKLAIQHMRKIVKRKASFDIMDLDTIQVAKQCFVPALFGHATEDDFILPHHSDKIYESYIGDKNIIKFDGDHNSPRPQFYFDSITIFFHNVLNPPEVAEDHYFMTPHGSLGQGHWDTEQDIEYRFSQSPTANATTTEDAIAQLRSRRLMSRMEVPSGATTEDRTDRTEGFDSDLGPSSSSVSTATPPNGRNGRLLTPTSDDGEYVEYSFDSLSDMPHTVEDEDRMLMQAILESLKDYEQSNTKNVQSTASDPASKANGTVKDCNGVAAAALEQDASSFDAPDKHTNVPNSGEKVSEGQSTDCNAGKSSASVSASGSSEPLAPTQMVNGQPASVDSQKVTQNANGEDGTRATLVVQKSRTGGLIEKWGSFFKNND

SEQ ID NO: 160803 - protein, 528 aa, Zea Mays
MASEAESPVVIHAWSAPRSLSTSLMYSFAQRDDMEVLDEPLYANFLRATGVDRPYRQELLSKMDPDGNKVVKEVIFGPGDKKYRYCKHISKQHLPNLSSDLMKKGKHFILIRNPLDILPSFDKVVPPSFMELGIGELVSIYSELCGLGSPPPVIDADDLQQDPEAVLSGLCEDLGIPFQPQMLKWEAGPKEFDGIWAPWWYGSVHKSSGFSKPRQYPLTFPFVFYDLLEQSLPFYNMLKRQIRKIRGPQQPPLSDPPLPVPANKNILVWVGDELLPRNSAKVSVFDSVVQGGDAVWEGLRIYDGKVFKLDEHLDRLFDSAKAMAFSNVPTRDWIKDAIFKTLIANGMFNNAHIRLTLTRGKKVTSGMSPAFNLYGCALIVLAEWKPPVYDNSHGIKLVTATTRRNSPNSIDSKIHHNNLINNILAKIEGNLAQAEDAIMLDKDGFVSETNATNIFMVKKGIVLTPHADYCLPGITRATVMDLVVKENFVLHERRISLSEFHAADEVWTTGTMGEITPSLQGAQCSVVI

SEQ ID NO: 160804 - protein, 323 aa, Zea Mays
MLKRQIRKIRGPQQPPLSDPPLPVPANKNILVWVGDELLPRNSAKVSVFDSVVQGGDAVWEGLRIYDGKVFKLDEHLDRLFDSAKAMAFSNVPTRDWIKDAIFKTLIANGMFNNAHIRLTLTRGKKVTSGMSPAFNLYGCALIVLAEWKPPVYDNSHGIKLVTATTRRNSPNSIDSKIHHNNLINNILAKIEGNLAQAEDAIMLDKDGFVSETNATNIFMVKKGIVLTPHADYCLPGITRATVMDLVVKENFVLHERRISLSEFHAADEVWTTGTMGEITPVVMIDGREIGDGKIGPVTRQIQKAYKILTAGQGVPIPGVAEV

SEQ ID NO: 160805 - protein, 513 aa, Zea Mays
MASEAESPVVIHAWSAPRSLSTSLMYSFAQRDDMEVLDEPLYANFLRATGVDRPYRQELLSKMDPDGNKVVKEVIFGPGDKKYRYCKHISKQHLPNLSSDLMKKGKHFILIRNPLDILAVLSGLCEDLGIPFQPQMLKWEAGPKEFDGIWAPWWYGSVHKSSGFSKPRQYPLTFPFVFYDLLEQSLPFYNMLKRQIRKIRGPQQPPLSDPPLPVPANKNILVWVGDELLPRNSAKVSVFDSVVQGGDAVWEGLRIYDGKVFKLDEHLDRLFDSAKAMAFSNVPTRDWIKDAIFKTLIANGMFNNAHIRLTLTRGKKVTSGMSPAFNLYGCALIVLAEWKPPVYDNSHGIKLVTATTRRNSPNSIDSKIHHNNLINNILAKIEGNLAQAEDAIMLDKDGFVSETNATNIFMVKKGIVLTPHADYCLPGITRATVMDLVVKENFVLHERRISLSEFHAADEVWTTGTMGEITPVVMIDGREIGDGKIGPVTRQIQKAYKILTAGQGVPIPGVAEV

SEQ ID NO: 160806 - protein, 513 aa, Zea Mays
MASEAESPVVIHAWSAPRSLSTSLMYSFAQRDDMEVLDEPLYANFLRATGVDRPYRQELLSKMDPDGNKVVKEVIFGPGDKKYRYCKHISKQHLPNLSSDLMKKGKHFILIRNPLDILPSFDKVVPPSFMELGIGELVSIYSELCGLGSPPPVIDADDLQQDPEAVLSGLCEDLGIPFQPQMLKWEAGPKEFDGIWAPWWYGSVHKSSGFSKPRQYPLTFPFVFYDLLEQSLPFYNMLKRQIRKIRGPQQPPLSDPPLPVPANKNILVWVGDELLPRNSAKVSVFDSVVQGGDAVWEGLRIYDGKVFKLDEHLDRLFDSAKAMAFSNVPTRDWIKDAIFKTLIANGMFNNAHIRLTLTRGKKSIDSKIHHNNLINNILAKIEGNLAQAEDAIMLDKDGFVSETNATNIFMVKKGIVLTPHADYCLPGITRATVMDLVVKENFVLHERRISLSEFHAADEVWTTGTMGEITPVVMIDGREIGDGKIGPVTRQIQKAYKILTAGQGVPIPGVAEV

SEQ ID NO: 160807 - protein, 385 aa, Zea Mays
MQMICNRILRWEAGPKEFDGIWAPWWYGSVHKSSGFSKPRQYPLTFPFVFYDLLEQSLPFYNMLKRQIRKIRGPQQPPLSDPPLPVPANKNILVWVGDELLPRNSAKVSVFDSVVQGGDAVWEGLRIYDGKVFKLDEHLDRLFDSAKAMAFSNVPTRDWIKDAIFKTLIANGMFNNAHIRLTLTRGKKVTSGMSPAFNLYGCALIVLAEWKPPVYDNSHGIKLVTATTRRNSPNSIDSKIHHNNLINNILAKIEGNLAQAEDAIMLDKDGFVSETNATNIFMVKKGIVLTPHADYCLPGITRATVMDLVVKENFVLHERRISLSEFHAADEVWTTGTMGEITPVVMIDGREIGDGKIGPVTRQIQKAYKILTAGQGVPIPGVAEV

SEQ ID NO: 160808 - protein, 351 aa, Zea Mays
MASEAESPVVIHAWSAPRSLSTSLMYSFAQRDDMEVLDEPLYANFLRATGVDRPYRQELLSKMDPDGNKVVKEVIFGPGDKKYRYCKHISKQHLPNLSSDLMKKGKHFILIRNPLDILPSFDKVVPPSFMELGIGELVSIYSELCGLGSPPPVIDADDLQQDPEAVLSGLCEDLGIPFQPQMLKWEAGPKEFDGIWAPWWYGSVHKSSGFSKPRQYPLTFPFVFYDLLEQSLPFYNMLKRQIRKIRGPQQPPLSDPPLPVPANKNILVWVGDELLPRNSAKVSVFDSVVQGGDAVWEGLRIYDGKVFKLDEHLDRLFDSAKAMAFSNVPTRDWSCHLHMLWYRLRMPSLRL

SEQ ID NO: 160809 - protein, 507 aa, Zea Mays
MASEAESPVVIHAWSAPRSLSTSLMYSFAQRDDMEVLDEPLYANFLRATGVDRPYRQELLSKMDPDGNKVVKEVIFGPGDKKYRYCKHISKQHLPNLSSDLMKKGKHFILIRNPLDILPSFDKVVPPSFMELGIGELVSIYSELCGLGSPPPVIDADDLQQDPEAVLSGLCEDLGIPFQPQMLKWEAGPKEFDGIWAPWWYGSVHKSSGFSKPRQYPLTFPFVFYDLLEQSLPFYNMLKRQIRKIRGPQQPPLSDPPLPVPANKNILVWVGDELLPRNSAKVSVFDSVVQGGDAVWEGLRIYDGKVFKLDEHLDRLFDSAKAMAFSNVPTRDWIKDAIFKTLIANGMFNNAHIRLTLTRGKKVTSGMSPAFNLYGCALIVLAEWKPPVYDNSHGIKLVTATTRRNSPNSIDSKIHHNNLINNILAKIEGNLAQAEDAIMLDKDGFVSETNATNIFMVKKGIVLTPHADYCLPGITRATVMDLVVKENFVLHERRISLSEFHAADEMN

SEQ ID NO: 160810 - protein, 382 aa, Zea Mays
MQMICNRILRWEAGPKEFDGIWAPWWYGSVHKSSGFSKPRQYPLTFPFVFYDLLEQSLPFYNMLKRQIRKIRGPQQPPLSDPPLPVPANKNILVWVGDELLPRNSAKVSVFDSVVQGGDAVWEGLRIYDGKVFKLDEHLDRLFDSAKAMAFSNVPTRDWIKDAIFKTLIANGMFNNAHIRLTLTRGKKVTSGMSPAFNLYGCALIVLAEWKPPVYDNSHGIKLVTATTRRNSPNSIDSKIHHNNLINNILAKIEGNLAQAEDAIMLDKDGFVSETNATNIFMVKKGIVLTPHADYCLPGITRATVMDLVVKENFVLHERRISLSEFHAADEARTRMAKVCVAAAAAQMPLQHMSLLPQKLPWTLPLQAQSAWAWVLSPHSCR

SEQ ID NO: 160811 - protein, 400 aa, Zea Mays
MASEAESPVVIHAWSAPRSLSTSLMYSFAQRDDMEVLDEPLYANFLRATGVDRPYRQELLSKMDPDGNKVVKEVIFGPGDKKYRYCKHISKQHLPNLSSDLMKKGKHFILIRNPLDILPSFDKVVPPSFMELGIGELVSIYSELCGLGSPPPVIDADDLQQDPEAVLSGLCEDLGIPFQPQMLKWEAGPKEFDGIWAPWWYGSVHKSSGFSKPRQYPLTFPFVFYDLLEQSLPFYNMLKRQIRKIRGPQQPPLSDPPLPVPANKNILVWVGDELLPRNSAKVSVFDSVVQGGDAVWEGLRIYDGKVFKLDEHLDRLFDSAKAMAFSNVPTRDWIKDAIFKTLIANGMFNNAHIRLTLTRGKKVTSGMSPAFNLYGCALIEYRFQDSSQQSYQQYSGKDRR

SEQ ID NO: 160812 - protein, 374 aa, Zea Mays
MASEAESPVVIHAWSAPRSLSTSLMYSFAQRDDMEVLDEPLYANFLRATGVDRPYRQELLSKMDPDGNKVVKEVIFGPGDKKYRYCKHISKQHLPNLSSDLMKKGKHFILIRNPLDILPSFDKVVPPSFMELGIGELVSIYSELCGLGSPPPVIDADDLQQDPEAVLSGLCEDLGIPFQPQMLKWEAGPKEFDGIWAPWWYGSVHKSSGFSKPRQYPLTFPFVFYDLLEQSLPFYNMLKRQIRKIRGPQQPPLSDPPLPVPANKNILVWVGDELLPRNSAKVSVFDSVVQGGDAVWEGLRIYDGKVFKLDEHLDRLFDSAKAMAFSNVPTRDWIKDAIFKTLIANGMFNNAHIRLTLTRGKKSGNHQFMITLMG

SEQ ID NO: 160813 - protein, 556 aa, Zea Mays
MASEAESPVVIHAWSAPRSLSTSLMYSFAQRDDMEVLDEPLYANFLRATGVDRPYRQELLSKMDPDGNKVVKEVIFGPGDKKYRYCKHISKQHLPNLSSDLMKKGKHFILIRNPLDILPSFDKVVPPSFMELGIGELVSIYSELCGLGSPPPVIDADDLQQDPEAVLSGLCEDLGIPFQPQMLKWEAGPKEFDGIWAPWWYGSVHKSSGFSKPRQYPLTFPFVFYDLLEQSLPFYNMLKRQIRKIRGPQQPPLSDPPLPVPANKNILVWVGDELLPRNSAKVSVFDSVVQGGDAVWEGLRIYDGKVFKLDEHLDRLFDSAKAMAFSNVPTRDWIKDAIFKTLIANGMFNNAHIRLTLTRGKKVTSGMSPAFNLYGCALIVLAEWKPPVYDNSHGIKLVTATTRRNSPNSIDSKIHHNNLINNILAKIEGNLAQAEDAIMLDKDGFVSETNATNIFMVKKGIVLTPHADYCLPGITRATVMDLVVKENFVLHERRISLSEFHAADEARTRMAKVCVAAAAAQMPLQHMSLLPQKLPWTLPLQAQSAWAWVLSPHSCR

SEQ ID NO: 160814 - protein, 216 aa, Zea Mays
MSFFFRMASRLRPSTPEEVVRSIKDSFLALHTRTHAKALEEVEKNMSSLRLLIFGDGEVEPNEEQVLQITLEICKEDVISLIVQDLPSLGWGVRKDLAICWCILLRQKVDETYCCVQYLENHLELLDFLVGCYKNLDIALNCGNMLRECIKYPTLAKYILESGSFELFFEYVELPNFDIASDALNTFKIVAGSAYQARSCSRRVLEFPLRAGHYLF

SEQ ID NO: 160815 - protein, 262 aa, Zea Mays
MSFFFRMASRLRPSTPEEVVRSIKDSFLALHTRTHAKALEEVEKNMSSLRLLIFGDGEVEPNEEQVLQITLEICKEDVISLIVQDLPSLGWGVRKDLAICWCILLRQKVDETYCCVQYLENHLELLDFLVGCYKNLDIALNCGNMLRECIKYPTLAKYILESGSFELFFEYVELPNFDIASDALNTFKDLLTKHEVVVAEFLSSHYEQVFVANPNKPRCIVVALLDNRREVLKLLHNLPSSKGDDELDEEKDLIIQEIQKLA

SEQ ID NO: 160816 - protein, 233 aa, Zea Mays
MSFFFRMASRLRPSTPEEVVRSIKDSFLALHTRTHAKALEEVEKNMSSLRLLIFGDGEVEPNEEQVLQITLEICKEDVISLIVQDLPSLGWGVRKDLAICWCILLRQKVDETYCCVQYLENHLELLDFLVGCYKNLDIALNCGNMLRECIKYPTLAKYILESGSFELFFEYVELPNFDIASDALNTFKDLLTKHEVVVAEFLSSHYEQFFELYSRLLSSTNYVTRRQAIKSSC

SEQ ID NO: 160817 - protein, 158 aa, Zea Mays
MVSAAFDTGCNGFTKPIQYKKRQRTSMEQQRPASMTRAVPESNNNQHHSPLEGRMRHTPAADKRLDGPKNLPPLAMQRRSDGKGTRVNRRCRRSSCARSASPFFTFYRGAKGGPKYVPVAVPSDLLGKEIKEALAAESNNSFVIWYLSLMCHLTSIGL

SEQ ID NO: 160818 - protein, 112 aa, Zea Mays
MEQQRPASMTRAVPESNNNQHHSPLEGRMRHTPAADKRLDGPKNLPPLAMQRRSDGKGTRVNRRCRRSSCARSASPFFTFYRGAKGQLCNFSCINATVRSYVLLSLILCPLF

SEQ ID NO: 160819 - protein, 266 aa, Zea Mays
MSEPSMADLMEMMKSWHSELKLEIKEMKIEMASLKDKASSSSGVGGGNRMEPPREPDRPPRFQKWDFPRFDGKSDPRLFLNKCESYFRQQRTMAEERVGMASYNLEDVAQEWFMQLQEDEGTSSWGRFKDLIDLRFGPALRSAPLFELTECRRTGTVEEYSNRFQSLLFHAGRLDEAQRVQLFTGGLLPPLSHAVRLHNPETLAAAMSLARQVELMELDKMAAAPAKPAHRALPAAIKPQQAPPLLALPAPPAGAAPAARERQPGR

SEQ ID NO: 160820 - protein, 128 aa, Zea Mays
MDRSGRRALLLVSSSGTFLGCFLTGLSFYFKVYYAAYSVGMGPVPWVIMSEIFSIDMKAIAGGFVTLASWIGSFAISYSFNFLMDWNPAGTFFLFSAASLVTVLFVAKLVPETKGRTLEEIQTLLKAT

SEQ ID NO: 160821 - protein, 258 aa, Zea Mays
MVFLATAVVVCGSFEFGTCVGYSAPAQAGIVSDIGLSNSEYGVFGSVLTIGAMIGAVTSGSLADILGRKMTMRFAAVVGIFGWLTVYFAKDAMMLYAGRVLLGYCTGVLSYVVPVYISEIAPKGIRGGLATSNQLFICSGCSAAYIIGALVSWRCLVVVGLIPCAVLLVGLFFIPESPRWLANIGKEREFHASLQEFRGEDSDISEEATEIKDYIKSVRRLPKAKIQDLFQRKNMYAVTVSKLDKFCPLKKRGIYSSF

SEQ ID NO: 160822 - protein, 181 aa, Zea Mays
MVFLATAVVVCGSFEFGTCVGYSAPAQAGIVSDIGLSNSEYGVFGSVLTIGAMIGAVTSGSLADILGRKMTMRFAAVVGIFGWLTVYFAKDAMMLYAGRVLLGYCTGVLSYVVPVYISEIAPKGIRGGLATSNQLFICSGCSAAYIIGALVSWRCLVVVGLIPCAVLLVGLFFIPESPRPT

SEQ ID NO: 160823 - protein, 289 aa, Zea Mays
MALFGCSRIDTLCCPTCWAFLHSRVSKVAGEMANIGKEREFHASLQEFRGEDSDISEEATEIKDYIKSVRRLPKAKIQDLFQRKNMYAVTVGVGLMIFQQLGGINALGFYTSYIFSSAGFSGKLGTTLIGVIQIPITFFGALLMDRSGRRALLLVSSSGTFLGCFLTGLSFYFKAQGLCTQLVPTLALCGILVYYAAYSVGMGPVPWVIMSEIFSIDMKAIAGGFVTLASWIGSFAISYSFNFLMDWNPAGTFFLFSAASLVTVLFVAKLVPETKGRTLEEIQTLLKAT

SEQ ID NO: 160824 - protein, 173 aa, Zea Mays
MAGLAATLPSPAAGASPLLLHCNAAPSVSFRHRRRWQRPAATRHDGRVAQLLLPVARRWLPAAAPPGVNGARGGIAASGSGAGAVAGEAPYRGNEGQGSLWMVFLATAVVVCGSFEFGTCVGYSAPAQAGIVSDIGLSNSEYGVFGSVLTIGAMIGAVTSGSLADILGRKMVK

SEQ ID NO: 160825 - protein, 348 aa, Zea Mays
MAGLAATLPSPAAGASPLLLHCNAAPSVSFRHRRRWQRPAATRHDGRVAQLLLPVARRWLPAAAPPGVNGARGGIAASGSGAGAVAGEAPYRGNEGQGSLWMVFLATAVVVCGSFEFGTCVGYSAPAQAGIVSDIGLSNSEYGVFGSVLTIGAMIGAVTSGSLADILGRKMTMRFAAVVGIFGWLTVYFAKDAMMLYAGRVLLGYCTGVLSYVVPVYISEIAPKGIRGGLATSNQLFICSGCSAAYIIGALVSWRCLVVVGLIPCAVLLVGLFFIPESPRWLANIGKEREFHASLQEFRGEDSDISEEATEIKDYIKSVRRLPKAKIQDLFQRKNMYAVTLLFPEKYK

SEQ ID NO: 160826 - protein, 407 aa, Zea Mays
MGIMRVADDVEARLVVGAGGGGGTATTTTEPLLRHCHGGRKEEDDQGSKIRDSPEAEGASDCGRTDGGSLRMVLVSTAVAVCGSFEFGTCVGYSAPTQSGIVEEVGLSISEFAIFGSVLTVGAMVGAVTSGRLADFLGRKMTMRISATICIFGWLSIHLAKSAIMLYFGRTLLGFSTGVLSYVVPVFIAEIAPKNLRGGLATSNQLLICSGSSATYIIGALVAWRNLVLVGLVPCVLLLAGLFFIPESPRWLANVGREKEFHASLQKLRGEDADEYIESLYSLPKARLRDLFLSKNIYAVIVGVGLMVFQQLGGINGVGFYASYIFSSAGFSGKLGTILIGIIQIPITLFGAILMDRSGRRVLLMVSASGTFLGCFLTGVSFYLKAQGLFSEWVPTLALSGILVGKY

SEQ ID NO: 160827 - protein, 248 aa, Zea Mays
MVGAVTSGRLADFLGRKMTMRISATICIFGWLSIHLAKSAIMLYFGRTLLGFSTGVLSYVVPVFIAEIAPKNLRGGLATSNQLLICSGSSATYIIGALVAWRNLVLVGLVPCVLLLAGLFFIPESPRWLANVGREKEFHASLQKLRGEDADEYIESLYSLPKARLRDLFLSKNIYAVIVGVGLMVFQQLGGINGVGFYASYIFSSAGFSGKLGTILIGIIQIPITLFGAILMDRSGRRVLLMVLTLQS

SEQ ID NO: 160828 - protein, 538 aa, Zea Mays
MGIMRVADDVEARLVVGAGGGGGTATTTTEPLLRHCHGGRKEEDDQGSKIRDSPEAEGASDCGRTDGGSLRMVLVSTAVAVCGSFEFGTCLYTAFSSSLPYFSFCSASCRHLFYYRQSVGYSAPTQSGIVEEVGLSISEFAIFGSVLTVGAMVGAVTSGRLADFLGRKMTMRISATICIFGWLSIHLAKSAIMLYFGRTLLGFSTGVLSYVVPVFIAEIAPKNLRGGLATSNQLLICSGSSATYIIGALVAWRNLVLVGLVPCVLLLAGLFFIPESPRWLANVGREKEFHASLQKLRGEDADVSEEAIEIKEYIESLYSLPKARLRDLFLSKNIYAVIVGVGLMVFQQLGGINGVGFYASYIFSSAGFSGKLGTILIGIIQIPITLFGAILMDRSGRRVLLMVSASGTFLGCFLTGVSFYLKAQGLFSEWVPTLALSGILVYIGAYSIGMGPVPWVVMSEIFSINMKATGGSLVTLVSWLGSFAISYSFSFLMDWSSAGTFFMFSSASLITVLFVAKLVPETKGRTLEEIQDSLNTRR

SEQ ID NO: 160829 - protein, 426 aa, Zea Mays
MFDPSVRKIYISMTPTEFRLSMHLNLQFAIFGSVLTVGAMVGAVTSGRLADFLGRKMTMRISATICIFGWLSIHLAKSAIMLYFGRTLLGFSTGVLSYVVPVFIAEIAPKNLRGGLATSNQLLICSGSSATYIIGALVAWRNLVLVGLVPCVLLLAGLFFIPESPRWLANVGREKEFHASLQKLRGEDADVSEEAIEIKEYIESLYSLPKARLRDLFLSKNIYAVIVGVGLMVFQQLGGINGVGFYASYIFSSAGFSGKLGTILIGIIQIPITLFGAILMDRSGRRVLLMVSASGTFLGCFLTGVSFYLKAQGLFSEWVPTLALSGILVYIGAYSIGMGPVPWVVMSEIFSINMKATGGSLVTLVSWLGSFAISYSFSFLMDWSSAGTFFMFSSASLITVLFVAKLVPETKGRTLEEIQDSLNTRR

SEQ ID NO: 160830 - protein, 380 aa, Zea Mays
MGIMRVADDVEARLVVGAGGGGGTATTTTEPLLRHCHGGRKEEDDQGSKIRDSPEAEGASDCGRTDGGSLRMVLVSTAVAVCGSFEFGTCVGYSAPTQSGIVEEVGLSISEFAIFGSVLTVGAMVGAVTSGRLADFLGRKMTMRISATICIFGWLSIHLAKSAIMLYFGRTLLGFSTGVLSYVVPVFIAEIAPKNLRGGLATSNQLLICSGSSATYIIGALVAWRNLVLVGLVPCVLLLAGLFFIPESPRWLANVGREKEFHASLQKLRGEDADVSEEAIEIKEYIESLYSLPKARLRDLFLSKNIYAVIVGVGLMVFQQLGGINGVGFYASYIFSSAGFSGKLGTILIGIIQIPITLFGAILMDRSGRRVLLMVLTLQS

SEQ ID NO: 160831 - protein, 510 aa, Zea Mays
MGIMRVADDVEARLVVGAGGGGGTATTTTEPLLRHCHGGRKEEDDQGSKIRDSPEAEGASDCGRTDGGSLRMVLVSTAVAVCGSFEFGTCVGYSAPTQSGIVEEVGLSISEFAIFGSVLTVGAMVGAVTSGRLADFLGRKMTMRISATICIFGWLSIHLAKSAIMLYFGRTLLGFSTGVLSYVVPVFIAEIAPKNLRGGLATSNQLLICSGSSATYIIGALVAWRNLVLVGLVPCVLLLAGLFFIPESPRWLANVGREKEFHASLQKLRGEDADVSEEAIEIKEYIESLYSLPKARLRDLFLSKNIYAVIVGVGLMVFQQLGGINGVGFYASYIFSSAGFSGKLGTILIGIIQIPITLFGAILMDRSGRRVLLMVSASGTFLGCFLTGVSFYLKAQGLFSEWVPTLALSGILVYIGAYSIGMGPVPWVVMSEIFSINMKATGGSLVTLVSWLGSFAISYSFSFLMDWSSAGTFFMFSSASLITVLFVAKLVPETKGRTLEEIQDSLNTRR

SEQ ID NO: 160832 - protein, 107 aa, Zea Mays
MRRLYNDIIYFLQNHVEPVPPPPPGTTTTAASCRLVELGSADDASAAQTWRPRRGDDDEAPVKLFGVRLNDGKKRRAQQVVPLEEKGGGNDQGEGLADGDRKWPWRW

SEQ ID NO: 160833 - protein, 238 aa, Zea Mays
MHAACKRRLASVGRGEKGFRKIVADRWEFANEFFRKGAKHLLSEIHRRKSSSCSQPPQKLQPPPLPQHQRPYDLSLFFPPPQPPRHPTSGYHVVQEEDHGHGGNKDFLATLSEDNRELRRRNSLLLSELAHMRRLYNDIIYFLQNHVEPVPPPPPGTTTTAASCRLVELGSADDASAAQTWRPRRGDDDEAPVKLFGVRLNDGKKRRAQQVVPLEEKGGGNDQGEGLADGDRKWPWRW

SEQ ID NO: 160834 - protein, 87 aa, Zea Mays
MAEASDRAGAHRPPRRNRGGRGRAREHFANQGRCGAVRARLRERNCALAGRRSSFGSSSQQRLGVGRSGWMGMGWWTRRWPAESPTK

SEQ ID NO: 160835 - protein, 244 aa, Zea Mays
MDKIKDSNRQAKQLEDLTVKMKECKRLIKEFDRILKDEESNNPPEINKQLNDRKQFMIKELNSYVTLRKTYQSSLGNNNKRVELFDMGAGSSEPAAEDNIQMASAMTNQQLIDTGRNQMDQTDQAIERSKMVVAQTVETGAQTAATLTQQTEQMKRIGNELDTVHFSLKKASQLVKEIGRQVATDKCIMAFLFLIVLGVIAIIVVKIVHPNNKNIRDIPGLAPPAQNYQIHNRRLLWAEASIGM

SEQ ID NO: 160836 - protein, 152 aa, Zea Mays
MDKIKDSNRQAKQLEDLTVKMKECKRLIKEFDRILKDEESNNPPEINKQLNDRKQFMIKELNSYVTLRKTYQSSLGNNNKRVELFDMGAGSSEPAAEDNIQMASAMTNQQLIDTGRNQMDQTDQAIERSKMVVAQTVETGAQTAATLTQQSK

SEQ ID NO: 160837 - protein, 91 aa, Zea Mays
MASDVPMTPELEQIDGEIHDIFRALQNGFQKMDKIKDSNRQAKQLEDLTVKMKECKRLIKEFDRILKDEESNNPPEINKQLNDRKQFMIPK

SEQ ID NO: 160838 - protein, 277 aa, Zea Mays
MTKEHEELRCSHDVLVQRYDSILIEQSSNDDALSCVAQLRVKNAMLERQVDLLSHDKLALTEKYDSLSYSHDNLLDRHIMLNVAHEVIIANLNSCEPHSRTCAHLNCISSCANPCCSKESQSLIEQQVLGSQKKWCGNKKQRQLRRRHIAQLSQDIHGRVVKKLEKGKTAASVKLHKKDVPKDEEINMSLEKGKDLINHVVCTDHVSMSSKSNKIRGKRRCFKCKALGHLITSCPYKDKRRDKEMFWMQQQGPHDHFMSGIDEPSMCILQDDSHQGK

SEQ ID NO: 160839 - protein, 59 aa, Zea Mays
MAVCSPSRARSPRPAASSSFPLAMNAVDPLLQFLHVVWSSTARVTCSWLWETSEPLLTA

SEQ ID NO: 160840 - protein, 198 aa, Zea Mays
MPRNFRKRGIEQDTDDRSDDEDTRRLRYVETELAKKRGKMVDVGHKEEMDHVDELYTVPDHLKVKKKNSEESSTQWTTGIAEVQLPIEYKLRNIEETEAAKKLLQEKRLARKPKPDANIPSSYSADYFHRGKEYDEKLRRENPGLYKDNDSRPSGNPGGKATDTKNPDGVGAGRREAASDELMLQRFRKREKFRALRR

SEQ ID NO: 160841 - protein, 210 aa, Zea Mays
MHSGDDRPMPNTKAEWSSIYLTEEQYLEVSVPWMATRSDGYRALCRWWGSPEFRAISERNRGNRGTESFHNYGGDGHVRLAKRMEVKSGRTPTDVEVYMQGHRGSDPQNPDVLCTQTATDRLDSYGQEMVQRHGEEYDWRSQPIDPQAAYASAGGQAHGRLGIFDSTIDSRELRRRGRQSTSSSSQSSRSRSAAHEIELAVLRQQAEYHQ

SEQ ID NO: 160842 - protein, 264 aa, Zea Mays
MTVIRPADMDALQNALDNNNVSLFFTETPTNPFLRCIDIEHVSNMCHSKGALLCIDSTFASPINQKALTLGADLVIHSATKYIAGHNDVIGGCVSGRDELVSKVRIYHHVVGGVLNPNAAYLILRGMKTLHLRVQCQNDTALRMAQFLEEHPKIARVYYPGLPSHPEHHIAKSQMTGFGGVVSFEVAGDFDATRKFIDSVKIPYHAPSFGGCESIIDQPAIMSYWDSKEQRDIYGIKDNLIRFSIGVEDFEDLKNDLVQALEKI

SEQ ID NO: 160843 - protein, 253 aa, Zea Mays
MAATLFSTSLLPQFLSLSAKPAAAAPSAAAFPSGLPQLHALSAAAVGFRPLEPVRAAATAAVTEELEAEGRSGGDEFSDDLRVFVGNLPFSVDSAQLAGLFEQAGSVEMVEVIYDKLTGRSRGFGFVTMSSVEEVEVLDGRSLRVNSGPPPPRDRSSPSPQRPRGDANRVYVGNLSWGVDNSALANLFSEQGEVLEARIIYDRESGRSRGFGFVTYGSAEEVENAISNLDGADLDGRQIRVTVAESKPPRQQY

SEQ ID NO: 160844 - protein, 187 aa, Zea Mays
MAATLFSTSLLPQFLSLSAKPAAAAPSAAAFPSGLPQLHALSAAAVGFRPLEPVRAAATAAVTEELEAEGRSGGDEFSDDLRVFVGNLPFSVDSAQLAGLFEQAGSVEMVEVIYDKLTGRSRGFGFVTMSSVEEVEVAVDQFNGYVSSLRFFQSYAPSFAVTMDHSPNVRHCLFTWNCDLCNTLGIP

SEQ ID NO: 160845 - protein, 59 aa, Zea Mays
MWVARKNTGLLTFEKSLHPDTSIMSSSAKPSLGRGQRRSLRLGAPGVVDFKVSFPSRDL

SEQ ID NO: 160846 - protein, 78 aa, Zea Mays
MTDATTPAPAVIVAPYATINVKNHIPVTLELAKPNFNQWEPFFTSLCGKFALLSHIDGLQEARPTDPSWGIADAYVRS

SEQ ID NO: 160847 - protein, 64 aa, Zea Mays
MRLEIFQEIDNNQKCSFYQLCVPHNRNPNIQLIQIEHLYDTISQHWEYASNTLESSLRLSNKLL

SEQ ID NO: 160848 - protein, 113 aa, Zea Mays
MDGPQDLLRAALDRRVLWDPAWPPYLGVGGYIYCRQDSAVIGNCTASTKLLLLPPVYWSQRTAGSTSCMSPAEQQRHGECKKLVEAVRRLGLPLPPGGAPCCHGEEGGHGPRP

SEQ ID NO: 160849 - protein, 113 aa, Zea Mays
MERAFTCGAASSAQKTRLLCSWASSPASAFPNSHANSSAQESTSTISIAPIPVPFAAIVLSHRSLADANCRSYIVRLCSYRSAAHLLDGMPSRVAMAFREGGKRGLASSAIAT

SEQ ID NO: 160850 - protein, 254 aa, Zea Mays
MAVKDNLMVAGGFQGELICKYVDRPGVAFCTSLTGGSSSITNAVDIHQAPSGATRVMAANNDCVVRTFDAERYSLLTQLTFPWSVNSTSVSPDGKLLAVLGDSTECVVADPQSGKAVATLRGHLDYSFASAWHPDGRVLATGNQDATCRLWDARSLSEPFAVLGARIGAVRGLRFSPDGRFLAAAEAADFVHVYDAAAGYAGAAQEVDVFGEVAGAAFSPDGEALFVSVADRTYGGLLEFRRRRADRYLDACFF

SEQ ID NO: 160851 - protein, 281 aa, Zea Mays
MAVKDNLMVAGGFQGELICKTRGGILHQPDRWQQFHHERRRHPPGTQRRHASDGGEQRLRRQDVRRREIQPSHAAHLPVVRQQHVGEPRRQAAGGPGRQHGVRGRRPAVGQGGGDAARAPGLLLRVGVAPRRPRPGDGEPGRDVPAVGRAQPVGAVRRARGPDRRRPGPPLLPRRQVPGRGRGRRLRARVRRRGRVRRRRAGGGRVRGGRRRRVQPRRRGAVRERRRPHLRRPARVPTPAGGPLPRRVFLLRERRARAPSVVYCACACRRAARIHVVCCVV

SEQ ID NO: 160852 - protein, 339 aa, Zea Mays
MVWQDVSRWTNLLKRVTLSSSFFLQLRNLLWPTSKHDVYLVQSYSVTHWSALLRRGREVLNVAGRLAPTQNVKGAGPLSRVQISAMAVKDNLMVAGGFQGELICKYVDRPGVAFCTSLTGGSSSITNAVDIHQAPSGATRVMAANNDCVVRTFDAERYSLLTQLTFPWSVNSTSVSPDGKLLAVLGDSTECVVADPQSGKAVATLRGHLDYSFASAWHPDGRVLATGNQDATCRLWDARSLSEPFAVLGARIGAVRGLRFSPDGRFLAAAEAADFVHVYDAAAGYAGAAQEVDVFGEVAGAAFSPDGEALFVSVADRTYGGLLEFRRRRADRYLDACFF

SEQ ID NO: 160853 - protein, 894 aa, Zea Mays
MYILCNEEPLWMSKCLSIGGPLEYKVSWKKTALCRLGLCSENKEIWQKPRQFDGFNSLYLYRRWYRCFTTLNSFSFDDGHVERKDDFLLDQFRSQYDGKCPVLVTKLAETWPARTKWTLQQLTKDFGEVPFRISQRSPQKITMKLKDYVSYMELQHDEDPLYIFDDKFGESAPTLLEDYSVPHLFQEDFFDILDYDQRPAFRWLIIGPERSGASWHVDPGLTSAWNTLLCGRKRWALYPPGRVPGGVTVHVNDEDGDVDIETPTSLQPLECTQLPGETIFVPSGWWHCVLNLETTIAVTQNFVNQSNFQHVCLDMAPGHRHKGVCRAGLLAVPGKFVKDNKNHQSVTMSGWNHPDMSRKEKRLKGSEALRISNSINHCSAFEFSGVQESLENQDFSYDIDFLSQFIEKERDHYSSLWSPTNSIGQREAREWLRRLWVLKPDLRELIWKGACLAINVDKWYSCLEEICACHSLPPPTEDEKLPVGTGSNPVFIVSGNVIKIYAEGGLVYSVHGLGTELEFYDLLQKSGSPLINHIPEIIASGFLEYKDDIYSTVPWNGKGIPEILVKYYSLEVSCANSCFPLGLWSKQRFGMCSSADVSDRPIWPYMVTRKCKGDIFARIRDMLSKTDILHLASSLGVQMRNIHLLPLPPVEHVPESGNNDVKEVVGTCDDTTVLPEWQQLVSTLNRRKQNVKKHLANWGDSVPQVLVEKAEEYLPPNMGFLIKFVKDDGELLYPCPSWIHSDIMDDNILIEGIIKLSSSGERERVYDSDRDKINAIHIIDFSDLSIGDPICDIIPLHLDIFRGDSDLLKEFLRSYQLPLLRGESTTDVYRSVRNSKFSRASYRAMCYCILHEDNVLGAIFSLWKEMRAATSWEDVENLVWGELNRYQDSAVRSA

SEQ ID NO: 160854 - protein, 433 aa, Zea Mays
MAPGHRHKGVCRAGLLAVPGKFVKDNKNHQSVTMSGWNHPDMSRKEKRLKGSEALRISNSINHCSAFEFSGVQESLENQDFSYDIDFLSQFIEKERDHYSSLWSPTNSIGQREAREWLRRLWVLKPDLRELIWKGACLAINVDKWYSCLEEICACHSLPPPTEDEKLPVGTGSNPVFIVSGNVIKIYAEGGLVYSVHGLGTELEFYDLLQKSGSPLINHIPEIIASGFLEYKDDIYSTVPWNGKGIPEILVKYYSLEVSCANSCFPLGLWSKQRFGMCSSADVSDRPIWPYMVTRKCKGDIFARIRDMLSKTDILHLASSLGVQMRNIHLLPLPPVEHVPESGNNDVKEVVGTCDDTTVLPEWQQLVSTLNRRKQNVKKHLANWGDSVPQVLVEKAEEYLPPNMGFLIKFVKVNLHPCLLRCSCRALGLTSAD

SEQ ID NO: 160855 - protein, 265 aa, Zea Mays
MELLPTDQICSGHENIDMGGNQYSSEHTIQGIEDKKFSIASTSQLSSSQNLLKQRHHLDSNSPSNITYEAYEEKFGPSSGSFAQRNLKADVTLNSTNAVQKKTMNMQPTQPINDNVMNRHPQTLTRSASYPCENNESERRGLGKRTLGDPQVTMGTSMVVDGSFVSSMSSDISVEESSFRQLQNAVSQLDVQTKLCIRDGLYRLARSAQHRQVIPNMMSSNEDNPDIKDLQNAETLRKYDISNKDLIYTYTSMNQYLYGFEKCSR

SEQ ID NO: 160856 - protein, 311 aa, Zea Mays
MELLPTDQICSGHENIDMGGNQYSSEHTIQGIEDKKFSIASTSQLSSSQNLLKQRHHLDSNSPSNITYEAYEEKFGPSSGSFAQRNLKVQKKTMNMQPTQPINDNVMNRHPQTLTRSASYPCENNESERRGLGKRTLGDPQVTMGTSMVVDGSFVSSMSSDISVEESSFRQLQNAVSQLDVQTKLCIRDGLYRLARSAQHRQVIPNMMSSNEDNPDIKDLQNAETLRKFVDPRSIETQTNPIDRSIALLLFHQSSDHAAVAVDDASSLKPPAGSKHHQGPAANQNQGLIPDSSVYSPGDGAPKDVQSLDKF

SEQ ID NO: 160857 - protein, 529 aa, Zea Mays
MPDWRVREFEGKFTDEFAHSNNNKHESGVEAPGVTSSKKLKHTVAGEKIQGVIPGINSSDPQKCNSENIQHENRIVSQNINSAGDCIGDCKDSSNAFSSREENTIAETRCPTDDWNSCQFALSNGSSILNNHSAPQDSLTYGDNDLNYIDWPGIDNFEDVDTLFRRSDFTYDPQQLENTDGLSWLPSSDAVYSSDVALQQGFDSSYSDYDILDDLSAFQCAEDKSLPSVGPSSDLCDNQFNDTYLFSEQKNANAYGEQIYQEDVMELLPTDQICSGHENIDMGGNQYSSEHTIQGIEDKKFSIASTSQLSSSQNLLKQRHHLDSNSPSNITYEAYEEKFGPSSGSFAQRNLKADVTLNSTNAVQKKTMNMQPTQPINDNVMNRHPQTLTRSASYPCENNESERRGLGKRTLGDPQVTMGTSMVVDGSFVSSMSSDISVEESSFRQLQNAVSQLDVQTKLCIRDGLYRLARSAQHRQVIPNMMSSNEDNPDIKDLQNAETLRKYDISNKDLIYTYTSMNQYLYGFEKCSR

SEQ ID NO: 160858 - protein, 501 aa, Zea Mays
MPDWRVREFEGKFTDEFAHSNNNKHESGVEAPGVTSSKKLKHTVAGEKIQGVIPGINSSDPQKCNSENIQHENRIVSQNINSAGDCIGDCKDSSNAFSSREENTIAETRCPTDDWNSCQFALSNGSSILNNHSAPQDSLTYGDNDLNYIDWPGIDNFEDVDTLFRRSDFTYDPQQLENTDGLSWLPSSDAVYSSDVALQQGFDSSYSDYDILDDLSAFQCAEDKSLPSVGPSSDLCDNQFNDTYLFSEQKNANAYGEQIYQEDVMELLPTDQICSGHENIDMLQGGNQYSSEHTIQGIEDKKFSIASTSQLSSSQNLLKQRHHLDSNSPSNITYEAYEEKFGPSSGSFAQRNLKVQKKTMNMQPTQPINDNVMNRHPQTLTRSASYPCENNESERRGLGKRTLGDPQVTMGTSMVVDGSFVSSMSSDISVEESSFRQLQNAVSQLDVQTKLCIRDGLYRLARSAQHRQVIPNMMSSNEDNPDIKDLQNAETLRNLSFLMFL

SEQ ID NO: 160859 - protein, 265 aa, Zea Mays
MERAAPVRSSHTSTAGLLAWPQPDGAASQAPRRPNQPTEEFRKVVFGGQVTEEADGLNKTKMRTTASAPKSKETTGIGMFKAESAAAAVTTASRDRQDGTIPPRKPTSVAGVARQRELSHTVESSGDGKMKRQVSNAKSKELSGHNIFADHEDPSPNRSSSSAAALAHVKNANVSSFSFGKADMDSTVKTAKKKGSSNKSTDLMNGKAISERDSAPAGKQPLNRAKPKGLSGSSIFADGKASTTGDHAGRRTRQPPGGDSSILLG

SEQ ID NO: 160860 - protein, 188 aa, Zea Mays
MVHHFPKASSTVSHISFAEDGTDPPKKPTSVAEVAKQRELSGTLQSETDSKTKKQISNAKSKELSGHDIFADTLDSRSNRARNPSNGSTASHAPAKNTNASTFSFGDANTDSTPKTARKITGKKVNDLTGNDIFKGDVPPASAEKHLSTAKLKEITGSNIFADGKEPIRERVGGNRKPPGGESSIALI

SEQ ID NO: 160861 - protein, 198 aa, Zea Mays
MESRNFSHPPHKCLFQQASSTVSHISFAEDGTDPPKKPTSVAEVAKQRELSGTLQSETDSKTKKQISNAKSKELSGHDIFADTLDSRSNRARNPSNGSTASHAPAKNTNASTFSFGDANTDSTPKTARKITGKKVNDLTGNDIFKGDVPPASAEKHLSTAKLKEITGSNIFADGKEPIRERVGGNRKPPGGESSIALI

SEQ ID NO: 160862 - protein, 1023 aa, Zea Mays
MRLKFDELKLISEKDPCSERRDFLIEVLVAFFEKRQSQKDAVNALPLYPNEQIMWDESLVPSINYSGEGCLALPKLNLQFLTLHDYLLRNFNLFRLESTYEIREDIQEAVPHLHAYINNEGETAFRGWSRMAVPIKGFKITEVKQPNIGEVKPSAVTADVTFSISSYRYQIKSEWDALKEHDVLFLLSIRPSFEPLSPEEAEKSTVPERLGLQYVRGCEVIEIRDEEGALMNDFTGRIKREEWKPPKGEIRTVRVALDTAQYHIDVTETAEKGTENVYGTFNILMRRKPKENNFKAILESIRDLMNETCVVPEWLHNIFLGYGNPSAAQWMNMPDLLEVIDFKDTFLDANHVQQSFPDYQVTFINSDGTKNLHPSPPFKIRLSKKMRESSHALPGNMNSNLTVKSRNNMADGEPQKEKLIVETYIPADPGPYPQDKPKQNSVRFTPTQIGAIISGIQPGLTMVVGPPGTGKTDTAVQILNVLYHNCPSQRTLIITHSNQALNDLFEKIMQRDVPARYLLRLGQGEQELATDLDFSRQGRVNAMLVRRLELLGEVSKLARSLRLPEDVGYTCETAAYFWLLHVYARWEQFLAACAQNQDKPSFVKDRFPFSEFFSDTPQPIFTGESFEMDMHAAKGCFKHLSTIFQELEECRAFELLKSTVERANYLMTKQAKIVAMTCTHAALKRRDFLQLGFKFDNLLMEESAQILEIETFIPMLLQRQEDGHARLKRCILIGDHHQLPPVVKNMAFQKYSHMDQSLFTRFVRLGVPYIELNAQGRARPSIAELYNWRYRELGDLPYVREQAIFHKANAGFSFEYQLVDVPDYKGKGESAPSPWFYQNEGEAEYIVSVYIYMRLIGYPANKISILTTYNGQKLLIRDVINKRCKPWNIEPPNKVTTVDKFQGQQNDFILLSLVRTRFVGHLRDVRRLIVAMSRARLGLYVFCRRSLFEQCYKLQPTFQLLLQRSDKLALNLEECTPFTERPLEETGNIHYITGIEDINSSSKVQAGTSSSSAIHAVLCSSGK

SEQ ID NO: 160863 - protein, 169 aa, Zea Mays
MHENRDEINALLDTDRQSGGAALSVESVASAGAGAGAAPPPAAKKRRLSSCTDKSVVDTASSAARPPERSMEQEQRVELANDRDAQSCCVGEVESGRRFALGEAEAEAAEGDSPDEQRRRRERIQETVAALRNMVPGGIAKDAAAVLDEAICYLQYLKLKVKTLGAVSL

SEQ ID NO: 160864 - protein, 346 aa, Zea Mays
MGFRCGRASSSLLCEEDVAGMFGCNGHDDEEVGLLVLGMDTTFAALPSQSDEVVASLMEKEKEQLHSVATGDYLQRLSSGGLESSCRIAAIDWIKKAQAYHDFGPLSAYLAVNYLDRVLSTNQVPADADHQPWMPQLLSVACLTIAAKMEETVVPRRLDIHQNQVLSEKYRFDLDAIQRMEIYILDSLNWRMQAVTPFSYINYFVDKFTDGKPLSCGFISRCTEIILGSLEATKLLQFRPSEMAAAVVLSAAAESQVIAFSGALLASNILVNKENVRRCHEALQEVGLVKKKTDYSASPSRVLDASCFSFKTDDNQTAGSSQSQANNNGNYNQAYSPASKRTRLDI

SEQ ID NO: 160865 - protein, 235 aa, Zea Mays
MGQPARFHRHKERQRRKTSLLIFVLIFKLHSSNNIIYSAISFFWQDVYNFMLDSGMDPVALPVGSSSLMSSLQAMKYSTYGQDSQPGSNTIDGIMNGVIKQKLKIIPKNFTWGEQSDSVYNALVNDFMKPKIDEIDELLSYGINVTVYNGQLDVICSTNGAEAWVQKLKWDGLRTFLSLPRQPLYCGASKGTKAFVRSHKNLHFYWILGAGHYVPADQPCIALSMISSITQSPAS

SEQ ID NO: 160866 - protein, 235 aa, Zea Mays
MERPRCYSPLALHLLLCLFSLRACSAASITAGTPDESELWGYVEVRPKAHLFWWYYKSPQKTSTPSKPWPTVLWLQGGPGASGVGLGNFLEMGPLDVDLKPRNSTWLHKADLIFVDNPVGTGYSYVEDDSLFVTSDWQQAADMTTVVRALAKEVPTLASSPLFLVAESYGGKYAATLGASIARAVRAGELNVTLGGVAVGDSWISPEDFTVRLTIPSFVSAEINHGHITELIVTC

SEQ ID NO: 160867 - protein, 314 aa, Zea Mays
MTMLCGISICSMCMKQLGSDGWSRVVKIEVVEQPCNKSIAPLSEAQFVRYPQPITYSREECKCNAVRSFAIISSQRSGSGWFETLLNSHMNVSSNGEIFSRKERRSNISSIIDTLDKVYNLDWNSSASKNECTAAIGFKWMLNQGLVANHADVVDYFNRRGVSAIFLFRRNLLRQLVSQVANNHDRLLKQLNGTHKAHVHTKREAHILARYRPRLNTTSLIWQLKRADEYTRDALENLNNTRHMSVYYEDVVRNRTKLLDVLDFLGVPRRKLVSRHVKIHTKPLSEQIENWDEVYSALNGTQYEGFLNAADYLV

SEQ ID NO: 160868 - protein, 364 aa, Zea Mays
MGGAKAEDKPAAAAAEDWCYQFGNKDAFDLKPPKKSPIALRTVVFAMTMLCGISICSMCMKQLGSDGWSRVVKIEVVEQPCNKSIAPLSEAQFVRYPQPITYSREECKCNAVRSFAIISSQRSGSGWFETLLNSHMNVSSNGEIFSRKERRSNISSIIDTLDKVYNLDWNSSASKNECTAAIGFKWMLNQGLVANHADVVDYFNRRGVSAIFLFRRNLLRQLVSQVANNHDRLLKQLNGTHKAHVHTKREAHILARYRPRLNTTSLIWQLKRADEYTRDALENLNNTRHMSVYYEDVVRNRTKLLDVLDFLGVPRRKLVSRHVKIHTKPLSEQIENWDEVYSALNEILMRGRRLLPCMVAFSVT

SEQ ID NO: 160869 - protein, 154 aa, Zea Mays
MLYITFLEESFVNQLYSSKGEMNSAESFYATPGAWQKSSYSGNGRNTKYDEGHGYWGTVEVDGDGADYMDDDASTNGPRQERDTSYHARQRNSRGSAAFRLRQHGHSFSWRESSDQNFLDGETQGSKEQGRGSSKNQQKHADTTKEISHPHGEA

SEQ ID NO: 160870 - protein, 309 aa, Zea Mays
MSCIGSSCTATNKGKETVVEVHGAVAEEKQQVRNGEETAAEDDSGGSDPDSDSESDLDSESDWDSYSEEEEERQQQRKKKEKPKNKKKKKKQRRRQQQQQPAWLITLLRTRFWEPCKEHVSKNRAEQCMFCLKCCKVTCPRCTHDLPGHRLLKIRRYVYRSVVHASDMQALGVDVSRIQAYVVNAKKVLHLRPMSRSKHFRPQAGTPRCVTCRTWLRSAPNLFCSLACQGNVDVAQDDFSGPEAEVRYRSLQVQMAEPSGAAADELPGPEAAHEVPAQVPPPPPPAANQNASLRRRPRKQAAPERAPFF

SEQ ID NO: 160871 - protein, 1650 aa, Zea Mays
MQDTHAPEKCMSTVSNKDDSSVQFGYYTNRSDDEDEEYPAYCSDRQVQHQQQSGQYYGPDEFYELDTPYNSKMSIVEESMTSKELSPHVLDQGFPSAPTITKSDNEPEHYYSSECGAASSIYALESNDTNPVDFEKDELFWLPPEPEDEEDELQAELFNDDDGDDDDDKSVADGEWCRIRSSSSFGSGEFRSRDRSGEEHKKVMKNVVDGHFRALISQLLEVENIPLHEGDDMGWLEIVTSVSWEAANFLRPDTSQGGGMDPGGYVKVKCLACGHRNESTVVKGVVCKKNVAHRRMTTRIEKPRLLLLAGALEYHRVTNQLSSIDTLLQQETDHLKMAVAKIVAQRPNLLLVENSVSRYAQDLLLEKNISLVLNIKQPLLQRIARCTGAQIVPSIDLLPSQKLGYCELFHVDKYDEQSVSSVNVSKKMVKTMMFFEGCPKPLGCTVLLKGGSMDELKKIKHVVQYGIFAAYHLALETSFLADEGATLPELPLLSPLTVALPDKRSTADSSISAVPGFTINVSISQQTDSFDHIGTDYIMSTQPGENAVAEAPVSSECFSSQNTYSHSLGPWCANNSNFNNGTGDGDGLANVTATPNSVSISSLSTSGALTNHTSRYSSVEKNSMHFGDYHDGSMRLHGKTVTIDSTSTASHYHQSTVKASTNINVNESLEGPYALANVKTINENNSIVVQPVSTAAVQYQETSQGDDSTSNKDEVVPSDHQSILVSLSTRCVWKGTICERSQLLRIKYYGNFDKPLGRFLRDYLFDQGYQCRSCDKPPEAHVHCYTHRQGSLTISVRKLTEFVLTGERDGKIWMWHRCLKCPWSNGFPPATQRIVMSDAAWGLSLGKFLELSFSNHAAASRVASCGHSLHRDCLRFYGFGKMVACFRYAPISVHSVHLPPHKLDFGHQPLDWIQKEANEVIERAKHLFDEVLHALHMISDKKVQGSSINMEFSNYIADLEIMLRKEKSEFEGCLNKVLRRDMQKGQPDILEINRLRRQLLFHSYLWDKRLVFGARSDRCRHEKTHSIDSVAEQNVILKPQSECSGNRSANKDAKYVECLQESIYGGNHTGVDVGTVNSNHVHQMATGELDSLQRDIKAPLYSSVSVNGESIPLEPDLVARRTLSEGQFPSVLDVTNALEAKWTGKDDPVSSKVTMPESTASSEDSEEHMGDNTPSYASILLSKLGDSAADHSNWIEMPFLLFYRSLNKQWNRSNRFDALNEYSPEYVPFLREVERHIGPKFFFPIGISDTVVGVYDDEPTSIISYALASHEYHLQMSDELEREMTDTSLPLCDSRSVSLTELDECTSELLRSVVSTEDIILSMSGRKNPLASDSLVPRKVSHIKVNFGDEGPLGQVKYTVICYYAKQFDALRRLCCPSERDFVRSLSRCKKWGAQGGKSNVFFAKTMDDRFIIKQVTKTELESFMKFAPDYFKYVSESICTGSPTCIAKILGIYQVKSLKGGKEMRMDVLLMENLLFERDVTTLYDLKGSARSRYNPDSNGSDKVLLDQNLIEAMPTSPIFVGNKAKRLLERAVWNDTSFLASIDVMDYSLLVGVDEKRHELVMGIIDFIRQYTWDKHLETWVKASGILGGPKNVSPTVISPKQYKKRFRKAMSAYFLVVPDQWSPPVVIPSKQAESGQDRDEQVVLTEL

SEQ ID NO: 160872 - protein, 950 aa, Zea Mays
MEDPNKTFSDVVKLLTSWLPRRSNPDNVSRDFWMPDHSCRVCYDCDSQFTIFNRRHHCRRCGRIFCGKCTANSIPVSSGPDRNVDEGDRIRVCNFCFKQWEQERVTSLKPVLPVLTPSLSETSLFSTKSAITINSVTTTAGSYSNGNYQHVSCVTSTSPPKCCHDKTSHNMQDTHAPEKCMSTVSNKDDSSVQFGYYTNRSDDEDEEYPAYCSDRQVQHQQQSGQYYGPDEFYELDTPYNSKMSIVEESMTSKELSPHVLDQGFPSAPTITKSDNEPEHYYSSECGAASSIYALESNDTNPVDFEKDELFWLPPEPEDEEDELQAELFNDDDGDDDDDKSVADGEWCRIRSSSSFGSGEFRSRDRSGEEHKKVMKNVVDGHFRALISQLLEVENIPLHEGDDMGWLEIVTSVSWEAANFLRPDTSQGGGMDPGGYVKVKCLACGHRNESTVVKGVVCKKNVAHRRMTTRIEKPRLLLLAGALEYHRVTNQLSSIDTLLQQETDHLKMAVAKIVAQRPNLLLVENSVSRYAQDLLLEKNISLVLNIKQPLLQRIARCTGAQIVPSIDLLPSQKLGYCELFHVDKYDEQSVSSVNVSKKMVKTMMFFEGCPKPLGCTVLLKGGSMDELKKIKHVVQYGIFAAYHLALETSFLADEGATLPELPLLSPLTVALPDKRSTADSSISAVPGFTINVSISQQTDSFDHIGTDYIMSTQPGENAVAEAPVSSECFSSQNTYSHSLGPWCANNSNFNNGTGDGDGLANVTATPNSVSISSLSTSGALTNHTSRYSSVEKNSMHFGDYHDGSMRLHGKTVTIDSTSTASHYHQSTVKASTNINVNESLEGPYALANVKTINENNSIVVQPVSTAAVQYQETSQGDDSTSNKDEVVPSDHQSILVSLSTRCVWKGTICERSQLLRIKYYGNFDKPLGRFLRDYLFDQVWQNGCMLPICSY

SEQ ID NO: 160873 - protein, 1156 aa, Zea Mays
MEDPNKTFSDVVKLLTSWLPRRSNPDNVSRDFWMPDHSCRVCYDCDSQFTIFNRRHHCRRCGRIFCGKCTANSIPVSSGPDRNVDEGDRIRVCNFCFKQWEQERVTSLKPVLPVLTPSLSETSLFSTKSAITINSVTTTAGSYSNGNYQHVSCVTSTSPPKCCHDKTSHNMQDTHAPEKCMSTVSNKDDSSVQFGYYTNRSDDEDEEYPAYCSDRQVQHQQQSGQYYGPDEFYELDTPYNSKMSIVEESMTSKELSPHVLDQGFPSAPTITKSDNEPEHYYSSECGAASSIYALESNDTNPVDFEKDELFWLPPEPEDEEDELQAELFNDDDGDDDDDKSVADGEWCRIRSSSSFGSGEFRSRDRSGEEHKKVMKNVVDGHFRALISQLLEVENIPLHEGDDMGWLEIVTSVSWEAANFLRPDTSQGGGMDPGGYVKVKCLACGHRNESTVVKGVVCKKNVAHRRMTTRIEKPRLLLLAGALEYHRVTNQLSSIDTLLQQETDHLKMAVAKIVAQRPNLLLVENSVSRYAQDLLLEKNISLVLNIKQPLLQRIARCTGAQIVPSIDLLPSQKLGYCELFHVDKYDEQSVSSVNVSKKMVKTMMFFEGCPKPLGCTVLLKGGSMDELKKIKHVVQYGIFAAYHLALETSFLADEGATLPELPLLSPLTVALPDKRSTADSSISAVPGFTINVSISQQTDSFDHIGTDYIMSTQPGENAVAEAPVSSECFSSQNTYSHSLGPWCANNSNFNNGTGDGDGLANVTATPNSVSISSLSTSGALTNHTSRYSSVEKNSMHFGDYHDGSMRLHGKTVTIDSTSTASHYHQSTVKASTNINVNESLEGPYALANVKTINENNSIVVQPVSTAAVQYQETSQGDDSTSNKDEVVPSDHQSILVSLSTRCVWKGTICERSQLLRIKYYGNFDKPLGRFLRDYLFDQGYQCRSCDKPPEAHVHCYTHRQGSLTISVRKLTEFVLTGERDGKIWMWHRCLKCPWSNGFPPATQRIVMSDAAWGLSLGKFLELSFSNHAAASRVASCGHSLHRDCLRFYGFGKMVACFRYAPISVHSVHLPPHKLDFGHQPLDWIQKEANEVIERAKHLFDEVLHALHMISDKKVQGSSINMEFSNYIADLEIMLRKEKSEFEESKPGEGKMRANRLF

SEQ ID NO: 160874 - protein, 161 aa, Zea Mays
MPLVPAASSSLPLPWMSTTSPCFLLLLPWISSPFCCPPSIPSRFRFLLHVVSAACVACLQQRGQRKLGVADAAWLVRPWRGQANASAWSCVCPRHGIALASGTACAAPTRPLCDPSAAAASPSTCLAASSSTHPSSLRDCDLFPSFKGSKIERWRPRDQAF

SEQ ID NO: 160875 - protein, 587 aa, Zea Mays
MPESGGLLKQEFFSLTIPQVGGGEDIFATIRWSQKLLYDNGQFSVEVPFRFPQFVNPLPKVFMKKEKIQLIVNSGVTKEILLQGTSHPLKEKSRQGEKLSFLHEAVVENWSTKDFTFAYTVYSGDLSGGVLVQPSTLRDYDDRDMFCLFLLPGNNENRKVFRKAVVYIIDTSGSMQGKPLESVKNALSTTLSDLIPGDYFNIITFNDELHSFSSHLEQVNEKTIGNAIEWMNLNFVAQGGTNIMHPLSEAMTLLSTSHDALPQIYFVTDGSVDDERNICHTLKTQLIKSGSKSPRISTFGLGSYCNHYFLRMLASIGKGHYAAAFDTGSIEGRMLQWFQKASSTIVSNVSIDAIKHIQDFEVDSVYIPDISAKYPLCVSGRYNGKLPETLIAKGHLADMSEISIELKVQHIKDIPLDKVLAKQQMDLLTAKAWLMENKELERKVVKLSIQNSLPSEYTRMVLLQTSLDKIDPAQQAKNKPTKQSSSPDELPAMPLGGLAVGFGDVAATTENLTTGFGDMKAAEKFVMLEKAAGCCSRMADCCCCMCFIKACSKMNDQCAIVMAQACAAIACLGCFECCSELCCGGSN

SEQ ID NO: 160876 - protein, 477 aa, Zea Mays
MDEAFARAVEDGLKLTKRLVLPSGGGMPPPPRPHLAMDRDDPAAALQQLMPAAPMAYAVVVDPAAVDSPDVPSYQPHVYGRLDPPALIPLQMREVELRVDCAAGCATAEVALRARWWLHCITRSRACHCRIVVPMAHQGSILGAEVTVGKRSYNTHVIDTEDNCSVKIAMPESGGLLKQEFFSLTIPQVGGGEDIFATIRWSQKLLYDNGQFSVEVPFRFPQFVNPLPKVFMKKEKIQLIVNSGVTKEILLQGTSHPLKEKSRQGEKLSFLHEAVVENWSTKDFTFAYTVYSGDLSGGVLVQPSTLRDYDDRDMFCLFLLPGNNENRKVFRKAVVYIIDTSGSMQGKPLESVKNALSTTLSDLIPGDYFNIITFNDELHSFSSHLEQVNEKTIGNAIEWMNLNFVAQGGTNIMHPLSEAMTLLSTSHDALPQIYFVTDGSVDDERNICHTLKTQLIKSGSKSPRISTFGLDKFSNCF

SEQ ID NO: 160877 - protein, 479 aa, Zea Mays
MDEAFARAVEDGLKLTKRLVLPSGGGMPPPPRPHLAMDRDDPAAALQQLMPAAPMAYAVVVDPAAVDSPDVPSYQPHVYGRLDPPALIPLQMREVELRVDCAAGCATAEVALRARWWLHCITRSRACHCRIVVPMAHQGSILGAEVTVGKRSYNTHVIDTEDNCSVKIAMPESGGLLKQEFFSLTIPQVGGGEDIFATIRWSQKLLYDNGQFSVEVPFRFPQFVNPLPKVFMKKEKIQLIVNSGVTKEILLQGTSHPLKEKSRQGEKLSFLHEAVVENWSTKDFTFAYTVYSGDLSGGVLVQPSTLRDYDDRDMFCLFLLPGNNENRKVFRKAVVYIIDTSGSMQGKPLESVKNALSTTLSDLIPGDYFNIITFNDELHSFSSHLEQVNEKTIGNAIEWMNLNFVAQGGTNIMHPLSEAMTLLSTSHDALPQIYFVTDGSVDDERNICHTLKTQLIKSGSKSPRISTFGLGKFSVGFLE

SEQ ID NO: 160878 - protein, 140 aa, Zea Mays
MKLSFVHACMQRKELPELLPLVDLRWRVVVPAAVAAQEATGAELLLRAAAGEALLLHRLLLLQLLLLPVPRRVRRRRLRVLRAVPALLVRLHLRLPALLLLRLPHVQRRVLRPALLPVPMMAMRNFACMLVVVVPGDDDG

SEQ ID NO: 160879 - protein, 54 aa, Zea Mays
MSTRPRVSQDQNGSPPTESSVPHHPASCQVDTRYSRHLSTPIAGQPFWYWSSRG

SEQ ID NO: 160880 - protein, 67 aa, Zea Mays
MGEPRNCRRFLSATPPVLCAVHILCSSSGWVMKRRSMRIARQMFDRRLQSKAVVVLAKKKSSRIMMW

SEQ ID NO: 160881 - protein, 52 aa, Zea Mays
MSFFSGGGSKNHQRTFRAKKSLSSPGNKEFKLVESAELAPLRDLIEPLISQC

SEQ ID NO: 160882 - protein, 149 aa, Zea Mays
MRSVQFGQKGIPYLNTYDGCTILYPDPLIKANDTIKIDLETNKIMDFFKFDVSNVVMVTGGRNTGRVGVIKNWEKHKGSFEQLAGPDAAQHARASGAGAAGETEIQTHRSRSFARQGPAAQPAEPPEDLQGEEEPVVAREQGYATEEAH

SEQ ID NO: 160883 - protein, 205 aa, Zea Mays
MAELAHDGFPLSMLFSSRHGSASLQQSGDRALPFPRHVGAMSSPSPANLASHQEGVSLSAAPMATISPSCGCPGSSSSTPAPLNLPSLPLSLSQIYYHLAQIRMADILSPSIFNSKARDVQWWSLKRILCSSVAISTANYQIITNCWEHAPSYYRSLYLEKVDRYICLFMAWLCCTIWDFKRYSFAPRIPLVKLYERVSTFRTPY

SEQ ID NO: 160884 - protein, 161 aa, Zea Mays
MAELAHDGFPLSMLFSSRHGSASLQQSGDRALPFPRHVGAMSSPSPANLASHQEGVSLSAAPMATISPSCGCPGSSSSTPAPLNLPSLPLSLSQIYYHLAQIRMADILSPSIFNSKARLSRDSRVLMIYKSLLYGKSGNHKFWAMTGMCSGGLLKEFCVPA

SEQ ID NO: 160885 - protein, 148 aa, Zea Mays
MRSVQFGQKGIPYLNTYDGCTILYPDPLIKANDTIKIDLETNKIMDFFKFDVSNVVMVTGGRNTGRVGVIKNWEKHKGSFEQLAGPDAAQHARASGAGAAGETEIQTHRSRSFARQGPAAQPAEPPEDLQGEEEPVVAREQGKLASCA

SEQ ID NO: 160886 - protein, 212 aa, Zea Mays
MAELAHDGFPLSMLFSSRHGSASLQQSGDRALPFPRHVGAMSSPSPANLASHQEGVSLSAAPMATISPSCGCPGSSSSTPAPLNLPSLPLSLSQIYYHLAQIRMADILSPSIFNSKARLSRDSRVLMIYKSLLYGKSAGNMLHLIIEACISRKLIDTSAYLWPGYVVPSGTLKDTALPQESPWLNFMKGSRHSGPLIDALVASPASSSSSAR

SEQ ID NO: 160887 - protein, 209 aa, Zea Mays
MSFFGRGSRNQRTFRPKKSAPSGNKGMQLKRHIDATLGSGNLREAVRLPIGEDLNEWLAVNTVDFFNQVNILYGTLMEFCTPATCPTMSAGPSYEYRWADGAKIKRPIEVSAPKYVEYLMDWVEAQLDEETIFPQKLGAPFPPNFRDVVKTIFKRLFRVYAHIYHSHFQVIVRLKEEAHLNTCFKHFTLFTLVFSIQRARIQLSFHRHS

SEQ ID NO: 160888 - protein, 120 aa, Zea Mays
MRLQLAVYRNSGGLQAIMNSKLKTLAEKDEEVVLASGIPCTIIRTGSLQSTPGRERGFDFTEGIASKGRISKEDAATICVEALNSIPLKTHIFEVANGKEKVIDWKAWFEEQTKREEEIQ

SEQ ID NO: 160889 - protein, 252 aa, Zea Mays
MPLPPLLPRLYPTPPPLRAGDRGNAVPLSPGRRRPALLAVVRAKRKDEASFTDRILDYIEGGPKLRRWYGAPDLLPKDGAAEDEEDESQDIEESRDAVLVTNGDSEIGQMVILALILKRARTKALVKDKRTTEEAFGTYVECMVGDIGDKSFTKRALRGVRAIICPADDGFFSEPIDLKGVQHIVLLSQLAVYRNSGGLQAIMNSKLKTLAEKDEEVVLASGIPCTIIRTGHSKQGKNKQRGCCYHMCGSSE

SEQ ID NO: 160890 - protein, 472 aa, Zea Mays
MHALERKFKELSDDQCSYDKTLISLNKLWNQLIDDLVLLGVRAGGDLDNLQALDHEELSEESLESCPSEEIFLLRLLKTNNIRDNSDTSLLKFVEEALAFRSSATVTLMKSLQETISSQQARSESLSLALNGQKSNEDVIVALRNHNDCLKEVAENASQAISIINEKHKRYLDEIEAFKSNHSRELQEIKRISGELEESIAELEESQRKLVVLQLQRHGSVMDASGANAVNGGISTHKSSDKSMSWQDLKDAVDAAKTLAGNRLLELHQTQEDNLILSKELGDLEGQLKDEKYVLVSKPYMILNDKLQHLNAEIERYRGLVEVLQNDKDQLMQREKEISAKAESLDSVKQTIITYEKKIEELETQIQILFSEKNDLETKVEETLQDSGKKDFKNEIHVMAAALSNELGMMENQLSRSKDAASEALALREQAESLRSLVAKKSYLSRTSICCNPLLQTLQRARKMTSTYDEIC

SEQ ID NO: 160891 - protein, 843 aa, Zea Mays
MDSTALQYENQKLVQQLEVQKSEMHALERKFKELSDDQCSYDKTLISLNKLWNQLIDDLVLLGVRAGGDLDNLQALDHEELSEESLESCPSEEIFLLRLLKTNNIRDNSDTSLLKFVEEALAFRSSATVTLMKSLQETISSQQARSESLSLALNGQKSNEDVIVALRNHNDCLKEVAENASQAISIINEKHKRYLDEIEAFKSNHSRELQEIKRISGELEESIAELEESQRKLVVLQLQRHGSVMDASGANAVNGGISTHKSSDKSMSWQDLKDAVDAAKTLAGNRLLELHQTQEDNLILSKELGDLEGQLKDEKYVLVSKPYMILNDKLQHLNAEIERYRGLVEVLQNDKDQLMQREKEISAKAESLDSVKQTIITYEKKIEELETQIQILFSEKNDLETKVEETLQDSGKKDFKNEIHVMAAALSNELGMMENQLSRSKDAASEALALREQAESLRSLVAKKIEEHKKISDKYNSQVIEIKSLKALVEELEQEKQELEFIADMYVKESSESRTIADIEESETRARNQAEYLRSNLEEHSLELRVKAANEAEAACQQRLSFAEVELEELRTKVDASERDVVELKEAIRIKEAEGDAYISDIETVGQAYEDMQTQNQHLLQQLTDRDDFNIKLVSDSVKMKQACSSLLSDKLMLEKQLQQVNTSLESSKLKIARGEEQMKTCVAQAIKTSAENRHLTISLERIALELSNTDKELKWLRSSVGSSEKEYEQTQQKISELRALLEHERSERRRLEEQYEEVKNEVMELTSETEETTVRKLEDEIKECKGILKCGVCFDRPKEVVITKCFHLFCSLCIQRNLEIRHRKCPGCGTPFGQNDVREVKI

SEQ ID NO: 160892 - protein, 489 aa, Zea Mays
MQREKEISAKAESLDSVKQTIITYEKKIEELETQIQILFSEKNDLETKVEETLQDSGKKDFKNEIHVMAAALSNELGMMENQLSRSKDAASEALALREQAESLRSLVAKKIEEHKKISDKYNSQVIEIKSLKALVEELEQEKQELEFIADMYVKESSESRTIADIEESETRARNQAEYLRSNLEEHSLELRVKAANEAEAACQQRLSFAEVELEELRTKVDASERDVVELKEAIRIKEAEGDAYISDIETVGQAYEDMQTQNQHLLQQLTDRDDFNIKLVSDSVKMKQACSSLLSDKLMLEKQLQQVNTSLESSKLKIARGEEQMKTCVAQAIKTSAENRHLTISLERIALELSNTDKELKWLRSSVGSSEKEYEQTQQKISELRALLEHERSERRRLEEQYEEVKNEVMELTSETEETTVRKLEDEIKECKGILKCGVCFDRPKEVVITKCFHLFCSLCIQRNLEIRHRKCPGCGTPFGQNDVREVKI

SEQ ID NO: 160893 - protein, 483 aa, Zea Mays
MQREKEISAKAESLDSVKQTIITYEKKIEELETQIQILFSEKNDLETKVEETLQDSGKKDFKNEIHVMAAALSNELGMMENQLSRSKDAASEALALREQAESLRSLVAKKIEEHKKISDKYNSQVIEIKSLKALEKQELEFIADMYVKESSESRTIADIEESETRARNQAEYLRSNLEEHSLELRVKAANEAEAACQQRLSFAEVELEELRTKVDASERDVVELKEAIRIKEAEGDAYISDIETVGQAYEDMQTQNQHLLQQLTDRDDFNIKLVSDSVKMKQACSSLLSDKLMLEKQLQQVNTSLESSKLKIARGEEQMKTCVAQAIKTSAENRHLTISLERIALELSNTDKELKWLRSSVGSSEKEYEQTQQKISELRALLEHERSERRRLEEQYEEVKNEVMELTSETEETTVRKLEDEIKECKGILKCGVCFDRPKEVVITKCFHLFCSLCIQRNLEIRHRKCPGCGTPFGQNDVREVKI

SEQ ID NO: 160894 - protein, 459 aa, Zea Mays
MDSTALQYENQKLVQQLEVQKSEMHALERKFKELSDDQCSYDKTLISLNKLWNQLIDDLVLLGVRAGGDLDNLQALDHEELSEESLESCPSEEIFLLRLLKTNNIRDNSDTSLLKFVEEALAFRSSATVTLMKSLQETISSQQARSESLSLALNGQKSNEDVIVALRNHNDCLKEVAENASQAISIINEKHKRYLDEIEAFKSNHSRELQEIKRISGELEESIAELEESQRKLVVLQLQRHGSVMDASGANAVNGGISTHKSSDKSMSWQDLKDAVDAAKTLAGNRLLELHQTQEDNLILSKELGDLEGQLKDEKYVLVSKPYMILNDKLQHLNAEIERYRGLVEVLQVWFLSSVILLCIAFALVFPSFSSLCEFRMTRTSSCKGRKKFLQKQNRSTVLNKPLSHMRKKLKNWKLKFRYSFLKRMISKPRLRRLCKIQVRKTSRMRFMLWLQHSPMNWV

SEQ ID NO: 160895 - protein, 280 aa, Zea Mays
MHWGVWHTNNKENEYVQEMELEKERGKARGKGKEKDKENINLLIFVAAFLDPRYKLSMYMKIIVEEIFGEDRGQLVWAAINSCVRELFEEYKNIYAPTEVTDPSEAKGGRGGKLREVIAKRMKMTNYSSSTTKSELEKYLTEETEDTDTKIDTLFWWKVNAHRFPVLAHMSRDVLAIPISTVAAESAFSMSGCILDDFHTSLTPFMLEALVCTQDWLRRTTPINIQENMEDLAMIEADLIEEFGEKGKGKENPTTSKSQATPSSSRCPPSKSMKELLLKV

SEQ ID NO: 160896 - protein, 643 aa, Zea Mays
MSMLEDPESNIRSLNDMLSISNDRDQKVVKLGVMSLLAVFKDVIPSYRIRQLTEKELAVEVSKEVKKTRYYEYTLIRCYKAYLQKLISLEKQPYFYTVAVRCMCALLDTAPHFNFRESLLASVVKNLSSSDDVVRKMCCEAIRSLFINEGKHRGEATIEAVRLIADHVKLNDCQLHPDSIEVFLSLRFDEDIGKDEIQEEKVKPKRNKRWQKNQEVPKQLPVNDKKKTRQELISKARKEVDADLRAVSFTLDPKERKGIQKETLSALFETYFRILKHSMAASNSRTKVNNVSPGGSHPLLTPCLEGLGKFSHLIDLDFMGELISCLKKLSGYSDRQDEIPNDNALSVSERLQCCIVVFKVWRSNLEALNVDLQDFFVQLYNLILEYRPDRDHGEVLADALKTLLWEGRQHDMLRAAAFIKRLATFALSFGSAEAIAALVTLKHLLQKNSKCRNMLENDSGGGSLSCLVAKYNPEATDPYLSGALASVLWELSLLEKHYDISVSSMASNILSMANLNPTQNPVPILNVNPLEAYRDLSLERELSKPASKALPLNLKRKRRAKEFVALSPDVLQKADCSVDKDELEEKLQSHFSVLRGISENERLRAELNHTLSSINMYKEYKKQKRKNMKVKTGRKKNSKALAV

SEQ ID NO: 160897 - protein, 546 aa, Zea Mays
MGKRSGSSRKDKNKVILPPELPPEIHDDEVDVSEEDIEFYATDSSNVTPFRHFDKKSIDRYVGRVAGRDEGEVERLYEERQKRKATESSGRPREDDDYLEVDPVDALPTKTLQGELVYNRAKKARSEDNSGSVKTKAQENGANAKTNTKKDESKGKSKNKKGDDNKVKNIQSQTEVPKGQLHSNVLEEVKEELSAEELFEKKKAQLAELGMSMLEDPESNIRSLNDMLSISNDRDQKVVKLGVMSLLAVFKDVIPSYRIRQLTEKELAVEVSKEVKKTRYYEYTLIRCYKAYLQKLISLEKQPYFYTVAVRCMCALLDTAPHFNFRESLLASVVKNLSSSDDVVRKMCCEAIRSLFINEGKHRGEATIEAVRLIADHVKLNDCQLHPDSIEVFLSLRFDEDIGKDEIQEEKVKPKRNKRWQKNQEVPKQLPVNDKKKTRQELISKARKEVDADLRAVSFTLDPKERKGIQKETLSALFETYFRILKHSMAASNSRTKVNNVSPGGSHPLLTPCLEGLGKFSHLIDLDFMGELISCLKKLSGYWLMR

SEQ ID NO: 160898 - protein, 358 aa, Zea Mays
MTSERETSKLHLSQSSVVHQIISPKSLNRFENAKVKFISSEEVALLSRERPPSVTSRFTLSQPSKASSPPTTKHLSNMNCVSPSRSDKNVQALKRCADASHSQAELEDRSYSAMQQRRVHPASPSSMKQPSNMKSTSPGRRDMQVQNQKRYAPMRESQPHVKQLSNRTATQVHATKRSATSSHDQANIDDINMDCEARSGGSVPMMHECRTSESVKVKMDSLIEHKAREKKIVNADKGEIKSQTELEPREKGTLCTSDEDIGCKSEIGSLNQNKDVIVTMVSTVQYSRRPAPTNCWRCEKKHSNVLEAYNNFVLRAYIHDIKLLIYSSEVLPPDSQWIDGENYLWGLFVSSDGKSGPS

SEQ ID NO: 160899 - protein, 433 aa, Zea Mays
MDIKVCGVCGSGSNSALIVKCVRCNDYEHRYCMKVVARVSPQEWYCAKCQEHTNRGPKPSQGGQTELQKPCHGRDMTSERETSKLHLSQSSVVHQIISPKSLNRFENAKVKFISSEEVALLSRERPPSVTSRFTLSQPSKASSPPTTKHLSNMNCVSPSRSDKNVQALKRCADASHSQAELEDRSYSAMQQRRVHPASPSSMKQPSNMKSTSPGRRDMQVQNQKRYAPMRESQPHVKQLSNRTATQVHATKRSATSSHDQANIDDINMDCEARSGGSVPMMHECRTSESVKVKMDSLIEHKAREKKIVNADKGEIKSQTELEPREKGTLCTSDEDIGCKSEIGSLNQNKDVIVTMVSTVQYSRRPAPTNCWRCEKKHSNVLEAYNNFVLRAYIHDIKLLIYSSEVLPPDSQWIDGENYLWGLFVSSDGKSGPS

SEQ ID NO: 160900 - protein, 244 aa, Zea Mays
MISFDKIEVVNRLRKEFVHETLLNYGVHYDKTWIYDKIHHEINQFCSAHSLQQVYIDMFDQIDETMKEAIQRDCTRYAPGIEIISVRVTKPNIPGSIRRNFELMEEERTKALIAMEKQKVAEKEAETQKKIALSEAEKNAQVSKILMEQKLMEKDSSKRQEQIDNDMYLAREKAVADANYYRILKEAEANRLKLTPEYLELRFIESIANNSKIFFGEKIPNMIMDQRLLKNYLDAAPRKDHYEM

SEQ ID NO: 160901 - protein, 264 aa, Zea Mays
MLFIMFNQVRDIPCGTKGGVMISFDKIEVVNRLRKEFVHETLLNYGVHYDKTWIYDKIHHEINQFCSAHSLQQVYIDMFDQIDETMKEAIQRDCTRYAPGIEIISVRVTKPNIPGSIRRNFELMEEERTKALIAMEKQKVAEKEAETQKKIALSEAEKNAQVSKILMEQKLMEKDSSKRQEQIDNDMYLAREKAVADANYYRILKEAEANRLKLTPEYLELRFIESIANNSKIFFGEKIPNMIMDQRLLKNYLDAAPRKDHYEM

SEQ ID NO: 160902 - protein, 161 aa, Zea Mays
MRYVLSDGKMNIERLTKLVELVGKQRLVLDLSCRKKDGRYTIVTDRWQKFSDVFVDEPALEYLAAFADEFLVHGVDVEGKRLGIDEELVELLGHHSPIPVTYAGGVSTMDDLERIKKAGKSRVDVTVGSALDIFGGDLPYKDVVLWHKKQSMVGQVSRNMW

SEQ ID NO: 160903 - protein, 93 aa, Zea Mays
MRYVLSDGKMNIERLTKLVELVGKQRLVLDLSCRKKDGRYTIVTDRWQKFSDVFVDEPALEYLAAFADEFLVHGVDVEGKRCNCGIIIKSSFY

SEQ ID NO: 160904 - protein, 244 aa, Zea Mays
MASKYVARVPSPWWAPQRRLVGSWVSVCSVKCGALGGRDVVCAAVSFRPCIDIHKGKVKQIVGSTLRDSSNDGMELVTNFESDKSPAEFAKSYKEDELLGGHVIMLGSDPASQAAALEALHAYPGGLQVGGGINLQNAMSYLNEGASHVIVTSYVLSDGKMNIERLTKLVELVGKQRLVLDLSCRKKDGRYTIVTDRWQKFSDVFVDEPALEYLAAFADEFLVHGVDVEGKRCNCGIIIKSSFY

SEQ ID NO: 160905 - protein, 174 aa, Zea Mays
MSYLNEGASHVIVTSYVLSDGKMNIERLTKLVELVGKQRLVLDLSCRKKDGRYTIVTDRWQKFSDVFVDEPALEYLAAFADEFLVHGVDVEGKRLGIDEELVELLGHHSPIPVTYAGGVSTMDDLERIKKAGKSRVDVTVGSALDIFGGDLPYKDVVLWHKKQSMVGQVSRNMW

SEQ ID NO: 160906 - protein, 233 aa, Zea Mays
MASKYVARVPSPWWAPQRRLVGSWVSVCSVKCGALGGRDVVCAAVSFRPCIDIHKGKVKQIVGSTLRDSSNDGMELVTNFESDKSPAEFAKSYKEDELLGGHVIMLGSDPASQAAALEALHAYPGGLQVGGGINLQNAMSYLNEGASHVIVTSYVLSDGKMNIERLTKLVELVGKQRLVLDLSCRKKDGRYTIVTDRWQKFSDVFVDEPALEYLAAFADEFLVHGVDVEGKRM

SEQ ID NO: 160907 - protein, 174 aa, Zea Mays
MASKYVARVPSPWWAPQRRLVGSWVSVCSVKCGALGGRDVVCAAVSFRPCIDIHKGKVKQIVGSTLRDSSNDGMELVTNFESDKSPAEFAKSYKEDELLGGHVIMLGSDPASQAAALEALHAYPGSALKDAHNPLIAKKRLKHWPRPRKSPNPGLTGRHQPSTLQRLNRRVAHM

SEQ ID NO: 160908 - protein, 496 aa, Zea Mays
MASPSPASARPQRSPDEVEDIILRKILLVSLTPPANPSPAVAYLELTAAELLSESRPLLALRDAAERLLIDRLSLPDPPAGSPTPFAYLVSAFRRAADEARKISTIRDAALRARLAASIAHLRALILSYARIVAGNPDTFPTPPGAQHPASDLLVFLLAEAADPLDPTPAPGAPPPPGFIDEFLGSADYDSIEPAMGELYELLRQSVDKVSALGDFQRPLRLLRRLVGIPNCAKALVNHPKWIPKNQIMLIGEGRVMELYSVLGAFFHVSAIRDREFASKPDVGQQCFSEASSRRPADLLSSFTTIKSVMNGLYDGLKDVLLILLKNLDTREKVLEYIAEVINKNASRSGMQVDPLKCASSGMFVNLSAVMLRLCEPFLDNMEAKKDKIDVNYLFCNNRIDFKDLTAINASSEEVSSWIESINNEHAQNNASGEARFAESQEATSSGKNSTASQLRCSKKENFSFICECFFMTSRVLNLGLMKAVSDFKHISQVRR

SEQ ID NO: 160909 - protein, 552 aa, Zea Mays
MASPSPASARPQRSPDEVEDIILRKILLVSLTPPANPSPAVAYLELTAAELLSESRPLLALRDAAERLLIDRLSLPDPPAGSPTPFAYLVSAFRRAADEARKISTIRDAALRARLAASIAHLRALILSYARIVAGNPDTFPTPPGAQHPASDLLVFLLAEAADPLDPTPAPGAPPPPGFIDEFLGSADYDSIEPAMGELYELLRQSVDKVSALGDFQRPLRLLRRLVGIPNCAKALVNHPKWIPKNQIMLIGEGRVMELYSVLGAFFHVSAIRDREFASKPDVGQQCFSEASSRRPADLLSSFTTIKSVMNGLYDGLKDVLLILLKNLDTREKVLEYIAEVINKNASRSGMQVDPLKCASSGMFVNLSAVMLRLCEPFLDNMEAKKDKIDVNYLFCNNRIDFKDLTAINASSEEVSSWIESINNEHAQNNASGEARFAESQEATSSGKNSTASQLRCSKKENFSFICECFFMTSRVLNLGLMKAVSDFKHISQQLSRFEDDLESNRAVRDQGGGSPQLEQDITRLEKIVEILSQDKFCYEAQILRVNDTLVS

SEQ ID NO: 160910 - protein, 72 aa, Zea Mays
MTFSSFICSRVGLPLPVFVWVLCVGGECGAVLMSQSNRRVKLYGVGVLMSQSNRLLFVLLFSPIRTTSSLLI

SEQ ID NO: 160911 - protein, 219 aa, Zea Mays
MIYDAGAGRQDRHNLGMHPPYMIRCCLGMKWRQEDAYRTAADARHESAWGQESISMHRIDRKKSTAWSSRNFKERGGGKTRRWRAELELLVAGSKGSSPDSPLGRSSIEVHLLKSISLPVIHTCDPLPSATRTAVVLVLQIAVAIHKYIRYAPASFCDIHTCPFASGLSAPIRPCLLSCFGSHESLSCLPLFIFVCSAFAHGWTGTCTLLSILCAAFTF

SEQ ID NO: 160912 - protein, 261 aa, Zea Mays
MLDLKKMAPNTWRIPILSMLERIKQKVMTRFYNKQKELKDFVGTICPNIRKKISKFADLANVCYVLPSGSVIFQVVDRDHQYIVDLAAKTCDCREWNLTGILCQHGTNIMPCKDMTSWEKVDAPTVSPPIYVRKPGRPKRCRRKQPHEKIGKYGPTLSRHGVKMTCNYCKGDDHNDKGFPIKKLGVSPKPNHLEMTIKLSPKITVKGPPMDQMTQDGDEPHYCNLMIEMSSTMLLQMMEQVGPSQLLSQEPKQAVSNVNSS

SEQ ID NO: 160913 - protein, 151 aa, Zea Mays
MNPIASKTLFSLFFFRLPKAADSALSSALEYGPSSSSLVASIHFSQSSFGSSNLSPYLKLYFSRTSSPSPVLVTVSFGISHFSKSGHILKAMCSWTRSLVPMKEQTVPKALWHPLAASSISTFGFRRPKRCQIGRMMISLMYSRTFKSFFT

SEQ ID NO: 160914 - protein, 89 aa, Zea Mays
MDSRHHIVALLHRRTCCRLPAVFACVPEHLEEVVFEGVYSNACLSSGWIYLTKGWVEGFWDLLLQQGKPRCICHHPCVYKILSLICYIR

SEQ ID NO: 160915 - protein, 732 aa, Zea Mays
MVSQGSNNCPLPTNTPKECDLLKAKQEPGSTSQQGIVAQHQPMQQMKSEQTPIVSQQQSMQQMKNQQTPVTNQTNSATTTAKAPVVTFHMLIPILSRYLDKARDIEVQSIFAKLRKNEVSKEYFLKTVRNIVGDKLLKQAASQYQMQAQRSPQTNPSNYSLSGQVSGQQTAPSGSVTGDEQKGYPGAHTIPMRQAIASTRPPQFRPSSSGQMRSNTGYPPSQTNLHKANEMGNMSDGKGVHMLQTRPPNNSIPVQTMQHHVQRPQTSSPVFGANSIHARPFPRPLGGPAAPFRPQMADSNPKAQLIQGAVTTVSGSVPTRSIVSGNAPALGSSKVSAGMESQSQQLSAPKPLAATSLSQTQSHGIQEEPKIQIQSSVQAPPAAASKTPQRKASSGQKKPLEVLGSSPPPSSKKQKVSGGFHEQSIDQLNDVTAVSGVNLREEEEHLFSAPKEEGRVSEVARKVVQLEEEKLILQKGPLTQKLAGIMSKCNLKVIGTDVERCLSMCVEERLRGFIRSIIRFSKQRVEVEKSRHHFYPLSSDVRSHIMRVNREAREQWEKKQAEDAERIRKQNDGDGNANVDLEKDRIETRGLSKHAKTYKEDDDKMRTTAANVAARVAAGGDDMLSKWQLLAERNKQRSEGGDGSSGSVPGNMLQHRPSLKSGKDLREEHEVEKRGYSTMLGSGGVRRSPLTKVARSISMKDVVAALEREPQMSKSSLLFRLYGRPLTEPSAK

SEQ ID NO: 160916 - protein, 732 aa, Zea Mays
MDPIMKLLEDDEDESLHSGADVEAFTAALNREVEASASASASTSTSVPAGSSSQPTDHGAGLLPQEHKSLLNHDPGQWQDPVKNEIVNQESQQQEQTHAFRNDHPSRPEMVSQGSNNCPLPTNTPKECDLLKAKQEPGSTSQQGIVAQHQPMQQMKSEQTPIVSQQQSMQQMKNQQTPVTNQTNSATTTAKAPVVTFHMLIPILSRYLDKARDIEVQSIFAKLRKNEVSKEYFLKTVRNIVGDKLLKQAASQYQMQAQRSPQTNPSNYSLSGQVSGQQTAPSGSVTGDEQKGYPGAHTIPMRQAIASTRPPQFRPSSSGQMRSNTVNQALGSSKVSAGMESQSQQLSAPKPLAATSLSQTQSHGIQEEPKIQIQSSVQAPPAAASKTPQRKASSGQKKPLEVLGSSPPPSSKKQKVSGGFHEQSIDQLNDVTAVSGVNLREEEEHLFSAPKEEGRVSEVARKVVQLEEEKLILQKGPLTQKLAGIMSKCNLKVIGTDVERCLSMCVEERLRGFIRSIIRFSKQRVEVEKSRHHFYPLSSDVRSHIMRVNREAREQWEKKQAEDAERIRKQNDGDGNANVDLEKDRIETRGLSKHAKTYKEDDDKMRTTAANVAARVAAGGDDMLSKWQLLAERNKQRSEGGDGSSGSVPGNMLQHRPSLKSGKDLREEHEVEKRGYSTMLGSGGVRRSPLTKVARSISMKDVVAALEREPQMSKSSLLFRLYGRPLTEPSAK

SEQ ID NO: 160917 - protein, 540 aa, Zea Mays
MVSQGSNNCPLPTNTPKECDLLKAKQEPGSTSQQGIVAQHQPMQQMKSEQTPIVSQQQSMQQMKNQQTPVTNQTNSATTTAKAPVVTFHMLIPILSRYLDKARDIEVQSIFAKLRKNEVSKEYFLKTVRNIVGDKLLKQAASQYQMQAQRSPQTNPSNYSLSGQVSGQQTAPSGSVTGDEQKGYPGAHTIPMRQAIASTRPPQFRPSSSGQMRSNTGYPPSQTNLHKANEMGNMSDGKGVHMLQTRPPNNSIPVQTMQHHVQRPQTSSPVFGANSIHARPFPRPLGGPAAPFRPQMADSNPKAQLIQGAVTTVSGSVPTRSIVSGNAPGNQSTRQQSANKEQKTISFTRTAHMNNETVSQNSEFSQNSFAVMHAKQVNQALGSSKVSAGMESQSQQLSAPKPLAATSLSQTQSHGIQEEPKIQIQSSVQAPPAAASKTPQRKASSGQKKPLEVLGSSPPPSSKKQKVSGGFHEQSIDQLNDVTAVSGVNLREEEEHLFSAPKEEGRVSEVARKVVQLEEEKLILQKGPLTQKLAGISHWH

SEQ ID NO: 160918 - protein, 464 aa, Zea Mays
MDPIMKLLEDDEDESLHSGADVEAFTAALNREVEASASASASTSTSVPAGSSSQPTDHGAGLLPQEHKSLLNHDPGQWQDPVKNEIVNQESQQQEQTHAFRNDHPSRPEMVSQGSNNCPLPTNTPKECDLLKAKQEPGSTSQQGIVAQHQPMQQMKSEQTPIVSQQQSMQQMKNQQTPVTNQTNSATTTAKAPVVTFHMLIPILSRYLDKARDIEVQSIFAKLRKNEVSKEYFLKTVRNIVGDKLLKQAASQYQMQAQRSPQTNPSNYSLSGQVSGQQTAPSGSVTGDEQKGYPGAHTIPMRQAIASTRPPQFRPSSSGQMRSNTGYPPSQTNLHKANEMGNMSDGKGVHMLQTRPPNNSIPVQTMQHHVQRPQTSSPVFGANSIHARPFPRPLGGPAAPFRPQMADSNPKAQLIQGAVTTVSGSVPTRSIVSGNAPGKTSQSSLGIFKSQCWHGKPVTTIECA

SEQ ID NO: 160919 - protein, 440 aa, Zea Mays
MADSNPKAQLIQGAVTTVSGSVPTRSIVSGNAPVNQALGSSKVSAGMESQSQQLSAPKPLAATSLSQTQSHGIQEEPKIQIQSSVQAPPAAASKTPQRKASSGQKKPLEVLGSSPPPSSKKQKVSGGFHEQSIDQLNDVTAVSGVNLREEEEHLFSAPKEEGRVSEVARKVVQLEEEKLILQKGPLTQKLAGIMSKCNLKVIGTDVERCLSMCVEERLRGFIRSIIRFSKQRVEVEKSRHHFYPLSSDVRSHIMRVNREAREQWEKKQAEDAERIRKQNDGDGNANVDLEKDRIETRGLSKHAKTYKEDDDKMRTTAANVAARVAAGGDDMLSKWQLLAERNKQRSEGGDGSSGSVPGNMLQHRPSLKSGKDLREEHEVEKRGYSTMLGSGGVRRSPLTKVARSISMKDVVAALEREPQMSKSSLLFRLYGRPLTEPSAK

SEQ ID NO: 160920 - protein, 763 aa, Zea Mays
MVSQGSNNCPLPTNTPKECDLLKAKQEPGSTSQQGIVAQHQPMQQMKSEQTPIVSQQQSMQQMKNQQTPVTNQTNSATTTAKAPVVTFHMLIPILSRYLDKARDIEVQSIFAKLRKNEVSKEYFLKTVRNIVGDKLLKQAASQYQMQAQRSPQTNPSNYSLSGQVSGQQTAPSGSVTGDEQKGYPGAHTIPMRQAIASTRPPQFRPSSSGQMRSNTGYPPSQTNLHKANEMGNMSDGKGVHMLQTRPPNNSIPVQTMQHHVQRPQTSSPVFGANSIHARPFPRPLGGPAAPFRPQMADSNPKAQLIQGAVTTVSGSVPTRSIVSGNAPGNQSTRQQSANKEQKTISFTRTAHMNNETVSQNSEFSQNSFAVMHAKQVNQALGSSKVSAGMESQSQQLSAPKPLAATSLSQTQSHGIQEEPKIQIQSSVQAPPAAASKTPQRKASSGQKKPLEVLGSSPPPSSKKQKVSGGFHEQSIDQLNDVTAVSGVNLREEEEHLFSAPKEEGRVSEVARKVVQLEEEKLILQKGPLTQKLAGIMSKCNLKVIGTDVERCLSMCVEERLRGFIRSIIRFSKQRVEVEKSRHHFYPLSSDVRSHIMRVNREAREQWEKKQAEDAERIRKQNDGDGNANVDLEKDRIETRGLSKHAKTYKEDDDKMRTTAANVAARVAAGGDDMLSKWQLLAERNKQRSEGGDGSSGSVPGNMLQHRPSLKSGKDLREEHEVEKRGYSTMLGSGGTMILVVETFLNDKMPILLFVHTDCISNL

SEQ ID NO: 160921 - protein, 259 aa, Zea Mays
MGKSKRNKGGRGGGGADDKLDGGGDADSVTSMSSGLSDLQFAQATEHISSQEFVLDKGSTREEALGSLTDAFESFVLLGLVENKYVTLLSQFINSIKRGSVKEVCLACRCIGLLAITLGAGSSSHEIMDESHPHLLRVLQTWPDAQKMISALDCLAVVTFVGATDLAETQLSLKAIWDVIHPKSGSNVGVVRKPKPPLLAAAVSAWAFLLTTIGSSRRNTDSWKEPITFLCSLLEAEDRAVRIAAVTLERLVVLSINFS

SEQ ID NO: 160922 - protein, 149 aa, Zea Mays
MQALKAKLSGLVYSLSMEAGGRGADKKNLNDQRDLFQRISDFIKSGECPEESLRISGKNGILRVTSWRESIQLNYMRRFLGRGFLKHSQDNDLLHEVFDIKIDRTENMSATEKKMFRSGEEKGRALKLNKERRLAQERKQQNILNEQYG

SEQ ID NO: 160923 - protein, 172 aa, Zea Mays
MGKSKRNKGGRGGGGADDKLDGGGDADSVTSMSSGLSDLQFAQATEHISSQEFVLDKYVDALYEKRGSTREEALGSLTDAFESFVLLGLVENKYVTLLSQFINSIKRGSVKEVCLACRCIGLLAITLGAGSSSHEIMDESHPHLLRVLQTWPDAQKMISVCCNFHFFLWFWF

SEQ ID NO: 160924 - protein, 268 aa, Zea Mays
MGKSKRNKGGRGGGGADDKLDGGGDADSVTSMSSGLSDLQFAQATEHISSQEFVLDKYVDALYEKRGSTREEALGSLTDAFESFVLLGLVENKYVTLLSQFINSIKRGSVKEVCLACRCIGLLAITLGAGSSSHEIMDESHPHLLRVLQTWPDAQKMISALDCLAVVTFVGATDLAETQLSLKAIWDVIHPKSGSNVGVVRKPKPPLLAAAVSAWAFLLTTIGSSRRNTDSWKEPITFLCSLLEAEDRAVRIAAVTLERLVVLSINFS

SEQ ID NO: 160925 - protein, 561 aa, Zea Mays
METVPLFVWSCDALLANPATSLVVPAIGIIVFALWGFLPLMRDIRNRFDHGGNWKKSPTYLISSSYLQPLLLWTGATLICRGLDPVVLPSAASQAVKTRLITFVRSLSTVLAVAYILTSLIQQVQKFLMDMRNPNDTRNMGFDFTMKALYTGVWIASVSLFMELLGFNTQKWITAGGFGTVLLTLAGREIFTNFLSSVMINATRPFVVNEWIDAKIDGVDVSGIVEHVGLWSPTLIRGVDREAIYIPNHKFTVSILRNNTQRTHWRIKTYLAISHMDAGKIGTIVADMRKVLAKNPHIEQQKLHRRVFFEKIDPKNQALMIFISCFVKTSHFEEYLNVQEAVMLDLLRIVGHHKARLATQIRTVQKSYGNADFDNIPFGEDMYSRVRGRPLLIDTSARISDDKPRPRPVSSREEQKVKTNGSVDIKSSSPENASSSNSEKQEPKKMVPEDTRVKNIKGDNVMPVTPSLDPATSTSKAGKGKTREPEPTERQGDGSVSVANPKKESRPVFEDNIVLGVALEGSRRTLPIEEGNPHLSLSETEVDTEEAASSPKDKIGQSPKL

SEQ ID NO: 160926 - protein, 454 aa, Zea Mays
MLHPQKNCSCFFLIQQVQKFLMDMRNPNDTRNMGFDFTMKALYTGVWIASVSLFMELLGFNTQKWITAGGFGTVLLTLAGREIFTNFLSSVMINATRPFVVNEWIDAKIDGVDVSGIVEHVGLWSPTLIRGVDREAIYIPNHKFTVSILRNNTQRTHWRIKTYLAISHMDAGKIGTIVADMRKVLAKNPHIEQQKLHRRVFFEKIDPKNQALMIFISCFVKTSHFEEYLNVQEAVMLDLLRIVGHHKARLATQIRTVQKSYGNADFDNIPFGEDMYSRVRGRPLLIDTSARISDDKPRPRPVSSREEQKVKTNGSVDIKSSSPENASSSNSEKQEPKKMVPEDTRVKNIKGDNVMPVTPSLDPATSTSKAGKGKTREPEPTERQGDGSVSVANPKKESRPVFEDNIVLGVALEGSRRTLPIEEGNPHLSLSETEVDTEEAASSPKDKIGQSPKL

SEQ ID NO: 160927 - protein, 209 aa, Zea Mays
MAVGLTSQLFQRVTATDIFCQRNKFRSSEMRSSLPLPSTSFPSVADRRDCWGRNVLESSCMPMLYTPRRYRSLGFRSFALPIPLKEIPLVKNTSLALTRSCDALLANPATSLVVPAIGIIVFALWGFLPLMRDIRNRFDHGGNWKKSPTYLISSSYLQPLLLWTGATLICRGLDPVVLPSAASQAVKTRLITFVRSLSTVLAVAYILTR

SEQ ID NO: 160928 - protein, 50 aa, Zea Mays
MWSIWDQLTAVSTYRPAGSEEEDDPDFGWDFSGLSDPSAMRDFMSACDYC

SEQ ID NO: 160929 - protein, 203 aa, Zea Mays
MFIYIYINTYIYTYKKQRKRIKKGKTNFLSSPFSLSPAHPVARGHTRGCSSRVSLPSPSRCLRSGPPYHLLASPFTTASAPCIRTPRKLAPTPSWPAHVARTSSPLQFSCIAVLELRSPPSYALPCPEKATPVILPHRVRRKVRVQSVAISFVFFASSELWQWRSIVIRASPAKSAEPSSLSLLCGRASTLAAPPYNALRGHG

SEQ ID NO: 160930 - protein, 58 aa, Zea Mays
MARPRCSDFKPPAVQLHSSPGVALAAKLRVAMPGEGYARDSPSSSSSQGSSKEGFMKS

SEQ ID NO: 160931 - protein, 79 aa, Zea Mays
MARPRCSDFKPPAVQLHSSPGVALAAKLRVAMPGEGYARDSPSSSSSQDCDLFPSIEESTIKLRRPNDPVLRVLRDRRP

SEQ ID NO: 160932 - protein, 149 aa, Zea Mays
MERRLRPIAPKPMPPLMPTGAAATSVLWRARKRGRDEDRLLLSPPLSKRETEREAAGASSYPNPQPPASAAPVAATRRGRRCPRSSGLAPLALCGPPSASTPATSPSSVAARRRRRLRPTRRRGRWRPNWSSRARSRPSCRAPATVSTW

SEQ ID NO: 160933 - protein, 211 aa, Zea Mays
MERVDLSAHGFYATPNIGFDWTIGKGTPFNYFTYGAAFAEVEIDTLTGDFYTRTADIVMDLGFSINPAIDIGQIEGAFIQGLGWAAIEELKWGDDNHKWIRPGHLFTCGPGSYKIPSVNDIPLNFKVSLLKGVPNPKAIHSSKAVGEPPFFLGSAVLFAIKDAISAARAEEGHLDWFPLDNPATPERIRMACVDSITKKFAGIDYRSKLSV

SEQ ID NO: 160934 - protein, 1370 aa, Zea Mays
MGSLTRVPAEDPAAAEEEWSDEAVIYVNGVRRVLPDGLAHLTLLQYLRDIGLRGTKLGCGEGGCGACTVMVSCYDRITKKSLHFAINACLAPLYSVEGMHIITVEGIGDRQRGLHPVQECLAKAHGSQCGFCTPGFVMSMYALLRSSKQPPTEDQIEDCLAGNLCRCTGYRPIIDAFRVFAKTDNLAYTNSCSEDAKDQAICPSTGKPCSCRNETDVNVNESSLSSSVERYSPYSYNEIDGSAYNERELIFPPELQLRKVMPLKLNGSNEIKWYRPLKLKQLLHLKSCYLDAKLIIGNSEVGVETKFKNAQYKVLIAVTHIPELNTLKAKEDGIHIGSAVRLAQLQNFLKKVVAEHDLPETSSCQAIVRQLKWFAGTQIRNVASIGGNICTASPISDLNPLWIAVGAKFHIIDVNGNVRTTLAKDFFLGYRKVDIKPEEILLSIILPWTRPFEYVKEFKQAHRREDDIALVNAGMRVYLQETERNWIISDVSIVFGGVAAVPLSASRTENFLTGKKWDSGLLDDTFNLLKEDISISENAPGGMIEFRRSLTLSFFFKFFLSVTHEMKIKGLLADGLHADHLSAVQPYSRPVTVGTQSYELVRQGASVGQPMVHMSAMLQVTGEAEYTDDTPTPPNTLHAALVLSKKAHARILSIDDSLAKSSPGFAGLFLSKDIPGVNHTGPIIHDEEFFASNIVTCVGQIIGIVVADTHDNAKTAANKVHIEYCELPAILSIEEAVKIGSFHPNTKKCLVKGDVEQCFLSGACDRIVSGQVHVGGQEHFYMEPQCTLVWPVDSGNEIHMVSSTQAPQKHQKYVASVLGLPQSKVVCKTKRIGGGFGGKETRSAIFAAAASVPSFCLRRPVKLVLDRDVDMISTGQRHSFLGKYKVGFTNEGKILALDLEIYNNGGHSLDLSLAVLERAMFHSENVYDIENIRINGQVCFTNFPSNTAFRGFGGPQGLLIAENWIHHIATELQRSPEEIKELNFHNDGVVLHYGQLLQNCTISSVWDELKASCNFVEARKAINNFNSNNRWRKRGIAMIPTKFGISFTAKFMNQAGALVQVYTDGTVLVTHGGVEMGQGLHTKVAQVAASSFNIPLSSVFISETSTDKVPNASPTAASASSDLYGAAVLDACQQIKVRMEPIASKGTHNSFAELAQACYMERVDLSAHGFYATPNIGFDWTIGKGTPFNYFTYGAAFAEVEIDTLTGDFYTRTADIVMDLGFSINPAIDIGQIEGAFIQGLGWAAIEELKWGDDNHKWIRPGHLFTCGPGSYKIPSVNDIPLNFKVSLLKGVPNPKAIHSSKAVGEPPFFLGSAVLFAIKDAISAARAEEGHLDWFPLDNPATPERIRMACVDSITKKFAGIDYRSKLSV

SEQ ID NO: 160935 - protein, 799 aa, Zea Mays
MGSLTRVPAEDPAAAEEEWSDEAVIYVNGVRRVLPDGLAHLTLLQYLRDIGLRGTKLGCGEGGCGACTVMVSCYDRITKKSLHFAINACLAPLYSVEGMHIITVEGIGDRQRGLHPVQECLAKAHGSQCGFCTPGFVMSMYALLRSSKQPPTEDQIEDCLAGNLCRCTGYRPIIDAFRVFAKTDNLAYTNSCSEDAKDQAICPSTGKPCSCRNETDVNVNESSLSSSVERYSPYSYNEIDGSAYNERELIFPPELQLRKVMPLKLNGSNEIKWYRPLKLKQLLHLKSCYLDAKLIIGNSEVGVETKFKNAQYKVLIAVTHIPELNTLKAKEDGIHIGSAVRLAQLQNFLKKVVAEHDLPETSSCQAIVRQLKWFAGTQIRNVASIGGNICTASPISDLNPLWIAVGAKFHIIDVNGNVRTTLAKDFFLGYRKVDIKPEEILLSIILPWTRPFEYVKEFKQAHRREDDIALVNAGMRVYLQETERNWIISDVSIVFGGVAAVPLSASRTENFLTGKKWDSGLLDDTFNLLKEDISISENAPGGMIEFRRSLTLSFFFKFFLSVTHEMKIKGLLADGLHADHLSAVQPYSRPVTVGTQSYELVRQGASVGQPMVHMSAMLQVTGEAEYTDDTPTPPNTLHAALVLSKKAHARILSIDDSLAKSSPGFAGLFLSKDIPGVNHTGPIIHDEEFFASNIVTCVGQIIGIVVADTHDNAKTAANKVHIEYCELPAILSIEEAVKIGSFHPNTKKCLVKGDVEQCFLSGACDRIVSGQVHVGGSAEASEVCCKCSWSSTIKSRLQD

SEQ ID NO: 160936 - protein, 740 aa, Zea Mays
MGSLTRVPAEDPAAAEEEWSDEAVIYVNGVRRVLPDGLAHLTLLQYLRDIGLRGTKLGCGEGGCGACTVMVSCYDRITKKSLHFAINACLAPLYSVEGMHIITVEGIGDRQRGLHPVQECLAKAHGSQCGFCTPGFVMSMYALLRSSKQPPTEDQIEDCLAGNLCRCTGYRPIIDAFRVFAKTDNLAYTNSCSEDAKDQAICPSTGKPCSCRNETDVNVNESSLSSSVERYSPYSYNEIDGSAYNERELIFPPELQLRKVMPLKLNGSNEIKWYRPLKLKQLLHLKSCYLDAKLIIGNSEVGVETKFKNAQYKVLIAVTHIPELNTLKAKEDGIHIGSAVRLAQLQNFLKKVVAEHDLPETSSCQAIVRQLKWFAGTQIRNVASIGGNICTASPISDLNPLWIAVGAKFHIIDVNGNVRTTLAKDFFLGYRKVDIKPEEILLSIILPWTRPFEYVKEFKQAHRREDDIALVNAGMRVYLQETERNWIISDVSIVFGGVAAVPLSASRTENFLTGKKWDSGLLDDTFNLLKEDISISENAPGGMIEFRRSLTLSFFFKFFLSVTHEMKIKGLLADGLHADHLSAVQPYSRPVTVGTQSYELVRQGASVGQPMVHMSAMLQVTGEAEYTDDTPTPPNTLHAALVLSKKAHARILSIDDSLAKSSPGFAGLFLSKDIPGVNHTGPIIHDEEFFASNIVTCVGQLHLFLIDRSLELLLLILMIMQKLLPTKYISSIVSSQQFYL

SEQ ID NO: 160937 - protein, 62 aa, Zea Mays
MTPVIGPSAPYPPIHSPSLTSLTPKQQQHSAPVPSTPSHSLPLRSIRSRLPYSSIVSPSCKR

SEQ ID NO: 160938 - protein, 203 aa, Zea Mays
MPLSHRNLLLFIPSVIVLVVTSAAALSVSTPVELTVTSHPPASVHLPHARPLAGGGTAGPYCTRVLLQGRPSRIRDPSRFFHALRLRANATRPHGLELCFHRNATVGPCKCAASQWQKMPKSGLWMQVISPYDYRILDFRMPADPSRILAPQGGVLCRRIGAHGGGTHIERVCSVLLWWSNDYWHFPCDTDYTLSGNEAFTNW

SEQ ID NO: 160939 - protein, 279 aa, Zea Mays
MPLSHRNLLLFIPSVIVLVVTSAAALSVSTPVELTVTSHPPASVHLPHARPLAGGGTAGPYCTRVLLQGRPSRIRDPSRFFHALRLRANATRPHGLELCFHRNATVGPCKCAASQWQKMPKSGLWMQVISPYDYRILDFRMPADPSRSVVVSTEEEFLLHRVVFFVVGLVLMVVAHTLSESVVFYYGGAMTIGIFLVILIILFQGMKLLPTGRKSSLAIFAYSSVVGMTTYFLHYLSGMLRSVLVEIGIAEDMHNPVSWNIRSSMCRLSWSLVWLLGCP

SEQ ID NO: 160940 - protein, 109 aa, Zea Mays
MAMTMTLGSMLIAAAAVVGLCSVAPAASAREEPLQPQIVGGWKPIKNVNDPHVQEIGRWAVSEHIKTANDGLGFGRVVSGEEQIVAGKNYRLRIQATKGLGFSGGDGAA

SEQ ID NO: 160941 - protein, 154 aa, Zea Mays
MRSMFATRSLLAAAASAPTVLRASAFPSRSLLLSLPFPRGRAARNMLGAARSISSAAPSRVGGRAAMEVRAAQSGEIHVIVGPMFAGKTTALLRRVQAEAGNGRSVALIKSDKDNRYGLDSVVTHDGTKMACWALSELSSFHDKLGIEAYNKML

SEQ ID NO: 160942 - protein, 59 aa, Zea Mays
MMCFNAFDEEADLDVLDHPVLNLFYYLLVEILPSSLVLYILRRIPAKLRLSQYHPVSSS

SEQ ID NO: 160943 - protein, 83 aa, Zea Mays
MLPPHDLHFLRHLIELDEDKPGACVDSISSEHAFSPESGSCTTPPRRASTVFERACSGPRGRSAEARRGLLGRQLGLRRLQGE

SEQ ID NO: 160944 - protein, 89 aa, Zea Mays
MHAYWFDSGVHTSPFFLLIHDTRKHTRIASPIISYLAVHTRSQKGQTRKLSARNKYSYTSTSSFEHKKAARLADARYGHHRRAIFSSSY

SEQ ID NO: 160945 - protein, 270 aa, Zea Mays
MAETVDDKVSYFQAVTGISNTDLCTEILAAHNWDLQLAVSTITANPSSPSASASTSSRDPAPSAPLAVDAEYVAPPPPLPLPLPPQQQPGIAWKLVTLPFHVVSGGVGLVAGTFRLGAWVAGGVLSRSLSLLGLAGQAGSGDRLLELPPSAAEAADFVAEFEREFGAGRGPRFVAEGFADALKRAQREFKLLFVYLHSPDHPDTPAFCGGCLCAEPVAAFIDENFVAWGGSIRRTEGFKMSNSLNASRFPFCAVVMASTNQRIVLLQQKR

SEQ ID NO: 160946 - protein, 246 aa, Zea Mays
MRSYILWMEKRKCRKIEKSSSRPPSSMKSIVAQKVSLKNGSFVVAPCPHDGRCPLENSDKYCHFVQRLERTSSQRAFKRSKGVPLRGFEDEKFCYVALRRGKRPEEAWPLDDLNFETLKERNAKRKPEDLVIDYDDQFPSEEDEEVHVDGGDSLVPYASDEHELSLFHDSEEAEAEQTVRADLGGGWGRIIYSPMRRGRQVQMDVCRSTKRDASEGTFERVVVTRSKNPTLHFQARKSLWGDLWPF

SEQ ID NO: 160947 - protein, 268 aa, Zea Mays
MYDTAKTIVLNLVYLLEKYGFVPNGARSYYTNRSQPPLLSSMVLEIYRATGDVEFVRTVFHSLLKEHSFWMSEIHNVAIADNHGRVHNLSRYQARWNKPRPESATIDEELASKLNSMAAKEKLYCEIASTAESGWDFSSRWMRNSTDMTTLATTYIIPVDLNTFLFKMELDIGALAKVVGDNATSEFFLNASKARHIAIDSILWNSEMEQWLDYWLPGDADCQEVHEWKPNSQNRNIFASNFVPLWLNAYHSESWRASRHLDYFMPQG

SEQ ID NO: 160948 - protein, 318 aa, Zea Mays
MAGLPPQPQHVHALPLLLLVVLPCLIPCLRATTEMAPTAATAGASDEGASALLGLLQRVQSEALRTLGPHDFDPKFYVDLPLATDERAAAAALAALPRPSPSRAELDDFLSRYFGDPGSDLVADVPPDFEPEPRGFLPHVHSPEARAWALEVHALWKRLARRVAPDVAARPDRHTLMPLPGRAVVPGSRFREVYYWDSYWVIRGLLVSKMYDTAKTIVLNLVYLLEKYGFVPNGARSYYTNRSQPPLLSSMVLEIYRATGDVEFVRTVFHSLLKEHSFWMSEIHNVAIADNHGRVHNLSRYQARWNKPRPESATIVKS

SEQ ID NO: 160949 - protein, 362 aa, Zea Mays
MAGLPPQPQHVHALPLLLLVVLPCLIPCLRATTEMAPTAATAGASDEGASALLGLLQRVQSEALRTLGPHDFDPKFYVDLPLATDERAAAAALAALPRPSPSRAELDDFLSRYFGDPGSDLVADVPPDFEPEPRGFLPHVHSPEARAWALEVHALWKRLARRVAPDVAARPDRHTLMPLPGRAVVPGSRFREVYYWDSYWVIRGLLVSKMYDTAKTIVLNLVYLLEKYGFVPNGARSYYTNRSQPPLLSSMVLEIYRATGDVEFVRTVFHSLLKEHSFWMSEIHNVAIADNHGRVHNLSRYQARWNKPRPESATIDEELASKLNSMAAKEKLYCEIASTAESGWDFSSRWMRFGCLLSLKRN

SEQ ID NO: 160950 - protein, 467 aa, Zea Mays
MSPVHKKEGHEKWGGGDSGSKRPKFEQDGAGDIVMEPHLTEDKPVRIDQESSSTSNRDAEASTSTSMKPVKTEEAGADLLPKEMNIMTISDDKADGHNDKEGEGVTLDGTGTETGQIIVTTIGGHNGKPKQKVSYMAELVVGTGSFGIVFQAKCLETDETVAIKKVLQDKRYKNRELQTMQLHDHPNVVQLKHHFFSTTQKGEVYLNLVLEFVSETVYRVAKYYNRMNQRVPIIYVKLYAYQMCRALAYIHRVVGVCHRDIKPQNLLVNPHTHQLKICDFGSAKKLVPGEPNISYICSRYYRAPELIFGATEYTTAIDIWSVGCVVAELLIGQPLFPGESGVDQLVEIIKILGTPTREEIRCMNPNYSEFKFPQIKAHPWHKLFGKRMPPEAVDLVSRLLQYSPNLRCTAVDACAHPFFDELRDPKACLPNGRPMPPLFDFTAAELEGLPAELVHRIVPEHMRKEVN

SEQ ID NO: 160951 - protein, 273 aa, Zea Mays
MHMMRRLKSIASGRSSVSDPGGDSGSKRPKFEQDGAGDIVMEPHLTEDKPVRIDQESSSTSNRDAEASTSTSMKPVKTEEAGADLLPKEMNIMTISDDKADGHNDKEGEGVTLDGTGTETGQIIVTTIGGHNGKPKQKVSYMAELVVGTGSFGIVFQAKCLETDETVAIKKVLQDKRYKNRELQTMQLHDHPNVVQLKHHFFSTTQKGEVYLNLVLEFVSETVYRVAKYYNRMNQRVPIIYVKLYAYQCAVRLLTSIELSVCVIVILNLKIYW

SEQ ID NO: 160952 - protein, 294 aa, Zea Mays
MHMMRRLKSIASGRSSVSDPGGDSGSKRPKFEQDGAGDIVMEPHLTEDKPVRIDQESSSTSNRDAEASTSTSMKPVKTEEAGADLLPKEMNIMTISDDKADGHNDKEGEGVTLDGTGTETGQIIVTTIGGHNGKPKQKVSYMAELVVGTGSFGIVFQAKCLETDETVAIKKVLQDKRYKNRELQTMQLHDHPNVVQLKHHFFSTTQKGEVYLNLVLEFVSETVYRVAKYYNRMNQRVPIIYVKLYAYQMCRALAYIHRVVGVCHRDIKPQNLLVNPHTHQLKICDFGSAKKLGS

SEQ ID NO: 160953 - protein, 354 aa, Zea Mays
MHMMRRLKSIASGRSSVSDPGGDSGSKRPKFEQDGAGDIVMEPHLTEDKPVRIDQESSSTSNRDAEASTSTSMKPVKTEEAGADLLPKEMNIMTISDDKADGHNDKEGEGVTLDGTGTETGQIIVTTIGGHNGKPKQKVSYMAELVVGTGSFGIVFQAKCLETDETVAIKKVLQDKRYKNRELQTMQLHDHPNVVQLKHHFFSTTQKGEVYLNLVLEFVSETVYRVAKYYNRMNQRVPIIYVKLYAYQMCRALAYIHRVVGVCHRDIKPQNLLVNPHTHQLKICDFGSAKKLVPGEPNISYICSRYYRAPELIFGATEYTTAIDIWSVGCVVAELLIGQFWISCTLGFDPLTVD

SEQ ID NO: 160954 - protein, 160 aa, Zea Mays
MAQQPRRRGQPGPGAERRRQHLLRGRRPRAARLRDAPRRRGRRALRAYYYGGGGGDDEHPAGVARRRGRRRPRPAHGRRRRPSVGPRHVHVASARVAPDVGVGAPPPHAVFPAPALDPNEVPGSSVAFGDSECWSLLQSIYLMPIPMPKRRTVFGIFSLV

SEQ ID NO: 160955 - protein, 117 aa, Zea Mays
MGFLAFWSVSPVGSAAEQVTWTGLLVAGTKYRGEFECTGATTLDGYRKHIEKDPALERRFQPVKVPEPTVDETIQILRGLHERYELHHKLRYTDDALIAAAQLSYQYIRFANHQVFK

SEQ ID NO: 160956 - protein, 245 aa, Zea Mays
MAHPTRDLPLMAHQSPRPRPSFNSAPIIPPAATNQRRIPPEAFLQWRVEGRLLLIGATTDDTMAPPDAPLPATRKPDIVGVLAPTDLACLPQDCRRSPPSPSRRAMPAVIPASARPTSTNLLCRCPPAHRHPSPAAATDDLPRPPQGGFCKRACRGSYRRARRGTRTRRRPRGCWRTSSPSRSTLGPPTRSFWPRNGGGDAAPSRPSAGGRTNEFHAATLHLPRRRCPPRTCALVPQHWMGIGSI

SEQ ID NO: 160957 - protein, 982 aa, Zea Mays
MENGNNGGNPPHYPPYQYPYPQAQAQLYPYGYQYPPAPPSPSPSAAPAGPYLSPSPSFPSYAPAPHPPQQFHSGPLQAYPPPPQYHAYPPPPHPSPYGHGYDPYPSPYFSYPSTNPSPSPSPGLSPSSSFHHQHASAPEPPSPAPSAPSAPSYPIEDVLASMRLSGRHDYASSPSVTPPSTPFLGDGSSHGGGMQLVPYGTAAGGSQHGGGMQVVPYGAAAGGSQHGGSFRASLKVVLLHGSLDIWVHDARHLPNKDMFSKRVGELLGPRITSAVGSKMSSASMTSDPYVTVQVSYATVARTYVIPNCENPVWSQNFMVPVGHEAAEVQFVVKDSDVFGAQIIGVVSIPAEKLLTGDRIQGVFPVLEPNGKPCAPGAVLHLSIQLIPVAQLTMYHHGVIAGPDSHGVPHTYFPLRRGMRVTLYQDAHVPDGCLPDIWLSNGLRYQHGQCWRDIYDAICQARKLIYIVGWSVFHTIHLVRDGTQAPSLGDLLKMKSQEGVRVLLLVWDDPTSRSILGYKMDGFMGTRDEETRRFFKHSSVQVLLCPRSAGKRHSWVKQQETGTIFTHHQKTVIVDADAGNYRRKIVAFVGGLDLCGGRYDTPWHPLFRTLQNEHKEDYYNPNFNTVDARGPREPWHDLHSKIDGPAAYDVLQNFQERWLKAAKRHGIKKLAKSYDDALLTIERIPEIININDAIYFSDNDPETWHVQVFRSIDSNSAKGFPKDPRAATMKNLVCGKNVLIDMSIHTAYVHAIRSAQHYIYIENQYFIGSSFNWDSNKDLGANNLIPIEIALKIANKIKANERFSAYIVVPMWPEGNPTGAATQRILYWQNKTMQMMYETIYRTLKEEGLDDMYEPQDYLNFFCLGNREVADSTSTSNASNTANNPQIYGYRMSLWAEHIGSIEEDFNYPESLECMRRVRHLGEENWKQFVADEVTEMRGHLMKYPVSVDRKGKVKPLPGCTTFPDMGGNICGSFVAIQENLTI

SEQ ID NO: 160958 - protein, 895 aa, Zea Mays
MENGNNGGNPPHYPPYQYPYPQAQAQLYPYGYQYPPAPPSPSPSAAPAGPYLSPSPSFPSYAPAPHPPQQFHSGPLQAYPPPPQYHAYPPPPHPSPYGHGYDPYPSPYFSYPSTNPSPSPSPGLSPSSSFHHQHASAPEPPSPAPSAPSAPSYPIEDVLASMRLSGRHDYASSPSVTPPSTPFLGDGSSHGGGMQLVPYGTAAGGSQHGGGMQVVPYGAAAGGSQHGGSFRASLKVVLLHGSLDIWVHDARHLPNKDMFSKRVGELLGPRITSAVGSKMSSASMTSDPYVTVQVSYATVARTYVIPNCENPVWSQNFMVPVGHEAAEVQFVVKDSDVFGAQIIGVVSIPAEKLLTGDRIQGVFPVLEPNGKPCAPGAVLHLSIQLIPVAQLTMYHHGVIAGPDSHGVPHTYFPLRRGMRVTLYQDAHVPDGCLPDIWLSNGLRYQHGQCWRDIYDAICQARKLIYIVGWSVFHTIHLVRDGTQAPSLGDLLKMKSQEGVRVLLLVWDDPTSRSILGYKMDGFMGTRDEETRRFFKHSSVQVLLCPRSAGKRHSWVKQQETGTIFTHHQKTVIVDADAGNYRRKIVAFVGGLDLCGGRYDTPWHPLFRTLQNEHKEDYYNPNFNTVDARGPREPWHDLHSKIDGPAAYDVLQNFQERWLKAAKRHGIKKLAKSYDDALLTIERIPEIININDAIYFSDNDPETWHVQVFRSIDSNSAKGFPKDPRAATMKNLVCGKNVLIDMSIHTAYVHAIRSAQHYIYIENQYFIGSSFNWDSNKDLGANNLIPIEIALKIANKIKANERFSAYIVVPMWPEGNPTGAATQRILYWQNKTMQMMYETIYRTLKEEGLDDMYEPQDYLNFFCLGNREVADSTSTSNASNTANNPQLILTRDPWKE

SEQ ID NO: 160959 - protein, 474 aa, Zea Mays
MGEAQDYYDTSTALAAAAAAAAGLALLAVCSYYLLVGRRRGGGGGKAPKRYAPVVGTVFHQLYHVRRLHDYHTDLFRERKTFQLLVPAGRRQIYTCDPAVVEHILRTNFANYGKGSFNYENMTDLLGDGIFAVDGDKWRQQRKIASYDFSTRALRDFSGSVFKRNAARLAGIVSGKAASGQPMEFQGLALRATMDSIFTIAFGLDLDTLGGSAEGSRFAAAFDDASEFTLLRYVNAFWKAQRFLGVGSEAALKKRVKVVDEFVYKRIRERAQELSDSKLATEDTVPDSRQDMLSRFIHTATNESGTVDYKYLRDIILNIVIAGKDTTAGALAWFLYMACKHPEIQEKICQEAAKATDASETAGVDEFAQSLTDEALNKMHYLHAALTETLRITSSASETTSCLTVPASARETSCSTSPTPWAGWSTSGARTPRCSGRSGGWIRTESSSRRARSNSQRSRLVRGYAWGRSSRTGR

SEQ ID NO: 160960 - protein, 109 aa, Zea Mays
MHDFLLPLPELMALYVVSGIFFMMLGIVRNFLYDVGHCNVHPWVLLHKDCLLCIQRLQGLIFFEHPTDLKECVVCLLVMKWCRWFKHLSLVMKWLYRHPWSTSFYGHSL

SEQ ID NO: 160961 - protein, 84 aa, Zea Mays
MVPSRSSMASAPPLLGPFLTAPFLSPHGEFSPCSLPQCAASLGADAPPPTGAGNSHGCSSPWLAAASSSSPLTISPVSSSLALP

SEQ ID NO: 160962 - protein, 78 aa, Zea Mays
MVPSRSSMASAPPLLGPFLTAPFLSPHGEFSPCSLPQCAASLGADAPPPTGAGCSVKGAAGATTPSTAMAKPGHRRSL

SEQ ID NO: 160963 - protein, 63 aa, Zea Mays
MSKKIVVKLHLQDNKDKQKAMKAVSALTGIDEISADMASHKMTVVGMVDPVSVVSNRSSWPSC

SEQ ID NO: 160964 - protein, 129 aa, Zea Mays
MWNEAMASDGSSSSTFRGLYGNVHGPAVLTGAPFALVALLISLWLILQHLRSYSDPAEQKWIIAVLFMVPVYACESIISLWNSKLSLACDILRNCYEAFALYAFGRYLVACLGFFGVFGNSEMGFVFRK

SEQ ID NO: 160965 - protein, 158 aa, Zea Mays
MWNEAMASDGSSSSTFRGLYGNVHGPAVLTGAPFALVALLISLWLILQHLRSYSDPAEQKWIIAVLFMVPVYACESIISLWNSKLSLACDILRNCYEAFALYAFGRYLVACLATYTSMLSPQLEYWAILSQNLFRYGLYCQHACGIYWALKLEYWATS

SEQ ID NO: 160966 - protein, 111 aa, Zea Mays
MPLFSTPLKSIQEAQLAKEKMNGKLICGRPMVVHLASERSSLGSSSSHRAVKDKKLAGGSGAKSQYTDTAAKIAAIKNKLKSLEDGGCSTKKPRLNPDNLTEIREQSHKKF

SEQ ID NO: 160967 - protein, 141 aa, Zea Mays
MSESDVIKMFSPFGKITAEDFLWHTRGPKRGEPRGYAFVQYTTKELAKEKMNGKLICGRPMVVHLASERSSLGSSSSHRAVKDKKLAGGSGAKSQYTDTAAKIAAIKNKLKSLEDGGCSTKKPRLNPDNLTEIREQSHKKF

SEQ ID NO: 160968 - protein, 138 aa, Zea Mays
MQAVPTPAGSEKLLFFFAEEFSLLERRHGQGQCRSTRRLLTFSDQATPGQKLDKTSGSGTRNLLVLLDARNQEKRPAQLSTDRFKKSIKGILGSIIVPSTSDLSVAPPLSNISGSENEFKESPTTFCAGPRLYSCWSC

SEQ ID NO: 160969 - protein, 82 aa, Zea Mays
MARHSVPTHINRPHRFPVSRSGLTALAYNASLTPTGRRAVTALVPTITGMGDLVSGRVRGKVHCQVQSGTRLTDLPYFSAYV

SEQ ID NO: 160970 - protein, 142 aa, Zea Mays
MAPAAPAATGAASPAVTKGGGKVAARSVRLGLPALPPLPGLSLAAQGQTRAASSLYKRLARDVVAMAAGEPAAPQAANEELTEFVDALKKEAIDRLPVVPGLMQAVGIGYSGWFAYRNLLFKPDRDAFFAKVREIYEDIISA

SEQ ID NO: 160971 - protein, 941 aa, Zea Mays
MFVKQGEATPYDIYSRNHFSNLFGLHSLRSESSNLTSEKHPGNWQESSETLTKDFGPSVFHQQQSAFVSKLLDHSGAEDTGPYPPRQDLNQYPFGSTYDKYMTQLSSCSTDTRPHIFSTQYVNSPEMANTTVPLMNDTIGESSFSFSHYMNPCRINLDYFDSVWNEQKGLGYQTTDKQHGKWSNPDDKATVGNYSLNSLGESHLNPEHLGNGRPMQGSSEMKHELGSFSSKVSSSESGFVQPRECSSEFPEVNNTSVDSPCWKGTPAQYQPSFGIIENNGAPPVVIGTVGYINSHQNQKLPELSFEYPWRFCEHQVSGSENDPFKAVKLPERCKISKDHKVLPIDVRVLNDMTTHASYLPDKQHPTTQKCNDSGEDSKNVITSSQQESSCSGRKPILLGEHGGSLTGSISELMSKTVEKEESTHKRGEDPSQCYPGVEGNMLNMSSESSSSNQEDEEELLQSVIQNLTAASSKRSKVEQKNDDGLSNSSQMKFKDINYVRKHFWRSMHEDSEQENADSEFKATVSQVLTNHQEDKVLDNTEVPQASIYRNLWIEAEASACKLKYELQHALLKLETAKGLNDTIKAPDSLEDSKGSNSYIFSNKPQNHGKGTVSCAAAFQGHGGDSRDKQSPVVSRSIFNGVDADVFARFEVLQSRIDNINSLSEIDCGEQKEASKRPYAVEDTVMARLKVLKSRPDNITSLSQGSTKHQLDGSTNSADNVDDTVIARLGILESHPNNEALLGQESSKRQLDARTNREDGIDAAVMARLRILKSRPDNETSMGDANKEQQDACGEQLNGDDLGIVSNGAISNTLSEKCSKFTHSDDHLGEKNSVGVPDTFGDGNSAREKKEVGGSADVATPMRCKGTSDGVSVGSAVHGEDNLGENHVWLQTAGDSHVCTEGSQEAHPISSPVDQYGGSPTEWEHVLKENFFHPGKLANSDP

SEQ ID NO: 160972 - protein, 840 aa, Zea Mays
MTQLSSCSTDTRPHIFSTQYVNSPEMANTTVPLMNDTIGESSFSFSHYMNPCRINLDYFDSVWNEQKGLGYQTTDKQHGKWSNPDDKATVGNYSLNSLGESHLNPEHLGNGRPMQGSSEMKHELGSFSSKVSSSESGFVQPRECSSEFPEVNNTSVDSPCWKGTPAQYQPSFGIIENNGAPPVVIGTVGYINSHQNQKLPELSFEYPWRFCEHQVSGSENDPFKAVKLPERCKISKDHKVLPIDVRVLNDMTTHASYLPDKQHPTTQKCNDSGEDSKNVITSSQQESSCSGRKPILLGEHGGSLTGSISELMSKTVEKEESTHKRGEDPSQCYPGVEGNMLNMSSESSSSNQEDEEELLQSVIQNLTAASSKRSKVEQKNDDGLSNSSQMKFKDINYVRKHFWRSMHEDSEQENADSEFKATVSQVLTNHQEDKVLDNTEVPQASIYRNLWIEAEASACKLKYELQHALLKLETAKGLNDTIKAPDSLEDSKGSNSYIFSNKPQNHGKGTVSCAAAFQGHGGDSRDKQSPVVSRSIFNGVDADVFARFEVLQSRIDNINSLSEIDCGEQKEASKRPYAVEDTVMARLKVLKSRPDNITSLSQGSTKHQLDGSTNSADNVDDTVIARLGILESHPNNEALLGQESSKRQLDARTNREDGIDAAVMARLRILKSRPDNETSMGDANKEQQDACGEQLNGDDLGIVSNGAISNTLSEKCSKFTHSDDHLGEKNSVGVPDTFGDGNSAREKKEVGGSADVATPMRCKGTSDGVSVGSAVHGEDNLGENHVWLQTAGDSHVCTEGSQEAHPISSPVDQYGGSPTEWEHVLKENFFHPGKLANSDP

SEQ ID NO: 160973 - protein, 1047 aa, Zea Mays
MMRAELRPERRRPILFRAQPITAHQTTSFLWSTRNAHVAYQTRPHLPHPDATTACALLAAAMLPYSGDHQRSPPPQPPPRAAFSSSLSPSAAPFPAADPVGPGPGPGRDLPTAPSVYTAGGDWGALSWMEPPASYMAPAATPPGYKGEATPYDIYSRNHFSNLFGLHSLRSESSNLTSEKHPGNWQESSETLTKDFGPSVFHQQQSAFVSKLLDHSDTRPHIFSTQYVNSPEMANTTVPLMNDTIGESSFSFSHYMNPCRINLDYFDSVWNEQKGLGYQTTDKQHGKWSNPDDKATVGNYSLNSLGESHLNPEHLGNGRPMQGSSEMKHELGSFSSKVSSSESGFVQPRECSSEFPEVNNTSVDSPCWKGTPAQYQPSFGIIENNGAPPVVIGTVGYINSHQNQKLPELSFEYPWRFCEHQVSGSENDPFKAVKLPERCKISKDHKVLPIDVRVLNDMTTHASYLPDKQHPTTQKCNDSGEDSKNVITSSQQESSCSGRKPILLGEHGGSLTGSISELMSKTVEKEESTHKRGEDPSQCYPGVEGNMLNMSSESSSSNQEDEEELLQSVIQNLTAASSKRSKVEQKNDDGLSNSSQMKFKDINYVRKHFWRSMHEDSEQENADSEFKATVSQVLTNHQEDKVLDNTEVPQASIYRNLWIEAEASACKLKYELQHALLKLETAKGLNDTIKAPDSLEDSKGSNSYIFSNKPQNHGKGTVSCAAAFQGHGGDSRDKQSPVVSRSIFNGVDADVFARFEVLQSRIDNINSLSEIDCGEQKEASKRPYAVEDTVMARLKVLKSRPDNITSLSQGSTKHQLDGSTNSADNVDDTVIARLGILESHPNNEALLGQESSKRQLDARTNREDGIDAAVMARLRILKSRPDNETSMGDANKEQQDACGEQLNGDDLGIVSNGAISNTLSEKCSKFTHSDDHLGEKNSVGVPDTFGDGNSAREKKEVGGSADVATPMRCKGTSDGVSVGSAVHGEDNLGENHVWLQTAGDSHVCTEGSQEAHPISSPVDQYGGSPTEWEHVLKENFFHPGKLANSDP

SEQ ID NO: 160974 - protein, 691 aa, Zea Mays
MGYSKHLLEVQYRMHPSISKFPNSNFYDNRISDGPIVRQEDYAKSYLPGPIYGAYSFIHIDNDMEMLDSLGQSSKNMAEVAVAANIVERLAKECTEKRQRTSVVKSIDGFQGGEEDIILISTVRSNKDGKVGFLSDSGRINVALTRAKYCLWILGNGTTLLASNSIWADLVRDSKRRRCFFDAFKDKDLAEVVMFATKPEQWNRREQRNSRANEAPSWPSSWDVVADRNNPPRRWNGRPASSNARSVTKSYDQGPNACRWTNNFSASREESYRTRFQHGEPLRSGHYNNQSRVAPANQNRFNNYNASSEWHGSVEGYRGWPKQHVGPEPHARLSHECSSSFQEGDVRHTPRSAYGEESHGQISVLGSWQAPGTYYNCGPQNRTVCPEFQNRGSFQQRFGSYGAADSGFGRANGDRQFNSLERRVPYGRIGGQGRGRTSCQGRGDTRGWHERFVCRWTEPHCQVQNGGLEIASHKLLAPGQQGTKRNWCKAESSDSPQQDNTKRILGSVDQPPGPGPVCHGGSGAPSPEQHASRQGAVKRGVCEAESSDLPIQDESSEVTLKQSADKPLCTTEDGNSGAGSCELPVPEQGGVGIDLREAGPPDIPCQVPDGSSEAFLELLVPEHRGMEAGLCKVEPSDAPYQGQDGSPGTASHEQPVPEQRGMGRADSCATEPLSVHQDSTENKPETVEQDS

SEQ ID NO: 160975 - protein, 676 aa, Zea Mays
MLTLDEASIRDCARWATANTCWKQEDYAKSYLPGPIYGAYSFIHIDNDMEMLDSLGQSSKNMAEVAVAANIVERLAKECTEKRQRTSVVKSIDGFQGGEEDIILISTVRSNKDGKVGFLSDSGRINVALTRAKYCLWILGNGTTLLASNSIWADLVRDSKRRRCFFDAFKDKDLAEVVMFATKPEQWNRREQRNSRANEAPSWPSSWDVVADRNNPPRRWNGRPASSNARSVTKSYDQGPNACRWTNNFSASREESYRTRFQHGEPLRSGHYNNQSRVAPANQNRFNNYNASSEWHGSVEGYRGWPKQHVGPEPHARLSHECSSSFQEGDVRHTPRSAYGEESHGQISVLGSWQAPGTYYNCGPQNRTVCPEFQNRGSFQQRFGSYGAADSGFGRANGDRQFNSLERRVPYGRIGGQGRGRTSCQGRGDTRGWHERFVCRWTEPHCQVQNGGLEIASHKLLAPGQQGTKRNWCKAESSDSPQQDNTKRILGSVDQPPGPGPVCHGGSGAPSPEQHASRQGAVKRGVCEAESSDLPIQDESSEVTLKQSADKPLCTTEDGNSGAGSCELPVPEQGGVGIDLREAGPPDIPCQVPDGSSEAFLELLVPEHRGMEAGLCKVEPSDAPYQGQDGSPGTASHEQPVPEQRGMGRADSCATEPLSVHQDSTENKPETVEQDS

SEQ ID NO: 160976 - protein, 950 aa, Zea Mays
MRRPHDASDGDEDRGYPSSSAVNGAGDEEEERRQAARTPGKDGPVDALWRWRSQSLSEIVLSWSVDQILDKDLLRDKVSKIPETFSSIEQYMTSYFGPLLEEVRGDMCSSMEDISNAPYADLLSVNSMRKGKGSYEISLGRWRGTSHGCGIDNYKPKSADVLLISETKPANQSDILKQSKSCVIVWVSKVNGNKMTVKASQLMETGAQGGERRPIGANKYDKLYAECLDKSWEMLDQEAMASKCRNSSVHRNVWKESHKVEKRSDVHGRNEKETGESKRWSFYAMYLTNMVTYDRVWVVLRRGLTMDSKIIHSMLGRNNYALGHCKHCVNKSHDEIKGDLCDFKLNDSQLDAVASCILASECTHRSSMGLVWGPPGTGKTTTVAVMLQMLLMKEQRTLACAPTNMAVLQVASRLLELIGDFSLRHNYSLGDIILFGNKDRLQIGKLLSEIYLDDRVQKLLSSFNRQHGWKHCVDSVVTFLKNCNSRYRMSVDIQQGSSDARDLTFKKYFTSRFSTLADGLVRCIDTFYDHLPRSSLGKNFDKMMFVKRLLDKLQQSLSADDVSDELLFTIFNPADEVPDSSGSHDDLIDDEDDFHDCKISLDSPLDIKSLCIKILMSLSNMRLPCEDNELSIRDLCLKHAKLIFCTASSSFELFRLQSVRPISILVIDEAAQLKECESLVPLLLQGIEHVLLIGDENQLSSLVKSKIAKDADFGRSLYQRLCTMGYSKHLLEVQYRMHPSISKFPNSNFYDNRISDGPIVRQEDYAKSYLPGPIYGAYSFIHIDNDMEMLDSLGQSSKNMAEVAVAANIVERLAKECTEKRQRTSVVKSIDGFQGGEEDIILISTVRSNKDGKVGFLSDSGRINVALTRAKYCLWILGNGTTLLASNSIWADLVRDSKRRRCFFDAFKDKDLAEVVMFATKPEQWNRREQVRPGGAIRSLLILFECCCPE

SEQ ID NO: 160977 - protein, 94 aa, Zea Mays
MAVVVVPRPGMRIICAGPISKIRAGRDGVEVALDKPRAVEGAHHGRSCRHDQVETEQRMDELGLTTDSIAGDRNGKQGGVEPNKGLARGTGGAS

SEQ ID NO: 160978 - protein, 450 aa, Zea Mays
MHFPAFLADQRRLRRVLSSSRTTLATLTRLHALLVVSSSQHILSSLAAAYARAGALDAAESTLAASPSSPSSIAAWNGLLSAHSRAGAPGAALRVFRALPSSARPNSTTFTLTLTACARLGDLDAAESVRVRAFAAGYGHDVFVCSALLHLYSRCGAMEEAIRVFDGMPRKDRVAWSTMVAGFVTAGRPVEALAMYSRMREHGVSDDEVVMVGVIQACMSTGNARIGASVHGRLLRHCMRMDVVTTTSLVSMYAKNGHLDVACQVFRMMPYRNDVTWSALISGFAQNGRAVEALDLFRELQADGLQPCSWALVSALLACASVGFLKLGKSIHGFILRRLEWQCILGTAVLDMYSKCGSLESARKLFNKLSSRDLVLWNAIIACCGTHGCGHDALALFQELNETGIKPDHATFASLLSALSHSGLVEEGKFWFDRMIKEFGIEPAEKHYVA

SEQ ID NO: 160979 - protein, 59 aa, Zea Mays
MLPVVSTCMGFFLIGKLLGPYTCMCMHPLCTHNSPHVSTSNTKLPHDDLLWLQTPWPFM

SEQ ID NO: 160980 - protein, 404 aa, Zea Mays
MTLGFISLLLTVTGRYIARICIPEGAANTMLPCRLSGHSVAEEPKGHGRRHLSEDPTNLFSCRKGMVSLVSADGMHQLHIFVFFLAVFHVTFSFFTMSLGRAKTRIWKVWEKETCSPQYNYLNDPSKFRLTHQTSFVRQHASCWSKSTITLYFVSFFRQFFRSVRKTDYFTLRHGFISAHLSPGTRFNFRKYIKRSLEDDFKTVVGISPPLWASALAVMLFNVHGWHNLFWFSAIPLVVILAVGTKLQAIIAMMAIEIAERHTVIQGMPVVKLSDDHFWFGKPRLVLHLIHFASFQNAFEITYFFWIWYEFGLRSCFHDNFEFIIARVCLGAIVQFMCSYITLPLYALVSQMGSEMKRTIFDEQTAKALKKWHKAVGKRVSGSGCTRCRSGTSTGTRPSRTSAA

SEQ ID NO: 160981 - protein, 121 aa, Zea Mays
MKGSKGSACPLTPEPEFREVRLTEEDEFLIIGCDGLWDVMSSQFAVSMVRKELMEHNDPQRCSRELVQEALRRDCCDNLTVVVVCFSDDPPPQIEVPRFRVRRSISMEGLHTLRGALDSNV

SEQ ID NO: 160982 - protein, 459 aa, Zea Mays
MKKAVNTCLLSWLLLLGTLTLAARPDAGGGLDAATVAAQELDRVLSLPGQPSYSSASPKQYSGYVTTDEHLGKALFYWFFEATETPDEKPLVLWLNGGPGCSSIGFGQSQELGPFLVKKDVPELELNPYAWNQAANLLFLDSPAGVGFSYTNTSFEKDPPGDNSTAHGSYAFLVRWFQRFPQHKAKEFYIAGESYAGHYVPQLADVIVEGNKKASEENHINFKGILIGNAYMDGDTDLVGIFDSAWHHAIISDELYGDVQKNCDFSLVELSPECSADVDQYTALYRVIDIYSLYTDRWIFSRCPMGYDPCTQTYATEYFNREDVQKALHANVTGVPYPYSLCRNSINDAWKDSDLTVVPVVKKLVEAGLRIWIFSGDTDARIPTTSTRYTLKKLGLPIKEDWSPWFHRKQVGGWTVVYDGLTFVTVRGAGHMVPSTQPQQALELFKHFLANTKLPSEPF

SEQ ID NO: 160983 - protein, 441 aa, Zea Mays
MASGGEGAGSGESPPAASVEAAAGEATLHIRCANGSKFTVQTDLGATVGGFKEVVAGSCDVPAPQQRLIYKGRILKDEQTLESYGVETDHTIHLVRGVAPPAASSAPAAASSLASSTLSSVPAGGLGDLFPGVGAPGSGRSSGIFGPGFPELEQVEQHLSQNPNLMREIMNMPAMQNLMNNPDLIRNMIMSNPQMREIMDRNPDLAHVLNDPSVLRQTLEAARNPEIMREMMRNTDRAMSNIESSPEGFNMLRRMYETVQEPFLNATTMSGEGNTASNPFAALLGNQGSNQPGQGQPATYTPTIGSESTTGTPAPNTNPLPNPWSTNAGSAQGATRSSGNTRTGASGHVGGTGATGGLGGLGSPDLSSLLGGLAGSPRTGASGGLGGLGSPDLGNMLGGSPDVSLFSQMLQNPAMMQMMQSIMSDPQTMNHCLASTQMHAT

SEQ ID NO: 160984 - protein, 393 aa, Zea Mays
MASGGEGAGSGESPPAASVEAAAGEATLHIRCANGSKFTVQTDLGATVGGFKEVVAGSCDVPAPQQRLIYKGRILKDEQTLESYGVETDHTIHLVRGVAPPAASSAPAAASSLASSTLSSVPAGGLGDLFPGVGAPGSGRSSAGSAQGATRSSGNTRTGASGHVGGTGATGGLGGLGSPDLSSLLGGLAGSPRTGASGGLGGLGSPDLGNMLGGSPDVSLFSQMLQNPAMMQMMQSIMSDPQTMNQLLSFNPNARNLMESNPQMREIFQNPEFLRQLTSPETLQQLLLFQQSLLGQLGQHQPNQGRNNSGSATGTPGNPSLDTLMSMLSGLGSGGGIGVPNTSNVPPEELYATQLTQLQEMGFIDTAENIQALLATAGNVHAAVERLLGNLGQ

SEQ ID NO: 160985 - protein, 576 aa, Zea Mays
MASGGEGAGSGESPPAASVEAAAGEATLHIRCANGSKFTVQTDLGATVGGFKEVVAGSCDVPAPQQRLIYKGRILKDEQTLESYGVETDHTIHLVRGVAPPAASSAPAAASSLASSTLSSVPAGGLGDLFPGVGAPGSGRSSGIFGPGFPELEQVEQHLSQNPNLMREIMNMPAMQNLMNNPDLIRNMIMSNPQMREIMDRNPDLAHVLNDPSVLRQTLEAARNPEIMREMMRNTDRAMSNIESSPEGFNMLRRMYETVQEPFLNATTMSGEGNTASNPFAALLGNQGSNQPGQGQPATYTPTIGSESTTGTPAPNTNPLPNPWSTNAGSAQGATRSSGNTRTGASGHVGGTGATGGLGGLGSPDLSSLLGGLAGSPRTGASGGLGGLGSPDLGNMLGGSPDVSLFSQMLQNPAMMQMMQSIMSDPQTMNQLLSFNPNARNLMESNPQMREIFQNPEFLRQLTSPETLQQLLLFQQSLLGQLGQHQPNQNNSGSATGTPGNPSLDTLMSMLSGLGSGGGIGVPNTSNVPPEELYATQLTQLQEMGFIDTAENIQALLATAGNVHAAVERLLGNLGQ

SEQ ID NO: 160986 - protein, 295 aa, Zea Mays
MDRGQHRSKPEATPLNQRFASLCPLSLSVRKGSKALAAADPPAAPRESKMPVKVFGSPTSAEVARVLACLFEKDVEFQLIRVDSFRGTKRLPQYLKLQPHGEALTFEDGNVTLVESRKILRHIADKYKNQGYRDLFGPGALERASIEQWLQTEAQSFDVPSADMVYSLAYLPPDMQLDGRGVGGLPAATGTMNPAHRQKVEEMLQLFEKSRRQLGKLLDIYEQRLGEEAFLAGGKFTLADLSHLPNADRLAGDPRSARLMESRRNVSKWWDTVSRRDSWVRVKELQRPPSAEAPF

SEQ ID NO: 160987 - protein, 78 aa, Zea Mays
MIKKGWSTILKDESTYKYYYREDQIESTKGEKPHKINIIIAKNSPLAPSLAQATSRARIALTAATSMVQPLIVGGSTA

SEQ ID NO: 160988 - protein, 266 aa, Zea Mays
MKAFLQETDGGASVSSSSSSSSGSGSDEEAACRRPLCLPSSSSSEEAASLPRLPPLRKAPSLSEIAAALTSSSTFCCAAVVTFFHGLGETGLLSALLYFLKAKFHYSKNQYANLLLIIGITGSFSQLTVMPLLVRKLGEQKLLVISLVASCGQAFLYSISWSSWVPYLAASSVILSMLVTPCIRSIVSKKVGPFEQGMVQGCMTGISSTASVVSPLIFTPLTAWCLSEATPFYLKGFSVACAGFATLVALATSISMRPAEVQPDRK

SEQ ID NO: 160989 - protein, 443 aa, Zea Mays
MKNKKREREDRVMEGLGHLLLFAFLFWFSTFMVAPVMTDVTMAALCPGRDECSLAIYLTGLQQAVSGLGALVLTPVVGNLSDRYGRKALLALPATASIVPLGILAYGRTKGYFYAYYVTKTLTAMVCEGTMMTLSLAYVADRVPETRRAAAFGVFSGVCSAGFVGGTVAARFLPVSSTFQVSAVAAVATAVYMKAFLQETDGGASVSSSSSSSSGSGSDEEAACRRPLCLPSSSSSEEAASLPRLPPLRKAPSLSEIAAALTSSSTFCCAAVVTFFHGLGETGLLSALLYFLKAKFHYSKNQYANLLLIIGITGSFSQLTVMPLLVRKLGEQKLLVISLVASCGQAFLYSISWSSWVPYLAASSVILSMLVTPCIRSIVSKKVGPFEQGMVQGCMTGISSTASVVSPLIFTPLTAWCLSEATPFYLKGFSVACAGFATRWRRA

SEQ ID NO: 160990 - protein, 281 aa, Zea Mays
MEPGKKRKRLGDRTWQRNKTSGCSTPPAPDQTTVLYSPPLFIQHAVASGDAHHHCHLSLTLCPSLNSSLCESAASSEEQNSSQFAISQLRSSDSPSPDGPVSQLVGAIRAAGAVRVVRRRARLRGVRPRLQGALRRRHLRLRGRGVAGRGGDGVHGGAGDRERDAARRRHRGHLRRRLLHRGRRVVPRPLALGRLRRLDPPLHGTLRTLICVHSIVLCQTGHWHFGSCSLVANRREYLPARAHHTRFRGLMGGFSLMLTKTIRLGVPHGFRGGWPHSVRKR

SEQ ID NO: 160991 - protein, 404 aa, Zea Mays
MGKRSGGRKLPFFTRSSSSSSKRNRSGRRLPSPSKQDNATRALLASPTAASPSATPDSAAAGQTAQPPSPLSVTAGAGGALSGKITKKKPGARLWMRLDRWGASEVVELDKATIIRRAGLPSRDLRILGPVFSRSSSILAREKTMVINLEFIRAIVTAEEVLLLDPLMHEVLPFVDQLRQHLPLRSLVGGNGECAPDGNGEKQGGSHGGQVPRLNEATGAEHEFPFEFHVLEVALEIVCSSLDLSVDDLERHATPVLDELTKNVSTRNLERVRSLKSHLTRLLARVQKVRDEIEHLLDDNEDMEHLYLTRKQVQNQQVEALMSSAASNSIVLAGPGVPRLNSSFRRSLSVATSMHLDNDVEDLEMLLEAYFMQLDGIRNRILFGSILMTQKTTSTFNLTTSVMN

SEQ ID NO: 160992 - protein, 99 aa, Zea Mays
MVLVILRLLSSISTSISDLNCDSFKILINSICGLNILSKQNNSLAEMFHLTLALLNAGACCSSREVGSSSTSTFTLIITLLRRSHDLIRNFLSKDVVSN

SEQ ID NO: 160993 - protein, 213 aa, Zea Mays
MVRGYTKPSAWNTRLPNMCRFMGGTWSGIPPFGHVHRSSKGLLFSVSYGRAIELDSSRVFALIESGNIQLMLGYYRKGVEQFRSALEMAPCNHSAYFGLASALLAWARNCVTTGAFGWAASLLKEASEASRICTSLTGNLSCVWKLHGDVQLTLARCFPWVDGKIKRVMDAQMFKNSVQEWRNTCLLAAIVQNSHINVLCILLPDEFKLNLHR

SEQ ID NO: 160994 - protein, 195 aa, Zea Mays
MPETAAEANLRRQLEQTLAAEPSSPLHHYNLGVFLWDRAEAEQEGDGEEARKLRAEASEHFLAAAKLNPNDGVPFRFLGHHYARGGDNQRAVKCYHRAVTLNPDDSEAGDTLCGLLDVEGKESLELAVCKEAAGKSPRAFWAFRRLGYLQVRFIRGNGQRVYKAFSMEYEVTQHVQIYGRHLVWHTTVWACSPQQ

SEQ ID NO: 160995 - protein, 233 aa, Zea Mays
MLKGRRAWSLLSARRQLASHRVRSGLFGDLAIYRFIRGNGQRVYKAFSMEYEVTQHVQIYGSFCRQSYGRAIELDSSRVFALIESGNIQLMLGYYRKGVEQFRSALEMAPCNHSAYFGLASALLAWARNCVTTGAFGWAASLLKEASEASRICTSLTGNLSCVWKLHGDVQLTLARCFPWVDGKIKRVMDAQMFKNSVQEWRNTCLLAAIVQNSHINVLCILLPDEFKLNLHR

SEQ ID NO: 160996 - protein, 362 aa, Zea Mays
MPETAAEANLRRQLEQTLAAEPSSPLHHYNLGVFLWDRAEAEQEGDGEEARKLRAEASEHFLAAAKLNPNDGVPFRFLGHHYARGGDNQRAVKCYHRAVTLNPDDSEAGDTLCGLLDVEGKESLELAVCKEAAGKSPRAFWAFRRLGYLQVHQRKWSEGIQSLQHGIRGYPTCADLWEALGLAYHRLGMFTAAVKSYGRAIELDSSRVFALIESGNIQLMLGYYRKGVEQFRSALEMAPCNHSAYFGLASALLAWARNCVTTGAFGWAASLLKEASEASRICTSLTGNLSCVWKLHGDVQLTLARCFPWVDGKIKRVMDAQMFKNSVQEWRNTCLLAAIVQNSHINVLCILLPDEFKLNLHR

SEQ ID NO: 160997 - protein, 205 aa, Zea Mays
MPETAAEANLRRQLEQTLAAEPSSPLHHYNLGVFLWDRAEAEQEGDGEEARKLRAEASEHFLAAAKLNPNDGVPFRFLGHHYARGGDNQRAVKCYHRAVTLNPDDSEAGDTLCGLLDVEGKESLELAVCKEAAGKSPRAFWAFRRLGYLQVHQRKWSEGIQSLQHGIRGYPTCADLWEALGLAYHRLGMFTAAVKFLPAVIWTSY

SEQ ID NO: 160998 - protein, 254 aa, Zea Mays
MVPRLFEKLKDESPRRRNTIVTRVPNIAREVCVLSIRKIEMFRLQLNDMGTATRSDDISGDVRAAEANLRRQLEQTLAAEPSSPLHHYNLGVFLWDRAEAEQEGDGEEARKLRAEASEHFLAAAKLNPNDGVPFRFLGHHYARGGDNQRAVKCYHRAVTLNPDDSEAGDTLCGLLDVEGKESLELAVCKEAAGKSPRAFWAFRRLGYLQVRFIRGNGQRVYKAFSMEYEVTQHVQIYGRHLVWHTTVWACSPQQ

SEQ ID NO: 160999 - protein, 243 aa, Zea Mays
MWQILLYVAWLSCVYCYQTWLPVENSEVRKDGIKGTYRVDVDIPANDWINVTKFYDVLIFNTGHWWDRYKFPKDTPLVFYKGGKPIEPPLDMHNGLKVVLKSIASYIEREVPRKTLKLWRTQSPRHFYGGEWDHNGSCVSDRRLEEHELNSWFDPQFGGVNKEARTVNLAIQEALAGTEIQLLNLTYMSEFRADAHPAIWLGKKDAVAVYGQDCMHWCLPGVPDTWVDILAAQIMHHFKQEKG

SEQ ID NO: 161000 - protein, 97 aa, Zea Mays
MELNSWFDPQFGGVNKEARTVNLAIQEALAGTEIQLLNLTYMSEFRADAHPAIWLGKKDAVAVYGQDCMHWCLPGVPDTWVDILAAQIMHHFKQEKG

SEQ ID NO: 161001 - protein, 179 aa, Zea Mays
MPRLRLPLVLLLPIALTIILLILFPFSPSPRSPPPQPLPCGAALSDAADGRWVPTPSPAPPPLYSPSCPFHRNAWNCLRNGRPQLAALSWAPARCGGAVVPRVDAAGFLAAARGRRIGLVGDSLSENLVVALLCALRSADDGARKWKRRGAWRGGYFPKEDVVVAYHRAVLLAKYTIIR

SEQ ID NO: 161002 - protein, 291 aa, Zea Mays
MPRLRLPLVLLLPIALTIILLILFPFSPSPRSPPPQPLPCGAALSDAADGRWVPTPSPAPPPLYSPSCPFHRNAWNCLRNGRPQLAALSWAPARCGGAVVPRVDAAGFLAAARGRRIGLVGDSLSENLVVALLCALRSADDGARKWKRRGAWRGGYFPKEDVVVAYHRAVLLAKYTWLPVENSEVRKDGIKGTYRVDVDIPANDWINVTKFYDVLIFNTGHWWDRYKFPKDTPLVFYKGGKPIEPPLDMHNGLKVVLKSIASYIEREVPRKTLKLWRTQSPRHFYGAQFLV

SEQ ID NO: 161003 - protein, 293 aa, Zea Mays
MPRLRLPLVLLLPIALTIILLILFPFSPSPRSPPPQPLPCGAALSDAADGRWVPTPSPAPPPLYSPSCPFHRNAWNCLRNGRPQLAALSWAPARCGGAVVPRVDAAGFLAAARGRRIGLVGDSLSENLVVALLCALRSADDGARKWKRRGAWRGGYFPKEDVVVAYHRAVLLAKYTWLPVENSEVRKDGIKGTYRVDVDIPANDWINVTKFYDVLIFNTGHWWDRYKFPKDTPLVFYKGGKPIEPPLDMHNGLKVVLKSIASYIEREVPRKTLKLWRTQSPRHFYGGYAFQSC

SEQ ID NO: 161004 - protein, 98 aa, Zea Mays
MSTYPRTYDLIHADSMFTLYKNRCEMDRILLEMDRILRPRGTVIIREDVDLLVKVKSLANGISRRTVKSINDMKEHCFWSQIMERKGPTVETAEWGQE

SEQ ID NO: 161005 - protein, 371 aa, Zea Mays
MVYDVLHGRVWAGHNIVHFDSMIIMDAFAEIGRPPPQPKAMIDTLPLLTQCFGPRAGDMKLASLANYFGLGKQRHRSLDDVKMNIDVFKNCATVLFLEESLRGVRVPTVQNMSSGGATIRTQGITSDPAPNRDNPNESLLVGSSTVHVEEMMLDTTVTVQTDTRSSGAFSGFVELDDVSTESIKISAPLFLRPFGPRAIVQHKGSPLQLICPGLEVLWVNTKGFPNSPHRPKVGIKVDIPENLSKVLGFCDDLAQSSSSSPGPGAICSNSRWKSLIERDADRRPTVWLKIPTFGSGDTAACRTHVYEKECDGVVPRLVSERVDPSELASMLQGNKVVDAFVSVETFDHYQSAGIRLVANRLDVHFKRQQQA

SEQ ID NO: 161006 - protein, 701 aa, Zea Mays
MENGGGVGEGRSENRAGENGGVAEAATAADEGDCDVVVEGGDEGDMPPGAVAAGDHQPMVTPNTRAVLETGQLAADKWDEDDTPRFIDVEESFADDVNQDHVAAQSGSEYEDVKDGTLVYQSKEQPGTSTEDIASSHSRPGTVTHSAAEPAVAIEELDDSSSSADENTATSAPPAQFSSGSSTPAQSSSAASARSTNGPSLPSRPAGLGSSSSLSQPPARSVQQVHANRPAIVERGTQGATEDDGDENDEIHEKLQMIRVKFLRLANRFGQTYHNMVVSQVLYRLGLAEQLRRTTSNGSFSIDRARDMAERLEAAGNAPLDFSCTILVLGKTGVGKSATINSVFDDTRLDTNAFDSSTRKVQEVVGMVEGIKVKVIDTPGLSCSSLEQHRNQKVLNSVKRLISKNPPDIVLYFDRLDMQSRDNCDVPLLQTITKVFGASVWFNAIVVLTHAASAPPDGQNGIPLSYEMFVTQRSHVVQQAIRQAAGDVRLMNPVSLVENHSACRTNRAGQRVLPNGQVWKPQLLLLCFASKVLAEANVLLKLQDSPIGKLSRTRIPPLPFLLSSLLQSRAPLKLPEEQFGGDDDDLEDDLADDSDSDDGSDYDDLPPFKRLTKAQLAKLNREQRKAYLEELDYREKLFYQKQLKEERKRRKLMKKMAAEASARANDFSNSNLEDDATTPTNVSVPMPDMGYGIHNPWRIEI

SEQ ID NO: 161007 - protein, 371 aa, Zea Mays
MAAAVVDKVFVALPAEVKAGQSTLAWALDRFGGGGGGRTTVVIAHVHVPPQMIPVMGVKFHSSKLSPEQVKLFRRIEHERVDKQLDGYVRQCSKMKDEAKSELGLYDELKEACIAAENLMKRALNESSRRQKADGEVASALQKAKEYQELYFEETRKREELEGALARAHREIARLMQAKQVFVVERNTAADELQEAMSERSSLEGHDVDEDAVLRTAGGQATEQQEEEEEHVQTQHDLGTGERDLELEARLNQSKLAAFSPSSVIQSPYDEDRVPACFLCPILQEPMRDPHVAADGFTYEGDAIRGWLDGGNGASPVTGQPLAHRELAPNLALGAVIQDYTVMRRRQCRFCDSHDGVAALQFFPSPVGCQR

SEQ ID NO: 161008 - protein, 479 aa, Zea Mays
MAAAVVDKVFVALPAEVKAGQSTLAWALDRFGGGGGGRTTVVIAHVHVPPQMIPVMGVKFHSSKLSPEQVKLFRRIEHERVDKQLDGYVRQCSKMKVKCEKLVFEKDDVVAGLVELVVLHKVTRLVIAAAADRQYSRKMDRPKCRTATEIMQRADPSCKIWFVCKGQLICTRGVEEEVAPSATPFVPDDLDHQALQLVVSHQKEDEAKSELGLYDELKEACIAAENLMKRALNESSRRQKADGEVASALQKAKEYQELYFEETRKREELEGALARAHREIARLMQAKQVFVVERNTAADELQEAMSERSSLEGHDVDEDAVLRTAGGQATEQQEEEEEHVQTQHDLGTGERDLELEARLNQSKLAAFSPSSVIQSPYDEDRVPACFLCPILQEPMRDPHVAADGFTYEGDAIRGWLDGGNGASPVTGQPLAHRELAPNLALGAVIQDYTVMRRRQCRFCDSHDGVAALQFFPSPVGCQR

SEQ ID NO: 161009 - protein, 559 aa, Zea Mays
MIFSMESSPHRSPQKQQSSCSSTIAIDNTQQGRFAKFLDPHPSTNAFKKYRICYYTDYISLPWPTYAVVAMDRDSSSSVSASDGSSEAGERGGCCSSPPSTRSLVDTAGNNLISRTASDASTSLSDRCSSVDVDHSGPFQPAAAVAKLIGRSSPPSAAASLRRLSIKPRADVLDRRSTEDEMELVKERFSKLLLGEDMSGGGKGVCTAVAISNAITNLYATVFGSCHKLEPLPAGKKAMWTREMDCLLSVCDYIVQFYPSTQTLPDGTKVEVMATRPRSDIYINLPALEKLDAMLIDILDSFQKAEFWYADAGTRSFGSVTSSSSSRMSCSSSFRRSAHRNDDKWWLPVPCVPDAGLTDKARKDLQQRRDCANQIHKAAVSINSGVLGDMEVPESFMAVLPKSGRASVGDSVYRVMLGADKFSPEFLLDTLDISSEHDALAMADRVEAAMYVWRRKASGSHGKLPWSKVKELAADDDDKNVTLANRAESLLLCIKHRFPGLSQTTLDTSKIQFNKDVGQAILESYSRVLESLAFNIVSWIDDVLFVDRSIRKLSDNLKS

SEQ ID NO: 161010 - protein, 154 aa, Zea Mays
MILIIAILLPCMVLECSGLLVNLVRFKTKFRHNQESEAASSNEEWCILALKRLKEASPLALKVSLRSIREGRYQTLDECLVREYRMSMNGISKQFSHEFCEGVRARLVDKDFTPKWDPPALEYVTNDMVDAYFAPLGDSEPELKLPIESREAFV

SEQ ID NO: 161011 - protein, 195 aa, Zea Mays
MIALGLATHYFMSGHLDLIDERLAKLVTDDPSVIDSSLAQYGDMVYPDKKSIVHRLEVIDKCFSHDTVEEIVDALESEAASSNEEWCILALKRLKEASPLALKVSLRSIREGRYQTLDECLVREYRMSMNGISKQFSHEFCEGVRARLVDKDFTPKWDPPALEYVTNDMVDAYFAPLGDSEPELKLPIESREAFV

SEQ ID NO: 161012 - protein, 163 aa, Zea Mays
MFIYFLGTYLKPHVAILDGITMGGGGGVSIPGTFRVATDRTVFATPEVHIGFHPDAAASFYLSHLTGHVGEYVALTGEKLNGTDMIALGLATHYFMSGHLDLIDERLAKLVTDDPSVIDSSLAQYGDMVYPDKKSIVHRLEVIDKCFSHDTVEEIVDALVSTD

SEQ ID NO: 161013 - protein, 290 aa, Zea Mays
MPRLAAAAAVSRRAGEALRRGAFGGLRPLSSLQPLNAASSDEVLVEGKTSARAAVLNRPGYLNALTTTMGARLNKFYQSWEDNPDIGFVMMKGSGRAFCAGGDVVRLHELISEGKLEECKDFFKTLYMFIYFLGTYLKPHVAILDGITMGGGGGVSIPGTFRVATDRTVFATPEVHIGFHPDAAASFYLSHLTGHVGEYVALTGEKLNGTDMIALGLATHYFMSGHLDLIDERLAKLVTDDPSVIDSSLAQYGDMVYPDKKSIVHRLEVIDKCFSHDTVEEIVDALVSTD

SEQ ID NO: 161014 - protein, 282 aa, Zea Mays
MLLDYMNLSVKASWRNVAILDGITMGGGGGVSIPGTFRVATDRTVFATPEVHIGFHPDAAASFYLSHLTGHVGEYVALTGEKLNGTDMIALGLATHYFMSGHLDLIDERLAKLVTDDPSVIDSSLAQYGDMVYPDKKSIVHRLEVIDKCFSHDTVEEIVDALESEAASSNEEWCILALKRLKEASPLALKVSLRSIREGRYQTLDECLVREYRMSMNGISKQFSHEFCEGVRARLVDKDFTPKWDPPALEYVTNDMVDAYFAPLGDSEPELKLPIESREAFV

SEQ ID NO: 161015 - protein, 425 aa, Zea Mays
MPRLAAAAAVSRRAGEALRRGAFGGLRPLSSLQPLNAASSDEVLVEGKTSARAAVLNRPGYLNALTTTMGARLNKFYQSWEDNPDIGFVMMKGSGRAFCAGGDVVRLHELISEGKLEECKDFFKTLYMFIYFLGTYLKPHVAILDGITMGGGGGVSIPGTFRVATDRTVFATPEVHIGFHPDAAASFYLSHLTGHVGEYVALTGEKLNGTDMIALGLATHYFMSGHLDLIDERLAKLVTDDPSVIDSSLAQYGDMVYPDKKSIVHRLEVIDKCFSHDTVEEIVDALCSGLLVNLVRFKTKFRHNQESEAASSNEEWCILALKRLKEASPLALKVSLRSIREGRYQTLDECLVREYRMSMNGISKQFSHEFCEGVRARLVDKDFTPKWDPPALEYVTNDMVDAYFAPLGDSEPELKLPIESREAFV

SEQ ID NO: 161016 - protein, 325 aa, Zea Mays
MGGQPRHWLCHDEGKLEECKDFFKTLYMFIYFLGTYLKPHVAILDGITMGGGGGVSIPGTFRVATDRTVFATPEVHIGFHPDAAASFYLSHLTGHVGEYVALTGEKLNGTDMIALGLATHYFMSGHLDLIDERLAKLVTDDPSVIDSSLAQYGDMVYPDKKSIVHRLEVIDKCFSHDTVEEIVDALCSGLLVNLVRFKTKFRHNQESEAASSNEEWCILALKRLKEASPLALKVSLRSIREGRYQTLDECLVREYRMSMNGISKQFSHEFCEGVRARLVDKDFTPKWDPPALEYVTNDMVDAYFAPLGDSEPELKLPIESREAFV

SEQ ID NO: 161017 - protein, 377 aa, Zea Mays
MVVLMFVAFLLASSPSRRNPGMLPPLVRQLAGFNAFWYSHHVFIAVYVLLIVHSMFLFLAKDVAEKTTWMYVAIPVVIYIGERMFRMVRSMVFDVKILNATVYPGMVLALKVTKPPGFRYQSGMYVFVQCPEVSKFEWHPFSLTSAPDDDHLSIHIRSLGDWSYQMYDVFQQMLLSSNSSMPKIFFDGPYGAASQDHSKYEIILLIGLGIGATPFISVLKDIANGLDKGHGNLNYHSDRLKKAYFYWVTREQGSFEWFRDIMKEVSVLDSKQGVIEMYNYLTSVYQEGDKRSMLISAIQALHFARHGIDIISKTPVHTHFSRPNWPRVLHGLARRHIGERIGVFYCGPDDLGRQLEKLCHKVNTKTFTRFVFHKEHF

SEQ ID NO: 161018 - protein, 94 aa, Zea Mays
MNCLTCDSSTATSSWVDAWPGKQMHSHNYRVPEPFLDQVVIIIGASASAVDISRDIASMAEEVHIADRSAPASTCNKQPGYDNLWLHSMVNYLL

SEQ ID NO: 161019 - protein, 485 aa, Zea Mays
MPSASLRLAVVGAGAAGLVAARELRREGHAPVVFERAAAVGGTWLYTPPATSSDPLGAAATHSSLYASLRTNLPRETMGFLDFPFAAGAAGSRDPRRFPGHEEVLRYLEAFARRFDLLRLVRFETEVLSVRREDGGRWAVTSRKLGDKGSGEEEFYDAVVVCNGHYTEPRLAVIPGVDAWPGKQMHSHNYRVPEPFLDQVVIIIGASASAVDISRDIASMAEEVHIADRSAPASTCNKQPGYDNLWLHSMIDHAQEDGTVVFQDGSSIKADVIMHCTGYSDLQYHLHPVSYKSMPFCVNLESDNVLLAFVCCLATCMTFHSLEMTALSPWTTTVSIHYTSIFFHPKWHLICPSSDCLGKSVLLQIDAPVIPFPLFELQSKWVARVLSGRINLPSEDRMMEDVKAFYLKLEAHGWPKRYTHNFANYQFEYDDWLAEQCGHPPVEEWRKQMYAVTSMNKAARPESYRDEWDDEHLVAEANEYFKKFL

SEQ ID NO: 161020 - protein, 519 aa, Zea Mays
MEDLKKFYPSFWKQSSSSRSSLHSIREHKLMDLGSRRNQTQEVSTNFNKRKPFSESVELTSDVRTSVWRKSDAYHGVIDLEKPSISGDAIEAIGCSGFGNPANQNGKSQDGSCCISPENTSLAESLQSCRDWNISRVSVVGSSDTPDCQSPIKTSNNEARHSLFDLNVPQEESLFMSSTLVPSSSTYCGIFSDNRRETSEKEHIAGIRSMKGSSITVVTPNSVADSSRDVVTESPVQPKFLFDLNVSLENTDMPSEICDYRDKDVNNDVSKGTAPRRSFSNKDSLHAETSTKHAVLGHDHMLAHEDDSKVLLTSPTANGINKVQLTQSGTINKEFLIPGSPLVDTSFPPRLEISDNGASNIQELSMLQDKVDGDGTTADTAARTLLSIFQHSSERIAHCFGSSNQTAAQNVNDEPQPSLDSFEQTVLNLEEIQDDGQSINVAPPYIEGPACRIKLKRGRGMRNFQREIIPGLLLGRQEICEDLEVIGYAPKKARSRKPRKGPGASSAQPRPCKRGAVKR

SEQ ID NO: 161021 - protein, 354 aa, Zea Mays
MEYLSRSWSVSASEISKILVAGGNKPSSVAAAACRLPEAAMSIPEQAPVLATSSTVHLPSPQQHRDARRYSTSGGHHQSIGRWFQQAHHRETCRAKQSGKEKQRAEKAHVHAMVSVARVAAAVAAVAGSGDTQTQATKMARAMASATELLASHCVEAAQHAGARHDQVAAAVQAAVGVGSPGDLVTLTAAAATALRGAATLKQRVQRETARSNASVLPYERGSSWSPDIWCKEGDLLKRTRKGGLHRIRVSIYINKRSQVILKLKSKHLGGALSKNNKSVVYGVYSELPTWAGKGSVEETCCFGLSTAQGLVELECEGSASKRKWVDDVQSLLREAALHGHGQVGNGMGLVKLS

SEQ ID NO: 161022 - protein, 158 aa, Zea Mays
MAAPQRSDVFLQRKRGQTATAAMRGVRLCEAKQLAVWLVDHAPGEGIAESGGVRQPLYGLHGLAPAPHAPLGGLLLRPVVDDGDGPLALRPREDAVGANARLPRVPLHQARQEQLLRGLAHHHRRLQELSLGALQLLHHVLRRVHPQLQTCCSTPTNG

SEQ ID NO: 161023 - protein, 228 aa, Zea Mays
MGADSVQEGPVLLRADGDGDHHRHELLPGVQVPLRPQRHGVRQAGQARPQRQAPPLGHHRHRVHQGAVRVPWPQDRVPRGGVLEPRLLRGAGGVRGRRRRRGAGGPDGVQDGARAADGAVGADARVLGLHLAHGHQPPHAAALLHPHPQRVRQDARRQERHPGQLEAQHLLPLLRPVQLASWFAPSGRSVTTTHHYYHHHPLDYCFCYQILRRNGTAGCRRRRRPWKG

SEQ ID NO: 161024 - protein, 173 aa, Zea Mays
MCAPTNMARSPSLLLSAANCVHTQTSPSPSPPSPPLPSAHCSPLEESERERGKGEGGAGRHGLPFLPPRRGGARAPGPARRSPVPRGPVRRRGRRRGELQHQRGRRVLGPLAEGPGHLVRPAQRRRPGRQRWCVRLQAHQPVPLHVHGLLRKPAIVQGRQGMRLLLQADGCRG

SEQ ID NO: 161025 - protein, 225 aa, Zea Mays
MSKRNLFWVVSQMQAIVERYPCWGDTVEVNTWVSANGKNGMRRDWHIRDSMTGHTTLKATSKWVMMNKLTRKLARIPDEVHTDIEPYFVGRSAIVDEDNSKLPKLPEGQSTCAAKYVRTGLTLTFGEQNTKKQAHGILAYSLDQGVSILDTVEIALMVVLKKMMVNTSHHQQLQRKGKSVADKGPPPQLWWQRMWWSRLGQPHDAHHLGVECKKSHASWIVLDKI

SEQ ID NO: 161026 - protein, 136 aa, Zea Mays
MSKRNLFWVVSQMQAIVERYPCWGDTVEVNTWVSANGKNGMRRDWHIRDSMTGHTTLKATSKWVMMNKLTRKLARIPDEVHTDIEPYFVGRSAIVDEDNSKLPKLPEGQSTCAAKYVRTGLTPTVADVIGIDLGTS

SEQ ID NO: 161027 - protein, 285 aa, Zea Mays
MATALSFKALALAALLSMVVASGARAEQQFKRNATTASQDRSLLSYSSGWLPAKATWYGAPTGAGPLDNVPVLVHDVLWQRAHLQGRQGLRLMLPDTVPEEQPPGLLRRGSDGDHHGHELLPGGQVPLRPERHGVRVHGQLGPERQAPARRDHRHAVQAGAVQLPGPDHHLPRPARLQPHVPGRAHRAREQGRRRGAGGHHAEQLRPLGAHARVLGLHLEDRPQPPAPWPLLHAHHQRVRQAAGGQERHPGQLHPRRRLPLLRPVLMIELAWSLLKRLIVSSLFN

SEQ ID NO: 161028 - protein, 166 aa, Zea Mays
MTTAAAVEPAPLVRARACAASASFPPPRRRRAAGAIRASPVPGRTEAAAELPAPLQPNARRRGRDPLWHGGGFSLGVDLGDARTGLAIGRGITFPRPLTVLRLRGQKLELALLDVARQQEADELIIGLPVSADGSETPQSNKVRSVVGRLAVQAAQSGFVFTAAGA

SEQ ID NO: 161029 - protein, 202 aa, Zea Mays
MTTAAAVEPAPLVRARACAASASFPPPRRRRAAGAIRASPVPGRTEAAAELPAPLQPNARRRGRDPLWHGGGFSLGVDLGDARTGLAIGRGITFPRPLTVLRLRGQKLELALLDVARQQEADELIIGLPVSADGSETPQSNKVRSVVGRLAVQAAQRGLRVYLQDEYGTSTDALDYMISRGVKKSARDTKSDAYAAVVFDAT

SEQ ID NO: 161030 - protein, 111 aa, Zea Mays
MTTAAAVEPAPLVRARACAASASFPPPRRRRAAGAIRASPVPGRTEAAAELPAPLQPNARRRGRDPLWHGGGFSLGVDLGDARTGLAIGRGITFPRPLTVRTSRTQLHRPK

SEQ ID NO: 161031 - protein, 179 aa, Zea Mays
MDLGVWCGDVSCRCRGEPWKGGTGGMISRSGFSSSTWGASLWAFLLLPCNLPGRDARIGQHARLTGSPQRRKRGCGRGDDEVDGEYGEDLGRPWREVLLFPTPWERSARATIGSSKGRGVSREMARSPAERGWASSCRGEYAEQGEPPWARSPWEEVRAQLAAIYGELETFCASNSREG

SEQ ID NO: 161032 - protein, 219 aa, Zea Mays
MGAAGAIRRAAASVVDRACAGTRGFRRALARFAPRPSAFEDNSSQQLRENVKPSALEPTYMEESQAKRDDVESTFIMIKPDGVQRGLIGEIISRFEKKGFYLKALKLVNVERSFAEKHYADLASKPFFQGLVDYIISGPVVAMVWEGKSVVTTGRKIIGATNPLASEPGTIRGDFAVDIGRNVIHGSDSIESANKEIALWFPEGPADWQSSQHPWIYEK

SEQ ID NO: 161033 - protein, 307 aa, Zea Mays
MAVQAHYHHHYHRESPFLVSRLAAAMELHHQAQKEAMAPQQAQAPPLFLDFSHGDYGGGRKRQREAEPMSSQFFSLQQQPQAQGPKVINLAQLQKRTAMGLRLDFDEGSEHVSCTSPASASASCLLSKELAAQRDQHRNEMDRLIQEHADRLRRALADTRRRHYRSLVGAAEAAAAQRVREKEAAAWQAKDAADQSTAAALHAQLQKAAAAQARGKAEEEDNVGAAADDAGSCFVDPDRVVEVAPPRPLARPCRTCGQRSASVVLLPCRHLCVCAECEPAVPAAGAVAAACPMCRGAVTGTVQVFFS

SEQ ID NO: 161034 - protein, 393 aa, Zea Mays
MLLPLCSIPPPTSAASPVNPPAPRQRPPAATPSRIPPSPRQHPTTNPRSPRSSSPPPAHPHSSPSHAPSPSPPRPLPPQLSSTSSGACPTTPPHTSSPTSSPPSLARPSQSSRSASSCPHPPQPPPPTTASTPRSFGFPSRSISYQPSLPTPCAASPASPPLCSPSTSSLSASVPLVPRSRGLYLPIALQILHDVIPAWNLTPDKFTYSTIVSALADAGRVDDALALVHEMVVDGILAAEAFNPVLKAMLRTGDVNGAAKLFRFMQLKGCTLTESTYNVLLHGLLLCGRARDAAGMMRRMESEGMPPGLMTYGAVVDGLLKCGRMEDAWKVSEEMGRKGLTPSDFVFSSVITGFCKSGEVDRALKVWETMVAAKGNLDVVGTMLRRRRSCRRK

SEQ ID NO: 161035 - protein, 573 aa, Zea Mays
MLLPLCSIPPPTSAASPVNPPAPRQRPPAATPSRIPPSPRQHPTTNPRSPRSSSPPPAHPHSSPSHAPSPSPPRPLPPQLSSTSSGACPTTPPHTSSPTSSPPSLARPSQSSRSASSCPHPPQPPPPTTASTPRSFGFPSRSISYQPSLPTPCAASPASPPLCSPSTSSLSASVPLVPRSRGLYLPIALQILHDVIPAWNLTPDKFTYSTIVSALADAGRVDDALALVHEMVVDGILAAEAFNPVLKAMLRTGDVNGAAKLFRFMQLKGCTLTESTYNVLLHGLLLCGRARDAAGMMRRMESEGMPPGLMTYGAVVDGLLKCGRMEDAWKVSEEMGRKGLTPSDFVFSSVITGFCKSGEVDRALKVWETMVAAKVNPNTVLYSAMIDGLARCGRMTEAKMLFGDMVDAKCLPNVMTYSSIIYGYFFIGDSSCALSTWEEMEKVGCVPNAISYSILINALCNVGRLKDAMMVWKNMLGRGCVPDTIAYTSMVKGLCMSGMVDGGVRLFNDMLAKGDARPDAISYNILLDGLIRTNNLPRAMDLLNQMLDQLCDPDTVTCNIFLREIGVVEGKGR

SEQ ID NO: 161036 - protein, 276 aa, Zea Mays
MHIKDVRMWTTVVCACAEDGQLATARQLFDQMPERNAFTWTALIEGYACHGQPMDALNMFQHMMKEGLQPDQITLGCCLSACAAMRSLNLGQQIHGMLLRCGFDRSVMIVTAIIDMYSKCSFLSGAIKVFSLTGKERKNAVLWNGMLSALYDHGHEQDVIGLFVQMIHGRHKPDANTFFLVLVACCHCGLVEEGMNFFDLMNERYRIVPGQEHYFCMADLVSHASSNNKVIEWIKSSPFSFNLRVWEVLVRNCTIHGNIELLNKVEEELARLDHPE

SEQ ID NO: 161037 - protein, 259 aa, Zea Mays
MDKGTNALDVLEGRAYRLQHPWVGIVNRSQADINKNVDMIIARRKEQEFFDSSPEYSHLASRMGSEYLAKLLSQHLEAAIRSRIPSITSLINKTIDELESEMDHLGRPIASDAGAQLYLILELCRAFDKIFKEHLDGGRPGGDRIYGVFDNQLPSALRKLPFDRHLSVQNVKRVVSQADGYQPHLIAPEQGYRRLIESSLNYFRGPAEASVDAVHSVLKELVRISIGETQVGPRFLRDKVSVTPFSLYISFKSYCIFRS

SEQ ID NO: 161038 - protein, 606 aa, Zea Mays
MTTMENVIVLVNRIQRACTVLGDHGGGDAAASLPTLWEALPTVAVVGGQSSGKSSVLESIVGRDFLPRGSGIVTRRPLVLQLHKTEAGVQEYAEFLHMPKRRFTDFSIVRKEIQDETDRLTGKTKQISPVPIHLSIYSPHEGQPESIVQDIESMVRSYVDKPNCIILAISPANQDIATSDAIKLAREVDPTGERTFGVLTKLDLMDKGTNALDVLEGRAYRLQHPWVGIVNRSQADINKNVDMIIARRKEQEFFDSSPEYSHLASRMGSEYLAKLLSQHLEAAIRSRIPSITSLINKTIDELESEMDHLGRPIASDAGAQLYLILELCRAFDKIFKEHLDGGRPGGDRIYGVFDNQLPSALRKLPFDRHLSVQNVKRVVSQADGYQPHLIAPEQGYRRLIESSLNYFRGPAEASVDAVHSVLKELVRISIGETQELKRFPSLQTELAAACYKALERFREDGRKTTLRLVDMESAYLTVEFFRKLPQEVDKTGTGNPRNANPPAPSDDRYADAHFRRIASNVSSYIGMVSETLKNTIPKSVVHCQVREAKRSLLNHFYTQVGGKDAKQLAVLLDEDPALMERRLQCFKRLELYKSARDEIDAVSWTR

SEQ ID NO: 161039 - protein, 405 aa, Zea Mays
MQSSLPGKWIQLVLEGRAYRLQHPWVGIVNRSQADINKNVDMIIARRKEQEFFDSSPEYSHLASRMGSEYLAKLLSQHLEAAIRSRIPSITSLINKTIDELESEMDHLGRPIASDAGAQLYLILELCRAFDKIFKEHLDGGRPGGDRIYGVFDNQLPSALRKLPFDRHLSVQNVKRVVSQADGYQPHLIAPEQGYRRLIESSLNYFRGPAEASVDAVHSVLKELVRISIGETQELKRFPSLQTELAAACYKALERFREDGRKTTLRLVDMESAYLTVEFFRKLPQEVDKTGTGNPRNANPPAPSDDRYADAHFRRIASNVSSYIGMVSETLKNTIPKSVVHCQVREAKRSLLNHFYTQVGGKDAKQLAVLLDEDPALMERRLQCFKRLELYKSARDEIDAVSWTR

SEQ ID NO: 161040 - protein, 363 aa, Zea Mays
MTTMENVIVLVNRIQRACTVLGDHGGGDAAASLPTLWEALPTVAVVGGQSSGKSSVLESIVGRDFLPRGSGIVTRRPLVLQLHKTEAGVQEYAEFLHMPKRRFTDFSIVRKEIQDETDRLTGKTKQISPVPIHLSIYSPHVVNLTLIDLPGLTKVAVEGQPESIVQDIESMVRSYVDKPNCIILAISPANQDIATSDAIKLAREVDPTGERTFGVLTKLDLMDKGTNALDVLEGRAYRLQHPWVGIVNRSQADINKNVDMIIARRKEQEFFDSSPEYSHLASRMGSEYLAKLLSQHLEAAIRSRIPSITSLINKTIDELESEMDHLGRPIASDAGAQLYLILELCRAFDKIFKEHLDGGCILF

SEQ ID NO: 161041 - protein, 480 aa, Zea Mays
MTTMENVIVLVNRIQRACTVLGDHGGGDAAASLPTLWEALPTVAVVGGQSSGKSSVLESIVGRDFLPRGSGIVTRRPLVLQLHKTEAGVQEYAEFLHMPKRRFTDFSIVRKEIQDETDRLTGKTKQISPVPIHLSIYSPHVVNLTLIDLPGLTKVAVEGQPESIVQDIESMVRSYVDKPNCIILAISPANQDIATSDAIKLAREVDPTGERTFGVLTKLDLMDKGTNALDVLEGRAYRLQHPWVGIVNRSQADINKNVDMIIARRKEQEFFDSSPEYSHLASRMGSEYLAKLLSQHLEAAIRSRIPSITSLINKTIDELESEMDHLGRPIASDAGAQLYLILELCRAFDKIFKEHLDGGRPGGDRIYGVFDNQLPSALRKLPFDRHLSVQNVKRVVSQADGYQPHLIAPEQGYRRLIESSLNYFRGPAEASVDAVHSVLKELVRISIGETQLLHAIRPLRDSAKMAGKLLYGWLIWSLHI

SEQ ID NO: 161042 - protein, 372 aa, Zea Mays
MATSRLPRDRWTLWCCRSRLLWPSSSRNRRGRQLSPSTSPWLLKSNQKLQGLREEMNAIVPYLEEMRKKKVERWDQFVDVIEQIKKVASEIRPADFVPFRIPMDQSDLSLRKLEELTKELQSLQKEKSDRLKQVMEHLNTLHSLCEVLGVDFKQIVNELQDLASSMLELWNLMDTPLEEQQMFQNVTCNIAASEHEITEPNTLSIDFLSYVESEVLRLEQHKASKMKDLVLKKKTELEEHRRRAHLIGEEGYAAKFSDEAIELDDTIIKTIETAPNNELKKAKEIIQRIRRRELNKFCNPVFCSPKDKLEHFKNITAQDIVCSQKSSEVLLKEEDVAVSNVKIDLTRGKDNPLERFLIFEWYLVLLLICLKH

SEQ ID NO: 161043 - protein, 294 aa, Zea Mays
MPSPLGGRIQFGPGKAGMPSASLARRLLSTISSPAIPSRSTSTSASNSNSCGFSTRRARKKRSCVSWTVSAATPADMATNSALAKLAPLEAILFDIDGTLCDSDPIHFCAFRELLQQAGFNGGVPITEEFYSANISGGHNDDLARSLFPGMDHQKAMRFMDDKEAMFRKLAPGQLKPVDGLQELCGWMEGRDLKRAAVTNAPRANAELMLSLLGLTDFFPVLVIGSECDRAKPFPDPYLKALQLIGASPQHTFIFEDSASGVRAGVAAGVPVVGLTTRNPGKVEVEPAAANAQG

SEQ ID NO: 161044 - protein, 98 aa, Zea Mays
MNCHTYIPSINKFMKLRPQQTCLDVMLLLLQVQAISLLTKMISRGVLVVSGSLGKTTQEPVGKSILCKEHGACTAPATSSNFILGCLYGQEFAKCISN

SEQ ID NO: 161045 - protein, 124 aa, Zea Mays
MAATAGVGGGGGANAAVAEQIAQAVRSTSNLLQLMEQSSPAQVHLAKLPKNLLEKASFAKNTEHLPQVISSLDAYMDRSLQSASQIKTVTQLLSNMEKTQLKSMLPSSRRKEDQKSTEPLRTQG

SEQ ID NO: 161046 - protein, 97 aa, Zea Mays
MAATAGVGGGGGANAAVAEQIAQAVRSTSNLLQLMEQSSPAQVHLAKLPKNLLEKASFAKNTEHVLHQLPQVISSLDAYMDRSLQRLPSSPICIFIH

SEQ ID NO: 161047 - protein, 304 aa, Zea Mays
MDGCSYKAAAGGSLSNSLVALARLGSSQSAGYPELNIVMGGSVGSDPLGSFYRAKLRRANVHFLSKPVKDGTTGTVIVLTTPDAQRTMLAYQGTSSTLSYDSDLASLVSKSNVLIVEGYLFELPHTIEAIKQACEDAHKNGAIIAVTASDVSCIKRCYNDFRDIVRNYADILFANANEARALCELPSTDSPMSATRYLSHSVPLVSVTDGMHGSYIGVKGEAIYIPPPQCVAVDTCGAGDAYASGILYGVLRGASDLKGIGLLASRVAAVVVGQQGTRLRVQDADRLAGSFEHHLDSLEFCSDV

SEQ ID NO: 161048 - protein, 112 aa, Zea Mays
MLQTRSLSTCIYNHSEHRTNNSELAYHTKPSLMIARTTMVLIQPFCRAPSKRCTSKMTSRRASKTFNRYEREKLGAEARHVMASKELRAQQRERRELHGSTRRNNGTRVQED

SEQ ID NO: 161049 - protein, 603 aa, Zea Mays
MSQLQPLLCDVPTQIVDPSDHEEATLQNIECINTEVNIVGAIDTNIQGKENTIPEVVTYKKVDPVGPAVIVPKVGMYFDSEKEAYEMYNAYACMVGFSIRKSDTRRRPDKTIFQKHIVCSNQGNRKNEPSQSTTRTGCKARVQFSISREGVWTVQKVELEHNHTLASPNKAHKLRSQRHVIEADRQLISQIREAGMRPTQVYEFMKQFYGGADKVPFSRMDCNNEIGRERKKYLESNDAQTLLEYLKNKQIEDHAFFYAIEIDLEEGEQYGRIANFFWADGQSILDYACFGDDVSFDTTFQTNKFEMPFAPLLGTNHHKQTIVFGAALLFNETIESFVWLFQTFLTAMSGKHPSTIFTDQDAAMACAIAYVFPNTRHRLCLWHIYLNAAKHLSHIIHNHPKKFLPAFKNCVYEDRSEDCFKRKWNELLIEYSLEENLWMLNLYNLREKWAAVYRDSFTADMTTTQRSEGMNNVFKKRFRRKLGLSELIVECEKVSASLRENELDEDFKSRMKNPVNYIQNLPLLKYAAESYTRRMYMEFEEEFKCQFSYSCKLLQSEGSISTFMVTHMHSNYGATVTFNVADLTITCSCRKFESIGMYFHLKL

SEQ ID NO: 161050 - protein, 602 aa, Zea Mays
MSQLQPLLCDVPTQIVDPSDHEEATLQNIECINTEVNIVGAIDTNIQGKENTIPEVVTYKVDPVGPAVIVPKVGMYFDSEKEAYEMYNAYACMVGFSIRKSDTRRRPDKTIFQKHIVCSNQGNRKNEPSQSTTRTGCKARVQFSISREGVWTVQKVELEHNHTLASPNKAHKLRSQRHVIEADRQLISQIREAGMRPTQVYEFMKQFYGGADKVPFSRMDCNNEIGRERKKYLESNDAQTLLEYLKNKQIEDHAFFYAIEIDLEEGEQYGRIANFFWADGQSILDYACFGDDVSFDTTFQTNKFEMPFAPLLGTNHHKQTIVFGAALLFNETIESFVWLFQTFLTAMSGKHPSTIFTDQDAAMACAIAYVFPNTRHRLCLWHIYLNAAKHLSHIIHNHPKKFLPAFKNCVYEDRSEDCFKRKWNELLIEYSLEENLWMLNLYNLREKWAAVYRDSFTADMTTTQRSEGMNNVFKKRFRRKLGLSELIVECEKVSASLRENELDEDFKSRMKNPVNYIQNLPLLKYAAESYTRRMYMEFEEEFKCQFSYSCKLLQSEGSISTFMVTHMHSNYGATVTFNVADLTITCSCRKFESIGMYFHLKL

SEQ ID NO: 161051 - protein, 90 aa, Zea Mays
MMASLRAAVFPAICGEVQDLQGESAFTKSDPTHPDFESLKPSPRCSVLPRRSFCLPLQPCIIRLQISHSTACFTRYSVADHITRRLADAV

SEQ ID NO: 161052 - protein, 57 aa, Zea Mays
MGKLCLGRTNTRKATTQWEWRDVESSVYPPWQEAGRWSICALGWREPILVLRNPGVS

SEQ ID NO: 161053 - protein, 261 aa, Zea Mays
MMKLSQRMITSFSANISASGSQSWTSLSETTEDTIRVTTRKNTDPGQPSGVILTAVSTSWLPFNHQKVFELLADEQQRCQLEIMSSGGSLHEVAHIANGSHPKNCISLLRINAASNSSQNVELMLQESSTHPDGGSLVVFATVDVDAIQVTMSGEDPSYIPLLPLGFAIFPAANPSAAATSAAGSGDGQSSPAGNADEPASGCLLTVGMQVLASAVPSAKLNLSSVTAINSHVCNAVHQITAALKGAGASGAAEPAAAASE

SEQ ID NO: 161054 - protein, 120 aa, Zea Mays
MERDATREVRKILTQARDTKVAEDEAKATATENTCKLLLARENAVAAGHRADALLSERSTKLQVIRLVVSMVCAHLSPLLSTEAPLVDRLWELPDCVESAPSPRAFVEGWNRPWPDGLSL

SEQ ID NO: 161055 - protein, 98 aa, Zea Mays
MCLVSAGLTPPIQEQQHEKPRQQLLRLDDLLGLCEPEKKQPYRPIDHADQRVRRGMKGFGPCNSGGRASLPQPTPRVASRYWSTRWRHFWWWLIPSMR

SEQ ID NO: 161056 - protein, 167 aa, Zea Mays
MAMTTAVTGLAVAATAPIRSFLSSAAASVSLPADLRDLASDLASDPAVSYRSLRAIWCATSPDTRPPLRDLLQGADFVLPSPKPREKSDELKARLEKLRETQERKEYAELVRDVAPPSKDDAPEPFSSYKDQIGFGTTQPPYFQIALCNLPTACFMDYTCSIEVIGI

SEQ ID NO: 161057 - protein, 290 aa, Zea Mays
MWVEILCGLVVYKIIQRVFFAGGDDASYLADLDSSHSDLCFAVASRLEKLYAGRCFVGLRIPDPDAGERQHIDVVLVTKREVMVVAIKNLSGFVEADKDGNWSCPTDKKHKHEIFPNPVLEVNRLAANLQSYLEQRGAKLPDGHIIGRVVLPNPNCRPSYTISTQPEVMLYDQWKDLKTDSKTGLSAWIKGAFTGSRSDMQDSVLQNLHFILSSSPMWDRLELKGDKNVLGEFIEFKGRHEDVQLLKILKRSKVSRFIIQKSTLFGGFGHEFKYCILLVTIELRGLHLQS

SEQ ID NO: 161058 - protein, 184 aa, Zea Mays
METPLSTRRITRSLAAASAQKSAAAGMDSAALFSLSKNAVAGETHAQTRAALHDITNDSPVVGLAAGSLHATDTTPAKTRRRAPRCTPGSGEALLRGQVKALLHKVDEEQGCAAAGALVRPKRIQALLGVSRSPAQLLAPTPANTPQIGPVSAPREGVGLHDGATVVPCVLDEEELLIPKLQVM

SEQ ID NO: 161059 - protein, 54 aa, Zea Mays
MENIKCIGTCRIRVVDRYRRKTELKSTRATIIYVHAFLFLQPDHFKKNLDVKML

SEQ ID NO: 161060 - protein, 442 aa, Zea Mays
MASSSAALAVLMLSWAAALAAASSPVTLFEAGYMPLFGGGNLVPSPGGRSVRLKLDRHTGSGFVSRSSYHHGFFSASIKLPDHHTAGVVVAFYLSNADVFPGNHDEVDFELLGNRRGHEWRVQTNIYGNGSTSRGREERYLLPFDPTLRPHAYAVAWTPTAILFYVDGTPIREVVRVPAMGGDFPSKPMSVYATIWDGSAWATEGGRYKVDYAFAPFAADFSSLVLSGCPVAGGGDDLAAAECQVATMTADCAVMTPAKRAAMRRFRRRYLLYTVCHDMYRYNGTVFPECDADGSERDDFHKWGESKRVSPSSRGYVEVEEDAGVELFYYFVQAESGAAAAADDTPFLFWLTGGDRCSVFSGLAYEIGPIRFVLEPYNGTLPRLRYNHNSWSKVSHILFVDSPVGAGFSFSRDPKGYDVGDISASLQLQEFLIKVLSINPTS

SEQ ID NO: 161061 - protein, 420 aa, Zea Mays
MAALTRPARRRRTAPTTTLPAAFSTIPTTPIIVGEGEPPPSWDPVPTPKAMVGKGSPRFNIGGSPKLRRFIPTTSATKKKTSPKCSGAKKSGSSPRVKQRADWNPGLERSLVDILHEFKESGYRGDNGWNSEGWNRMVKEFHVRNKYVSFTKSQIQDKEGQLKRDYKMLKAAKQQSGSTWNEKRNMVEGPPALWENLIVTFPKIKKFNNNKATFPLFDALGELYDGHLAEGTWNCTSLDAPREEEPNEQLQDVEDGPQGFDLNVVHDVYDEVDDALTERNEDMLQGRANTLSRDEESGQRRPAASRNKQEKELKKPRKTDNIENMMNKYLETRSKQVEDEAAREKEAREKETREKEATQSEDFSIKRCISVLNTMEEVTKLEKAKAYSVFTKSKENRETFICACEADQESALIWLRNEMA

SEQ ID NO: 161062 - protein, 93 aa, Zea Mays
MAEGRGELSDGVEKGLEQRMGELDWGARGSGAKADARKGDAAALATGEDAAGWRSEQGMDAVARAGGEGLGIRVERMVCSAAGRRGRLEDEPR

SEQ ID NO: 161063 - protein, 572 aa, Zea Mays
MAAMNGKVLGKCGRNMNSLKRKRENPAAYDADIFHNSELHQHPVNDSAVRFHVDKDRKAKIVCHFNKQVLQSYKNFMSSAPPKRILLRIGAVWKDFPEKIVKLAQADFRAKKTITETGYQNQLFLLDFAHMTFIDTKTGLQRPIAWIDENGNRYFPESFVQDQKIFMKKDFGNGYHDYISVESNGTREMNDQLGTSESSAESSNFGSSTEDVSSPKRARAENNSIIKKYCDMGEAIGENEPCTLLPTACNLLPRQANLGEVSRAQRTIEAVEKLLLQGMGSVIESKDIIGIYRTPLLDDHGQVRYHNHEKHVQVTRCHRGNANVRYAWLPCSKSTVHEMMLNSSLQVHKPPIKCAAYGEGTFLTPANRSDACVKFSAVDENGIVHMMLCRVIMGNVEIVHPGSKQHQPSSDYFDSGVDDLKNPQHYIVWDMNLNRHIYPEFVVTVKLPSKTKDYFVSQEDCQNSSDLSLVLNSSSPDCISERSQPKCLLKLWTWLLVAMKSLSCLLWRGVRDRVHQLPRWWRNREAGVGRSVGEECRREEAADFDNPVGSSNYEASCVSLCMAADVSSFCVV

SEQ ID NO: 161064 - protein, 492 aa, Zea Mays
MAAMNGKVLGKCGRNMNSLKRKRENPAAYDADIFHNSELHQHPVNDSAVRFHVDKDRKAKIVCHFNKQVLQSYKNFMSSAPPKRILLRIGAVWKDFPEKIVKLAQADFRAKKTITETGYQNQLFLLDFAHMTFIDTKTGLQRPIAWIDENGNRYFPESFVQDQKIFMKKDFGNGYHDYISVESNGTREMNDQLGTSESSAESSNFGSSTEDVSSPKRARAENNSIIKKYCDMGEAIGENEPCTLLPTACNLLPRQANLGEVSRAQRTIEAVEKLLLQGMGSVIESKDIIGIYRTPLLDDHGQVRYHNHEKHVQVTRCHRGNANVRYAWLPCSKSTVHEMMLNSSLQVHKPPIKCAAYGEGTFLTPANRSDACVKFSAVDENGIVHMMLCRVIMGNVEIVHPGSKQHQPSSDYFDSGVDDLKNPQHYIVWDMNLNRHIYPEFVVTVKLPSKTKDYFVSQEDCQNSSDLSLVLNSSSPDCISETSSTVGAARVQ

SEQ ID NO: 161065 - protein, 330 aa, Zea Mays
MHAPPLVAFAGGACPASAASSLSPWLASLRPAIVAAPARLLWFRRGALRLEAKAAWRATGGGRGPRVPAKGAVLASYMGAEEVVGPLSLLDEEELILHIRKERDNGKLPADVAINLEELYYNYRNAVLQNGDPNAYEIMLSNMTALFDRVLLDVQNPFTFPPYHKAVREPFDYYMFGQNYIRPLVDFRNSYVGNISLFHDMEEKLHQGHNVVLMSNHQTEADPAIIALLLEKTNPWISENIVYVAGDRVVTDPLCKPFSMGRNLICVYSKKHMNDFPELIEMKRRSNTRSLKEMALLLRGGSQLIWIAPSGGRDRPNPSTGEWYPVYALA

SEQ ID NO: 161066 - protein, 447 aa, Zea Mays
MHAPPLVAFAGGACPASAASSLSPWLASLRPAIVAAPARLLWFRRGALRLEAKAAWRATGGGRGPRVPAKGAVLASYMGAEEVVGPLSLLDEEELILHIRKERDNGKLPADVAINLEELYYNYRNAVLQNGDPNAYEIMLSNMTALFDRVLLDVQNPFTFPPYHKAVREPFDYYMFGQNYIRPLVDFRNSYVGNISLFHDMEEKLHQGHNVVLMSNHQTEADPAIIALLLEKTNPWISENIVYVAGDRVVTDPLCKPFSMGRNLICVYSKKHMNDFPELIEMKRRSNTRSLKEMALLLRGGSQLIWIAPSGGRDRPNPSTGEWYPAHFDSSTVDNMRRLLEHAGVPGHIYPLSLLCYEVMPPPQQVEKEIGEQRVISFHGVGLSATEETKYGDITCHTKNADEGRELFTNTLYNSVVNQYNVLKSAIFRDRGAAVSNNAISLSQPWR

SEQ ID NO: 161067 - protein, 336 aa, Zea Mays
MHAPPLVAFAGGACPASAASSLSPWLASLRPAIVAAPARLLWFRRGALRLEAKAAWRATGGGRGPRVPAKGAVLASYMGAEEVVGPLSLLDEEELILHIRKERDNGKLPADVAINLEELYYNYRNAVLQNGDPNAYEIMLSNMTALFDRVLLDVQNPFTFPPYHKAVREPFDYYMFGQNYIRPLVDFSRNSYVGNISLFHDMEEKLHQGHNVVLMSNHQTEADPAIIALLLEKTNPWISENIVYVAGDRVVTDPLCKPFSMGRNLICVYSKKHMNDFPELIEMKRRSNTRSLKEMALLLRGGSQLIWIAPSGGRDRPNPSTGEWYPANETRWYRQL

SEQ ID NO: 161068 - protein, 251 aa, Zea Mays
MHAPPLVAFAGGACPASAASSLSPWLASLRPAIVAAPARLLWFRRGALRLEAKAAWRATGGGRGPRVPAKGAVLASYMGAEEVVGPLSLLDEEELILHIRKERDNGKLPADVAINLEELYYNYRNAVLQNGDPNAYEIMLSNMTALFDRVLLDVQNPFTFPPYHKAVREPFDYYMFGQNYIRPLVDFRNSYVGNISLFHDMEEKLHQGHNVVLMSNHQTEADPAIIALLLEKTNPWISENIGCYRSTLQAI

SEQ ID NO: 161069 - protein, 254 aa, Zea Mays
MHAPPLVAFAGGACPASAASSLSPWLASLRPAIVAAPARLLWFRRGALRLEAKAAWRATGGGRGPRVPAKGAVLASYMGAEEVVGPLSLLDEEELILHIRKERDNGKLPADVAINLEELYYNYRNAVLQNGDPNAYEIMLSNMTALFDRVLLDVQNPFTFPPYHKAVREPFDYYMFGQNYIRPLVDFRNSYVGNISLFHDMEEKLHQGHNVVLMSNHQTEADPAIIALLLEKTNPWISENIVRPFFDYTLLSYQ

SEQ ID NO: 161070 - protein, 254 aa, Zea Mays
MHAPPLVAFAGGACPASAASSLSPWLASLRPAIVAAPARLLWFRRGALRLEAKAAWRATGGGRGPRVPAKGAVLASYMGAEEVVGPLSLLDEEELILHIRKERDNGKLPADVAINLEELYYNYRNAVLQNGDPNAYEIMLSNMTALFDRVLLDVQNPFTFPPYHKAVREPFDYYMFGQNYIRPLVDFRNSYVGNISLFHDMEEKLHQGHNVVLMSNHQTEADPAIIALLLEKTNPWISENILKFPPDVGLCCWR

SEQ ID NO: 161071 - protein, 337 aa, Zea Mays
MHAPPLVAFAGGACPASAASSLSPWLASLRPAIVAAPARLLWFRRGALRLEAKAAWRATGGGRGPRVPAKGAVLASYMGAEEVVGPLSLLDEEELILHIRKERDNGKLPADVAINLEELYYNYRNAVLQNGDPNAYEIMLSNMTALFDRVLLDVQNPFTFPPYHKAVREPFDYYMFGQNYIRPLVDFRNSYVGNISLFHDMEEKLHQGHNVVLMSNHQTEADPAIIALLLEKTNPWISENIVYVAGDRVVTDPLCKPFSMGRNLICVYSKKHMNDFPELIEMKRRSNTRSLKEMALLLRGGSQLIWIAPSGGRDRPNPSTGEWYPGRRILIHPQWTI

SEQ ID NO: 161072 - protein, 299 aa, Zea Mays
MHAPPLVAFAGGACPASAASSLSPWLASLRPAIVAAPARLLWFRRGALRLEAKAAWRATGGGRGPRVPAKGAVLASYMGAEEVVGPLSLLDEEELILHIRKERDNGKLPADVAINLEELYYNYRNAVLQNGDPNAYEIMLSNMTALFDRVLLDVQNPFTFPPYHKAVREPFDYYMFGQNYIRPLVDFRNSYVGNISLFHDMEEKLHQGHNVVLMSNHQTEADPAIIALLLEKTNPWISENIVYVAGDRVVTDPLCKPFSMGRNLICVYSKKHMNDFPELIEMKRRSNTRSLKEMALLLR

SEQ ID NO: 161073 - protein, 267 aa, Zea Mays
MQIAAINLEKGNKKECKNLLEDGKTTLDSMTDVDPTVHASFYWISSQYHKACQEFAEFYKNALLYLAYTTVESLSESFKLDLAFDLSLAALLGDNIYNFGELLAHPIINSLIGTKVEWVYHMLQAFNSGNLALYQELCRVHNAALTAQPALVQNERKLLEKINILCLMEIIFSRPSEDRTIPLSVIAERTKLSISDVECLLMKSLSVHLIEGIIDEVDSTVHVSWVQPRVLGIPQVKALRDRLDAWVGKVHTTLLSVEAETPDLVAV

SEQ ID NO: 161074 - protein, 345 aa, Zea Mays
MAATAMIGITNLRCRHDPLSSLPRATSSAARSCTLLPPRCRRHSSCCSPSSSVSPCRARVRPTAALKRIPAADTGFMGPANNEATTLKRSSSADLRRRLIVPSSTAGTGHAASASTGVLPAIIGVAHLLVSLGILLAMDKFLKQAFVAASIKFPSALFGMFCVFSVLVVFDTFVPPLAKAFIGFFEPATLFIQRWLSLFYVPTLVVLPLAVGDIPAASGIKILAITFGGWFATLTVAGYTVLAMRKLVKTELLAPSEPTKKPSPFSTSEIWAWSAIFVASFGVACFNPTAFGTTARTCLPFLLAANVLGYMVTTWRQESAASDHLLRTLCRFRGASLWVHLRVWT

SEQ ID NO: 161075 - protein, 287 aa, Zea Mays
MARVSNAKKRQGAKPASALSSTDTSTAAKRKAEDDRPVRVYADGIFDLFHFGHARALEQAKMLFPNTYLLVGCCNDELTYRYKGKTVMTQEERYESLRHCKWVDEVIPDAPWVLTQEFIDKHQIDYVAHDALPYADTSGTANDVYEFIGKFKETKRTDGVSTSDLIMRILKDYNQYVMRNLARGYSRKDLGVSYVKEKQLQVNMKINKLRETVKAHQEKLQTVAKTAGLNHEEWLANADRWVAGFLEKFEQHCHNMETAIKDRIQERLGKQLSKGIIAGLVQEPVTA

SEQ ID NO: 161076 - protein, 238 aa, Zea Mays
MCRAVSPAHTLHSHLPQGYGMTESAAVGTRGFNTSKHKKYGSVGLLAPNMHARIVHVETGCSLPPGSCGELWLHGPAIMKGYLNHVDPCAINGGWLRTGDIAYFDFDGYLYIVGRLKEVIKYKGFQIAPADLEAVLIEHPGIVDVAVTSTEDEEAGEVPVAFVVRKSGSGLSCTQVMEYVAKQVSPYKKVRKVVFVESIPKSPAGKVLRRLLRESLAASAVAGPTSYSESNSMRHSRL

SEQ ID NO: 161077 - protein, 718 aa, Zea Mays
MAFSYFTLSTSRLATWPMLCIYTRCFGLKIFLPITTLALLVLIPVNVSGGTLLDLRKEVVFSDIDKLSISNVSPGSNRFFIHLLMAYVFTFWVCFMLYKEYSNVAFMRLHFLASQKRCADHFTVIVRNIPRVSSHSTSETVDEFFRRNHPDHYLGHQQKERLQNWLDYYELKFERHPERRPTRRTGCLGFCGREVDQIDYYRARISELERRMTSERQKILNDPKAVMPVSFVTFDSRWGAAVCAQTQQSKNPTQWLTDWAPEPRDVYWQNLAIPFFSLSIRRFLMSVAVFALVFFYMIPIAFVQSLANLEGLEKVAPFLKPVIEAHVVKSFLQGFLPGLALKIFLYILPTVLLIMSKVEGYVSLSSLERRTASKYYYFMLVNVFLGSIIAGTAFEQLYSFLHQPPTQIPRTIGVAIPMKATFFMTYVMVDGWAGIANEILRVKALVIYHLKNMFIVKTERDRDRAMDPGSIGLGENLPSLQLYFLLGLVYAVVTPLLLPFIIVFFAFAFLVYRHQIINVYNQEYESAAAFWPQVHSRIIASLLISHVTLFGLMSTKEAAYSTPLLIFLPLLTIWFHKYCKSRFEPAFRKYPLEEAMAKDTMEHASEPNLNLESFLANAYLHPIFRLFEEAGKEEETVEVRIDKAEKQQHRHEEDEAHARSSSQYREEETHFRSTHETHYHHEESHVSRSTQYHEGIHVRSDTDSPSPPHFVYHYDIQQ

SEQ ID NO: 161078 - protein, 647 aa, Zea Mays
MAYVFTFWVCFMLYKEYSNVAFMRLHFLASQKRCADHFTVIVRNIPRVSSHSTSETVDEFFRRNHPDHYLGHQPVYNANRYAKLVKQKERLQNWLDYYELKFERHPERRPTRRTGCLGFCGREVDQIDYYRARISELERRMTSERQKILNDPKAVMPVSFVTFDSRWGAAVCAQTQQSKNPTQWLTDWAPEPRDVYWQNLAIPFFSLSIRRFLMSVAVFALVFFYMIPIAFVQSLANLEGLEKVAPFLKPVIEAHVVKSFLQGFLPGLALKIFLYILPTVLLIMSKVEGYVSLSSLERRTASKYYYFMLVNVFLGSIIAGTAFEQLYSFLHQPPTQIPRTIGVAIPMKATFFMTYVMVDGWAGIANEILRVKALVIYHLKNMFIVKTERDRDRAMDPGSIGLGENLPSLQLYFLLGLVYAVVTPLLLPFIIVFFAFAFLVYRHQIINVYNQEYESAAAFWPQVHSRIIASLLISHVTLFGLMSTKEAAYSTPLLIFLPLLTIWFHKYCKSRFEPAFRKYPLEEAMAKDTMEHASEPNLNLESFLANAYLHPIFRLFEEAGKEEETVEVRIDKAEKQQHRHEEDEAHARSSSQYREEETHFRSTHETHYHHEESHVSRSTQYHEGIHVRSDTDSPSPPHFVYHYDIQQ

SEQ ID NO: 161079 - protein, 715 aa, Zea Mays
MLTHLFRLLGSLKIFLPITTLALLVLIPVNVSGGTLLDLRKEVVFSDIDKLSISNVSPGSNRFFIHLLMAYVFTFWVCFMLYKEYSNVAFMRLHFLASQKRCADHFTVIVRNIPRVSSHSTSETVDEFFRRNHPDHYLGHQPVYNANRYAKLVKQKERLQNWLDYYELKFERHPERRPTRRTGCLGFCGREVDQIDYYRARISELERRMTSERQKILNDPKAVMPVSFVTFDSRWGAAVCAQTQQSKNPTQWLTDWAPEPRDVYWQNLAIPFFSLSIRRFLMSVAVFALVFFYMIPIAFVQSLANLEGLEKVAPFLKPVIEAHVVKSFLQGFLPGLALKIFLYILPTVLLIMSKVEGYVSLSSLERRTASKYYYFMLVNVFLGSIIAGTAFEQLYSFLHQPPTQIPRTIGVAIPMKATFFMTYVMVDGWAGIANEILRVKALVIYHLKNMFIVKTERDRDRAMDPGSIGLGENLPSLQLYFLLGLVYAVVTPLLLPFIIVFFAFAFLVYRHQIINVYNQEYESAAAFWPQVHSRIIASLLISHVTLFGLMSTKEAAYSTPLLIFLPLLTIWFHKYCKSRFEPAFRKYPLEEAMAKDTMEHASEPNLNLESFLANAYLHPIFRLFEEAGKEEETVEVRIDKAEKQQHRHEEDEAHARSSSQYREEETHFRSTHETHYHHEESHVSRSTQYHEGIHVRSDTDSPSPPHFVYHYDIQQ

SEQ ID NO: 161080 - protein, 92 aa, Zea Mays
MAPAFPRRRPTSPDSPPHTAAAPMAHPPCSPPWPPGGGFGLPESPPNVSPPNQSEKSTGRSFCTSRTGEGRGARQHYVPADPCLDDENSYSM

SEQ ID NO: 161081 - protein, 168 aa, Zea Mays
MAPAFPRRRPTSPDSPPHTAAAPMAHPPCSPPWPPGGGFGLPESPPNVSPPNQSEKSTGRSFCTSRTGEGRGARQHYVPAGRVSPGPMASAMSSRSRPAGHFGVFPVNAMAGTGGSDGGVQLADKLKIIKTDNFDPDAYVQSKCRAMDEKRQDYPTCCLVVHWRGCST

SEQ ID NO: 161082 - protein, 120 aa, Zea Mays
MVVFVMQQAVWNVDTNNEAVQGFRRSLHDETRLSYMLSCGSLERLLNMRNLKLWMVRMTMMKTMMTRMMMIMIQRRTRELLEGKGNRENDLQSASSSEQRRCALCKALELPLLQSLNLQR

SEQ ID NO: 161083 - protein, 197 aa, Zea Mays
MAPAFPRRRPTSPDSPPHTAAAPMAHPPCSPPWPPGGGFGLPESPPNVSPPNQSEKSTGRSFCTSRTGEGRGARQHYVPAGRVSPGPMASAMSSRSRPAGHFGVFPVNAMAGTGGSDGGVQLADKLKIIKTDNFDPDAYVQSKCRAMDEKKMVVFVMQQAVWNVDTNNEAVQGFRRSLHDGMLHETFMYMHESYTRL

SEQ ID NO: 161084 - protein, 70 aa, Zea Mays
MPHHKKMLRRSSIQSYAFMESTPWSIDKAQQISHKEKVSVFLNPQSLNSELHNSGAHHYENREAHKPIAV

SEQ ID NO: 161085 - protein, 322 aa, Zea Mays
MQQVIGAWICRERLTPVVVDADEPSVVDDAEGVWAVGGDDVHDPDGVLDEAACESSVHGVHVHDVPDLVAPQRRQQRLVVLDPELPPGVVLLEGGGAAARDDADALRGDAEPLGPLGRGVEPQLPVLGAGSRDAGAHGHVPGGVGVDAVVALGGRGDRGELVVAGVGGLLPHGDVPLHAVELEAHAGQHLLEPVQGMRQREQCAMSKAADGNGRRCVEMMPRMAGMPRSSANCTWASWLSLGASDTVRMPRPSRSPPQLATPQPVSSAVRTVPSRMPGTRPCIRSTYAPTPLGNMVPPPGNRKRSPSLTSQCWLDFWLLIQS

SEQ ID NO: 161086 - protein, 317 aa, Zea Mays
MEMAIVMARDGGMDWIIHLDTDELLYPGGAAEYSVRRLLAEVPRDVDMVIFPNYESSVEHDNIKDPFSEVSMFKRNYDHLPKDTYFGMYKEATRGNPNYFLTYGNGKSAARIQDHLRPNGAHRWHNYAKSPNEIKLEEAAVLHYTYTKFSDLTSRRDRCGCKPTKEDVKRCFMLDFDRAAFIIASTASEEEMLRWYNERVVWTDKQLNLKLLRKGVLTRIYTPMTIVQSLRESGVFTSAITAGQPAVNAKLSPKETNAQSQNVTAPGNMTRVVRSTDSKASGRKILQAVDLAFSDTNVTAVPPLSPPSLDEHRHHSE

SEQ ID NO: 161087 - protein, 289 aa, Zea Mays
MDIATSSDDEEPPKLNLVGYLVGNAATDDRYDTGGKVPFMHGMGLISDELYEAAKQGCGGDFYVAPDPTNARCASAMMAINMVTFAVNPVHILEPFCGAAVRAGGGSIFQGYGGGARRSMLVRDDVRHPGFFAKQRLGLPVECRDNGYRLSYIWADDPEVREALGILEGSIGSWSRCTMLSHYRHDVTTVIPYHVNLTKAGYRALVYNGDHDLDMTFVGTQEWIRSIGYPIVSDWRPWFANRQVAGFTRTYAHNLTFATVKGGGHTAPEYRPKECQAMLDRWTSEAGQL

SEQ ID NO: 161088 - protein, 52 aa, Zea Mays
MYILEFSHFLILLIWYSDGCTRIHYCKRSEIIYEGKLFVLEDTEASGCNLYL

SEQ ID NO: 161089 - protein, 385 aa, Zea Mays
MSPLALLQALIFILCCSPLASASSSELTLAGAACGDDQLVIFDASDGLLNLSVNGVLMQDRVFACQKLGFYFGSGCLRCSNLSDAWRSAVKQYCGEGSEKSHATLHQDVPRKLLRWSTENSSRNACERSGLNENNQDIGDSSEKQEHLLAVPGVILLCCGLMLPCFHAERKEVSRHDNATIQRNALESVSSYEGSMSSEKVPPTPHRIPPSPSRFAPSPQIARVGSVNLSIQQILRATQNFSPSFKLGEGGFGMVYRAVLPDGNVVAVKRAKKDQFAGPRDEFSNEVDLLAKIDHRNLVRLLGFTDKGNERIIITEYVPNGTLREHLDGQHGRVLDFNQRLEIAIDVAHALTYLHLYADFQKIQRRQHERDTGPIAGRSRGRRGA

SEQ ID NO: 161090 - protein, 267 aa, Zea Mays
MSPLALLQALIFILCCSPLASASSSELTLAGAACGDDQLVIFDASDGLLNLSVNGVLMQDRVFACQKLGFYFGSGCLRCSNLSDAWRSAVKQYCGEGSEKSHATLHQDVPRKLLRWSTENSSRNACERSGLNENNQDIGDSSEKQEHLLAVPGVILLCCGLMLPCFHAERKEVSRHDNATIQRNARSMSSEKVPPTPHRIPPSPSRFAPSPQIARVGSVNLSIQQILRATQNFSPSFKLGEGGFGMVYRAVLPDGNVVAVKRAKKVI

SEQ ID NO: 161091 - protein, 185 aa, Zea Mays
MEQEEVGLALGLSLGSGHHHQELKPQHPSHPCAALLEPSLSLSGPATKDDGPTAPVRRFAAVKRELQTMEGNDDEATGRVLVYSVASSAVVTADDDEGCNSSRKKLRLSKEQSALLEDHFKEHSTLNPKQKAALARQLNLSPRQVEVWFQNRRARLVITHIFTSKSISPFSFFSFHHIFFVPNYS

SEQ ID NO: 161092 - protein, 287 aa, Zea Mays
MRVHGEVSDDEAAVAVVGETVPSSPPPASVVQPLVVGYALTKKKVKSFLQPKLLALARKKGIHFVSIDETCPLSEQGPFDIILHKLTSKEWQQVLEDYREEHPEVTVLDPPNAIQHLHNRQSMLQEVADLNLSNGYGEVCAPRQLVIMKDPSSIPDAVAKAGLTLPLVAKPLVADGTSKSHELSLAYVEASLPLLDPPLVLQEFVNHGGILFKVYIVGETIQVVRRFSLPDVNTYDLGNNDGIFRFPRVSCATNNAEDADVDPCIAELPPKPLLEKLGRELRRRLAV

SEQ ID NO: 161093 - protein, 318 aa, Zea Mays
MRVHGEVSDDEAAVAVVGETVPSSPPPASVVQPLVVGYALTKKKVKSFLQPKLLALARKKGIHFVSIDETCPLSEQGPFDIILHKLTSKEWQQVLEDYREEHPEVTVLDPPNAIQHLHNRQSMLQEVADLNLSNGYGEVCAPRQLVIMKDPSSIPDAVAKAGLTLPLVAKPLVADGTSKSHELSLAYVEASLPLLDPPLVLQEFVNHGGILFKVYIVGETIQVVRRFSLPDVNTYDLGNNDELPPKPLLEKLGRELRRRLGLRLFNIDMIREHGRKDRYYVIDINYFPGYGKMPGYEHIFTDFLLSLVQSKYKRLSGS

SEQ ID NO: 161094 - protein, 91 aa, Zea Mays
MMFTINFDHHNFDLSSSASISRFSSASIIFLVHCTMGSFITSLRILFSLVHCLIIHRITAQAHNLKGKIIIEAELDIVFRYLIVYSQIVLQ

SEQ ID NO: 161095 - protein, 347 aa, Zea Mays
MQMAAGSCRQEGEGSSSKGARLPLPRLRRGVQRDDARHRRAPGACRLRRLRPGLRGPRPLRRAAGLRAGFRRAGAGLRRVLHLGGGGGGAVAVQGRPPTSPVPARGVHGRRRGSPPPPPAPRVLERRRAGGAHVQDRRRHAASPAGGQHPQGHDHHHPDVEDRAQQRRHRRGVQEPGEEGRDPQQPLLLQGQAATQDRLRAAQSQLGPRAQPPPPGVVAVPDRARRGRQGDGPVGERAAVPIGGEPGQDAQVLSGHVARPHLRRVARQHPSRFPRHHRLARPQVTRHGTGGAGVVGGGAEGQARRPAPPGAAPGRQQIASCLLACCFLLFTERTVSFGHAWIHIMSQ

SEQ ID NO: 161096 - protein, 92 aa, Zea Mays
MAVTAEAAAEMVLERRAYARVGLLGNPSDVYGGRALSFAIADFSATVHLRPSPELLIQPHPHHDLVAFPSLPQLPTDQASCRRGYSHRWAKA

SEQ ID NO: 161097 - protein, 92 aa, Zea Mays
MAVTAEAAAEMVLERRAYARVGLLGNPSDVYGGRALSFAIADFSATVHLRPSPELLIQPHPHHDLVAFPSLPQLVGRSRTYITSKSEARSIR

SEQ ID NO: 161098 - protein, 992 aa, Zea Mays
MPLSDEERRVGTPVVVTCNDQRREVSVAQNIANKQIDRTFAFDKVLGPKSQQQDVFNHAVVPLVSEVLDGYNCTIFAYGQTGTGKTYTMEGGGGKALNADLPTDAGVIPRAVKCIFDILEAQSAEYSMKVSFLELYNEELTDLLAAEESKFSDDKSKKPLALMEDGKGGVFVRGLEEELVSSAAEIYRILERGSAKRKTAETLLNKQSSRSHSIFSITIHIKECTPEGEEMIKCGKLNLVDLAGSENISRSGARDGRAREAGEINKSLLTLGRVINTLVEHSGHIPYRDSKLTRLLRDSLGGKTKTCIIATISPSVHCLEETLSTLDYAHRAKHIKNKPEVNQKMMKSALIKDLYFQMDRLKQELYAAREKNGVYIPREQYIADESEKKAMSEKLDRLELVLESKDKQLEELHGLYESQKVLSADLSDQLQTLQKRMKETECTLADLETRYMKANDTIKEKQYLIENLLKSEKVLVGEAQTLRSELENTAGDLHGLFSKLERKEKIEDKNGSIIQYFHSQLIQEMNVLHRTVSTSVSQQERQLKALEEEMQSFVTSKGKVAGGLQEHVRKLKESFNSRIAELHGFANELKHKSMLSFENLNSQVTTHTSSLEDCMKDLLVDADELLIALQNGLSQHEVNFATFIEQQHEGLSRNLEGTKFVSATTMNFFRTIDSHALGLLKILEESKMEHQKQLFQLQKKFEAVVADEEKYLMEKVAGLFAESNARKKNMVQDDICSLNRTVSESSNNLQTETTKLHDFTSSMKEQWEGYMKKTEEAFQQNVSSIEQKRGFLAGNFQQCKEKVESCSEQWITAQNLVLALGRRNAEAIGLVISDGNEVSNQLGARISSAVAAGFEDNDISSKSLLSCIDDSLKLDHGIRENVKSIVMTSRAQLHDLEHGHYEMTKAITGNADRSLGEDYKVDEATCSTPRRREINIPDSQSIIELVTPLEDIVKSFWDSRTPTKPALNAKGKQQLVGSTTPETQRAPLSAIN

SEQ ID NO: 161099 - protein, 897 aa, Zea Mays
MQNADLPTDAGVIPRAVKCIFDILEAQSAEYSMKVSFLELYNEELTDLLAAEESKFSDDKSKKPLALMEDGKGGVFVRGLEEELVSSAAEIYRILERGSAKRKTAETLLNKQSSRSHSIFSITIHIKECTPEGEEMIKCGKLNLVDLAGSENISRSGARDGRAREAGEINKSLLTLGRVINTLVEHSGHIPYRDSKLTRLLRDSLGGKTKTCIIATISPSVHCLEETLSTLDYAHRAKHIKNKPEVNQKMMKSALIKDLYFQMDRLKQELYAAREKNGVYIPREQYIADESEKKAMSEKLDRLELVLESKDKQLEELHGLYESQKVLSADLSDQLQTLQKRMKETECTLADLETRYMKANDTIKEKQYLIENLLKSEKVLVGEAQTLRSELENTAGDLHGLFSKLERKEKIEDKNGSIIQYFHSQLIQEMNVLHRTVSTSVSQQERQLKALEEEMQSFVTSKGKVAGGLQEHVRKLKESFNSRIAELHGFANELKHKSMLSFENLNSQVTTHTSSLEDCMKDLLVDADELLIALQNGLSQHEVNFATFIEQQHEGLSRNLEGTKFVSATTMNFFRTIDSHALGLLKILEESKMEHQKQLFQLQKKFEAVVADEEKYLMEKVAGLFAESNARKKNMVQDDICSLNRTVSESSNNLQTETTKLHDFTSSMKEQWEGYMKKTEEAFQQNVSSIEQKRGFLAGNFQQCKEKVESCSEQWITAQNLVLALGRRNAEAIGLVISDGNEVSNQLGARISSAVAAGFEDNDISSKSLLSCIDDSLKLDHGIRENVKSIVMTSRAQLHDLEHGHYEMTKAITGNADRSLGEDYKVDEATCSTPRRREINIPDSQSIIELVTPLEDIVKSFWDSRTPTKPALNAKGKQQLVGSTTPETQRAPLSAIN

SEQ ID NO: 161100 - protein, 242 aa, Zea Mays
MNQDAPTSRRDYFEDRRDCARASNAEDLMNATKNGVLNSHARRDDYEEGRDSARAPNSENYEEGRDCTRASNAENIVNATKKADRTEEKRGRDKNKCKKLAKLKPGEKIKVTFYNNRALCTTFARHIGRIVRDPSITSVRVKKWTDITETSLKHIFAAVKDKFENMDENIEIDVYKNDIMEHARDLWNNWRGDLSRHYVKPTKNMQQAIKNCPNDFAQADWEWLVKEHFCSKEFIASYPITA

SEQ ID NO: 161101 - protein, 199 aa, Zea Mays
MSSRQRICSKPLRIVRMILHKLIGSGWSKSIFAAKSKRNSRNRSNLTILHHSGSKPFRKVIYDNGGKDNNPPALDALFFMTHTKGDNFIDSESSSKHAQIQEQMFSDPSLSNAQLMDKCFPSKRQDHIIGYGGRVKARHLRSPYVSKAELLEKLKQSEDEKRAMLEENRELREENRATNSRVSQMEKEWAELKKQISSS

SEQ ID NO: 161102 - protein, 246 aa, Zea Mays
MLQKKDKFENMDENIEIDVYKNDIMEHARDLWNNWRGDLSRHYVKPTKNMQQAIKNCPNDFAQADWEWLVKEHFCSKEFIAKSKRNSRNRSNLTILHHSGSKPFRKVIYDNGGKDNNPPALDALFFMTHTKGDNFIDSESSSKHAQIQEQMFSDPSLSNAQLMDKCFPSKRQDHIIGYGGRVKARHLRSPYVSKAELLEKLKQSEDEKRAMLEENRELREENRATNSRVSQMEKEWAELKKQISSS

SEQ ID NO: 161103 - protein, 236 aa, Zea Mays
MDENIEIDVYKNDIMEHARDLWNNWRGDLSRHYVKPTKNMQQAIKNCPNDFAQADWEWLVKEHFCSKEFIAKSKRNSRNRSNLTILHHSGSKPFRKVIYDNGGKDNNPPALDALFFMTHTKGDNFIDSESSSKHAQIQEQMFSDPSLSNAQLMDKCFPSKRQDHIIGYGGRVKARHLRSPYVSKAELLEKLKQSEDEKRAMLEENRELREENRATNSRVSQMEKEWAELKKQISSS

SEQ ID NO: 161104 - protein, 581 aa, Zea Mays
MKGDSIITSEAEESTLPLLLPLHAAPSQDYEQFTCNGSVDIRGYPASKRHTGNWRACYSILGGEFCGAMAYYGVGTNLVSYLTKAQKKSNVAAASNIASWQGTCYLTALLGAFLADSYLGRHRTIVVSLMVVTMGVLLLTLSATIPASIHVMATATSNSQEALSSLGLFLTALGLGGIWPCVPTFGADQFDDTDAAEKEQKQLYYNWYYFAVNGGFLFASTVLVWVQDDHGWGWGFGIPAAVSAVGVAGFLACMKLYRYQKPGGSALTRICQVVVAAARKVNVDVPTDSSLLHEMPPGEESAIVGSRKLMHTDGLKFFDRAATITTSEDKSTDATNPWKLCTVTQVEELKILARMLPVFLTGIVFNTAEAFFPLFIEQGQVMDNHIIEQLWIPSATLTTFNCLCIIILAPAYDKVVMPVVSRITGMKRGLSELQRIGVGMVFAMFSMVSAALVETVRLDTAKNRLLMSILWQAPQYMFVGVAKVFSIVGFIEFAYEQSPDAMRSLCQACSLLMVTLGSYLVSIMLKMIDSVTAGRGSHGWIPEDLNEGRLDLLFWLMAVLHLLNLLAFAYCAARYKCKLAT

SEQ ID NO: 161105 - protein, 614 aa, Zea Mays
MDAQDGDERPLIIHRLPLLQDESTSEFTSDGTVDLRNQPARKQRTGKWKACFFILGAEFAECVAFFAISKNLVTYLTGVLHESNVDAATTVSTWIGTSFFTPLVGAFLADTFWGRYWTILAFLSVYVTGMTVLTASALLPLLMGASYSRSAHRLFAYLGLYLAALGTGGIKPCVCALGADQFDASDPVERRAKGSFFNWYYFSINIGSLLSATVVVWVQDNVGWGVGFAIPTLLMLSGLVLFVAGRKVYRYQRVGGSPLTRASQVVVAAVRNYRLVLPEPDDSSALLHQAPPGTTEGNDSTMQHTSQFSAILRRERSDGKPMAALHGLPGRGAEDGAADVPRVGVDGALLRGHRADVVHLHRARRDHGQPRGAVHRAAGVPLHLRRHQRHGLHTHLRQSAGAAGPARHGQGAGPVAAAAAGRRPRAVRGRHGVRGAARGQAAVARPRSGGRAAADVHHVAGAGVRGARRRGGVRDHRHPRVLLRPVARRHEEPRHGPCAARRRGRQLLQLCRARRRRRRHHAQRGGRMDPRRPGQGPPRLFLLVHGCSRRGQPAALPALLRQVQRQQQQQHILFLSLHTICAKYMAKCQQREMSIELVNETQQDARILHLASPQ

SEQ ID NO: 161106 - protein, 433 aa, Zea Mays
MEDDSPDNSGLRRATAYLGLYLVSLGTGGIKPCTAALGADQFDGGDAAERVTKASFFNWYYFCTNIGSLLSGTVLVWVQENIGWGVGFTVQTVFMLFGLAVFVAGRKVYRYKKLGGSPLTRVAQVVVAAVRNCHLVLPDDTSALYHDKLLPTEPNFRIESARQFRFFDKAAIITGEKGAAAPTSPWRLCTVSQVEELKMLLRLLPVWASMVLFFAVSAQTVTTFIEQARVMDNRIGPFTIPPASIATFDVISVMVCVPVYDAVLVPLARRATGNDRGLSQLHRLSIGIALSVVVMVYAALLEGRRLALARANMPAMNIAWQAPMFAVHGAAAVFATVGVLEFFYDQSPDGMKSLGNALALLSMAAGSYFNSLALSAVGSITARGGERGWLPDDLNKGHMDYFFWMMAALGTLNLLHFLHYCNRRYRGNNNNTS

SEQ ID NO: 161107 - protein, 523 aa, Zea Mays
MILGTEFAECLAFYATAKNLVTYLTAELGETNIDAATNVSTWIGSCYLTPLIGAFLADTYWGRYKTMIVFLLLYIVGMLTLTASAWLPLAMEDDSPDNSGLRRATAYLGLYLVSLGTGGIKPCTAALGADQFDGGDAAERVTKASFFNWYYFCTNIGSLLSGTVLVWVQENIGWGVGFTVQTVFMLFGLAVFVAGRKVYRYKKLGGSPLTRVAQVVVAAVRNCHLVLPDDTSALYHDKLLPTEPNFRIESARQFRFFDKAAIITGEKGAAAPTSPWRLCTVSQVEELKMLLRLLPVWASMVLFFAVSAQTVTTFIEQARVMDNRIGPFTIPPASIATFDVISVMVCVPVYDAVLVPLARRATGNDRGLSQLHRLSIGIALSVVVMVYAALLEGRRLALARANMPAMNIAWQAPMFAVHGAAAVFATVGVLEFFYDQSPDGMKSLGNALALLSMAAGSYFNSLALSAVGSITARGGERGWLPDDLNKGHMDYFFWMMAALGTLNLLHFLHYCNRRYRGNNNNTS

SEQ ID NO: 161108 - protein, 58 aa, Zea Mays
MGSALEKDDYGSCTNARHDALTTATRSPSKPGLRVAYMHSLCVMWLCQQVNGSESMSG

SEQ ID NO: 161109 - protein, 158 aa, Zea Mays
MLPVVLVPVYPVRTGGRGLGQGHDILWSGRPPLLFAAACRGGCGPVPLHLHLHLPSQAPGGVRPAAGAVRRLLRPHVVRAMRHLPDVPGAQEQRRRPGHGMGSALEKDDYGSCTNARHDALTTATRSPSKPGLRVAYMHSLCVMWLCQQVNGSESMSG

SEQ ID NO: 161110 - protein, 497 aa, Zea Mays
MGSRERMLFDLNKLPAEVEEEAAAVVPNESAVVVSQEAAVVASQAAVVVSQPQKSLPVPMTYAPSLFQPGGGSQSQGILNDNNAFKHASIGSGFQPFVKNNKDSNNTKEPMKVEDNQNSSIQSTAMVNNRTTDSASPKAETCNQVSQAVEREEGECFDADSISENAGSSNKDEITGTASTHLKKESQESEPHLIKSGGVTKDDTAAECSDAEMVDASKDLVHGSSTGSENMQISECKGNQPGDDLDPCNRSKDVKGVEANYAFRFASNPAKRPKLNEHKEAMLGKKRARQTVFIGVEDAKQAGTMKTTTPRRQSSFPAPIVTRTVKEASRGIGEKAAEKQNQQAIRDQRQPEMMGSERSNSVDPSDQHTEPNGDTELGTQGWSKKMNTEEPASDGYQHPAQRQASLKQTMDFKQPKGRPFSSQRTILTGQNNADQKPANKRSIISKKKTFLNNVQYQDSSIERLIREVTNDKFWHNPELSFIVRMRRVLRLWEGMHM

SEQ ID NO: 161111 - protein, 361 aa, Zea Mays
MVDASKDLVHGSSTGSENMQISECKGNQPGDDLDPCNRSKDVKGVEANYAFRFASNPAKRPKLNEHKEAMLGKKRARQTVFIGVEDAKQAGTMKTTTPRRQSSFPAPIVTRTVKEASRGIGEKAAEKQNQQAIRDQRQPEMMGSERSNSVDPSDQHTEPNGDTELGTQGWSKKMNTEEPASDGYQHPAQRQASLKQTMDFKQPKGRPFSSQRTILTGQNNADQKPANKRSIISKKKTFLNNVQYQDSSIERLIREVTNDKFWHNPEEAELECVPGSFESAEEYIRVFEPLLFEECRAQLYSSYEESLEAVGRDAHVAVQVKTVDKRERGWYDVVVLPIHERKWNFKEGDVAILSFPHPGSG

SEQ ID NO: 161112 - protein, 80 aa, Zea Mays
MAKRFLAVPASSVSSESTFSTGGRILDDYRSSLKPATVQALVCASSWIRGSRSSPILLTGEGDDGDIESVEFPKCVVASN

SEQ ID NO: 161113 - protein, 84 aa, Zea Mays
MVAILVTSKCLLDISLSEYVTLTLYIFCREKVMMVTSSPWNFQSVWWQVIRHMVTYSHGGDGGEGEIGPERGHERHMVIIFCWL

SEQ ID NO: 161114 - protein, 215 aa, Zea Mays
MIIVHEYAFRMVEHKWFNILMKWMNNNYESIGRKTIKNECMKIYESEKELIKKSLREAESISLTTDLWTSNQNIQYMCLVAHYVDVDWILQCRVLNFIELDPPHTGIVIAQAVFECLVEWKIEDKILTITLDNASSNDSAITNLKSKFLARKNSSFDPMYFVEVCNQYSVKVGQGLCLDVKTRWGSTYKMLDSCLDYKEAFGYYSEIDNNYEWKP

SEQ ID NO: 161115 - protein, 138 aa, Zea Mays
MEAQEPDAHEGHSRPPIPRISGSMIKRTSTRKKLMPAAKKISAAASTAPSSSTSCCGAVSVSIEKQLDVVMEEGQGEELEVMLSESDDSEFDLDDEFPPSTDGDELSKTEKTKRGGKRSRAGIQLSPSKCKANRVKRA

SEQ ID NO: 161116 - protein, 149 aa, Zea Mays
MADNVLIDRSASGFEFRRWAAGDEFQSLATMSVLQPDARAAAKGMKQAAQRRTGPRECKRKKPPRTPRLGEEPPSAQRRKPLERATPLPPAPAVHEALDDLERQVTMGFVEDLKHALALAPPPSSLPLPTFSLVRAAAAAAKAVPSCTV

SEQ ID NO: 161117 - protein, 491 aa, Zea Mays
MLMFDYNVEERVNDFVVAAIEQANFTRTNHIMWTMGDDFSYQYAESWFRNMDKLIYHVNKDGRVHALYSTPSIYTDAKHFSNISWPVKYDDDFPYADSKNSYWTGYYTSRPTFKRYVRVLSGYYLAARQIEFLVGRSFLGMFTTSLEDPMAIAQHHDAVSGTAKQHTTDDYSKRLALGASKVEKGVNVALTCLLSSNGTCAPSVQKFSQCPLLNISYCPSTEETVSGAKNLVVVVYNPLGRERSDFIQIPVNDENLVVKSSDGTIIESQLVEVDNVTRNLRKVYVKAYLGITTNKPPMYWLLFQASVPPMGWNSYYISRSTGSNSIRYVATMVSPRNDTVEVGPGSLKLSFSSASGQLERIFNSVSGVDLPIQQSFFWYSSNQGDIVDAQGSGAYVFRPNGTTPTIVSSSVLLSVIHGPLVHEVHQQFGPWINQITRLYKNKEHAEVEYTIGPIPIDDDVGKEVITRLTTNMVTNSTFYTDSNGRDFLKRV

SEQ ID NO: 161118 - protein, 683 aa, Zea Mays
MAPALLLLRLLALIATAREACAARAFAAASNATAHGATVVAGKLNVHLVPHSHDDVGWLKTVDQYYVGSNNSIQGACVMNTLDSVVDALARDPARKFVVVEQAFFQRWWAEKIPNIQAVVRKLVDSGQLEFINGGWCMHDEAAVHYIDMIDQTTLGHRMIKKQFNKTPRAGWQIDPFGHSAVQAYLLGAEDDMLMFDYNVEERVNDFVVAAIEQANFTRTNHIMWTMGDDFSYQYAESWFRNMDKLIYHVNKDGRVHALYSTPSIYTDAKHFSNISWPVKYDDDFPYADSKNSYWTGYYTSRPTFKRYVRVLSGYYLAARQIEFLVGRSFLGMFTTSLEDPMAIAQHHDAVSGTAKQHTTDDYSKRLALGASKVEKGVNVALTCLLSSNGTCAPSVQKFSQCPLLNISYCPSTEETVSGAKNLVVVVYNPLGRERSDFIQIPVNDENLVVKSSDGTIIESQLVEVDNVTRNLRKVYVKAYLGITTNKPPMYWLLFQASVPPMGWNSYYISRSTGSNSIRYVATMVSPRNDTVEVGPGSLKLSFSSASGQLERIFNSVSGVDLPIQQSFFWYSSNQGDIVDAQGSGAYVFRPNGTTPTIVSSSVLLSVIHGPLVHEVHQQFGPWINQITRLYKNKEHAEVEYTIGPIPIDDDVGKEVITRLTTNMVTNSTFYTDSNGRDFLKRV

SEQ ID NO: 161119 - protein, 659 aa, Zea Mays
MAPALLLLRLLALIATAREACAARAFAAASNATAHGATVVAGKLNVHLVPHSHDDVGWLKTVDQYYVGSNNSIQGACVMNTLDSVVDALARDPARKFVVVEQAFFQRWWAEKIPNIQAVVRKLVDSGQLEFINGGWCMHDEAAVHYIDMIDQTTLGHRMIKKQFNKTPRAGWQIDPFGHSAVQAYLLGAEANFTRTNHIMWTMGDDFSYQYAESWFRNMDKLIYHVNKDGRVHALYSTPSIYTDAKHFSNISWPVKYDDDFPYADSKNSYWTGYYTSRPTFKRYVRVLSGYYLAARQIEFLVGRSFLGMFTTSLEDPMAIAQHHDAVSGTAKQHTTDDYSKRLALGASKVEKGVNVALTCLLSSNGTCAPSVQKFSQCPLLNISYCPSTEETVSGAKNLVVVVYNPLGRERSDFIQIPVNDENLVVKSSDGTIIESQLVEVDNVTRNLRKVYVKAYLGITTNKPPMYWLLFQASVPPMGWNSYYISRSTGSNSIRYVATMVSPRNDTVEVGPGSLKLSFSSASGQLERIFNSVSGVDLPIQQSFFWYSSNQGDIVDAQGSGAYVFRPNGTTPTIVSSSVLLSVIHGPLVHEVHQQFGPWINQITRLYKNKEHAEVEYTIGPIPIDDDVGKEVITRLTTNMVTNSTFYTDSNGRDFLKRV

SEQ ID NO: 161120 - protein, 460 aa, Zea Mays
MWTMGDDFSYQYAESWFRNMDKLIYHVNKDGRVHALYSTPSIYTDAKHFSNISWPVKYDDDFPYADSKNSYWTGYYTSRPTFKRYVRVLSGYYLAARQIEFLVGRSFLGMFTTSLEDPMAIAQHHDAVSGTAKQHTTDDYSKRLALGASKVEKGVNVALTCLLSSNGTCAPSVQKFSQCPLLNISYCPSTEETVSGAKNLVVVVYNPLGRERSDFIQIPVNDENLVVKSSDGTIIESQLVEVDNVTRNLRKVYVKAYLGITTNKPPMYWLLFQASVPPMGWNSYYISRSTGSNSIRYVATMVSPRNDTVEVGPGSLKLSFSSASGQLERIFNSVSGVDLPIQQSFFWYSSNQGDIVDAQGSGAYVFRPNGTTPTIVSSSVLLSVIHGPLVHEVHQQFGPWINQITRLYKNKEHAEVEYTIGPIPIDDDVGKEVITRLTTNMVTNSTFYTDSNGRDFLKRV

SEQ ID NO: 161121 - protein, 72 aa, Zea Mays
MDSSPLFVPRPHPPFSRTTSLMSRTEKFARSPPQKGGFAALPLSNDPHCCYAIQPHIIHQLVLLQLFSHGKK

SEQ ID NO: 161122 - protein, 146 aa, Zea Mays
MYPVAFGLIQSEPEYNWVWFMKQLRRAIGDMPQLAICTDACKGLEKAVVQVFPYANQRECFRYLTQNFMKRYSGVIYSRMYPAVETYKKDKFQYHMTQMFSGSNDVFKYLDEHHSLKWMRCDFNQEIKCDYITNNLAECFNNWIRE

SEQ ID NO: 161123 - protein, 617 aa, Zea Mays
MGRSSLGLFTSSLEDAMGIAQHHDAISGTAKQHTTDDYSKRIAIGASKVEKGVNAALTCLTNSNKTCVSSVPKFSQCPLLNISYCPSTEEAISATKHLVVVVYNPLGWKRSDFIRVPVNDEDLVVKSSDGNTVVSQIVVVDNVTNNLRKLYVKAYLGVTANKAPKYWLTFQASVPPMGWNSYFILKSTGSGYNNTEHVPVVVPPSNNTIEAGQGHLKMSFSSASGQLERIFNSASGGDLPIQQSFLWYRSSKGDALDPQASGAYIFRPDGNTPTIASSSVTLKVIRGPLFDEVHQQFSSWIYQITRLYKNKEHAEVEYTIGPIPVDDDVGKEVITQLTANMSTNSTFYTDSNGRDFLKRVRNYREDWNLQVTQPVAGNYYPVNLGVYIVDEKYELSVLVDRAAGASSIQDGQLEIMLHRRLLKDDGRGVAEPLDEVVCVDQDCQGLTARGTYYINVEKLGHGAHWRRTYGQQVYSPFLLAFTHEDATSSKPYSVAKDSMMDGNYSLPDNVAIVTLQNLDDGTTLLRLAHLFQAGEDPRYSEVAEVDLKKVFGKRTIKELTETNLSANQKKSEMKQLNWRVIEDAESGPAPVKGGPVDCRALVVALGPMEIRTFLLKF

SEQ ID NO: 161124 - protein, 400 aa, Zea Mays
MSFSSASGQLERIFNSASGGDLPIQQSFLWYRSSKGDALDPQASGAYIFRPDGNTPTIASSSVTLKVIRGPLFDEVHQQFSSWIYQITRLYKNKEHAEVEYTIGPIPVDDDVGKEVITQLTANMSTNSTFYTDSNGRDFLKRVRNYREDWNLQVTQPVAGNYYPVNLGVYIVDEKYELSVLVDRAAGASSIQDGQLEIMLHRRLLKDDGRGVAEPLDEVVCVDQDCQGLTARGTYYINVEKLGHGAHWRRTYGQQVYSPFLLAFTHEDATSSKPYSVAKDSMMDGNYSLPDNVAIVTLQNLDDGTTLLRLAHLFQAGEDPRYSEVAEVDLKKVFGKRTIKELTETNLSANQKKSEMKQLNWRVIEDAESGPAPVKGGPVDCRALVVALGPMEIRTFLLKF

SEQ ID NO: 161125 - protein, 335 aa, Zea Mays
MSLFDYNVQERVDDFVAAAIAQANVTRTNHIMWTMGDDFNYQYAESWFRNMDKLIQYVNKDGRVHALYSTPSIYTDAKHASNESWPVKYDDYFPYADSTNAYWTGYFTSRPTFKRYIRVYSGYYLAARQIEFLMGRSSLGLFTSSLEDAMGIAQHHDAISGTAKQHTTDDYSKRIAIGASKVEKGVNAALTCLTNSNKTCVSSVPKFSQCPLLNISYCPSTEEAISATKHLVVVVYNPLGWKRSDFIRVPVNDEDLVVKSSDGNTVVSQIVVVDNVTNNLRKLYVKAYLGVTANKAPKYWLTFQASVPPMGWNSYFILKSTGSGRLTNSTKLSLV

SEQ ID NO: 161126 - protein, 728 aa, Zea Mays
MSLFDYNVQERVDDFVAAAIAQANVTRTNHIMWTMGDDFNYQYAESWFRNMDKLIQYVNKDGRVHALYSTPSIYTDAKHASNESWPVKYDDYFPYADSTNAYWTGYFTSRPTFKRYIRVYSGYYLAARQIEFLMGRSSLGLFTSSLEDAMGIAQHHDAISGTAKQHTTDDYSKRIAIGASKVEKGVNAALTCLTNSNKTCVSSVPKFSQVVVVYNPLGWKRSDFIRVPVNDEDLVVKSSDGNTVVSQIVVVDNVTNNLRKLYVKAYLGVTANKAPKYWLTFQASVPPMGWNSYFILKSTGSGYNNTEHVPVVVPPSNNTIEAGQGHLKMSFSSASGQLERIFNSASGGDLPIQQSFLWYRSSKGDALDPQASGAYIFRPDGNTPTIASSSVTLKVIRGPLFDEVHQQFSSWIYQITRLYKNKEHAEVEYTIGPIPVDDDVGKEVITQLTANMSTNSTFYTDSNGRDFLKRVRNYREDWNLQVTQPVAGNYYPVNLGVYIVDEKYELSVLVDRAAGASSIQDGQLEIMLHRRLLKDDGRGVAEPLDEVVCVDQDCQGLTARGTYYINVEKLGHGAHWRRTYGQQVYSPFLLAFTHEDATSSKPYSVAKDSMMDGNYSLPDNVAIVTLQNLDDGTTLLRLAHLFQAGEDPRYSEVAEVDLKKVFGKRTIKELTETNLSANQKKSEMKQLNWRVIEDAESGPAPVKGGPVDCRALVVALGPMEIRTFLLKF

SEQ ID NO: 161127 - protein, 455 aa, Zea Mays
MSLFDYNVQERVDDFVAAAIAQANVTRTNHIMWTMGDDFNYQYAESWFRNMDKLIQYVNKDGRVHALYSTPSIYTDAKHASNESWPVKYDDYFPYADSTNAYWTGYFTSRPTFKRYIRVYSGYYLAARQIEFLMGRSSLGLFTSSLEDAMGIAQHHDAISGTAKQHTTDDYSKRIAIGASKVEKGVNAALTCLTNSNKTCVSSVPKFSQCPLLNISYCPSTEEAISATKHLVVVVYNPLGWKRSDFIRVPVNDEDLVVKSSDGNTVVSQIVVVDNVTNNLRKLYVKAYLGVTANKAPKYWLTFQASVPPMGWNSYFILKSTGSEIVPTTYPGYNNTEHVPVVVPPSNNTIEAGQGHLKMSFSSASGQLERIFNSASGGDLPIQQSFLWYRSSKGDALDPQASGAYIFRPDGNTPTIASSSVTLKVIRGPLFDEVHQQFSSWIYQFWSLGPSFFLI

SEQ ID NO: 161128 - protein, 592 aa, Zea Mays
MAPTLLLVALVALAVAAATPMVMEASAFTEGCNNRSTPGGGGGTAVGNKLNVHLVPHSHDDVGWLMTIDQYYVGSNNSIQGACVMNTLDSVVDALAKDPARKFIVVEQAFFQRWWAQKSLTVQATVHKLVDSGQLEFINGGWCMHDEAVVHYIDMIDQTTLGHRVIKKQFKKIPRAGWQIDPFGHSAVQAYLLGAELGFDSVHFARIDYQDRATRKANKGLEVIWRGSRPVGSSSQIFTNVFPVHYSAPVGFSFEVLAENVIPVQDDMSLFDYNVQERVDDFVAAAIAQANVTRTNHIMWTMGDDFNYQYAESWFRNMDKLIQYVNKDGRVHALYSTPSIYTDAKHASNESWPVKYDDYFPYADSTNAYWTGYFTSRPTFKRYIRVYSGYYLAARQIEFLMGRSSLGLFTSSLEDAMGIAQHHDAISGTAKQHTTDDYSKRIAIGASKVEKGVNAALTCLTNSNKTCVSSVPKFSQCPLLNISYCPSTEEAISATKHLVVVVYNPLGWKRSDFIRVPVNDEDLVVKSSDGNTVVSQIVVVDNVTNNLRKLYVKAYLGVTANKAPKYWLTFQASVPPMGWNSYFILKSTGSGE

SEQ ID NO: 161129 - protein, 602 aa, Zea Mays
MAPTLLLVALVALAVAAATPMVMEASAFTEGCNNRSTPGGGGGTAVGNKLNVHLVPHSHDDVGWLMTIDQYYVGSNNSIQGACVMNTLDSVVDALAKDPARKFIVVEQAFFQRWWAQKSLTVQATVHKLVDSGQLEFINGGWCMHDEAVVHYIDMIDQTTLGHRVIKKQFKKIPRAGWQIDPFGHSAVQAYLLGAELGFDSVHFARIDYQDRATRKANKGLEVIWRGSRPVGSSSQIFTNVFPVHYSAPVGFSFEVLAENVIPVQDDMSLFDYNVQERVDDFVAAAIAQANVTRTNHIMWTMGDDFNYQYAESWFRNMDKLIQYVNKDGRVHALYSTPSIYTDAKHASNESWPVKYDDYFPYADSTNAYWTGYFTSRPTFKRYIRVYSGYYLAARQIEFLMGRSSLGLFTSSLEDAMGIAQHHDAISGTAKQHTTDDYSKRIAIGASKVEKGVNAALTCLTNSNKTCVSSVPKFSQCPLLNISYCPSTEEAISATKHLVVVVYNPLGWKRSDFIRVPVNDEDLVVKSSDGNTVVSQIVVVDNVTNNLRKLYVKAYLGVTANKAPKYWLTFQASVPPMGWNSYFILKSTGSGRLTNSTKLSLV

SEQ ID NO: 161130 - protein, 758 aa, Zea Mays
MSLFDYNVQERVDDFVAAAIAQANVTRTNHIMWTMGDDFNYQYAESWFRNMDKLIQYVNKDGRVHALYSTPSIYTDAKHASNESWPVKYDDYFPYADSTNAYWTGYFTSRPTFKRYIRVYSGYYLAARQIEFLMGRSSLGLFTSSLEDAMGIAQHHDAISGTAKQHTTDDYSKRIAIGASKVEKGVNAALTCLTNSNKTCVSSVPKFSQCPLLNISYCPSTEEAISATKHLVVVVYNPLGWKRSDFIRVPVNDEDLVVKSSDGNTVVSQIVVVDNVTNNLRKLYVKAYLGVTANKAPKYWLTFQASVPPMGWNSYFILKSTGSEIVPTTYPGYNNTEHVPVVVPPSNNTIEAGQGHLKMSFSSASGQLERIFNSASGGDLPIQQSFLWYRSSKGDALDPQASGAYIFRPDGNTPTIASSSVTLKVIRGPLFDEVHQQFSSWIYQITRLYKNKEHAEVEYTIGPIPVDDDVGKEVITQLTANMSTNSTFYTDSNGRDFLKRVRNYREDWNLQVTQPVAGNYYPVNLGVYIVDEKYELSVLVDRAAGASSIQDGQLEIMLHRRLLKDDGRGVAEPLDEVVCVDQDCQGLTARGTYYINVEKLGHGAHWRRTYGQQVYSPFLLAFTHEDATSSKPYSVAKDSMMDGNYSLPDNVAIVTLQNLDDGTTLLRLAHLFQAGEDPRYSEVAEVDLKKVFGKRTIKELTETNLSANQKKSEMKQLNWRVIEDAESGPAPVKGGPVDCRALVVALGPMEIRTFLLKF

SEQ ID NO: 161131 - protein, 708 aa, Zea Mays
MAPTLLLVALVALAVAAATPMVMEASAFTEGCNNRSTPGGGGGTAVGNKLNVHLVPHSHDDVGWLMTIDQYYVGSNNSIQGACVMNTLDSVVDALAKDPARKFIVVEQAFFQRWWAQKSLTVQATVHKLVDSGQLEFINGGWCMHDEAVVHYIDMIDQTTLGHRVIKKQFKKIPRAGWQIDPFGHSAVQAYLLGAELGFDSVHFARIDYQDRATRKANKGLEVIWRGSRPVGSSSQIFTNVFPVHYSAPVGFSFEVLAENVIPVQDDMSLFDYNVQERVDDFVAAAIAQANVTRTNHIMWTMGDDFNYQYAESWFRNMDKLIQYVNKDGRVHALYSTPSIYTDAKHASNESWPVKYDDYFPYADSTNAYWTGYFTSRPTFKRYIRVYSGYYLAARQIEFLMGRSSLGLFTSSLEDAMGIAQHHDAISGTAKQHTTDDYSKRIAIGASKVEKGVNAALTCLTNSNKTCVSSVPKFSQCPLLNISYCPSTEEAISATKHLVVVVYNPLGWKRSDFIRVPVNDEDLVVKSSDGNTVVSQIVVVDNVTNNLRKLYVKAYLGVTANKAPKYWLTFQASVPPMGWNSYFILKSTGSGYNNTEHVPVVVPPSNNTIEAGQGHLKMSFSSASGQLERIFNSASGGDLPIQQSFLWYRSSKGDALDPQASGAYIFRPDGNTPTIASSSVTLKVIRGPLFDEVHQQFSSWIYQATAAC

SEQ ID NO: 161132 - protein, 449 aa, Zea Mays
MHDEAVVHYIDMIDQTTLGHRVIKKQFKKIPRAGWQIDPFGHSAVQAYLLGAELGFDSVHFARIDYQDRATRKANKGLEVIWRGSRPVGSSSQIFTNVFPVHYSAPVGFSFEVLAENVIPVQDDMSLFDYNVQERVDDFVAAAIAQANVTRTNHIMWTMGDDFNYQYAESWFRNMDKLIQYVNKDGRVHALYSTPSIYTDAKHASNESWPVKYDDYFPYADSTNAYWTGYFTSRPTFKRYIRVYSGYYLAARQIEFLMGRSSLGLFTSSLEDAMGIAQHHDAISGTAKQHTTDDYSKRIAIGASKVEKGVNAALTCLTNSNKTCVSSVPKFSQCPLLNISYCPSTEEAISATKHLVVVVYNPLGWKRSDFIRVPVNDEDLVVKSSDGNTVVSQIVVVDNVTNNLRKLYVKAYLGVTANKAPKYWLTFQASVPPMGWNSYFILKSTGSGE

SEQ ID NO: 161133 - protein, 57 aa, Zea Mays
MRVETFHNICEIVAYCCPLMMAMESTQLRHYMVYLDIHKTIYFDIYIYIYIYIICLI

SEQ ID NO: 161134 - protein, 779 aa, Zea Mays
MPFLSIIAHQMALASKFWMKISYLFRDDLSLFDYNVQERVDDFVAAALAQANVTRTDHIMWTMGDDFNYQYAESWFRNMDKLIQHVNKDGRVHALYSTPSIYTDAKHASNESWPVKYDDYFPYADSTNAYWTGYFTSRPTFKRYVRVHSGYYLAARQIEFLVGGRSSLGLFTSSLEDAMGIAQHHDAVSGTAKQHTTDDYAKRLALGAAKVEKGVNTALACLTSSNGTCGSSVVKFSQCSLLNISYCPSTEEAISSTKRLVVVVYNPLGWERSDFIRVPVNDQNLVVKGSDGNIVESQLVEVDNVTRNLRKFYVKAYLGITTHKAPKYWLLFQASVPPMGWNSYFISKSTGAGYNSTEHVSDVVSPSNSTIEVGPGHLKMSFSKASGQLNRIFNSISGVDLPVQQSFLWYRSSEGDASDSQASGAYIFRPDGNTPTTVSSSVPLKVIRGPLVDEVHQQFSSWIYQITRLYKNKEHAEVEYTIGPIPVDDDVGKEVITRLTANMVTNSTFYTDSNGRDFLKRVRNYREDWNLQVTQPVAGNYYPVNLGVYVADEKYELSVLVDRAVGASSIQDGQLEIMLHRRLLKDDGRGVGEPLDEVVCVDQDCQGLTARGNYYVNVEKLGHGAHWRRTYGQQVYSPFLLAFTHEDETSSKSYSVAKAGMMNANYSLPDNVAIVTLQNLDDGTTLLRLAHLFQAAEDPRYSKVAKVDLKKVFGKRTIKELTETSLSANQKKSDMKKLSWRVIGNTETGPAAVKGGPVDSRALVVELGPMEIRTFLLKF

SEQ ID NO: 161135 - protein, 315 aa, Zea Mays
MWTMGDDFNYQYAESWFRNMDKLIQHVNKDGRVHALYSTPSIYTDAKHASNESWPVKYDDYFPYADSTNAYWTGYFTSRPTFKRYVRVHSGYYLAARQIEFLVGGRSSLGLFTSSLEDAMGIAQHHDAVSGTAKQHTTDDYAKRLALGAAKVEKGVNTALACLTSSNGTCGSSVVKFSQCSLLNISYCPSTEEAISSTKRLVVVVYNPLGWERSDFIRVPVNDQNLVVKGSDGNIVESQLVEVDNVTRNLRKFYVKAYLGITTHKAPKYWLLFQASVPPMGWNSYFISKSTGAVLSMSRTWFPQVTARLKLDQDI

SEQ ID NO: 161136 - protein, 716 aa, Zea Mays
MVMAPAILLAVLVLAAVAAATASAFAVASNNATVVAGKLNVHLVPHSHDDVGWLKTVDQYYVGSNNSIQGACVMNTLDSVVDALARDPARKFVVVEQAFFQRWWAEKSPTIQDIVHKLVDSGQLEFINGGWCMHDEAAVHYIDMIDQTTLGHRMIKKQFNKTPRAGWQIDPFGHSAVQAYLLGAELGFDSVHFARIDYQDRATRKADKGLEVIWRGSRTFGSSSQIFTNAFPVHYSPPDGFGFEVLDENIIPVQDDLSLFDYNVQERVDDFVAAALAQANVTRTDHIMWTMGDDFNYQYAESWFRNMDKLIQHVNKDGRVHALYSTPSIYTDAKHASNESWPVKYDDYFPYADSTNAYWTGYFTSRPTFKRYVRVHSGYYLAARQIEFLVGGRSSLGLFTSSLEDAMGIAQHHDAVSGTAKQHTTDDYAKRLALGAAKVEKGVNTALACLTSSNGTCGSSVVKFSQCSLLNISYCPSTEEAISSTKRLVVVVYNPLGWERSDFIRVPVNDQNLVVKGSDGNIVESQLVEVDNVTRNLRKFYVKAYLGITTHKAPKYWLLFQASVPPMGWNSYFISKSTGAGYNSTEHVSDVVSPSNSTIEVGPGHLKMSFSKASGQLNRIFNSISGVDLPVQQSFLWYRSSEGDASDSQASGAYIFRPDGNTPTTVSSSVPLKVIRGPLVDEVHQQFSSWIYQITRLYKNKEHAEVEYTGRRSSHG

SEQ ID NO: 161137 - protein, 174 aa, Zea Mays
MGDPRPWRSAAQLRAPPSFSAPARPPSPHPLPDARPRLPLSSGGWCAQASGSGSPCVSWRCGGPAAAMEVLAAAPRRRCLQPSSPRSPSSAASTWRRTSRWSRAAPPPFTAAPPIGVKPWVEARSRGQAATARVKRPGGASSGSRGRTPCPTTATLTGIPGLSVAQPRTGVNAT

SEQ ID NO: 161138 - protein, 50 aa, Zea Mays
MDATWEKSFWKGKKGTWAQELGTKQVTVTMELLPFGVIFKKSKIGLRVLH

SEQ ID NO: 161139 - protein, 64 aa, Zea Mays
MSTSSEVSFKGDGCYMGEELLEREERNLGSRIGNKAGDGNNGTTTFWSYLQEIKDRIEGLALVD

SEQ ID NO: 161140 - protein, 121 aa, Zea Mays
MLHGRRAFGKGRKELGLKNWEQSRKRKPRKNTTKNWIPKELRTSSQTVREQPELEEVEEPEGVLQIYSPRGTTASQPELSEPEQLGIVLRASRCTNHFTSGRCNSPVDSTNFSTTDKEMSS

SEQ ID NO: 161141 - protein, 75 aa, Zea Mays
MKVRVVVLPGGHGGAEGERRRPRAAQLQDQQERRECPAPRRHGCRRRHFACGMLMRACSWRPWQQRAWEIQPMDG

SEQ ID NO: 161142 - protein, 96 aa, Zea Mays
MLTCCGRADSRHDTARLRRVGDTPVMNSLYPIHPFPCQDLTYVIRGLSNLLECLQGDRTLQLMWFHGCGSICSIPLASEVLCLPRLSMPTLSIRMG

SEQ ID NO: 161143 - protein, 598 aa, Zea Mays
MSSVGPYMDISGNLLHGVIPAVLGSWRNLTMLDVSNNLFSGPIPRELGALTKLETLRMSSNRLKGRIPHELGNCTHLLHLDLGKNLLNGSIPAEITSFGRLQSLLLSANNLTGTIPDTFTAAQDLIELQLGDNRLEGAVPRSLGNLQYLSKALNISHNRLSGQIPSSLGNLEDLELLDLSVNSLSGPIPPQLSNMVSLLVVNISFNELSGQLPGSWAKLAAKSPDGFVGNPQLCIESACADHSNSQPAGKLRYSKTRVVVALLVSTLAAMVAGACAAYYIVKRSHHLSASRASVRSLDTTEELPEDLTYEDILRATDNWSEKYVIGRGRHGTVYRTECKLGKDWAVKTVDLSQCKFPIEMKILNTVKHRNIVRMDGYCIRGSVGLILYEYMPEGTLFELLHERKPRVRLDCMARCQIALGVAQALSYLHHDSVPMIVHRDVKSSNILMDAEFVPKLTDFGMGKIVADENADATVSAIIGTLGYIAPEHGYATRLTEKSDVYSYGVVLLELLCRKTPVDSSFGDGIDIVTWMRTNLEHGDRRSIISLMDEEMTCWSQDEQEKALSLLDLGVSCTQVACQSRPSMREVVNMLLKIEKYSV

SEQ ID NO: 161144 - protein, 242 aa, Zea Mays
MEPSRGAAGGARRWGEAETEGDAAEEGRRAEDGGEVSLREWLDRPGRAVEAAECLHVFRQVAEAVAVAHAPGVVVGSARPSCFVVSPPFARVAFIESAFGSDASGSCSGSDADPDASPPRRGDGAGRGEERAGKSFPLKSVLAMELNWYTSPEEADDSAATFASDVYRLGVLLFELFCTFETMEDKMRAMATANLRHRVLPPQLLLKWPKEASFCQLLMHPVPETRPKMRFGMLLGVKFLLR

SEQ ID NO: 161145 - protein, 234 aa, Zea Mays
MEPSRGAAGGARRWGEAETEGDAAEEGRRAEDGGEVSLREWLDRPGRAVEAAECLHVFRQVAEAVAVAHAPGVVVGSARPSCFVVSPPFARVAFIESAFGSDASGSCSGSDADPDASPPRRGDGAGRGEERAGKSFPLKSVLAMELNWYTSPEEADDSAATFASDVYRLGVLLFELFCTFETMEDKMRAMATANLRHRVLPPQLLLKWPKEASFCQLLMHPVPETRPKMRQNVD

SEQ ID NO: 161146 - protein, 778 aa, Zea Mays
MKKIQIISTKLLQHHAFLALLSQYSLHGYSGEQELNNLVLNDLYYLIRGELEGRQISSGPFQELLSFLLGFRIFEHNPLEQLQNTYLMANDKFLFDVEHIHDELGVDLWTDSDKRSKEVAKKMLDIMSKANLMKYYADAKLSALMSFLKFLSVYKGALILELLQISNKNLDLPDGGISVAATQSAIKCACKSFESTVDSLLPQAHTDEVLFPLLSGQVELLLTLARILFHQAKNKKSSHLCPDIVLLMKTSGASTCLFVDLMPSAHALKQPVKTLLVLLLSSYEFMYSKVDIKDLPNDINIFGELALLSVSLLPILCKLAENRECSDLAVASMDLILKGSVPSNLWMPILQKHFHLQTILHKCQNGDLLSTQVILNFLLTLGRTKDGAKVLQSANIFAFLKLLLSQLSLDDSCLRNSLSAQVKDVNLWGLGLGIVASLNHCLDDDISHNNVVSNTISFLSGHVPLVSSYLSTQSATTHQSKKRALSQKSQTSLSALSLTENILILLCILAKYHFPRDTGKKEVDSELREIIIHLLAFISKGSVKTGNASKWNSSFFCPAVIKEEVALNEKPPLICSKYGWFRFAASCTLSTAGVSVSPSAALSVVRRDKTSGDSDSIRQTRFTEILAVQIYRIAFLIMKFLCSQAKEAVKRAEELEFLDLAHFPELPMPDILHGLQDQVVCIVTEIFEANGSSTLNPETEKVCQLLLVTLETSLYMELCVSQSCGIRPVLGRLEDFCKGIKAMLQAIEKHSSFEPFVRSLTEITSLLYPGLLHNNLLM

SEQ ID NO: 161147 - protein, 950 aa, Zea Mays
MNRSPLVLLSILDLLKALWESGIRFLFILEKLRSSVTFWDNLSRCIRATLDISPIDNIDAIDEKFSLRYHCQGKIFEIMSHELFLQGKLLTETSNTVQDDPKGQKEHKSGPCRISVVLKWFDNAILADLVSNLSSNAYKKELHHAKVAACLCIIHLITKLSTGDTGSLSFSFMKKIQIISTKLLQHHAFLALLSQYSLHGYSGEQELNNLVLNDLYYLIRGELEGRQISSGPFQELLSFLLGFRIFEHNPLEQLQNTYLMANDKFLFDVEHIHDELGVDLWTDSDKRSKEVAKKMLDIMSKANLMKYYADAKLSALMSFLKFLSVYKGALILELLQISNKNLDLPDGGISVAATQSAIKCACKSFESTVDSLLPQAHTDEVLFPLLSGQVELLLTLARILFHQAKNKKSSHLCPDIVLLMKTSGASTCLFVDLMPSAHALKQPVKTLLVLLLSSYEFMYSKVDIKDLPNDINIFGELALLSVSLLPILCKLAENRECSDLAVASMDLILKGSVPSNLWMPILQKHFHLQTILHKCQNGDLLSTQVILNFLLTLGRTKDGAKVLQSANIFAFLKLLLSQLSLDDSCLRNSLSAQVKDVNLWGLGLGIVASLNHCLDDDISHNNVVSNTISFLSGHVPLVSSYLSTQSATTHQSKKRALSQKSQTSLSALSLTENILILLCILAKYHFPRDTGKKEVDSELREIIIHLLAFISKGSVKTGNASKWNSSFFCPAVIKEEVALNEKPPLICSKYGWFRFAASCTLSTAGVSVSPSAALSVVRRDKTSGDSDSIRQTRFTEILAVQIYRIAFLIMKFLCSQAKEAVKRAEELEFLDLAHFPELPMPDILHGLQDQVVCIVTEIFEANGSSTLNPETEKVCQLLLVTLETSLYMELCVSQSCGIRPVLGRLEDFCKGIKAMLQAIEKHSSFEPFVRSLTEITSLLYPGLLHNNLLM

SEQ ID NO: 161148 - protein, 1030 aa, Zea Mays
MQVAAARAFSALCFIAYKAQPQLMENASFTSDVSEPAFLISLIEQSTKSTDHNASTNDRDNRVLVTSKSNARLVDQILDYIDRSIELMNRSPLVLLSILDLLKALWESGIRFLFILEKLRSSVTFWDNLSRCIRATLDISPIDNIDAIDEKFSLRYHCQGKIFEIMSHELFLQGKLLTETSNTVQDDPKGQKEHKSGPCRISVVLKWFDNAILADLVSNLSSNAYKKELHHAKVAACLCIIHLITKLSTGDTGSLSFSFMKKIQIISTKLLQHHAFLALLSQYSLHGYSGEQELNNLVLNDLYYLIRGELEGRQISSGPFQELLSFLLGFRIFEHNPLEQLQNTYLMANDKFLFDVEHIHDELGVDLWTDSDKRSKEVAKKMLDIMSKANLMKYYADAKLSALMSFLKFLSVYKGAISNKNLDLPDGGISVAATQSAIKCACKSFESTVDSLLPQAHTDEVLFPLLSGQVELLLTLARILFHQAKNKKSSHLCPDIVLLMKTSGASTCLFVDLMPSAHALKQPVKTLLVLLLSSYEFMYSKVDIKDLPNDINIFGELALLSVSLLPILCKLAENRECSDLAVASMDLILKGSVPSNLWMPILQKHFHLQTILHKCQNGDLLSTQVILNFLLTLGRTKDGAKVLQSANIFAFLKLLLSQLSLDDSCLRNSLSAQVKDVNLWGLGLGIVASLNHCLDDDISHNNVVSNTISFLSGHVPLVSSYLSTQSATTHQSKKRALSQKSQTSLSALSLTENILILLCILAKYHFPRDTGKKEVDSELREIIIHLLAFISKGSVKTGNASKWNSSFFCPAVIKEEVALNEKPPLICSKYGWFRFAASCTLSTAGVSVSPSAALSVVRRDKTSGDSDSIRQTRFTEILAVQIYRIAFLIMKFLCSQAKEAVKRAEELEFLDLAHFPELPMPDILHGLQDQVVCIVTEIFEANGSSTLNPETEKVCQLLLVTLETSLYMELCVSQSCGIRPVLGRLEDFCKGIKAMLQAIEKHSSFEPFVRSLTEITSLLYPGLLHNNLLM

SEQ ID NO: 161149 - protein, 1588 aa, Zea Mays
MIHDEVPLSGGCSAFSVGDILEMDVEISKLPEFSLVESGPLILAWAVFLCLVLSLPESNTNLEIDHTSYARRAFEFAPFNYLLGVLCSSIFRESDGPVSGYRGILRTFISAFIASYEVSYQKEHSSFDMISSILCEVYDGEESLCMQFWDKDSFVDGPIRYNYLERMNGVTTIYTIPCVADGVGYGHQIESHHPVSIPSIEGITIPQGTHGYILKVLQEDTTLVRWEFPHSGVSFLLITLAQELHSCNYKKACDIIGLLYRMVSSNKDLCFALMHVDKSLAVQTSNNLGQIEKHVRIDIAKVFCNSIFKYVRDVNNADILSKTFGLLAEMMKCAPYHVFDAAFECNIFTSQLSSPSSDWLLSGALARMLFAAYEGNGDCSSLTSSAVLDFTTQVLRKGADADDIISPLIVFSIKYIMINHVNWKHKECSRWKTTLRVFELVKSCLQVKPFSSKLGGIIWEILLYDSSVHGVLWSILSVLTRLLHDSYRSNYHGLKDIEDIQLVLCNGLDIIYHILSNLPEGMQVAAARAFSALCFIAYKAQPQLMENASFTSDVSEIRRLESNISCILDEDDKNNDCLVVAVFNLLTSAARYQPAFLISLIEQSTKSTDHNASTNDRDNRVLVTSKSNARLVDQILDYIDRSIELMNRSPLVLLSILDLLKALWESGIRFLFILEKLRSSVTFWDNLSRCIRATLDISPIDNIDAIDEKFSLRYHCQGKIFEIMSHELFLQGKLLTETSNTVQDDPKGQKEHKSGPCRISVVLKWFDNAILADLVSNLSSNAYKKELHHAKVAACLCIIHLITKLSTGDTGSLSFSFMKKIQIISTKLLQHHAFLALLSQYSLHGYSGEQELNNLVLNDLYYLIRGELEGRQISSGPFQELLSFLLGFRIFEHNPLEQLQNTYLMANDKFLFDVEHIHDELGVDLWTDSDKRSKEVAKKMLDIMSKANLMKYYADAKLSALMSFLKFLSVYKGAISNKNLDLPDGGISVAATQSAIKCACKSFESTVDSLLPQAHTDEVLFPLLSGQVELLLTLARILFHQAKNKKSSHLCPDIVLLMKTSGASTCLFVDLMPSAHALKQPVKTLLVLLLSSYEFMYSKVDIKDLPNDINIFGELALLSVSLLPILCKLAENRECSDLAVASMDLILKGSVPSNLWMPILQKHFHLQTILHKCQNGDLLSTQVILNFLLTLGRTKDGAKVLQSANIFAFLKLLLSQLSLDDSCLRNSLSAQVKDVNLWGLGLGIVASLNHCLDDDISHNNVVSNTISFLSGHVPLVSSYLSTQSATTHQSKKRALSQKSQTSLSALSLTENILILLCILAKYHFPRDTGKKEVDSELREIIIHLLAFISKGSVKTGNASKWNSSFFCPAVIKEEVALNEKPPLICSKYGWFRFAASCTLSTAGVSVSPSAALSVVRRDKTSGDSDSIRQTRFTEILAVQIYRIAFLIMKFLCSQAKEAVKRAEELEFLDLAHFPELPMPDILHGLQDQVVCIVTEIFEANGSSTLNPETEKVCQLLLVTLETSLYMELCVSQSCGIRPVLGRLEDFCKGIKAMLQAIEKHSSFEPFVRSLTEITSLLYPGLLHNNLLM

SEQ ID NO: 161150 - protein, 1885 aa, Zea Mays
MASGRAATSSSILVNAAGTSKTLSASLWWDSFVVLSDDLDRATAGPSVPDALAKRIKSHHAWLRGSVSMFGKPNDASRSALEVGEVAVGERRLTVKPELKEAALRASKCLNLDEVQSYILVKRSSEVSPTIRDADAEEFLHLVSVRYYLERQCLLKCIRRIFVHASDVSDSTDPIRDEASLLISEEIDRKLISIIEDSFSTASSVKAEAEFTISSLEETLIEVNLILDILFLTFYDNFSRCNGRQWITLCSIFKDILCGSYGVGKFVASVEAKNSFHYAKAQLLLILIETLDFENLLRMIHDEVPLSGGCSAFSVGDILEMDVEISKLPEFSLVESGPLILAWAVFLCLVLSLPESNTNLEIDHTSYARRAFEFAPFNYLLGVLCSSIFRESDGPVSGYRGILRTFISAFIASYEVSYQKEHSSFDMISSILCEVYDGEESLCMQFWDKDSFVDGPIRYNYLERMNGVTTIYTIPCVADGVGYGHQIESHHPVSIPSIEGITIPQGTHGYILKVLQEDTTLVRWEFPHSGVSFLLITLAQELHSCNYKKACDIIGLLYRMVSSNKDLCFALMHVDKSLAVQTSNNLGQIEKHVRIDIAKVFCNSIFKYVRDVNNADILSKTFGLLAEMMKCAPYHVFDAAFECNIFTSQLSSPSSDWLLSGALARMLFAAYEGNGDCSSLTSSVLDFTTQVLRKGADADDIISPLIVFSIKYIMINHVNWKHKECSRWKTTLRVFELVKSCLQVKPFSSKLGGIIWEILLYDSSVHGVLWSILSVLTRLLHDSYRSNYHGLKDIEDIQLVLCNGLDIIYHILSNLPEGMQVAAARAFSALCFIAYKAQPQLMENASFTSDVSEIRRLESNISCILDEDDKNNDCLVVAVFNLLTSAARYQPAFLISLIEQSTKSTDHNASTNDRDNRVLVTSKSNARLVDQILDYIDRSIELMNRSPLVLLSILDLLKALWESGIRFLFILEKLRSSVTFWDNLSRCIRATLDISPIDNIDAIDEKFSLRYHCQGKIFEIMSHELFLQGKLLTETSNTVQDDPKGQKEHKSGPCRISVVLKWFDNAILADLVSNLSSNAYKKELHHAKVAACLCIIHLITKLSTGDTGSLSFSFMKKIQIISTKLLQHHAFLALLSQYSLHGYSGEQELNNLVLNDLYYLIRGELEGRQISSGPFQELLSFLLGFRIFEHNPLEQLQNTYLMANDKFLFDVEHIHDELGVDLWTDSDKRSKEVAKKMLDIMSKANLMKYYADAKLSALMSFLKFLSVYKGAISNKNLDLPDGGISVAATQSAIKCACKSFESTVDSLLPQAHTDEVLFPLLSGQVELLLTLARILFHQAKNKKSSHLCPDIVLLMKTSGASTCLFVDLMPSAHALKQPVKTLLVLLLSSYEFMYSKVDIKDLPNDINIFGELALLSVSLLPILCKLAENRECSDLAVASMDLILKGSVPSNLWMPILQKHFHLQTILHKCQNGDLLSTQVILNFLLTLGRTKDGAKVLQSANIFAFLKLLLSQLSLDDSCLRNSLSAQVKDVNLWGLGLGIVASLNHCLDDDISHNNVVSNTISFLSGHVPLVSSYLSTQSATTHQSKKRALSQKSQTSLSALSLTENILILLCILAKYHFPRDTGKKEVDSELREIIIHLLAFISKGSVKTGNASKWNSSFFCPAVIKEEVALNEKPPLICSKYGWFRFAASCTLSTAGVSVSPSAALSVVRRDKTSGDSDSIRQTRFTEILAVQIYRIAFLIMKFLCSQAKEAVKRAEELEFLDLAHFPELPMPDILHGLQDQVVCIVTEIFEANGSSTLNPETEKVCQLLLVTLETSLYMELCVSQSCGIRPVLGRLEDFCKGIKAMLQAIEKHSSFEPFVRSLTEITSLLYPGLLHNNLLM

SEQ ID NO: 161151 - protein, 1599 aa, Zea Mays
MDVEISKLPEFSLVESGPLILAWAVFLCLVLSLPESNTNLEIDHTSYARRAFEFAPFNYLLGVLCSSIFRESDGPVSGYRGILRTFISAFIASYEVSYQKEHSSFDMISSILCEVYDGEESLCMQFWDKDSFVDGPIRSVLHMLEEEYPFQISELIRFLSAVCHGTWPANCVYNYLERMNGVTTIYTIPCVADGVGYGHQIESHHPVSIPSIEGITIPQGTHGYILKVLQEDTTLVRWEFPHSGVSFLLITLAQELHSCNYKKACDIIGLLYRMVSSNKDLCFALMHVDKSLAVQTSNNLGQIEKHVRIDIAKVFCNSIFKYVRDVNNADILSKTFGLLAEMMKCAPYHVFDAAFECNIFTSQLSSPSSDWLLSGALARMLFAAYEGNGDCSSLTSSVLDFTTQVLRKGADADDIISPLIVFSIKYIMINHVNWKHKECSRWKTTLRVFELVKSCLQVKPFSSKLGGIIWEILLYDSSVHGVLWSILSVLTRLLHDSYRSNYHGLKDIEDIQLVLCNGLDIIYHILSNLPEGMQVAAARAFSALCFIAYKAQPQLMENASFTSDVSEIRRLESNISCILDEDDKNNDCLVVAVFNLLTSAARYQPAFLISLIEQSTKSTDHNASTNDRDNRVLVTSKSNARLVDQILDYIDRSIELMNRSPLVLLSILDLLKALWESGIRFLFILEKLRSSVTFWDNLSRCIRATLDISPIDNIDAIDEKFSLRYHCQGKIFEIMSHELFLQGKLLTETSNTVQDDPKGQKEHKSGPCRISVVLKWFDNAILADLVSNLSSNAYKKELHHAKVAACLCIIHLITKLSTGDTGSLSFSFMKKIQIISTKLLQHHAFLALLSQYSLHGYSGEQELNNLVLNDLYYLIRGELEGRQISSGPFQELLSFLLGFRIFEHNPLEQLQNTYLMANDKFLFDVEHIHDELGVDLWTDSDKRSKEVAKKMLDIMSKANLMKYYADAKLSALMSFLKFLSVYKGAISNKNLDLPDGGISVAATQSAIKCACKSFESTVDSLLPQAHTDEVLFPLLSGQVELLLTLARILFHQAKNKKSSHLCPDIVLLMKTSGASTCLFVDLMPSAHALKQPVKTLLVLLLSSYEFMYSKVDIKDLPNDINIFGELALLSVSLLPILCKLAENRECSDLAVASMDLILKGSVPSNLWMPILQKHFHLQTILHKCQNGDLLSTQVILNFLLTLGRTKDGAKVLQSANIFAFLKLLLSQLSLDDSCLRNSLSAQVKDVNLWGLGLGIVASLNHCLDDDISHNNVVSNTISFLSGHVPLVSSYLSTQSATTHQSKKRALSQKSQTSLSALSLTENILILLCILAKYHFPRDTGKKEVDSELREIIIHLLAFISKGSVKTGNASKWNSSFFCPAVIKEEVALNEKPPLICSKYGWFRFAASCTLSTAGVSVSPSAALSVVRRDKTSGDSDSIRQTRFTEILAVQIYRIAFLIMKFLCSQAKEAVKRAEELEFLDLAHFPELPMPDILHGLQDQVVCIVTEIFEANGSSTLNPETEKVCQLLLVTLETSLYMELCVSQSCGIRPVLGRLEDFCKGIKAMLQAIEKHSSFEPFVRSLTEITSLLYPGLLHNNLLM

SEQ ID NO: 161152 - protein, 1915 aa, Zea Mays
MASGRAATSSSILVNAAGTSKTLSASLWWDSFVVLSDDLDRATAGPSVPDALAKRIKSHHAWLRGSVSMFGKPNDASRSALEVGEVAVGERRLTVKPELKEAALRASKCLNLDEVQSYILVKRSSEVSPTIRDADAEEFLHLVSVRYYLERQCLLKCIRRIFVHASDVSDSTDPIRDEASLLISEEIDRKLISIIEDSFSTASSVKAEAEFTISSLEETLIEVNLILDILFLTFYDNFSRCNGRQWITLCSIFKDILCGSYGVGKFVASVEAKNSFHYAKAQLLLILIETLDFENLLRMIHDEVPLSGGCSAFSVGDILEMDVEISKLPEFSLVESGPLILAWAVFLCLVLSLPESNTNLEIDHTSYARRAFEFAPFNYLLGVLCSSIFRESDGPVSGYRGILRTFISAFIASYEKEHSSFDMISSILCEVYDGEESLCMQFWDKDSFVDGPIRSVLHMLEEEYPFQISELIRFLSAVCHGTWPANCVYNYLERMNGVTTIYTIPCVADGVGYGHQIESHHPVSIPSIEGITIPQGTHGYILKVLQEDTTLVRWEFPHSGVSFLLITLAQELHSCNYKKACDIIGLLYRMVSSNKDLCFALMHVDKSLAVQTSNNLGQIEKHVRIDIAKVFCNSIFKYVRDVNNADILSKTFGLLAEMMKCAPYHVFDAAFECNIFTSQLSSPSSDWLLSGALARMLFAAYEGNGDCSSLTSSVLDFTTQVLRKGADADDIISPLIVFSIKYIMINHVNWKHKECSRWKTTLRVFELVKSCLQVKPFSSKLGGIIWEILLYDSSVHGVLWSILSVLTRLLHDSYRSNYHGLKDIEDIQLVLCNGLDIIYHILSNLPEGMQVAAARAFSALCFIAYKAQPQLMENASFTSDVSEIRRLESNISCILDEDDKNNDCLVVAVFNLLTSAARYQPAFLISLIEQSTKSTDHNASTNDRDNRVLVTSKSNARLVDQILDYIDRSIELMNRSPLVLLSILDLLKALWESGIRFLFILEKLRSSVTFWDNLSRCIRATLDISPIDNIDAIDEKFSLRYHCQGKIFEIMSHELFLQGKLLTETSNTVQDDPKGQKEHKSGPCRISVVLKWFDNAILADLVSNLSSNAYKKELHHAKVAACLCIIHLITKLSTGDTGSLSFSFMKKIQIISTKLLQHHAFLALLSQYSLHGYSGEQELNNLVLNDLYYLIRGELEGRQISSGPFQELLSFLLGFRIFEHNPLEQLQNTYLMANDKFLFDVEHIHDELGVDLWTDSDKRSKEVAKKMLDIMSKANLMKYYADAKLSALMSFLKFLSVYKGAISNKNLDLPDGGISVAATQSAIKCACKSFESTVDSLLPQAHTDEVLFPLLSGQVELLLTLARILFHQAKNKKSSHLCPDIVLLMKTSGASTCLFVDLMPSAHALKQPVKTLLVLLLSSYEFMYSKVDIKDLPNDINIFGELALLSVSLLPILCKLAENRECSDLAVASMDLILKGSVPSNLWMPILQKHFHLQTILHKCQNGDLLSTQVILNFLLTLGRTKDGAKVLQSANIFAFLKLLLSQLSLDDSCLRNSLSAQVKDVNLWGLGLGIVASLNHCLDDDISHNNVVSNTISFLSGHVPLVSSYLSTQSATTHQSKKRALSQKSQTSLSALSLTENILILLCILAKYHFPRDTGKKEVDSELREIIIHLLAFISKGSVKTGNASKWNSSFFCPAVIKEEVALNEKPPLICSKYGWFRFAASCTLSTAGVSVSPSAALSVVRRDKTSGDSDSIRQTRFTEILAVQIYRIAFLIMKFLCSQAKEAVKRAEELEFLDLAHFPELPMPDILHGLQDQVVCIVTEIFEANGSSTLNPETEKVCQLLLVTLETSLYMELCVSQSCGIRPVLGRLEDFCKGIKAMLQAIEKHSSFEPFVRSLTEITSLLYPGLLHNNLLM

SEQ ID NO: 161153 - protein, 1886 aa, Zea Mays
MASGRAATSSSILVNAAGTSKTLSASLWWDSFVVLSDDLDRATAGPSVPDALAKRIKSHHAWLRGSVSMFGKPNDASRSALEVGEVAVGERRLTVKPELKEAALRASKCLNLDEVQSYILVKRSSEVSPTIRDADAEEFLHLVSVRYYLERQCLLKCIRRIFVHASDVSDSTDPIRDEASLLISEEIDRKLISIIEDSFSTASSVKAEAEFTISSLEETLIEVNLILDILFLTFYDNFSRCNGRQWITLCSIFKDILCGSYGVGKFVASVEAKNSFHYAKAQLLLILIETLDFENLLRMIHDEVPLSGGCSAFSVGDILEMDVEISKLPEFSLVESGPLILAWAVFLCLVLSLPESNTNLGPVSGYRGILRTFISAFIASYEVSYQKEHSSFDMISSILCEVYDGEESLCMQFWDKDSFVDGPIRSVLHMLEEEYPFQISELIRFLSAVCHGTWPANCVYNYLERMNGVTTIYTIPCVADGVGYGHQIESHHPVSIPSIEGITIPQGTHGYILKVLQEDTTLVRWEFPHSGVSFLLITLAQELHSCNYKKACDIIGLLYRMVSSNKDLCFALMHVDKSLAVQTSNNLGQIEKHVRIDIAKVFCNSIFKYVRDVNNADILSKTFGLLAEMMKCAPYHVFDAAFECNIFTSQLSSPSSDWLLSGALARMLFAAYEGNGDCSSLTSSVLDFTTQVLRKGADADDIISPLIVFSIKYIMINHVNWKHKECSRWKTTLRVFELVKSCLQVKPFSSKLGGIIWEILLYDSSVHGVLWSILSVLTRLLHDSYRSNYHGLKDIEDIQLVLCNGLDIIYHILSNLPEGMQVAAARAFSALCFIAYKAQPQLMENASFTSDVSEIRRLESNISCILDEDDKNNDCLVVAVFNLLTSAARYQPAFLISLIEQSTKSTDHNASTNDRDNRVLVTSKSNARLVDQILDYIDRSIELMNRSPLVLLSILDLLKALWESGIRFLFILEKLRSSVTFWDNLSRCIRATLDISPIDNIDAIDEKFSLRYHCQGKIFEIMSHELFLQGKLLTETSNTVQDDPKGQKEHKSGPCRISVVLKWFDNAILADLVSNLSSNAYKKELHHAKVAACLCIIHLITKLSTGDTGSLSFSFMKKIQIISTKLLQHHAFLALLSQYSLHGYSGEQELNNLVLNDLYYLIRGELEGRQISSGPFQELLSFLLGFRIFEHNPLEQLQNTYLMANDKFLFDVEHIHDELGVDLWTDSDKRSKEVAKKMLDIMSKANLMKYYADAKLSALMSFLKFLSVYKGAISNKNLDLPDGGISVAATQSAIKCACKSFESTVDSLLPQAHTDEVLFPLLSGQVELLLTLARILFHQAKNKKSSHLCPDIVLLMKTSGASTCLFVDLMPSAHALKQPVKTLLVLLLSSYEFMYSKVDIKDLPNDINIFGELALLSVSLLPILCKLAENRECSDLAVASMDLILKGSVPSNLWMPILQKHFHLQTILHKCQNGDLLSTQVILNFLLTLGRTKDGAKVLQSANIFAFLKLLLSQLSLDDSCLRNSLSAQVKDVNLWGLGLGIVASLNHCLDDDISHNNVVSNTISFLSGHVPLVSSYLSTQSATTHQSKKRALSQKSQTSLSALSLTENILILLCILAKYHFPRDTGKKEVDSELREIIIHLLAFISKGSVKTGNASKWNSSFFCPAVIKEEVALNEKPPLICSKYGWFRFAASCTLSTAGVSVSPSAALSVVRRDKTSGDSDSIRQTRFTEILAVQIYRIAFLIMKFLCSQAKEAVKRAEELEFLDLAHFPELPMPDILHGLQDQVVCIVTEIFEANGSSTLNPETEKVCQLLLVTLETSLYMELCVSQSCGIRPVLGRLEDFCKGIKAMLQAIEKHSSFEPFVRSLTEITSLLYPGLLHNNLLM

SEQ ID NO: 161154 - protein, 1258 aa, Zea Mays
MMKCAPYHVFDAAFECNIFTSQLSSPSSDWLLSGALARMLFAAYEGNGDCSSLTSSVLDFTTQVLRKGADADDIISPLIVFSIKYIMINHVNWKHKECSRWKTTLRVFELVKSCLQVKPFSSKLGGIIWEILLYDSSVHGVLWSILSVLTRLLHDSYRSNYHGLKDIEDIQLVLCNGLDIIYHILSNLPEGMQVAAARAFSALCFIAYKAQPQLMENASFTSDVSEIRRLESNISCILDEDDKNNDCLVVAVFNLLTSAARYQPAFLISLIEQSTKSTDHNASTNDRDNRVLVTSKSNARLVDQILDYIDRSIELMNRSPLVLLSILDLLKALWESGIRFLFILEKLRSSVTFWDNLSRCIRATLDISPIDNIDAIDEKFSLRYHCQGKIFEIMSHELFLQGKLLTETSNTVQDDPKGQKEHKSGPCRISVVLKWFDNAILADLVSNLSSNAYKKELHHAKVAACLCIIHLITKLSTGDTGSLSFSFMKKIQIISTKLLQHHAFLALLSQYSLHGYSGEQELNNLVLNDLYYLIRGELEGRQISSGPFQELLSFLLGFRIFEHNPLEQLQNTYLMANDKFLFDVEHIHDELGVDLWTDSDKRSKEVAKKMLDIMSKANLMKYYADAKLSALMSFLKFLSVYKGAISNKNLDLPDGGISVAATQSAIKCACKSFESTVDSLLPQAHTDEVLFPLLSGQVELLLTLARILFHQAKNKKSSHLCPDIVLLMKTSGASTCLFVDLMPSAHALKQPVKTLLVLLLSSYEFMYSKVDIKDLPNDINIFGELALLSVSLLPILCKLAENRECSDLAVASMDLILKGSVPSNLWMPILQKHFHLQTILHKCQNGDLLSTQVILNFLLTLGRTKDGAKVLQSANIFAFLKLLLSQLSLDDSCLRNSLSAQVKDVNLWGLGLGIVASLNHCLDDDISHNNVVSNTISFLSGHVPLVSSYLSTQSATTHQSKKRALSQKSQTSLSALSLTENILILLCILAKYHFPRDTGKKEVDSELREIIIHLLAFISKGSVKTGNASKWNSSFFCPAVIKEEVALNEKPPLICSKYGWFRFAASCTLSTAGVSVSPSAALSVVRRDKTSGDSDSIRQTRFTEILAVQIYRIAFLIMKFLCSQAKEAVKRAEELEFLDLAHFPELPMPDILHGLQDQVVCIVTEIFEANGSSTLNPETEKVCQLLLVTLETSLYMELCVSQSCGIRPVLGRLEDFCKGIKAMLQAIEKHSSFEPFVRSLTEITSLLYPGLLHNNLLM

SEQ ID NO: 161155 - protein, 698 aa, Zea Mays
MASGRAATSSSILVNAAGTSKTLSASLWWDSFVVLSDDLDRATAGPSVPDALAKRIKSHHAWLRGSVSMFGKPNDASRSALEVGEVAVGERRLTVKPELKEAALRASKCLNLDEVQSYILVKRSSEVSPTIRDADAEEFLHLVSVRYYLERQCLLKCIRRIFVHASDVSDSTDPIRDEASLLISEEIDRKLISIIEDSFSTASSVKAEAEFTISSLEETLIEVNLILDILFLTFYDNFSRCNGRQWITLCSIFKDILCGSYGVGKFVASVEAKNSFHYAKAQLLLILIETLDFENLLRMIHDEVPLSGGCSAFSVGDILEMDVEISKLPEFSLVESGPLILAWAVFLCLVLSLPESNTNLGPVSGYRGILRTFISAFIASYEVSYQKEHSSFDMISSILCEVYDGEESLCMQFWDKDSFVDGPIRSVLHMLEEEYPFQISELIRFLSAVCHGTWPANCVYNYLERMNGVTTIYTIPCVADGVGYGHQIESHHPVSIPSIEGITIPQGTHGYILKVLQEDTTLVRWEFPHSGVSFLLITLAQELHSCNYKKACDIIGLLYRMVSSNKDLCFALMHVDKSLAVQTSNNLGQIEKHVRIDIAKVFCNSIFKYVRDVNNADILSKTFGLLAEMMKCAPYHVFDAAFECNIFTSQLSSPSSDWLLSGALARMLFAAYEGNGDCSSLTSSVSDPWMARYICFET

SEQ ID NO: 161156 - protein, 206 aa, Zea Mays
MIHDEVPLSGGCSAFSVGDILEMDVEISKLPEFSLVESGPLILAWAVFLCLVLSLPESNTNLGPVSGYRGILRTFISAFIASYEVSYQKEHSSFDMISSILCEVYDGEESLCMQFWDKDSFVDGPIRYNYLERMNGVTTIYTIPCVADGVGYGHQIESHHPVSIPSIEGITIPQGTHGYILKVLQEDTTLVRWEDGLSFESWWRSS

SEQ ID NO: 161157 - protein, 537 aa, Zea Mays
MASGRAATSSSILVNAAGTSKTLSASLWWDSFVVLSDDLDRATAGPSVPDALAKRIKSHHAWLRGSVSMFGKPNDASRSALEVGEVAVGERRLTVKPELKEAALRASKCLNLDEVQSYILVKRSSEVSPTIRDADAEEFLHLVSVRYYLERQCLLKCIRRIFVHASDVSDSTDPIRDEASLLISEEIDRKLISIIEDSFSTASSVKAEAEFTISSLEETLIEVNLILDILFLTFYDNFSRCNGRQWITLCSIFKDILCGSYGVGKFVASVEAKNSFHYAKAQLLLILIETLDFENLLRMIHDEVPLSGGCSAFSVGDILEMDVEISKLPEFSLVESGPLILAWAVFLCLVLSLPESNTNLEIDHTSYARRAFEFAPFNYLLGVLCSSIFRESDGPVSGYRGILRTFISAFIASYEVSYQKEHSSFDMISSILCEVYDGEESLCMQFWDKDSFVDGPIRYNYLERMNGVTTIYTIPCVADGVGYGHQIESHHPVSIPSIEGITIPQGTHGYILKVLQEDTTLVRWEDGLSFESWWRSS

SEQ ID NO: 161158 - protein, 222 aa, Zea Mays
MDSNRVLGLVIRVLMDWGEKEHGMYNIDHMDVLPEVFKPGFMSKKTRQEAVNLFSCLDAFLKEEPLGPDDMWYCPGCKEHRQASKKLDLWRLPEILVVHLKRFSYSRYMKNKLDTFVNFPIHDLNMSKYVKPTSRGDQHPVYELYAVINHYGGLGGGHYSAYAKLVEEDNWYHFDDSHVSSVNEDEIRRSAAYVLFYRRVGGSSTAANGGPVDIEMVDSLET

SEQ ID NO: 161159 - protein, 265 aa, Zea Mays
MSGRDVLVIMAAGGGKSLCYQLPAVLRDGIALVVSPLLSLIQDQVMGLSALGIPAYMLTSTTNKEVEKFIYKTLDKGEGELKILYVTPEKISKSKRFMSKLEKCHHAGRLSLIAIDEAHCCSQWGHDFRPDYKNLGILKIQFPSVPMIALTATATSKVQMDLMEMLHIPRCIKFVSTVNRPNLFYKVSEKSPVGKVVIDEITKFISESYPNNESGIIYCFSRKECEQVAKELRERGISADYYHADMDIVNREKIHMRSICYSSQP

SEQ ID NO: 161160 - protein, 391 aa, Zea Mays
MGRKFVPLRWLACWHWEGPYYSNRGMEDEENIEGELLLVESQLHDIQGQIKTLLDRQEELYERQAQLKALLEASKLTRNTTINTSSVAPEDWSGSFPWDLEADDTRFNIFGISSYRSNQREIINAVMSGRDVLVIMAAGGGKSLCYQLPAVLRDGIALVVSPLLSLIQDQVMGLSALGIPAYMLTSTTNKEVEKFIYKTLDKGEGELKILYVTPEKISKSKRFMSKLEKCHHAGRLSLIAIDEAHCCSQWGHDFRPDYKNLGILKIQFPSVPMIALTATATSKVQMDLMEMLHIPRCIKFVSTVNRPNLFYKVSEKSPVGKVVIDEITKFISESYPNNESGIIYCFSRKECEQVAKELRERGISADYYHADMDIVNREKIHMRQWYNDSTC

SEQ ID NO: 161161 - protein, 257 aa, Zea Mays
MAATIQSVKARQIFDSRGNPTVEVDVFCSDGTFARAAVPSGASTGVYEALELRDGGSDYLGKGVSKAVNNVNSVIGPALIGKDPTAQTEIDNFMVQQLDGTKNEWGWCKQKLGANAILAVSLAVCKAGASIKRIPLYQHIANLAGNKQLVLPVPAFNVINGGSHAGNKLAMQEFMILPTGAASFKEAMKMGVEVYHHLKSVIKKKYGQDATNVGDEGGFAPNIQENKEGLELLKTAIEKAGYTGCHRNGCCCFGVLQ

SEQ ID NO: 161162 - protein, 421 aa, Zea Mays
MPPAIPSLVHPSRVRILHPGGSHIHGPVVYWMLRDQRLADNWALLHAAELAAASTPAAPLAIAFTLFPRPFLLGAHLRQLGFLLRGLRRLAADAHARGLPFFLLEGGPAELPSLVRRLGASALVADFSPLRPVREALDAVVQELLRDAANMAVHQVDAHNVVPVWTASGKLEYSAKTFRSKVNKVINEYLVEYPEVPQWAPWCMEQPKSVDWDALINSIFSEAENVPEINWCEPGESSAMEVLLGSKDGFLTKRIKNYDTGRNDPTKPHALSCLSPYLHFGHISAQRCALEAKKRRHLSPKSVDTFLEELIIRRELADNFCYYQPQYDSLAGAWEWARKTLTDHTGDKREHIYTREQLENAKTSDPLWNASQLEMVHHGKMHGFMRMYWAKKILEWTSQPEEALSIAIYLNDKFQDEYLFS

SEQ ID NO: 161163 - protein, 386 aa, Zea Mays
MPPAIPSLVHPSRVRILHPGGSHIHGPVVYWMLRDQRLADNWALLHAAELAAASTPAAPLAIAFTLFPRPFLLGAHLRQLGFLLRGLRRLAADAHARGLPFFLLEGGPAELPSLVRRLGASALVADFSPLRPVREALDAVVQELLRDAANMAVHQVDAHNVVPVWTASGKLEYSAKTFRSKVNKVINEYLVEYPEVPQWAPWCMEQPKSVDWDALINSIFSEAENVPEINWCEPGESSAMEVLLGSKDGFLTKRIKNYDTGRNDPTKPHALSCLSPYLHFGHISAQRCALEAKKRRHLSPKSVDTFLEELIIRRELADNFCYYQPQYDSLAGAWEWARKTLTDHTGDKREHIYTREQLENAKTSDPLWNASQLEMVHHGKMHGFMR

SEQ ID NO: 161164 - protein, 426 aa, Zea Mays
MPPAIPSLVHPSRVRILHPGGSHIHGPVVYWMLRDQRLADNWALLHAAELAAASTPAAPLAIAFTLFPRPFLLGAHLRQLGFLLRGLRRLAADAHARGLPFFLLEGGPAELPSLVRRLGASALVADFSPLRPVREALDAVVQELLRDAANMAVHQVDAHNVVPVWTASGKLEYSAKTFRSKVNKVINEYLVEYPEVPQWAPWCMEQPKSVDWDALINSIFSEAENVPEINWCEPGESSAMEVLLGSKDGFLTKRIKNYDTGRNDPTKPHALSCLSPYLHFGHISAQRCALEAKKRRHLSPKSVDTFLEELIIRRELADNFCYYQPQYDSLAGAWEWARKTLTDHTGDKREHIYTREQLENAKTSDPLWNASQLEMVHHGKMHGFMRMYWAKKILEWTSQPEEALSIAIYLNDKFSIEETHRWLHIP

SEQ ID NO: 161165 - protein, 422 aa, Zea Mays
MPPAIPSLVHPSRVRILHPGGSHIHGPVVYWMLRDQRLADNWALLHAAELAAASTPAAPLAIAFTLFPRPFLLGAHLRQLGFLLRGLRRLAADAHARGLPFFLLEGGPAELPSLVRRLGASALVADFSPLRPVREALDAVVQELLRDAANMAVHQVDAHNVVPVWTASGKLEYSAKTFRSKVNKVINEYLVEYPEVPQWAPWCMEQPKSVDWDALINSIFSEAENVPEINWCEPGESSAMEVLLGSKDGFLTKRIKNYDTGRNDPTKPHALSCLSPYLHFGHISAQRCALEAKKRRHLSPKSVDTFLEELIIRRELADNFCYYQPQYDSLAGAWEWARKTLTDHTGDKREHIYTREQLENAKTSDPLWNASQLEMVHHGKMHGFMRMYWAKKILEWTSQPEEALSIAIYLNDKIPNLLRPPL

SEQ ID NO: 161166 - protein, 115 aa, Zea Mays
MQKNLPSELDDISGWTEDLFTARKSAINLLGVIALSKGPPVASAASKRKKGDKNKGKSEMSSIGELLVIPFLSKFPIPSHGEDASSVAVQNYFGVLMAYGGLQDFLSEKKDLTIT

SEQ ID NO: 161167 - protein, 164 aa, Zea Mays
MSLCMKGYRVISIDVPQVWNHHEWIHSFEKFLDSMNIHHVHIYGTSLGGFLAQIFAEHRPRRVKSLVLSNTFLETHKFAAAMPWSPVVNWTPSFLLKRYLLTGIRDGPHEPFIADSVDFVVGQVETLSRDDLSSRLMLNVNVASVGSLMLPDSLITIMDVSYLL

SEQ ID NO: 161168 - protein, 93 aa, Zea Mays
MSLCMKGYRVISIDVPQVWNHHEWIHSFEKFLDSMNIHHVHIYGTSLGGFLAQIFAEHRPRRVKSLVLSNTFLETHKFAAAMPWSPVNPRWSP

SEQ ID NO: 161169 - protein, 63 aa, Zea Mays
MEEVVHALATGQASIDAIMKQPVKVYKWDMDETLILLMSLLVGSYARDFEGLKDHEKSTQTRK

SEQ ID NO: 161170 - protein, 71 aa, Zea Mays
MSSCSNRRRSMCCSKLVVGLGARLLAIALRIRRREFHLAVTTSWSFGTSTNRCPAALLCGAPYFLPSELPK

SEQ ID NO: 161171 - protein, 624 aa, Zea Mays
MLLSVCASSLDFDGALQVMELLKEAGLKPDCKLYTTLISTCAKCGKVDAMFEVFYEMVSAGIEPNVNTYSALIDGCARAGQVAKAFGVYGIMSSKKVKPDRVVFNSLISACGESGALARAFDVLSEMTAESSESKGWKPIVPDHVTVGALMKTCILAGQADRAREVYKMLQEYNIKGTPEVYTIALRSCSLTGDLGFALKIYEDMNRIGVKPDEMFLSALVDVAGHARRADAAFEIMKDARAKGLLVGTIAYSSLMGACCNADDWKKALQLYEEIKSIKLTPSVSMMNALITSLCDGDQVLKAVDILNEMNILGVHPNEITYSVLFVACERNGEAQLGLDLFEQLKMDGIDINPTIIGSLTGLCLQMFNIDFSLGNIIVNFSSGKPQIDNKWTSSAVMVYREAVSAGLLPSSDVLSQVLGCLRLPHGSSLKSTFIENMGVSCDIPQYPNINSLFEGFGEYDIRAFSILEEAASLGAVASISIKETRIVIDARKLKIFTAEVSLLRTLRSLKHRLAAGSRLPNVTILLPTEKKQVDIDEKEKTLKLAGRIGQAVGSLLRRLGISYQGEESHGRMRINGLTIRRWFNPKLNSKSSAAGPADLLPLPSRLAKGIAGQQRDIRNLSLE

SEQ ID NO: 161172 - protein, 384 aa, Zea Mays
MEQNGLLDMRKIHHASFFSMCKKQRAVLEALRFCRFIGNPKISTFNMLLSVCASSLDFDGALQVMELLKEAGLKPDCKLYTTLISTCAKCGKVDAMFEVFYEMVSAGIEPNVNTYSALIDGCARAGQVAKAFGVYGIMSSKKVKPDRVVFNSLISACGESGALARAFDVLSEMTAESSESKGWKPIVPDHVTVGALMKTCILAGQADRAREVYKMLQEYNIKGTPEVYTIALRSCSLTGDLGFALKIYEDMNRIGVKPDEMFLSALVDVAGHARRADAAFEIMKDARAKGLLVGTIAYSSLMGACCNADDWKKALQLYEEIKSIKLTPSVSMMNALITSLCDGDQVLKAVDILNEMNILGVHPNEITYSVLFVACESTTRFGFV

SEQ ID NO: 161173 - protein, 238 aa, Zea Mays
MDGIDINPTIIGSLTGLCLQMFNIDFSLGNIIVNFSSGKPQIDNKWTSSAVMVYREAVSAGLLPSSDVLSQVLGCLRLPHGSSLKSTFIENMGVSCDIPQYPNINSLFEGFGEYDIRAFSILEEAASLGAVASISIKETRIVIDARKLKIFTAEVSLLRTLRSLKHRLAAGSRLPNVTILLPTEKKQVDIDEKEKTLKLAGSWLSPEAIRNFIPGGGISWEDEDQWPHDKEVVQSKTE

SEQ ID NO: 161174 - protein, 403 aa, Zea Mays
MTAESSESKGWKPIVPDHVTVGALMKTCILAGQADRAREVYKMLQEYNIKGTPEVYTIALRSCSLTGDLGFALKIYEDMNRIGVKPDEMFLSALVDVAGHARRADAAFEIMKDARAKGLLVGTIAYSSLMGACCNADDWKKALQLYEEIKSIKLTPSVSMMNALITSLCDGDQVLKAVDILNEMNILGVHPNEITYSVLFVACERNGEAQLGLDLFEQLKMDGIDINPTIIGSLTGLCLQMFNIDFSLGNIIVNFSSGKPQIDNKWTSSAVMVYREAVSAGLLPSSDVLSQVLGCLRLPHGSSLKSTFIENMGVSCDIPQYPNINSLFEGFGEYDIRAFSILEEAASLGAVASISIKETRIVIDARKLKIFTAEVSLLRTLRSLKHRLAAVPTQDKWTWCEKQ

SEQ ID NO: 161175 - protein, 494 aa, Zea Mays
MEQNGLLDMRKIHHASFFSMCKKQRAVLEALRFCRFIGNPKISTFNMLLSVCASSLDFDGALQVMELLKEAGLKPDCKLYTTLISTCAKCGKVDAMFEVFYEMVSAGIEPNVNTYSALIDGCARAGQVAKAFGVYGIMSSKKVKPDRVVFNSLISACGESGALARAFDVLSEMTAESSESKGWKPIVPDHVTVGALMKTCILAGQADRAREVYKMLQEYNIKGTPEVYTIALRSCSLTGDLGFALKIYEDMNRIGVKPDEMFLSALVDVAGHARRADAAFEIMKDARAKGLLVGTIAYSSLMGACCNADDWKKALQLYEEIKSIKLTPSVSMMNALITSLCDGDQVLKAVDILNEMNILGVHPNEITYSVLFVACERNGEAQLGLDLFEQLKMDGIDINPTIIGSLTGLCLQMFNIDFSLGNIIVNFSSGKPQIDNKWTSSAVMVYREAVSAGLLPSSDVLSQVLGCLRLPHGSSLKSTFIENMGVLIKVAWLL

SEQ ID NO: 161176 - protein, 150 aa, Zea Mays
MVAVAQCEVLHEHGIIIVKTLRTSKAMYDSNLAPHLTQGSHWLSEPCVSGRMTVDEMNHKAGNFPCAHTVHTEKQAYSVITPWISPDIPLYVSRPEEVSCATPTANSSIKKDTSLPVMPHSVSQGQDNSKYLSNRTGRVAGLPYQFLSLS

SEQ ID NO: 161177 - protein, 216 aa, Zea Mays
MAERGRSFPHAMDAPPPAPVAWTQAPARRGQHVQCAPPRDARPPCCAASPSLPSSSLFSTTPIDCSTKRLRGASYHKQHPMALLPPWSTCCKFCLVPLVVRLEPGVRSPSATASTPRRPCTCVASRAETLHATASPGSPLHRVLRWVCAALRVVVETLASRCRASRTPRPTRRLNHGRMRNSTWVSARLFALEKLWFLFYLRFSQWRKYVCENIIV

SEQ ID NO: 161178 - protein, 163 aa, Zea Mays
MAAPPPSYPAALKPEIGPDGLARDSPVIAYTEKVILEEQLQLKKYIQENYSKIRDVEKELESLTLEMKLTAGPKKAALEHLRKKIEISTEKIRLAKVKEEHAKKTWEVAAQVVKDEEDAKQKLCDDLNHLVQESAASQYARLEELKKRLESLNPIRDSVNVSM

SEQ ID NO: 161179 - protein, 152 aa, Zea Mays
MAAPPPSYPAALKPEIGPDGLARDSPVIAYTEKVILEEQLQLKKYIQENYSKIRDVEKELESLTLEMKLTAGPKKAALEHLRKKIEISTEKIRLAKVKEEHAKKTWEVAAQVVKDEEDAKQKLCPGECCFPICKIGGAEETFRISKSHKGFC

SEQ ID NO: 161180 - protein, 180 aa, Zea Mays
MGTFMILLSCFCWSAFFILQSYTLRSYPSELSLTTLICAMGATESGAVALVMERDTKAWSIGFDMRLFTAIYSGIMCSGVAYYVQGIVIKDRGPVFVTAFSPLCMILVTVLGSFILSEVVTLGRLIGATVIVVGLYALIWGKNKDHVKSQNSFDKHDTFELPFSTSAVNNTTGPVLATSI

SEQ ID NO: 161181 - protein, 78 aa, Zea Mays
MPVHEPYPSVVLNEQVHQMLHNSRAELDVPSAASSLQGVAICLLMRFQLQNWWCHFLMDNPKQPGAYGGPQRIFLCVG

SEQ ID NO: 161182 - protein, 321 aa, Zea Mays
MPCSRRCSLPGARAHRPATLRVLPPRLSASGIPAAAAAYLQAAAAAIAAGNAAKHRPCRCGRPSPGRRDHPPPHCCRNTSTMACAISQHPHSGLAPSGSRRPCSPPSVRRGRPRCSSALARFPSHGATAPHRRHPRQRLALLIRCRLPIHVRAGACAAHPSLLRLYSVARIRAAAASSDCAVTEQCLLTLLLSPASPIPCQVRRRPLPGWNRPVALPFLAFVGSVAAAAFSAGSTLLRPSRLDQPSLWLDRVSPSGSVAAVAFPAGSDIPLLFCRGRGHLDQRSRVRCCRPPWRGSLTSGRSKKQEGRPAGALLLCRPADR

SEQ ID NO: 161183 - protein, 93 aa, Zea Mays
MASRMSWRKRGRAAERSERGRSARRDGELLDERPGEQEAARGNRARAMGASRPSERREIDAVGKSRSAGRAPAEEIEAERLGERKEITTLGGV

SEQ ID NO: 161184 - protein, 126 aa, Zea Mays
MLCASSGSVCLYFNCLRAEISEAFSPALSSDHSAQQACGDSFVRGAAVRAIPLVCGDQAGRLSTSPWSDRSRGQIHRRLSNLCLLRAALRKHQDLELPTEGVKIQDEVVVEEEFAPVHVHQVDGGI

SEQ ID NO: 161185 - protein, 82 aa, Zea Mays
MHQLFSTQLLSPNASNKVIKILKQQGGGKCIGANAHNSYQPLFRYLLRPSIFRLIHQHYLVEKLTLSNILWSTQFWSSVSRD

SEQ ID NO: 161186 - protein, 290 aa, Zea Mays
MSSGLILKLFLLALIWNTLGMNLCNASVTLTSATVASATGNSTPVITFCLALLLRMEVVKLRSVSGIAKVTGVALCLAGALVIALYTGPSLSPVNRHHRASGGAHGFKAPTRGGTWVTGTFLMLLSNVTWSLWTVLQGALLKEYPNKLLVTTSQCLFSTAQSFVVAAVAERDFSKWALKLDVSLIAVAYTIKGPVFLAVWNPLCFVLTIFCSSFFLGENVHLGSIVGGILLVCGLYSVLWGKTLEVHQTVESGDNTVGEVQNGQEEKNHQQKVLEKGRQEEASMTAPGVV

SEQ ID NO: 161187 - protein, 855 aa, Zea Mays
MEVESSLSGQASEYEEAESDIYSGGAGYDSFTWMQQHENGTGPVIDSSLFSSYTPASSIGNYQGQHATQNKSFYPVNQHNGPLILNGSSDMLGTNGRANQTDLPSWNSVIELDEPGQMPHLQFPVPSDQGATTEGLGVDYLTFDEVYSDGLSLNDIGAAGTHGKSYLQFSSATGDLSATENSLPQQNDGSLEEAAIGYPFLKTQSSNLSDILKDSFKKTDSFTRWMSKELPEVEDSQIHSSSGGFWSTGEANDIIEASSHEPLDQFTVSPMLSQEQLFSIVDFAPNWTYVGSKTKILVAGNILNDSQITERCKWSCMFGEVEVPAKILADGTLICYSPQHKLGRVPFYITCSNRLACSEVREFEFRPTVSQYMDAPSPHGETNKVYFQIRLDKLLSLEPDEYQATVSNPSLEMIDLSKKISSLMASNDEWSNLLKLAVDNEPSTADHHDQFVEKLIKEKLHVWLLNKVGMGGKGPSVLDDEGQGVLHLAAALGYDWAIRPTLAAGVNINFRDVHGWTALHWAAICGRERTVVALIALGAAPGALTDPTPDFPGSTPADIASANGQKGISGFLAESSLTSHLQALNLKEANMAQISGLPGIGDVTERDSLHPPSGDSLGPVRNAAQAAARIYQVFRVQSFQRKQAAQSEDDKGGMSDERALSLLSVKPPKSGQLDPLHSAATRIQNKFRGWKGRKEFLLIRQRIVKIQAHVRGQQVRKHYRKIVWSVGIVEKVILRWRRRGAGLRGFRSTEGSVESSNGGTSSSSIQDKPSGDDYDFLQEGRKQTEERLQKALARVKSMAQYPEARDQYHRILTVVSKMQESQAMEEKMLEESAGMDFMSEFKELWDDDTPIPGYI

SEQ ID NO: 161188 - protein, 1007 aa, Zea Mays
MATTEARRLAVVPQLDIEQILKEAQHRWLRPAEICEILKNYRNFRIAPEPPNRPPILRYFRKDGHNWRKKNDQKTVKEAHERLKSGSIDVLHCYYAHGEENINFQRRTYWMLEEDYMHIVLVHYLETKGGKSSRARGNNIIQEAAVGSPSQIMEVESSLSGQASEYEEAESDIYSGGAGYDSFTWMQQHENGTGPVIDSSLFSSYTPASSIGNYQGQHATQNKSFYPVNQHNGPLILNGSSDMLGTNGRANQTDLPSWNSVIELDEPGQMPHLQFPVPSDQGATTEGLGVDYLTFDEVYSDGLSLNDIGAAGTHGKSYLQFSSATGDLSATENSLPQQNDGSLEEAAIGYPFLKTQSSNLSDILKDSFKKTDSFTRWMSKELPEVEDSQIHSSSGGFWSTGEANDIIEASSHEPLDQFTVSPMLSQEQLFSIVDFAPNWTYVGSKTKILVAGNILNDSQITERCKWSCMFGEVEVPAKILADGTLICYSPQHKLGRVPFYITCSNRLACSEVREFEFRPTVSQYMDAPSPHGETNKVYFQIRLDKLLSLEPDEYQATVSNPSLEMIDLSKKISSLMASNDEWSNLLKLAVDNEPSTADHHDQFVEKLIKEKLHVWLLNKVGMGGKGPSVLDDEGQGVLHLAAALGYDWAIRPTLAAGVNINFRDVHGWTALHWAAICGRERTVVALIALGAAPGALTDPTPDFPGSTPADIASANGQKGISGFLAESSLTSHLQALNLKEANMAQISGLPGIGDVTERDSLHPPSGDSLGPVRNAAQAAARIYQVFRVQSFQRKQAAQSEDDKGGMSDERALSLLSVKPPKSGQLDPLHSAATRIQNKFRGWKGRKEFLLIRQRIVKIQAHVRGQQVRKHYRKIVWSVGIVEKVILRWRRRGAGLRGFRSTEGSVESSNGGTSSSSIQDKPSGDDYDFLQEGRKQTEERLQKALARVKSMAQYPEARDQYHRILTVVSKMQESQAMEEKMLEESAGMDFMSEFKELWDDDTPIPGYI

SEQ ID NO: 161189 - protein, 312 aa, Zea Mays
MLVSLSDIQNPDKRPAIVSIDIPSGWHVEEGDVDGGIKPDMLVSLTAPKLCAKKFTGPHHFLGGRFVPPPILNKYGLQLPPYPGTSMCVRIGKAPSVEISSLRENYISPELLESQVMSDPFDQFLKWFDEAVTAGLREPNAMALTTANKEGKPSSRMVLLKGVDKQGFVWYTNYGSRKAHDLCENPNAALLFYWNEMNRQVRVEGSVEKVPEAESDKYFHSRPRGSQLGAIVSKQSTVIAGREVLQQDYKKLEQKYSDGSLIPKPEYWGGYKLTPTLFEFWQGQQSRLHDRLQYSQREVDGSTVWHIERLSP

SEQ ID NO: 161190 - protein, 203 aa, Zea Mays
MLVSLSDIQNPDKRPAIVSIDIPSGWHVEEGDVDGGIKPDMLVSLTAPKLCAKKFTGPHHFLGGRENYISPELLESQVMSDPFDQFLKWFDEAVTAGLREPNAMALTTANKEGKPSSRMVLLKGVDKQGFVWYTNYGSRKAHDLCENPNAALLFYWNEMNRQVRVEGSVEKVPEAESDKYFHSRPRGSQLGAIVSKQELDSKT

SEQ ID NO: 161191 - protein, 448 aa, Zea Mays
MVVIQGGIGPAGLSAEDLHVLDLKQQRPRWHRVVVQGPGPWKTTPGRCMALDTTAKPYEWRKLEPEGEGPPPCMEMETEVSARDVMAMKDHIDLEASQSQQPRKLPPKDLKEIAGSFWLVASMFSKKWQNWRGKQYNFGECKLCFCLSASVAISDLNHTLLQGSTNVGKSAFISAMLRTMAYKDPVAATAQKYKPIQSVVPGTTLGPIQIESFLGGGWHLACEPVEPVRRGSAAAVPDQRMLAAVASRTRNKSATTVLSLAMPFLLSAASASTTTNPHPLSPFPRSQNNSRVHRLQLPARRLPSFPAVAPGASFAPLPQRLGMASLAASAAAAAEVTHLTQRDAAEIDEQLMGPLGFSVDQLMELAGLSVAAALAEVYKLNEHARVLVICGPGNNGGDGLVAARHLYHFGYRPSICYPKRTPKPLYSGLVTQEHPDHPLIILSKCLFH

SEQ ID NO: 161192 - protein, 639 aa, Zea Mays
MVVIQGGIGPAGLSAEDLHVLDLKQQRPRWHRVVVQGPGPWKTTPGRCMALDTTAKPYEWRKLEPEGEGPPPCMEMETEVSARDVMAMKDHIDLEASQSQQPRKLPPKDLKEIAGSFWLVASMFSKKWQNWRGKQYNFGECKLCFCLSASVAISDLNHTLLQGSTNVGKSAFISAMLRTMAYKDPVAATAQKYKPIQSVVPGTTLGPIQIESFLGGGWHLACEPVEPVRRGSAAAVPDQRMLAAVASRTRNKSATTVLSLAMPFLLSAASASTTTNPHPLSPFPRSQNNSRVHRLQLPARRLPSFPAVAPGASFAPLPQRLGMASLAASAAAAAEVTHLTQRDAAEIDEQLMGPLGFSVDQLMELAGLSVAAALAEVYKLNEHARVLVICGPGNNGGDGLVAARHLYHFGYRPSICYPKRTPKPLYSGLVTQLESLSIPFIPVEDLPNELPREFDVIVDAMFGFSFHGTPRPPFDHLIQMLVSLSDIQNPDKRPAIVSIDIPSGWHVEEGDVDGGIKPDMLFLKWFDEAVTAGLREPNAMALTTANKEGKPSSRMVLLKGVDKQGFVWYTNYGSRKAHDLCENPNAALLFYWNEMNRQVRVEGSVEKVPEAESDKYFHSRPRGSQLGAIVSKQELDSKT

SEQ ID NO: 161193 - protein, 66 aa, Zea Mays
MGVCFKGRARAEAEEEEVAAAIDLEVEAEAGVLGEQWDSGIAINETVDLSELGFRVDEMGVLHDLP

SEQ ID NO: 161194 - protein, 152 aa, Zea Mays
MEGVSSLNQPLINDDRQPVPSSIAKGDQIQGLLSGEWTNERHSSYISSMEASFVEQLRSGSKAIQEGLCQSMRIPRDDARSHDVPESPWVVVRRFRPRGVHHGDGMEVEPLVDGYGSEVTDQNFPEEGIQSSNGACKRQKSTPGNASNGQGT

SEQ ID NO: 161195 - protein, 528 aa, Zea Mays
MSHNNLGGGQQIPYNLPNKKLERLNLAENQFSGSVPYSISTMPNIKYLNLNHNQLSGDITDIFSNLPSLTTVDLSSNSLTGNLPQSFTSLSSLKTLYLQNNQLTGSINVLANLPLDDLNVANNRFTGWIPEELKKINSLQTDGNSWSTGSAPPPPPFTAPPRSRNRRKSPGQHSNGSNNSSSGGSSSIGAGAIAGIIISVLVVGALVAFFLIKRNKRKSAMPEHYEQRQPFNSFPSNEVKNMKPIEEATTVEVESLPSPAAVNLKPPPKIERNQSFDDDDFANKPVAMKSNAAAAPVKATVYSVADLQMATDSFNMDNLIGEGTLGRVYKAQFSDGKVLAVKKLNSTTLPRQSSDDFYELVSNISKLHHPNLSELVGYCMEHGQHLLVYDFHRNGSLHDMLHLSDDYNKPLSWNSRVKIALGSARALEHLHEICSPSIIHKNFKSSNILLDTELNPHISDAGHSSFVPDAEFQASDQGSGYSAPEVEMSGQYTLKSDVYSFGVVMLELLTGRKPFDSSRPRSEQSLVR

SEQ ID NO: 161196 - protein, 285 aa, Zea Mays
MGDDQILQISKDSGGCRVLESFLGSSATAKRKFNVFGKLQGHYGDIAMNPSGSFLVEKCFTASNFSHKEAIVAELLAVQSDLSKTRHGFHLLKKLDVDRYARRPEQWRASRTSKETTQKKFEAEFGSNSQSTGQIVKEKFSQSRTKKRKQKEKVDKITEDARSNKPDFSQKGNSKRPKSGNATSENPLSEGASASMVFLKGSVKRKSPGFLSDKPSFKKQKPHKPDSGRPDGKRFVRDSDTSAPFVKNAGKQKQSIAELADLAGKEKLTASEVRKLLKPEMSGKS

SEQ ID NO: 161197 - protein, 463 aa, Zea Mays
MDEIVTLLEESAYSHLLEVIVEVAPDELRNGMLARSLKGALFAISSHHCGNYVVQAFISSTKTSDQMNQIWEELGPNMKELLELGKTGVVASMLAACQRLETYRLESSQALAAALSSDSESTKSIVARILFLENYLHERSNWKWILGAKMSILGCLMLQSIFQYPHQYIRPYVASLLAMGDDQILQISKDSGGCRVLESFLGSSATAKRKFNVFGKLQGHYGDIAMNPSGSFLVEKCFTASNFSHKEAIVAELLAVQSDLSKTRHGFHLLKKLDVDRYARRPEQWRASRTSKETTQKKFEAEFGSNSQSTGQIVKEKFSQSRTKKRKQKEKVDKITEDARSNKPDFSQKGNSKRPKSGNATSENPLSEGASASMVFLKGSVKRKSPGFLSDKPSFKKQKPHKPDSGRPDGKRFVRDSDTSAPFVKNAGKQKQSIAELADLAGKEKLTASEVRKLLKPEMSGKS

SEQ ID NO: 161198 - protein, 105 aa, Zea Mays
MERGRGDSQGGHARSVDVVVRARMRAGAACTRGHWQGGAASGEGGRAVAPQAVVGAWERKRRVGTEAEAVTEAELRVLVRERGRREGEPELKRRPVRRYLKIVYI

SEQ ID NO: 161199 - protein, 128 aa, Zea Mays
MSAVEYSQCPTNSQTSSTVCLVNGCDGVQWVPHMLCPMVYMQVRYNKLIFDGLHVDHHILICLMSDGLSVAVGYNEFHIGQYSPGFCSFAQYTLSHPKISRFHNQYIFTNTYIHKYIHPQPQTNTDIF

SEQ ID NO: 161200 - protein, 202 aa, Zea Mays
MAMEGPVFCRPAMQAKLPAAALINNSLTKSGQLGTALFGAISKYRNISRFISPISQTSTKNIGPCCSFSSSSDGNGYMAGNSSESDEDYVNSTVLEAVEVRSGSEGYVIKMRDGKNLRCVHSNFQGRNIPENTPQPAIVLRIEDGSGTLLPIIVLEMPSVLLMAAIRNVHIARPTIYQVVKEMIDKMGYETTSPSIFGLQMP

SEQ ID NO: 161201 - protein, 270 aa, Zea Mays
MLAVVRPPLCDSSLFRIKRKVSSPTSFSISFSNKSTINTPLRSLFSPPLNLRSCSASSAPRSGDHCSLMAMEGPVFCRPAMQAKLPAAALINNSLTKSGQLGTALFGAISKYRNISRFISPISQTSTKNIGPCCSFSSSSDGNGYMAGNSSESDEDYVNSTVLEAVEVRSGSEGYVIKMRDGKNLRCVHSNFQGRNIPENTPQPAIVLRIEDGSGTLLPIIVLEMPSVLLMAAIRNVHIARPTIYQVVKEMIDKMGYETTSPSIFGLQMP

SEQ ID NO: 161202 - protein, 329 aa, Zea Mays
MAMEGPVFCRPAMQAKLPAAALINNSLTKSGQLGTALFGAISKYRNISRFISPISQTSTKNIGPCCSFSSSSDGNGYMAGNSSESDEDYVNSTVLEAVEVRSGSEGYVIKMRDGKNLRCVHSNFQGRNIPENTPQPAIVLRIEDGSGTLLPIIVLEMPSVLLMAAIRNVHIARPTIYQVVKEMIDKMGYEVKLVRVNKRIQEAYCAELYLTKVNDPTDNITFDLRPSDAINIAVRCKVPVQVHRSLAYSDGIRPVEPARMAVTAGLSDGLLFTELDRPDGQPCVEAQEFGLVRNMLIAAIEERYKDAGLQVEHLVMILPSAVLSYLSEC

SEQ ID NO: 161203 - protein, 558 aa, Zea Mays
MVGSESQSASVPQVASNAGSTGPASALSAAADCKTLAEKAIAALPPDLSAQANDPKRKARSQDPGWQFGWWPDTTKKDFVQCVFCKKIVPSGIKRFKQHLAGGFGDTMKCARVPEVVSKEMHTYLRRNMRVVITSDGDEGEEEGEQIDVGPLPSSGTKTKQTKKQIAQASMSSFVVAAPIKPNTQKASKSVSAMLCKTPEEVVAERHKNRTSQTTLEHCTKKGTEAKQIVDDHVADFLYENKIPLNVVNSRSWQIMMESIGQYGPGYRGPSYYEARVPWLERAVKRTSTLRAKHEEAWKEYGCSIMSDGRTDIRQRHLINFLANSPAGTYFLGSVDASSEIANANMLADPLEKQIIKVGKEHVVQVITDNGANFKAAGRILMDRIPHLFWTPCAAHCLDLLLEDIGKIKEFNTCINMAKKVSRFLYKHGRLPTSQPNERKASDEWNGSKFALVKEGEQAENIVLSVSFWQTLENCLRASQPLLIALRIADGDETPAAPEIMAAMDKAKATIQESLKEKPRLLAEVISCFEKRWDTQMEQKLYGAALYLNPVMRMSKQK

SEQ ID NO: 161204 - protein, 83 aa, Zea Mays
MPYIGETKVEVDLLSDGVKEGAESGKTDSELKVLPPWMIKDGMNLTKEQRGEIIAPQKLEKSDAGDDKKHDLKDDDCFRSAQE

SEQ ID NO: 161205 - protein, 128 aa, Zea Mays
MTENIPAPEFGSLQTWERANIGAFAIGDPAAADSSRNSQGQYGTPMPYIGETKVEVDLLSDGVKEGAESGKTDSELKVLPPWMIKDGMNLTKEQRGEIIAPQKLEKSDAGDDKKHDLKDDDCFRSAQE

SEQ ID NO: 161206 - protein, 240 aa, Zea Mays
MLCICDVVRYRIHRMKKKLKDELDSRNTIQHYICPSCNKRYSAFDALQLVSYTDEYFHCETCNGELVAESDKLASEEMGDGDDNVRKRRREKLKDMQQRIEEQLKPLVAQLDRVKNIPAPEFGSLQTWERANIGAFAIGDPAAADSSRNSQGQYGTPMPYIGETKVEVDLLSDGVKEGAESGKTDSELKVLPPWMIKDGMNLTKEQRGEIIAPQKLEKSDAGDDKKHDLKDDDCFRSAQE

SEQ ID NO: 161207 - protein, 302 aa, Zea Mays
MRAACRLQRRGGVRGGAAGGVRTEGRPWVREEDLAKALKLHSKQLRRILRFFEEEKLVTRDHRKEICDVVRYRIHRMKKKLKDELDSRNTIQHYICPSCNKRYSAFDALQLVSYTDEYFHCETCNGELVAESDKLASEEMGDGDDNVRKRRREKLKDMQQRIEEQLKPLVAQLDRVKNIPAPEFGSLQTWERANIGAFAIGDPAAADSSRNSQGQYGTPMPYIGETKVEVDLLSDGVKEGAESGKTDSELKVLPPWMIKDGMNLTKEQRGEIIAPQKLEKSDAGDDKKHDLKDDDCFRSAQE

SEQ ID NO: 161208 - protein, 241 aa, Zea Mays
MNSIEPFNRLVRLAARAFYDDVSMKGDNQPKTSRGDNRGMAVVVLDALTRRPWVREEDLAKALKLHSKQLRRILRFFEEEKLVTRDHRKESAKNAKAHNAAAANDGQPIAKEGEEKVKLHTHSYCCLDYAQICDVVRYRIHRMKKKLKDELDSRNTIQHYICPSCNKRYSAFDALQLVSYTDEYFHCETCNGELVAESDKLASEEMGDGDDNVRKRRREKLKDMQQRIEVSIRYLWYSSKF

SEQ ID NO: 161209 - protein, 270 aa, Zea Mays
MNSIEPFNRLVRLAARAFYDDVSMKGDNQPKTSRGDNRGMAVVVLDALTRRPWVREEDLAKALKLHSKQLRRILRFFEEEKLVTRDHRKESAKNAKAHNAAAANDGQPIAKEGEEKVKLHTHSYCCLDYAQEQLKPLVAQLDRVKNIPAPEFGSLQTWERANIGAFAIGDPAAADSSRNSQGQYGTPMPYIGETKVEVDLLSDGVKEGAESGKTDSELKVLPPWMIKDGMNLTKEQRGEIIAPQKLEKSDAGDDKKHDLKDDDCFRSAQE

SEQ ID NO: 161210 - protein, 368 aa, Zea Mays
MNSIEPFNRLVRLAARAFYDDVSMKGDNQPKTSRGDNRGMAVVVLDALTRRPWVREEDLAKALKLHSKQLRRILRFFEEEKLVTRDHRKESAKNAKAHNAAAANDGQPIAKEGEEKVKLHTHSYCCLDYAQICDVVRYRIHRMKKKLKDELDSRNTIQHYICPSCNKRYSAFDALQLVSYTDEYFHCETCNGELVAESDKLASEEMGDGDDNVRKRRREKLKDMQQRIEEQLKPLVAQLDRVKNIPAPEFGSLQTWERANIGAFAIGDPAAADSSRNSQGQYGTPMPYIGETKVEVDLLSDGVKEGAESGKTDSELKVLPPWMIKDGMNLTKEQRGEIIAPQKLEKSDAGDDKKHDLKDDDCFRSAQE

SEQ ID NO: 161211 - protein, 142 aa, Zea Mays
MNSIEPFNRLVRLAARAFYDDVSMKGDNQPKTSRGDNRGMAVVVLDALTRRPWVREEDLAKALKLHSKQLRRILRFFEEEKLVTRDHRKESAKNAKAHNAAAANDGQPIAKEGEEKVKLHTHSYCCLDYAQEVFFKFSLCTA

SEQ ID NO: 161212 - protein, 70 aa, Zea Mays
MQCIWAVVMSLCGMGAWKPRKIGHTVMAFPWFSYIRSELRSMPYLHVQWYLSISSALRLGSIKLPLALRF

SEQ ID NO: 161213 - protein, 61 aa, Zea Mays
MLSLFVGRNKVAPLCSGAGCWGLVLKCYELRTRQHKMLNVNALRPLKHYLHKDLMSFGQRP

SEQ ID NO: 161214 - protein, 407 aa, Zea Mays
MALALLSPSTPSHRILLRPIPFPSLPVARATSAGSFGLAFFCPLSRGSSSLQRTGAAGGVIDSAGEGSSEEPVAGWLSADLLRRISGAADADRVLDIVAESVEGAGAALGAPECNAIVSAAFDRGNIALALSVFEAMRSGFAGVGGWRWARPDVRTYALLVQRLAAAPRVADAIMIIDYVSRAGASSMDEVPFGIIVRCPTCMIAVAVVQPQDGTQVVSCSKCRYQYELFSGDITSIESEEVSMDISALEKALRFINMRKDGIPAAVHSIVIRSPSGTARTYRFATQNVTLPAQEGERVTISLAAPVNVYRDMGPLKVAARSQGFKPGEPMCLTNHINGQVSKLLRAPSKNKGTFFLSPYLLTCYSNCHCISCHRNNTKWSGPAKNSKASRKSSGYSCCTAKAFVSV

SEQ ID NO: 161215 - protein, 473 aa, Zea Mays
MALALLSPSTPSHRILLRPIPFPSLPVARATSAGSFGLAFFCPLSRGSSSLQRTGAAGGVIDSAGEGSSEEPVAGWLSADLLRRISGAADADRVLDIVAESVEGAGAALGAPECNAIVSAAFDRGNIALALSVFEAMRSGFAGVGGWRWARPDVRTYALLVQRLAAAPRVADAIMIIDYVSRAGASSMDEVPFGIIVRCPTCMIAVAVVQPQDGTQVVSCSKCRYQYELFSGDITSIESEEVSMDISALEKALRFINMRKDGIPAAVHSIVIRSPSGTARTYRFATQNVTLPAQEGERVTISLAAPVNVYRDMGPLKVAARSQGFKPGEPMCLTNHINGQVSKLLRAPSKNKGTFFLSPYLLVGALAFLASTDAASAFIDPSLPRLVTATAIASAAIGTTLNGVVLPKIQKLPEKAVDIVAVQQKLLSQYDILQSRLKELKQFAQKEVWMLARMCQLDNKIVAVGEPSYRCAQ

SEQ ID NO: 161216 - protein, 416 aa, Zea Mays
MALALLSPSTPSHRILLRPIPFPSLPVARATSAGSFGLAFFCPLSRGSSSLQRTGAAGGVIDSAGEGSSEEPVAGWLSADLLRRISGAADADRVLDIVAESVEGAGAALGAPECNAIVSAAFDRGNIALALSVFEAMRSGFAGVGGWRWARPDVRTYALLVQRLAAAPRVADAIMIIDYVSRAGASSMDEVPFGIIVRCPTCMIAVAVVQPQDGTQVVSCSKCRYQYELFSGDITSIESEEVSMDISALEKALRFINMRKDGIPAAVHSIVIRSPSGTARTYRFATQNVTLPAQEGERVTISLAAPVNVYRDMGPLKVAARSQGFKPGEPMCLTNHINGQVSKLLRAPSKNKGTFFLSPYLLVGALAFLASTDAASAFIDPSLPRLVTATAIASAAIGTTLNGVVLPKIQKKKQWI

SEQ ID NO: 161217 - protein, 522 aa, Zea Mays
MALALLSPSTPSHRILLRPIPFPSLPVARATSAGSFGLAFFCPLSRGSSSLQRTGAAGGVIDSAGEGSSEEPVAGWLSADLLRRISGAADADRVLDIVAESVEGAGAALGAPECNAIVSAAFDRGNIALALSVFEAMRSGFAGVGGWRWARPDVRTYALLVQRLAAAPRVADAIMIIDYVSRAGASSMDEVPFGIIVRCPTCMIAVAVVQPQDGTQVVSCSKCRYQYELFSGDITSIESEEVSMDISALEKALRFINMRKDGIPAAVHSIVIRSPSGTARTYRFATQNVTLPAQEGERVTISLAAPVNVYRDMGPLKVAARSQGFKPGEPMCLTNHINGQVSKLLRAPSKNKGTFFLSPYLLLPEKAVDIVAVQQKLLSQYDILQSRLKELKQFAQKEVWMLARMCQLDNKIVAVGEPSYRTRRDRVKRVRESLESTLLARIELMESYAKLCSMIEIEVEMDSDVIAAEAASSAERISEQIQQLMEIDSLEEQWRIQAEANDEAERLLSSDSSETYPAGRVM

SEQ ID NO: 161218 - protein, 220 aa, Zea Mays
MALALLSPSTPSHRILLRPIPFPSLPVARATSAGSFGLAFFCPLSRGSSSLQRTGAAGGVIDSAGEGSSEEPVAGWLSADLLRRISGAADADRVLDIVAESVEGAGAALGAPECNAIVSAAFDRGNIALALSVFEAMRSGFAGVGGWRWARPDVRTYALLVQRLAAAPRVADAIMIIDYVSRAGSFRNHCSLSNLHDSSCCCAASGWNSGCFLFKVSISI

SEQ ID NO: 161219 - protein, 301 aa, Zea Mays
MIRSPSGTARTYRFATQNVTLPAQEGERVTISLAAPVNVYRDMGPLKVAARSQGFKPGEPMCLTNHINGQVSKLLRAPSKNKGTFFLSPYLLVGALAFLASTDAASAFIDPSLPRLVTATAIASAAIGTTLNGVVLPKIQKLPEKAVDIVAVQQKLLSQYDILQSRLKELKQFAQKEVWMLARMCQLDNKIVAVGEPSYRTRRDRVKRVRESLESTLLARIELMESYAKLCSMIEIEVEMDSDVIAAEAASSAERISEQIQQLMEIDSLEEQWRIQAEANDEAERLLSSDSSETYPAGRVM

SEQ ID NO: 161220 - protein, 332 aa, Zea Mays
MELSMDISALEKALRFINMRKDGIPAAVHSIVIRSPSGTARTYRFATQNVTLPAQEGERVTISLAAPVNVYRDMGPLKVAARSQGFKPGEPMCLTNHINGQVSKLLRAPSKNKGTFFLSPYLLVGALAFLASTDAASAFIDPSLPRLVTATAIASAAIGTTLNGVVLPKIQKLPEKAVDIVAVQQKLLSQYDILQSRLKELKQFAQKEVWMLARMCQLDNKIVAVGEPSYRTRRDRVKRVRESLESTLLARIELMESYAKLCSMIEIEVEMDSDVIAAEAASSAERISEQIQQLMEIDSLEEQWRIQAEANDEAERLLSSDSSETYPAGRVM

SEQ ID NO: 161221 - protein, 163 aa, Zea Mays
MSVEFPSMLQTHDNWRAVEAIAQYGSGFKPPSYHELRELLLDKVKKIDNDKAKHDVAWKRHIKKRNRLLHQKLNDLVYVSYNKKMATRFQKRREKGTKGHDGIAWDHFDDAIGASTYLQGCNLPKKAHGQQLYYTRRVQQVEDKVDTEKRKMIQVWEKGMIMR

SEQ ID NO: 161222 - protein, 159 aa, Zea Mays
MKNKITRQEPHVAKSQSKQNFIEGEKHVIFNSEGSLDKFESDAQNKPGKLYTQLVSAQLKIQDIKSQRSALLLEISRIKQILEQEKNIIPGFPAALQQMDMKSLEEEYKALQGDKSGEVEYFQSLDETINGMKGILDPVKCQCGLEYNLKLDGEAMDIS

SEQ ID NO: 161223 - protein, 155 aa, Zea Mays
MKAIDQLSTLELLRQETASTFVKLCEKRLFYTKRTETLTVKLQEQQEWFSMKNKITRQEPHVAKSQSKQNFIEGEKHVIFNSEGSLDKFNKPGKLYTQLVSAQLKIQDIKSQRSALLLEISRIKQILEQEKNIIPGCTTADGYEVIGGGIQSSAR

SEQ ID NO: 161224 - protein, 184 aa, Zea Mays
MEEYLESMKSLRSYMNDLEDDAAKRSVEEQQQRTAIDAHDSDVALVMAQAKQASEEAERLATARAKVGMQMAEKQGRIATLDIECATLKQVAKSQSKQNFIEGEKHVIFNSEGSLDKFNKPGKLYTQLVSAQLKIQDIKSQRSALLLEISRIKQILEQEKNIIPGCTTADGYEVIGGGIQSSAR

SEQ ID NO: 161225 - protein, 157 aa, Zea Mays
MEEYLESMKSLRSYMNDLEDDAAKRSVEEQQQRTAIDAHDSDVALVMAQAKQASEEAERLATARAKVGMQMAEKQGRIATLDIECATLKQTLELLRQETASTFVKLCEKRLFYTKRTETLTVKLQEQQEWFSMKNKITRQEPHVAKSQSKQNFIEGK

SEQ ID NO: 161226 - protein, 109 aa, Zea Mays
MEEYLESMKSLRSYMNDLEDDAAKRSVEEQQQRTAIDAHDSDVALVMAQAKQASEEAERLATARAKVGMQMAEKQGRIATLDIECATLKQVAKSQSKQNFIEVFNQTGK

SEQ ID NO: 161227 - protein, 233 aa, Zea Mays
MEEYLESMKSLRSYMNDLEDDAAKRSVEEQQQRTAIDAHDSDVALVMAQAKQASEEAERLATARAKVGMQMAEKQGRIATLDIECATLKQVAKSQSKQNFIEGEKHVIFNSEGSLDKFNKPGKLYTQLVSAQLKIQDIKSQRSALLLEISRIKQILEQEKNIIPGFPAALQQMDMKSLEEEYKALQGDKSGEVEYFQSLDETINGMKGILDPVKCQCGLEYNLKLDGEAMDIS

SEQ ID NO: 161228 - protein, 248 aa, Zea Mays
MEEYLESMKSLRSYMNDLEDDAAKRSVEEQQQRTAIDAHDSDVALVMAQAKQASEEAERLATARAKVGMQMAEKQGRIATLDIECATLKQEWFSMKNKITRQEPHVAKSQSKQNFIEGEKHVIFNSEGSLDKFNKPGKLYTQLVSAQLKIQDIKSQRSALLLEISRIKQILEQEKNIIPGFPAALQQMDMKSLEEEYKALQGDKSGEVEYFQSLDETINGMKGILDPVKCQCGLEYNLKLDGEAMDIS

SEQ ID NO: 161229 - protein, 166 aa, Zea Mays
MEEYLESMKSLRSYMNDLEDDAAKRSVEEQQQRTAIDAHDSDVALVMAQAKQASEEAERLATARAKVGMQMAEKQGRIATLDIECATLKQTLELLRQETASTFVKLCEKRLFYTKRTETLTVKLQEQQEWFSMKNKITRQEPHVAKSQSKQNFIEGTGFSENRKNT

SEQ ID NO: 161230 - protein, 243 aa, Zea Mays
MEEYLESMKSLRSYMNDLEDDAAKRSVEEQQQRTAIDAHDSDVALVMAQAKQASEEAERLATARAKVGMQMAEKQGRIATLDIECATLKQTLELLRQETASTFVKLCEKRLFYTKRTETLTVKLQEQQEWFSMKNKITRQEPHVAKSQSKQNFIEGEKHVIFNSEGSLDKFESDAQNKPGKLYTQLVSAQLKIQDIKSQRSALLLEINQADSGAREKHNSWFSRCTTADGYEVIGGGIQSSAR

SEQ ID NO: 161231 - protein, 91 aa, Zea Mays
MEEYLESMKSLRSYMNDLEDDAAKRSVEEQQQRTAIDAHDSDVALVMAQAKQASEEAERLATARAKVGMQMAEKQGRIATLDIECATLKQG

SEQ ID NO: 161232 - protein, 56 aa, Zea Mays
MQPQSIKGILGSIIVPSTSDLSVAPPLSNISGSENEFKESPATFCAGPRLYSCWSC

SEQ ID NO: 161233 - protein, 189 aa, Zea Mays
MYPVKRTYWFDIYKNIDKIPQVTCPVLIIHGTADEVVDWSHGKQLWELCKDKYEPLWLRGGKHCDLELFPEYIRHLKNFFHSLEKSPSHRQAWRENVDRIEPSRKSTDFFEPSRKSTDQRKKSRSTRDKTRNTEHRYSNVEKVDKLKISFDQFEKSRRSVDIFERPKRNIEQLDCGRKSVDRLDRIWAS

SEQ ID NO: 161234 - protein, 177 aa, Zea Mays
MLAGAPLEVHGFVQDNRTGQKVAMLIGKWDEAMYYVLGDPSVKPKGYDPMSEAVLLWERDKSLNQTRYNLSPFAISLNELTPHLLNKLAPTDSRLRPDQRHLENGEYEMANSEKLRLEQLQRQARQLQEKGWRPRWFKKDDGDSYRYMGGYWEARETGNWDGIPDIFRQNSLSPGLH

SEQ ID NO: 161235 - protein, 306 aa, Zea Mays
MAEVETEEDEVTYFDTRDFLSAESLRSASCQRRELIAHGFGSEYVGDSVTNTVKTTKYPFVLRRDKLPEPKEKEKHIGLWSIIRENIGKDLSGVCLPVYFNEPLSSLQKCFEDLEYSYLVDHALHWGKQGDSLMRILHVAAFAVSGYASTEGRQCKPFNPLLGETYEADYPDKGLRFFSEKVSHHPMVVACHCDGRGWRFWGDSNLKGKFWGRSIQLDPIGVLTLQFDDGETFQWSKVTTSIYNIIIGKIYCDHYGTMRINGSGQYSCKLKFKEQSIIDRNPHQLLTSFGKKLLLVVVSAIAKVAL

SEQ ID NO: 161236 - protein, 607 aa, Zea Mays
MNPLCCIAPVSLEHAADQLHEHPQRILAGAPPATPAPKQDAVVGVLHKWVNYGKGWRSRWFVLEDGVLSYYKLRGAGAGGVAVSPAAAAARVIGDGSAVQQAREVAAGAGKLWKPFGVIHLKVSSIRASKSDDKRLYIFSGTKTLHLRCETEEDRNAWIDALLAAKDQFPRSQTSNDVGSMADIMLSSEKLRARLLQEGLCEAVVRECESIMMSELLELHNHIKSQQQQHSILIDRLRQLETEKVELERTVVHETKERETLGYANSRQSDFYSVLSGGSTTESDPDTASHMAEVETEEDEVTYFDTRDFLSAESLRSASCQRRELIAHGFGSEYVGDSVTNTVKTTKYPFVLRRDKLPEPKEKEKHIGLWSIIRENIGKDLSGVCLPVYFNEPLSSLQKCFEDLEYSYLVDHALHWGKQGDSLMRILHVAAFAVSGYASTEGRQCKPFNPLLGETYEADYPDKGLRFFSEKVSHHPMVVACHCDGRGWRFWGDSNLKGKFWGRSIQLDPIGVLTLQFDDGETFQWSKVTTSIYNIIIGKIYCDHYGTMRINGSGQYSCKLKFKEQSIIDRNPHQEICVSFLKKEKESTTYIKRPKTAKTTFIPTARD

SEQ ID NO: 161237 - protein, 93 aa, Zea Mays
MHFKPKLYATQLFVKHEHSCNNACNKAFYQTYNKTTMCLCYRQDIRHIILHQNSRPQPLTPLLYNSKNNYITTKQHTDTTTDLAIITKRTYAK

SEQ ID NO: 161238 - protein, 254 aa, Zea Mays
MKEWFYVKNDLKAREDVKDIIMRPIWQRFGLRKPKVEIDEAAEECQKAFGIVCSFIGTRDLVQEHIAFRVCPLVEQWEMPKETISKSDEGGLVRLKYTFRYEGKFIEPDDDWLKCIEATSNRLLGPYSKVEDNTLSATFGGRKKKRLNRVFDAIGFMYPNYRYPLKGQKRKSATSGKGDAVVALSEAAPKRKKMKVLTHRPHFIEPASVPDFGDETSTATEAKGPALTQKNEEPAMMPKADNIKEIEAAKTKIV

SEQ ID NO: 161239 - protein, 455 aa, Zea Mays
MRSWRLLYDLLRRLLKPTDTPGQIRPASHLSTKSGQAAAQSAAADPTRAVSLLAERDWFARINSEFAAPLRQLGPRFVVRALQHAAGEPLLCVRLYVWASRFGQHFARDRSVRRALGDALLRRGPVVLSAALVADVRSCGCEVSEELLCALVESWGRLGLAHYAHEVFVQVPRLGLRPSTAIYNAVIAASVRAGAVDAAYLRFQQMPADGCRPDCFTYNTLVHGVCRRGIVDEALRLVKQMERAGIRPNVVTYTMLVDGFCNASRVEEAVCVLERMKEKGVSATEATYRSLVHGAFRCLEKERAYRMLSEWIESDPTLHSIAYHTLLYCLSKNDMDKEAVELAKKMSKRGYLLGSTTFSIVIPCAVKVLESSDLCELVDDFIKKGGNLGFDMYIMIIKSFLRCKDISKANKYFSQMVSDGLLSSVESYNIVIDCFAKAGEVERALETIKVMQESG

SEQ ID NO: 161240 - protein, 467 aa, Zea Mays
MRSWRLLYDLLRRLLKPTDTPGQIRPASHLSTKSGQAAAQSAAADPTRAVSLLAERDWFARINSEFAAPLRQLGPRFVVRALQHAAGEPLLCVRLYVWASRFGQHFARDRSVRRALGDALLRRGPVVLSAALVADVRSCGCEVSEELLCALVESWGRLGLAHYAHEVFVQVPRLGLRPSTAIYNAVIAASVRAGAVDAAYLRFQQMPADGCRPDCFTYNTLVHGVCRRGIVDEALRLVKQMERAGIRPNVVTYTMLVDGFCNASRVEEAVCVLERMKEKGVSATEATYRSLVHGAFRCLEKERAYRMLSEWIESDPTLHSIAYHTLLYCLSKNDMDKEAVELAKKMSKRGYLLGSTTFSIVIPCAVKVLESSDLCELVDDFIKKGGNLGFDMYIMIIKSFLRCKDISKANKYFSQMVSDGLLSSVESYNIVIDCFAKAGEVERALETIKVMQESGMVYLQTVTHTMP

SEQ ID NO: 161241 - protein, 399 aa, Zea Mays
MCIYWKFRHLPVVENGEVIAMLDIAKCLYEAIARLEKAAEQGSAIAAAVEGVERQLGGNFSAPSALIETLRERMFKPSLSTIVTENTKVAIVSPTDPVCVAAQKMREFCVNSVVVSTGNTLQGIFTSKDILMRVVSQNISPELTLVEKVMTVNPDCATLETTILDTLHIMHDGKFLHIPVIDKDGQIAACLDVLQLTHATIQLVEGGNGTVNNVANSVMQRFWDSALALEPPDEEFDSHSEVSLLLQSEAGDGKSSVYPPVVGNSFSFKLQDRKGRVHRFTCGSESLDELVSSVRQRLSIADEKEAVQLLYEDDEGDRVLLTTDADLAGALLHAKSSGLKVLKLHIEDPSLNTEVTKPSQELAPPPLKSGISMVHVGLTAGVVALSGAAVMVYLKRSQL

SEQ ID NO: 161242 - protein, 131 aa, Zea Mays
MIFTLVFVITYQKYGSMRFCKMLAWCVAIVQSLLIVSSRKHYSVDVVVAWYTVNLVVFFVDKKLTELPDRSVGSTSILPLSAKDKDTKLKEENTRLLNGNSMDSADRRPRTQMNGKQIDNESQVDSETVKA

SEQ ID NO: 161243 - protein, 73 aa, Zea Mays
MSTSHQLLWQMAGGRVAHATLKGPSVVKEIFIGLTLGLIAGGMWKMHHWNEQRKTRSFYDMLDKGQISVVVEE

SEQ ID NO: 161244 - protein, 64 aa, Zea Mays
MNVKKLVFASPFNHEILYLSLAIVLLKEANNKDCFLSLNFNHNLAGDRAPPSCHSISVISSLSL

SEQ ID NO: 161245 - protein, 260 aa, Zea Mays
MLGQLINRVSCHALDSSRTATDESICADLLDVRRIVPNSLRAIKHGWNEYKQQTVLPASAATVFLNFNVALAPGAIMTALLMHRGTSPSIVGAFSGLCSIMGLVATFISSSLVKRVGILKAGAAGLIFQASLLSIALTVYWAGSISQTTPLLIFLASIALSRLGHMSYDVVGTQIVQTGVPASKANLIGGMEVSIASLAELVMLAMAIIANDVSHFGFLAILSVSSVAGAAWMFCRWLTNPTDEQRELFMVDPLYQVQAM

SEQ ID NO: 161246 - protein, 261 aa, Zea Mays
MLGQLINRVSCHALDSSRTATDESICADLLDVRRIVPNSLRAIKHGWNEYKQQTVLPASAATVFLNFNVALAPGAIMTALLMHRGTSPSIVGAFSGLCSIMGLVATFISSSLVKRVGILKAGAAGLIFQASLLSIALTVYWAGSISQTTPLLIFLASIALSRLGHMSYDVVGTQIVQTGVPASKANLIGGMEVSIASLAELVMLAMAIIANDVSHFGFLAILSVSSVAGAAWMFCRWLTNPTDEQRELFMVDPLYQVQAIG

SEQ ID NO: 161247 - protein, 139 aa, Zea Mays
MAPGHHDTPWQFQNTPDDNWPRCPAGGTACGAPAASGRACVGSAEARGAIAPLAVMKSSSRCFEQEHVWLREKDQQEWLSSERFLTGCKRWGRCYSPGGRGSTASSCAASCLGRWGRSCGRIFPTMSGETPTSSVRHFV

SEQ ID NO: 161248 - protein, 129 aa, Zea Mays
MFIRVVRCETSLGTDAVSTCMTTRPPSPFTISFIASRSSSTHSVVTYTHLVAVVGDEDLVLDPDPHTAVPARRALVQDRGRRDVHPGLDRYYLHKYNAHAHGPERACQSLTHCWSCSKLQTQKWRLTWL

SEQ ID NO: 161249 - protein, 507 aa, Zea Mays
MLGDHAKKEMVTGEKPATSHGKAPSGESSNKVKGAPSHTKSHRSGEKKKKMKKVVYYEIDSSSPSTSGSDAPSVTSKCHERKKFSKIPLCYPRIPKHTPLLSVPLDKPHVFEGEDYSMWSARMKGHLTSLHKSIWNVIEYGAQVPQVGDKDYDSDEADQIRHFNSQATTILLASLSREEYNKVHGLESAKDIWDVLKTAHEGDEVTRITKRETIEGELGRFMLHQGEEPQVMYNRLKTLVNQVRNLGSTKWDDHEMVKVILRSLVFLNPTQVQLIHGDPRYKLMSPEEVIGKFVSFELMIKGSKKIIEQGASSTPEMQPVAFKATEEKKEESTSSRLPIDASKLDNEEMAFIIKSFRQILKQRRGKDYKPRSKKVCYKCGKPGHFIAKCPLSSDSDRGDDKKGRRKEKKKYYKKKGGDAHVCREWDSDESSTDSSDDEDTANIAVNKGLLFPNVGHKCLMAKDDKKKVKSRASTKYATSSDEASSSDDEDNLLTLFANLNMQQKKIE

SEQ ID NO: 161250 - protein, 62 aa, Zea Mays
MPALVSPTPLLPTAPTTRSTAARRLPGNSPVIGRLPCLTVRRVVIPAVSRRRAPHTLFPPCR

SEQ ID NO: 161251 - protein, 226 aa, Zea Mays
MNAHRDEEAVSPLIAAPGGRSHAADAHVLSAAFLFVFSAYSAAQNLQTSVNTEDDLGTVSMGTVYTSFTLFSVASSPVVTRIGPKRALVVGTSGYVLFILANLVPSWYTMVPASLYLGFTASIIWVGQGTYLTSAALSHARENNLPEGPTLGSFNGEFWGMFASTQEAAFAQLKVWQSGAIAVIFFLSPSITLQAMLLLMAAALVISFGSFLFLTLVVEKSSPVRA

SEQ ID NO: 161252 - protein, 429 aa, Zea Mays
MAGADAGLASAAGDVEEAAPLVAGPGSRRAPASVMGASRDVHLLSSAFLFVFLAYHAAQNLQSTVNTDENLGSISLGVLYTSFTAFSAAGSAVVRWMGSRRALVAGTSGYLLFIAANLLPSWYTMVPASLYLGFTASIIWVGQGTYLTSAALSHARENNLPEGPTLGSFNGEFWGMFASTQDGGSITGKNLLFAVFLGCMIVGIVLMCLLSKRDEKKDNTPTHSSFGAMLKYIIAPLKDKRMLLTIPLIAYSGLQQAFVWAVFTKSIVTPVLGISGVGGAMAIYGAADVVCSLVAGRLTSGLRSAAFIVSVGAILQAIVLFWLLLFYSPMDGLLGAAIPLFIGALWGVGDGVLNTQLSALLGLLFEDVKEAAFAQLKVWQSGAIAVIFFLSPSITLQAMLLLMAAALVISFGSFLFLTLVVEKSSPVRA

SEQ ID NO: 161253 - protein, 237 aa, Zea Mays
MEDEDDKKEVAVVGSSAADPVADSSAADASHEYTGIEKEIFDRLLERRIDEAVYRPSVFREQLHRHFKRLPRSYAINLNAEDVLLHSKILECAADPDKRPVFHARFLKCIHGPVVDSKDNPWGSLTATSRYAGVPCLHEIIFSTIDRPRVLAQLSALLSEVGLNILEAHVFSTRDGFCLHMFIVDGWHTEETYDLVQCLKETAARNYVLRSGFEIGLHSNLKAQRTEKDRRRQRRRI

SEQ ID NO: 161254 - protein, 54 aa, Zea Mays
MSSGCSIFLKDGRSILRYKKVSLRMQYFPKKGRVLANISYLGLTKEVFLFHKVT

SEQ ID NO: 161255 - protein, 114 aa, Zea Mays
MTLLKCECSVSTTLPRKLLGNHTTLLSSVTGTSTILLDLTLIVSLKFTFVVVYNQISFVDLEKELFMKSFIASYGRNVIAITQMKHSTICQLQQNYCLDQNNHSPNVSQLQCIY

SEQ ID NO: 161256 - protein, 56 aa, Zea Mays
MKSFIASYGRNVIAITQMKHSTICQLQQNYCLDQNNHSPNDSPGDEGQDLPSFESP

SEQ ID NO: 161257 - protein, 172 aa, Zea Mays
MNNHVSILAVLIVYVSVVLLLNSHVGLCSCYKRIFSFGDDTMDTGNFVHLIGKAPSKYKEAPYGKTFFRHATGRISDGRVLIDFYAEALKLPMIPPILPEKNSGYFPHGANFAVLGATARDRLFYSGSPWCLGAQISWFNEMVDRIAPGDGWKYHFRCHRIHKPYDRGTYSH

SEQ ID NO: 161258 - protein, 59 aa, Zea Mays
MRHLSSSNPNHPNPLTYEEPRASPQLEAAAIDFPVHRRRNLLAVVWASPETSCDYPWEF

SEQ ID NO: 161259 - protein, 184 aa, Zea Mays
MARHFLDMQLAAFLMVVSSLISMELIVVNGAKAFVVANNFPVGCLASYLSRFHSDDHEDYDEHGCLKSFNEFSQKHNEQLYSAIGQIRYSYPNVKVIYADYYNATMEFIKKPSRFGIGDPLVACCGGNGPYHTSMECNGTAKLWGDPHHFANWDGMHMTEKAYNIIMEGVLNGPFADPPFPLSC

SEQ ID NO: 161260 - protein, 170 aa, Zea Mays
MTTTHISSKELIVVNGAKAFVVANNFPVGCLASYLSRFHSDDHEDYDEHGCLKSFNEFSQKHNEQLYSAIGQIRYSYPNVKVIYADYYNATMEFIKKPSRFGIGDPLVACCGGNGPYHTSMECNGTAKLWGDPHHFANWDGMHMTEKAYNIIMEGVLNGPFADPPFPLSC

SEQ ID NO: 161261 - protein, 287 aa, Zea Mays
MKKFHESIVQLEQALCDFSYDKLDISDEVREQVELVHVQLKRAKERVDMPDDEFYNELLSLYNKSHDPSAELDILGRLSEKLHLTTITDLTQESLALHEMVASGGGNDPGEHIEKMSMLLKKIKDFVQTQNPEMGPPMTTKLMDPNGEPRPRNIPDEFRCPISLELMKDPVIVATGQTYERAFIEKWLASGHQTCPNTQQRMPNTTLTPNYVLRSLIAQWCEANGIDPPKRSTQPDKPTSSCSSSERANIDALLSKLCSADPEEQRSAAAELRLLAKRNANNRICIA

SEQ ID NO: 161262 - protein, 150 aa, Zea Mays
MKERQRWRPEEDAVLRAYVRQYGPREWHLVSQRMNVALDRDAKSCLERWKNYLRPGIKKGSLTEEEQRLVIRLQAKHGNKWKKIAAEVPGRTAKRLGKWWEKVAELRRDAQVKEEKMAEQWAAKHARVAKFVEQMGGCSRSWSSATDMNC

SEQ ID NO: 161263 - protein, 584 aa, Zea Mays
MDRDEEVGHGDRSLLFIGDEDDLGVDRDGGSPPTSSDDGSFSDRSDAETRAGHVRRRDGGEREDTPEDGQNGAWPQSYRQSIDMLSAVPSPTMNSIMAASPSLTRFGSSFLKAGSSFFLRKGEGSGLPLTRPLLPPSLPQLSQSSLHPQPRPVKQSTDSLAQAPRWPAAHEAELPERPSRQCLKSDYIELPPPASKCSRNQSIINGFNVLCGVGILTTAYGIKEGGWLSLLLLPLLGGSSCYTGLLLKRCIDSSPNIETYPDIGQVAFGIFGRIFVSVVLYMELYASCVEYITLLGDSLSSVFPSAHLAFTGIDLNAHNLFATTMALAILPSVWLRNLSLLSYLSAGGVIATITVIVCLCWVGIGEGIGFRFSGAVVNVTHLPVALGLYGYCYSGHSVFPNIYSSMKERSQFPFVLMFCFTVVTLVYAGVAVSGFLMFGESTMSQFTLNLPQQYIPSKIAIWMTVVNPYTKYALTMTPVALSIEEALPKKMQSYLVGMLVRTCLVLSTVAVALLFPYFALVMALLGSVFTMLVALILPCACYLSIKKGAVPLWEIILCIIIIAIGVVCACIGSFTSINQMISSR

SEQ ID NO: 161264 - protein, 418 aa, Zea Mays
MCGIALVLASDRLVIVPCATATTAALETQHSCKRKGVPDELKEALRRRGPDSLGYRSRCLLADGTVVVGDGCNDGVEGKIGVSDSSVADLFFIGATLHLRGAKLVSQPLVAPSGSVFLYNGEIYGGIQVADDENDTQALFNSLESCCSCDCHALGRDKTCTCCGTGSGAKSVLQVLSTIKGPWALIYWQMKSNTIWFGRDAFGRRSLLVHWPTADDSHFILSSVSPPSFAKIHSDQTVSDRDMSNHTKASYWEELPCGIYSMHMKDIGKHGACMKEGWIVEVNTHKWMASSLNGLIKWERKLTVPTMENIPVDRGNHQLSQSFISSREPEENTNNGITKADFLSDSSLCDANCITQSAHRVLVALRESVMLRTKMNTLFQGTLDRSEDGESAPIAVLFSGGLDSMLLAALLDQCIDSK

SEQ ID NO: 161265 - protein, 503 aa, Zea Mays
MKSNTIWFGRDAFGRRSLLVHWPTADDSHFILSSVSPPSFAKIHSDQTVSDRDMSNHTKASYWEELPCGIYSMHMKDIGKHGACMKEGWIVEVNTHKWMASSLNGLIKWERKLTVPTMENIPVDRGNHQLSQSFISSREPEENTNNGITKADFLSDSSLCDANCITQSAHRVLVALRESVMLRTKMNTLFQGTLDRSEDGESAPIAVLFSGGLDSMLLAALLDQCIDSKWIIDLLNVSFDGQLAPDRISAIAGLKELQRISPCRRWRLIEIDTALTDLNGESEHVMSLIHPSNTFMDLNIGIALWLAAGGDGWVDGSICRMQDGSRYKYRSRSRVLIVGSGADEQCAGYGRHRTKYRLGGWNALDQEMRLDVQRIWKRNMGRDDRCISDHGKEARFPFLDENVIKTLLEIPLWEIAKLDEPVGRGDKKILREVARLLGLQEAALQPKRAIQFGSRIARESNRKNFGSNRAANQASAGSVQIHQSPASPVASATRQPFLTNNQP

SEQ ID NO: 161266 - protein, 86 aa, Zea Mays
MRHHANHPYDPSPTCLPAVGCKRAGSLCLRCGCGYRRRPDWTIGEERKPSCRVTTMLRLDGRVGEQSSLPLRVQPQGDEEQVCYRG

SEQ ID NO: 161267 - protein, 58 aa, Zea Mays
MPPLFLPLLSSPCSSLAAATCQDFLQQSAPAAPCTCILRALQPTTPRNQCSAPSSVGD

SEQ ID NO: 161268 - protein, 547 aa, Zea Mays
MLHPSWVGVSAHVSEYWSVIIATVVFAFVGAVTIYYTVNQLNKNISLSLIRAIKARAKRYKKSKDKVPAASHIWRKEVVSRSKGLKCCVCLKSVSPPQYSGGTIHQCDICGAAAHPSCSGNAHKDCKCVSMAGLGHVLHQWAVQWIDSADHSEEDSFCCHCDESCNGAFLAGSPVWYCMWCQRLVHVDCHSSLAKETGDICDLGPLKRLILSPLCVKELHWTGAGILSSITNGANELASSVRETIRIRSKRYKRGSASADSDSSGAIELPSDAEGDSQEVNSKAKVRDDHANCKLNEVHQSSESEKDKQLVPDNAATTNMSDVQRENSHVQNNQKYEIINVPSDSRPLLVFINKRSGAQSGDSLRQRLQILLNPVQVFELSKQQGPDVGLALFRKVTHFRVLVCGGDGTAGWVLDAIEKQKFETPPPVAILPAGTGNDLARVLCWGGGLGVIEKRGGLFSVLQDVEHAAVTVLDRWKITIKDNQGKLMRPPKFMNNYFGVGCDAKVALDIHNLREENPERFYSQDTTIFVVYEQGAVCKRGSKEHNG

SEQ ID NO: 161269 - protein, 431 aa, Zea Mays
MLHPSWVGVSAHVSEYWSVIIATVVFAFVGAVTIYYTVNQLNKNISLSLIRAIKARAKRYKKSKDKVPAASHIWRKEVVSRSKGLKCCVCLKSVSPPQYSGGTIHQCDICGAAAHPSCSGNAHKDCKCVSMAGLGHVLHQWAVQWIDSADHSEEDSFCCHCDESCNGAFLAGSPVWYCMWCQRLVHVDCHSSLAKETGDICDLGPLKRLILSPLCVKELHWTGAGILSSITNGANELASSVRETIRIRSKRYKRGSASADSDSSGAIELPSDAEGDSQEVNSKAKVRDDHANCKLNEVHQSSESEKDKQLVPDNAATTNMSDVQRENSHVQNNQKYEIINVPSDSRPLLVFINKRSGAQSGDSLRQRLQILLNPVQVFELSKQQGPDVGLALFRKPSFQLVLVMILRGFYVGVVALVLLRSGEVYSQFCKM

SEQ ID NO: 161270 - protein, 707 aa, Zea Mays
MLHPSWVGVSAHVSEYWSVIIATVVFAFVGAVTIYYTVNQLNKNISLSLIRAIKARAKRYKKSKDKVPAASHIWRKEVVSRSKGLKCCVCLKSVSPPQYSGGTIHQCDICGAAAHPSCSGNAHKDCKCVSMAGLGHVLHQWAVQWIDSADHSEEDSFCCHCDESCNGAFLAGSPVWYCMWCQRLVHVDCHSSLAKETGDICDLGPLKRLILSPLCVKELHWTGAGILSSITNGANELASSVRETIRIRSKRYKRGSASADSDSSGAIELPSDAEGDSQEVNSKAKVRDDHANCKLNEVHQSSESEKDKQLVPDNAATTNMSDVQRENSHVQNNQKYEIINVPSDSRPLLVFINKRSGAQSGDSLRQRLQILLNPVQQGPDVGLALFRKVTHFRVLVCGGDGTAGWVLDAIEKQKFETPPPVAILPAGTGNDLARVLCWGGGLGVIEKRGGLFSVLQDVEHAAVTVLDRWKITIKDNQGKLMRPPKFMNNYFGVGCDAKVALDIHNLREENPERFYSQFMNKVLYAREGAKNIMDNTFDCFPWDVKLEIDGSKIDIPQDSEGILVANIRSYMGGVDLWKNEDDVSDTYLPQSMHDKKLEVVSFTGMLHLGKLQVGLSRAKRLAQGHHIKVEVSTTMPIQVDGEPWSQEPGTIEVSHHSQAFMLKRVSEEPLGHAASVMADILENAESSGIISALQKRTLLQEIASRLL

SEQ ID NO: 161271 - protein, 655 aa, Zea Mays
MLHPSWVGVSAHVSEYWSVIIATVVFAFVGAVTIYYTVNQLNKNISLSLIRAIKARAKRYKKSKDKVPAASHIWRKEVVSRSKGLKCCVCLKSVSPPQYSGGTIHQCDICGAAAHPSCSGNAHKDCKCVSMAGLGHVLHQWAVQWIDSADHSEEDSFCCHCDESCNGAFLAGSPVWYCMWCQRLVHVDCHSSLAKETGDICDLGPLKRLILSPLCVKELHWTGAGILSSITNGANELASSVRETIRIRSKRYKRGSASADSDSSGAIELPSDAEGDSQEVNSKAKVRDDHANCKLNEVHQSSESEKDKQLVPDNAATTNMSDVQRENSHVQNNQKYEIINVPSDSRPLLVFINKRSGAQSGDSLRQRLQILLNPVQVFELSKQQGPDVGLALFRKRGGLFSVLQDVEHAAVTVLDRWKITIKDNQGKLMRPPKFMNNYFGVGCDAKVALDIHNLREENPERFYSQFMNKVLYAREGAKNIMDNTFDCFPWDVKLEIDGSKIDIPQDSEGILVANIRSYMGGVDLWKNEDDVSDTYLPQSMHDKKLEVVSFTGMLHLGKLQVGLSRAKRLAQGHHIKVEVSTTMPIQVDGEPWSQEPGTIEVSHHSQAFMLKRVSEEPLGHAASVMADILENAESSGIISALQKRTLLQEIASRLL

SEQ ID NO: 161272 - protein, 1001 aa, Zea Mays
MLPEHKSAVPPTLEGHEASEVQLLQSDITVELSSSKHSEYTVQHVFGSTEDTISNISSSIPAAPPYPIFHIVTYNSSGSISAEQVNCEQALDQTALPIHLRPFKVEISQSETTNGLLASKTDDKEHGGLPIPSLPQNLPQPREHMKPPSPPPPPPRPPPCHATLVPSLCLSSNPPSLRELYENQPSTSPPPFPRESFVALPPPPAPHPNHLSLPGKHIKPSPPPPPPPPRENEAFCPSTLLSPTRHVIPPPPTLHHIAPTSPCLYQPSFPIDIEIQPTFSEDIVIVSPSHSTEVNIVPLPPPPPRRMSEILSQPLEGGQSALPASLLEVTKEIPPPPPLPPKVQRRSPLSTLCGGIVNIPLPPPPPPPPLPGGHGEVPLSTPKGSGAIPPPPPFTKGLGGITLAIQFHSGDFSLLEPTRESESTSRLPPPPLSSNGHIGDPPPPPPPPPTMSVFVEASIPLPPQTGCREAPPPPPPSPGGHVEFPPPPPGECALALPHPKASVGAPPPPPPPGGHVESPPPPPPPGECALALPHPKASVGAPPPPPPPGGHVESPPPPPPPGECALALPHPRASVGAPPPPPPPGGHVESPPPPPPPGECALALPHPKASVGAPPPPPPPGGHVESPPPPPPPGECALALPHPKASVGAPPPPPPPGGYVGAPPPPPPPGECALALPHPKASVGAPPPPPPPGGYVGAPSPPPPPGGYIGAPPPLPYGGIGGVPPPPPPFGGLGGTPPPPPPAGFRGGAPAPPPPPGGHGGPPPPPPRGHGGVGGPPPPPGAPSPPMPPGMPGGPPPPPGGRGMPAPPGGRGHGLARSLGPTLQSAVRRSSLKPLHWVKVTRAMQGSLWAELQKQVDANSRAEFDVNELESLFTIAPKTKAGPKSEGRGKSLGTKSDKVQLIDLRRANNTEIMLTKIKMPLPDMMSAALALDDSVLDADQIENLIKFCPTKEEMELLKNYSGDKEALGKCEHFFLELMKVPRVESKLQIFAFKIQFQSQRC

SEQ ID NO: 161273 - protein, 1018 aa, Zea Mays
MLPEHKSAVPPTLEGHEASEVQLLQSDITVELSSSKHSEYTVQHVFGSTEDTISNISSSIPAAPPYPIFHIVTYNSSGSISAEQVNCEQALDQTALPIHLRPFKVEISQSETTNGLLASKTDDKEHGGLPIPSLPQNLPQPREHMKPPSPPPPPPRPPPCHATLVPSLCLSSNPPSLRELYENQPSTSPPPFPRESFVALPPPPAPHPNHLSLPGKHIKPSPPPPPPPPRENEAFCPSTLLSPTRHVIPPPPTLHHIAPTSPCLYQPSFPIDIEIQPTFSEDIVIVSPSHSTEVNIVPLPPPPPRRMSEILSQPLEGGQSALPASLLEVTKEIPPPPPLPPKVQRRSPLSTLCGGIVNIPLPPPPPPPPLPGGHGEVPLSTPKGSGAIPPPPPFTKGLGGITLAIQFHSGDFSLLEPTRESESTSRLPPPPLSSNGHIGDPPPPPPPPPTMSVFVEASIPLPPQTGCREAPPPPPPSPGGHVEFPPPPPGECALALPHPKASVGAPPPPPPPGGHVESPPPPPPPGECALALPHPKASVGAPPPPPPPGGHVESPPPPPPPGECALALPHPRASVGAPPPPPPPGGHVESPPPPPPPGECALALPHPKASVGAPPPPPPPGGHVESPPPPPPPGECALALPHPKASVGAPPPPPPPGGYVGAPPPPPPPGECALALPHPKASVGAPPPPPPPGGYVGAPSPPPPPGGYIGAPPPLPYGGIGGVPPPPPPFGGLGGTPPPPPPAGFRGGAPAPPPPPGGHGGPPPPPPRGHGGVGGPPPPPGAPSPPMPPGMPGGPPPPPGGRGMPAPPGGRGHGLARSLGPTLQSAVRRSSLKPLHWVKVTRAMQGSLWAELQKQVDANSRAEFDVNELESLFTIAPKTKAGPKSEGRGKSLGTKSDKVQLIDLRRANNTEIMLTKIKMPLPDMMSAALALDDSVLDADQIENLIKFCPTKEEMELLKNYSGDKEALGKCEHFFLELMKVPRVESKLQIFAFKIQFQSQIRDVRKNLQTVSSACEEKL

SEQ ID NO: 161274 - protein, 398 aa, Zea Mays
MLNNETAVVKSTLAATIDGDADSGISKSTYKVDDYMFEKGSSKQDTRMGSNQDLGQIDNVLVKEVIILETNSPKDIQMIKEVIISEVTTLKQVVDGSMMETELDETVHDSESIALAETEDTKQLNIFCKQDEGHSVQDEYAAYDNGIVIEQEESSNEENLTIRDTNSEVTEPTDENNGRAEFDVNELESLFTIAPKTKAGPKSEGRGKSLGTKSDKVQLIDLRRANNTEIMLTKIKMPLPDMMSAALALDDSVLDADQIENLIKFCPTKEEMELLKNYSGDKEALGKCEHFFLELMKVPRVESKLQIFAFKIQFQSQIRDVRKNLQTVSSACEELRSSEKLKVIMKNILLIGNTLNQGTPRGQAVGFRLDSLLKLIDTRATSGRMTLMHFLCKRSHRK

SEQ ID NO: 161275 - protein, 700 aa, Zea Mays
MGCAVSRPGVVSSPSYEDDVSSCSYNMSRSASASADLGSASASASAMSIWSRPVRLEAFKDDDEDERRRRRSGREAAVAAAARLGSVRPCVEGEQAAAGWPAWLSAVAAEAVHGWVPLRADGFEKLEKVGQGTYSSVFRARELATGRLVALKKVRFDSVEPESVRFMAREILILRRLQGHPNVVGLEGLVTSRSSPSIYLVFEYLEHDLAGLSSSPDITFTESQIKCYMRQLLEGLAHCHARGVMHRDIKCANLLVSDGGELKVADFGLANLFAPAPAAPLTSRVVTLWYRPPELLLGATAYEPSVDLWSAGCVFAEMHARRPVLQGRTEVEQIHKIFKLCGSPPDHFWRRSGLSHAAVFRPQQPYPSRLRDTFAASMPDHAFRLLAMLLSLDPAARGTAAAALDAEYFTTAPYACDPGSLPKYAPNKEMDAKFREESRRRSNLRSQGGEGAKRLSWGHKSMQLQDTNQSHVHAEESLPVVAKSGAAVARNDGDSRLLVDLEPVPAIRFSKRHGDDGAGDHAPPYAKTLSSSFKEPARVADRRPLSGPGQLAASTGFAWAKKPRSVARSSTAAAAVTKRSYSKGSGTKNNSSGGGDRARTTSAATATEAAAPYEVEKQEVIKQWAQAADAFSASEAYSSRFRQTLAARQLKNGKMYKGKVSRVDHSGPLLSQPRRIDEFLLHSHEQQAARRSSTDGRGTA

SEQ ID NO: 161276 - protein, 54 aa, Zea Mays
MKEKHNSNSATCCPSVLFSYPRCLLFLFPLMTRLMIICSCYHPHSVVEITYYAV

SEQ ID NO: 161277 - protein, 51 aa, Zea Mays
MFVCIATFSGEVTSHMKSKLVPGISTPMQVVPLITSFYPVMFLLIIMICIG

SEQ ID NO: 161278 - protein, 66 aa, Zea Mays
MCKGCLELSQYKYLQDMHGLFLTYNILDHACTTCFVFANSFVNPFQSSFANSQRQMNKILRSIFKI

SEQ ID NO: 161279 - protein, 55 aa, Zea Mays
MEGPIDKTYSPSAIPCRFRRVAVVLTGNRRQYFENSPQDSESRMPNQTKSVYMDL

SEQ ID NO: 161280 - protein, 248 aa, Zea Mays
MEQDVGGQNSHSQFINNDLRIVPADEDGPSQSINNGSSAAPINLEEGTATNNGTGDANTSENVDGKNHKRICTSKVLQDFEPLYHTLDGKRIRYGGKCHWCKCTLTAVSTSGTGHLLRHQRDCKVKLSKQGKQSVLKFNPDGSVRNWDYCPDRARTQMCRLIARLDLPLNFAESPAFEEYIRLSHNPVFKKVSHQTTARDFVKFFNDRRKIVVECLQSVSSIAITFDIWSGNAKEDYLSVVVHYVSKD

SEQ ID NO: 161281 - protein, 250 aa, Zea Mays
MPIASKLVYFQRRPAPAPPDDPGPEPPDPRRPRRRRRSGSLSSSHQKPGTKGITLLQPSLRGQSERQQGFFTRPPAQGFTTAARRGRTTAGFPTPCSRPGNGSFRGSAAWTWSWRRDEGTRHGRCRHSGLELEDSLAPSLTPLRAAVKPAASSSSSSPVNVNPSLCSPNRRPPRYRKQKTGEPRPRTQLLTAPYAWRGAAPAAGSRSCAAGTSSTPPACSAGCGPAPTAPTAGPPCELAPNSRKEGRMDE

SEQ ID NO: 161282 - protein, 258 aa, Zea Mays
MPIASKLVYFQRRPAPAPPDDPGPEPPDPRRPRRRRRSGSLSSSHQKPLHRSMMFQGTKGITLLQPSLRGQSERQQGFFTRPPAQGFTTAARRGRTTAGFPTPCSRPGNGSFRGSAAWTWSWRRDEGTRHGRCRHSGLELEDSLAPSLTPLRAAVKPAASSSSSSPVNVNPSLCSPNRRPPRYRKQKTGEPRPRTQLLTAPYAWRGAAPAAGSRSCAAGTSSTPPACSAGCGPAPTAPTAGPPCELAPNSRKEGRMDE

SEQ ID NO: 161283 - protein, 68 aa, Zea Mays
MAPRNNYLFSLLLSFIFVRHFHYVIMVVTFIAIHLVIICVVLLWRTYETHTALSLKSGCDNVRMAKCC

SEQ ID NO: 161284 - protein, 155 aa, Zea Mays
MRAACACSGRPPTTTRCAWYEDRLAALRSRLCAFWCPPSACELKNLRRQKLQENTLCGGGLAADPDPDPDSESAEQLAASGDGDGDGDSLAPSVRFSHAAPSPCCSLVAGLQPLDGWMVHQKQLAVCCFIKEDEVRLASLNFFGGKGVIIEGLSL

SEQ ID NO: 161285 - protein, 191 aa, Zea Mays
MEWAMAQLLMHRDAMQKARAEIDANVGTSRLVDESDTTHLPYLQCVVKETLRLCPVGPVIPAHEAMEDCAVGGFRVRRGTMVLVNAWLIHRDPRLWEAPEEFRPERFLDATATVAAPLLPFGLGRRRCPGEGMALRLLSLTLAALLQCFDWEVGGCVDMAEGVGLSMPMAKPLAAVCRPREFVQTVLSAST

SEQ ID NO: 161286 - protein, 386 aa, Zea Mays
MAILVGLVAVLSALFAAALRRLLISCRHPAYAAGFFHPYTNDGGGGERVLWCAVRAVQELCPDLPCAVYTGDADAAPEALAARALDRFGVRLLRPPQVVHLNKRKWIEASTYPHFTMIGIWLSRCKILYYTIFSWLYGLVGSCAHLVMVNSSWTRSHITNIWKIPERTKRVYPPCDTSALQMLPLERPTTPPVLISVAQFRPEKAHGLQLEAFALALQKLDPDFPKPKIQFVGSCRNKEDLDRLQKLKDRSTELHIDELVEFHKDISYRDLVQFLGGAIAGLHSMTDEHFGISVVEYMAAGAIPIAHKSAGPMMDIVLDEDGHQTGFLASEKEEFTEAIIKVLRMPESGRQEMAAAARKRAQRFSDQRFHQDFTETVRPILSAREG

SEQ ID NO: 161287 - protein, 124 aa, Zea Mays
MAILVGLVAVLSALFAAALRRLLISCRHPAYAAGFFHPYTNDGGGGERVLWCAVRAVQELCPDLPCAVYTGDADAAPEALAARALDRFGVRLLRPPQVVHLNKRKWIEASTFTLIQVAMLLRIH

SEQ ID NO: 161288 - protein, 363 aa, Zea Mays
MVVTLNAYNVLAARCAAEYLEMSETVEKGNLVYKIDVFLSASIFRAWKDSIIVLQSTRPLQRWTDSLKVVNHCVDAIASRASTDPSEVDWSYTYSRRKLPSETDGDARGWNGVRKRQAVPRDWWVEDLCDLEVCLYRKVILAIKAKGRTGGAVVGEALRAYACRRLFGSLDHAVSDGLDCTKHRAALEAVADLLPAEKGSVSCGLLLKLLRASCLLESGQAYRGELIRRIGAQLERASVPDLLIPADSGDGDGDATYNVGMVAAMLEEFLLHHKVNGAEAEKREDGEDDVDVAADDPVTSSKLAAVAKLVDGYLSEIAKDPCLPLETFVALAESMPPLSRPVHDALYRAIDVYLKVCTRKIML

SEQ ID NO: 161289 - protein, 69 aa, Zea Mays
MGRRKEHLERVRVEAYCWDVFKPVEMVEIDSMEKLDDAFRMASWCQKCIYLMPRMEKIAGQYPGGSTRR

SEQ ID NO: 161290 - protein, 102 aa, Zea Mays
MTSSGGCAGSTRNAEATQPELQRSPPLCSRSSQPMRPHHIWQLTLLERTSSTRRFTGGKFNKNYRSQVNNKCNTSKHCRNNFITLTDRWKLDVCNQARLRVN

SEQ ID NO: 161291 - protein, 415 aa, Zea Mays
MMAGNEDQLRAVAARAVTDSLRAAASRCSAADRAARFRDCVRSLEAEKAKMEVFRRELPISVHLVADVIDWLKEELAQHRRRPSDLFAPPAPPPPAKDGAVLADADANDKRSWMSSVQLWSCGSHDDSTANTNGAAAAAHKVSSAFVALAASPPAPTLARPSGDAAGKPGASASAMPVADLSLSSPAAAASPSAASSAVTDAAGAHRRQHAQQRKARRCWSPGLHRRFVAALQRLGGAQVATPKQIRELMKVDGLTNDEVKSHLQAAHAARVVGRRRPARGRAVVVGAGAAVHDVAAQHVAVAVAVRVAAGAAAAGGVEQGHVGHRRGQLRRRRRGPGRPVGELRLGDAAARDEGVVVLMILVLGRDHNSQQYRRRCGVGHGTEDNCGRGGIFCTGVEMISFFPLPFFSGRGRRM

SEQ ID NO: 161292 - protein, 301 aa, Zea Mays
MSTWSSWCSRRPASAPPPTQLPTATAMKKETKNTLRSPQRSGSAKLASPPSSGFLRPAGASASATGRRTSPSPTSIASSSGDASIGRRCRGRRSCCPLRACPWPPRWRSARRRRCRSSTPAASTSTRRPSGGWSCWCCPRSGGAWAPSRPWTFSPASPPASTRMAAPAPAPAAASPSVSSLPRPKAGSVLDHRPSTVAAAAILAATYGPLLTKEALSSKMSCLSPSYLIEKEHVHACYSMMVGDMSRRGSKRSLPCSGPDEIATSTYHSVLVDDATDTAAFASAVAAARSKQIRLELTGIH

SEQ ID NO: 161293 - protein, 65 aa, Zea Mays
MHAKGTTYLQRHYLFLALVISIQKLYVLNFSPRFKQALRKLWLADAVSTFSVQNFGRKLPVHTYL

SEQ ID NO: 161294 - protein, 182 aa, Zea Mays
MSNLSALLGLSVSPHFCFEVDAPCVDAAAAARRSCAPRPSGSGPRNTRRRAACRRPPPLKRPCTLLAAKKQGAFSQPLESRTRTSKEQPLPLPPPPPRVKTTRSSSCSSCALAKSPHPDPRSSSSASAFLATSTSHVAPLGDFRLSVSVSCPFGSLTNFSEWVESLITPLQKAPSGGRTSLP

SEQ ID NO: 161295 - protein, 309 aa, Zea Mays
MALGNLEDIFPAASREYAPLVDELWKDPAIQATYRRSELPFLPPAASYFLDKAVDISRTEYELSDMDILYADGITSSDGVASTEFSFPQLSLGGLGVDEPDAQDTLLRYQLIRINSRGLHGNCKWLQMFDDVRLVIFCVAASDYDEYYEDANGTIVNKMIESRQLFESITLHPTFEQADFLLLLTKFDLLEQKISSSPLTSCDWFSDFTPLISRNLLNGGGGGGRRTARSSTGATLPQMAAHYMATKFKRLFESMTGRKLYVSYVNALDQESVRSAIRYGREVVKWEEEKPVFGASETVYSEEPSSFTA

SEQ ID NO: 161296 - protein, 618 aa, Zea Mays
MAAGASDYSFAAEYVGPPLPYTLPRAIPLDLSRIPLAALSSSPPASPSASSSPLPVVRPPSRLRPGFYWYDKVSGFWGKEGHKPHCIITANLNVGGSLDQKASNGNTGILINGREITKSELQMLKLAGVQCAGKPHFWVNADGTYQEEGQKTVKGKIWDKPIVKLLSPVLSLPTPNKAANQSSEDAVDIVNRAIPDYLEQRTTQKFLLVGSGASTILKQAKFLYKTGKPFSVDEREDLKLIIQSNIYNYLGILLEGRERFEEESLADRRKTSQCDPSSSGCCEPGLCDEVTEYSLIPRLKAFSDWILKAMALGNLEDIFPAASREYAPLVDELWKDPAIQATYRRSELPFLPPAASYFLDKAVDISRTEYELSDMDILYADGITSSDGVASTEFSFPQLSLGGLGVDEPDAQDTLLRYQLIRINSRGLHGNCKWLQMFDDVRLVIFCVAASDYDEYYEDANGTIVNKMIESRQLFESITLHPTFEQADFLLLLTKFDLLEQKISSSPLTSCDWFSDFTPLISRNLLNGGGGGGRRTARSSTGATLPQMAAHYMATKFKRLFESMTGRKLYVSYVNALDQESVRSAIRYGREVVKWEEEKPVFGASETVYSEEPSSFTA

SEQ ID NO: 161297 - protein, 429 aa, Zea Mays
MAAGASDYSFAAEYVGPPLPYTLPRAIPLDLSRIPLAALSSSPPASPSASSSPLPVVRPPSRLRPGFYWYDKVSGFWGKEGHKPHCIITANLNVGGSLDQKASNGNTGILINGREITKSELQMLKLAGVQCAGKPHFWVNADGTYQEEGQKTVKGKIWDKPIVKLLSPVLSLPTPNKAANQSSEDAVDIVNRAIPDYLEQRTTQKFLLVGSGASTILKQAKFLYKTGKPFSVDEREDLKLIIQSNIYNYLGILLEGRERFEEESLADRRKTSQCDPSSSGCCEPGLCDEVTEYSLIPRLKAFSDWILKAMALGNLEDIFPAASREYAPLVDELWKDPAIQATYRRSELPFLPPAASYFLDKAVDISRTEYELSDMDILYADGITSSDGVASTEFSFPQLSLGGLGVDEPDAQDTLLRCDNDGGYFNLFS

SEQ ID NO: 161298 - protein, 104 aa, Zea Mays
MKWVGCPHDKRRRQQLRKSMKEYCPERLLLISKNCYQQHQSSAQVQMSVVISATSKDLLGFTCIYINPQALLCYSILELNLGANKIGSLHFGKLEYISLSRDQQ

SEQ ID NO: 161299 - protein, 103 aa, Zea Mays
MPSLLETGSGEAETVVMGREDLGWDEDSTEYVPCPRAGPGEAKLWVTAERGLGRIVVYTLLSSGMCLVATSGLSTFRDVIQVPLITIPDKSSLELDLSASLES

SEQ ID NO: 161300 - protein, 315 aa, Zea Mays
MQTLNISICMLDIGKGKKLVTLLRDGDNIVTSQADKANLVDQFYSNLIGQSVFRESTIDLEALGLPAHNLSTLDAPFTKQEVWEAVSNLPSDKAPGPDGFTERFNKVLNAISAVWSRNFINLDKVNSAYIAMVPKIDGTDQVKDFRPISLVHSFAKLVTKILANRLASKLNELVSPNQSAFIKGRFIKDNFMQVQQTSRFLHQQNRACLLFKLDITKAFDSVSWPSLIEVLQALGFGQVWRDIICGFLVPLLLKCCSMVVLEIKSTIEGGLGKDVIFFLEHAGELRIIILSREGLKKTKNNSYTKKRIKGGKIRK

SEQ ID NO: 161301 - protein, 113 aa, Zea Mays
MIKILYLLCFIVTPKPLENHNFIAVTLNLVVLGPRISIRRVEHYYAVCSYVWCDINFAYTMFVCIAMSIIEVTSHLKSKLVPRNLEPKVSCALDHFSLHNNVHVNHCDMLSSI

SEQ ID NO: 161302 - protein, 277 aa, Zea Mays
MILLSPFDMFYLSSRFYFLRTVWRIILPLQAITFPDFFLADIFTSMSKVFSDLERSVCRMVNRQVATIAWFEADSICGSHSVAIPLVLVFPYLWRFFQCLRQYKDTKEKTCLFNALKYSTAIPVIFLSALKYHVYPDQWVGFYRPLWLISSVVNSLYSFYWDIKRDWDLSILTRIFMFKNPSIWTNLLYGQNWVFYWVLGSNLVLRCTWTYKLSAHLRHNYLTVFTIAALEILRRWQWVFFRVENEWNKMTAKQNLEMSSDMPSEGDRLLDSSNHTV

SEQ ID NO: 161303 - protein, 393 aa, Zea Mays
MGLMLLQGWDSVMRMSVDLRDLFLYEAFLYYNPLLLVALMIWLWGVNLWVFAQSSVNYAKVFDLAQTHLSHREIWRCATWLTLIVPTSMTAYLYLYSHGEVSLAASQPVLLYAILLMILLSPFDMFYLSSRFYFLRTVWRIILPLQAITFPDFFLADIFTSMSKVFSDLERSVCRMVNRQVATIAWFEADSICGSHSVAIPLVLVFPYLWRFFQCLRQYKDTKEKTCLFNALKYSTAIPVIFLSALKYHVYPDQWVGFYRPLWLISSVVNSLYSFYWDIKRDWDLSILTRIFMFKNPSIWTNLLYGQNWVFYWVLGSNLVLRCTWTYKLSAHLRHNYLTVFTIAALEILRRWQWVFFRVENEWNKMTAKQNLEMSSDMPSEGDRLLDSSNHTV

SEQ ID NO: 161304 - protein, 139 aa, Zea Mays
MSWHVAFRAHWPPAVALAHVPSSHHPSSAAPKSTDGSPSGDNADTADVSASSHPASSTFFHGRNWPASPSHAAAAAVALRPCGGGSGAATHVQMAPLSPHPAVRSAVFMMVADTEQLPVAAAFPRQPRARKSPVWLVTP

SEQ ID NO: 161305 - protein, 66 aa, Zea Mays
MPYSNRITAGCTIQKQGRRVLLIVFVVLPAATTRTIFFAERSAKRRAKCQEKRTGALHRKVIYICF

SEQ ID NO: 161306 - protein, 223 aa, Zea Mays
MALLPLPPCSPCHRRAAPLPAPTVASARHRRGSLRLAAAGACSGPTAARKPRPTAADRRRCECFDLHRRLVPYAEAYCWQKSIVERRKRLIDSGEDHSDTLIALQHPPVYTLGTDSKEEYLHFDKEDAPFEVHRINRGGEVTYHGPGQVGDFGLTRFKRNTLVSGGVRDTLPWMAPELLNGSSSKVYEKASMHRGAIICMYLRCPSNLLFAFQHWYISRMRQR

SEQ ID NO: 161307 - protein, 186 aa, Zea Mays
MALLPLPPCSPCHRRAAPLPAPTVASARHRRGSLRLAAAGACSGPTAARKPRPTAADRRRCECFDLHRRLVPYAEAYCWQKSIVERRKRLIDSGEDHSDTLIALQHPPVYTLGTDSKEEYLHFDKEDAPFEVHRINRGGEVTYHGPGQSFDLFLLACYVPDYESAVPQRGSSLVLQVTRRSDHPRT

SEQ ID NO: 161308 - protein, 50 aa, Zea Mays
MPSFSDRTARTCLPVPTGGPYTPMVKRDERAEETALRCAAEPSAVARGSE

SEQ ID NO: 161309 - protein, 415 aa, Zea Mays
MNGGEYGRMEEMARQLVARLAATPDSALRGLPFLHRVLTLPLLSAASAVLRLSLLLSRLRSRRALPVPVVSVGNLTWGGNGKTPMVDFLARSFHRLGVSPLLLTRGYAGGDEPKMLRRRLSDTSAKIGVGANRTAVASSMLQEYGFIHHFQNTFAEKKLSSVCKLESGNRIGVAILDDGMQHWSLLRDVEIVMVNGLAPWGNSHFIPRGPMREPLSALGRADIVVIHNADMVCGNRGASEMQLKAIRSAIEDNNATCSVFYSRLAPSHFFEVKQPSQRLPLNVLNDKIVLCVSAIGCPNAFIHTAREIGPLKIARLDFSDHHFFSAHDLEKIQETARNLMDEHSKDTIVLVTEKDYDRDPEALKTLDANVWVLSSSLQIMHHSKQGEDEFMRKVNEIITVTWCAKSHAADRATGC

SEQ ID NO: 161310 - protein, 238 aa, Zea Mays
MNGGEYGRMEEMARQLVARLAATPDSALRGLPFLHRVLTLPLLSAASAVLRLSLLLSRLRSRRALPVPVVSVGNLTWGGNGKTPMVDFLARSFHRLGVSPLLLTRGYAGGDEPKMLRRRLSDTSAKIGVGANRTAVASSMLQEYGFIHHFQNTFAEKKLSSVCKLESGNRIGVAILDDGMQHWSLLRDVEIVMVNGLAPWGNSHFIPRGPMREPLSALGRADIVVIHNADMVCGNRGF

SEQ ID NO: 161311 - protein, 436 aa, Zea Mays
MMLAHYFPAAAQSKGSQPILYPAAALPMNGGEYGRMEEMARQLVARLAATPDSALRGLPFLHRVLTLPLLSAASAVLRLSLLLSRLRSRRALPVPVVSVGNLTWGGNGKTPMVDFLARSFHRLGVSPLLLTRGYAGGDEPKMLRRRLSDTSAKIGVGANRTAVASSMLQEYGFIHHFQNTFAEKKLSSVCKLESGNRIGVAILDDGMQHWSLLRDVEIVMVNGLAPWGNSHFIPRGPMREPLSALGRADIVVIHNADMASEMQLKAIRSAIEDNNATCSVFYSRLAPSHFFEVKQPSQRLPLNVLNDKIVLCVSAIGCPNAFIHTAREIGPLKIARLDFSDHHFFSAHDLEKIQETARNLMDEHSKDTIVLVTEKDYDRDPEALKTLDANVWVLSSSLQIMHHSKQGEDEFMRKVNEIITVTWCAKSHAADRATGC

SEQ ID NO: 161312 - protein, 222 aa, Zea Mays
MMLAHYFPAAAQSKGSQPILYPAAALPMNGGEYGRMEEMARQLVARLAATPDSALRGLPFLHRVLTLPLLSAASAVLRLSLLLSRLRSRRALPVPVVSVGNLTWGGNGKTPMVDFLARSFHRLGVSPLLLTRGYAGGDEPKMLRRRLSDTSAKIGVGANRTAVASSMLQEYGFIHHFQNTFAEKKLSSVCKLESGNRIGVAILDDGMQAALELAPRCGDCDG

SEQ ID NO: 161313 - protein, 234 aa, Zea Mays
MTVCRQHWSLLRDVEIVMVNGLAPWGNSHFIPRGPMREPLSALGRADIVVIHNADMASEMQLKAIRSAIEDNNATCSVFYSRLAPSHFFEVKQPSQRLPLNVLNDKIVLCVSAIGCPNAFIHTAREIGPLKIARLDFSDHHFFSAHDLEKIQETARNLMDEHSKDTIVLVTEKDYDRDPEALKTLDANVWVLSSSLQIMHHSKQGEDEFMRKVNEIITVTWCAKSHAADRATGC

SEQ ID NO: 161314 - protein, 208 aa, Zea Mays
MPPSPIVLPATALPAARLARVVAASESGGATPPRASPRRGRRGKPGFSRRSAIKKSFHQEQVVFSTPVSTDPTVAVIGGGASGLSCATSLAARGVRSVVFDTGMHGLGGRMATRFVDGGKQLVFDHAAQFFTASDERFQRLVNEWLDRGLVREWSGLIGELEAGGCFRPIPSLTPRYIGVNGMRPLADAMLPEGNVPTVCSLHQDCHY

SEQ ID NO: 161315 - protein, 302 aa, Zea Mays
MPSKPNAASRLVFLAFLLVISAAAANDDAAARRTMEQFAGFPASDDGEGPSSDFHVDSEGLQRQIDELASFSDSPAPSVTRVLYTDKDVQARRYIKGIMNQLGLVVREDAVGNIFGRWEGSEPGLGAVATGSHVDAIPFSGKFDGVVGVLGALEAISLLKRSAFLPKRSLEVIMFTSEEPTRFGISCLGSRLMAGIEELAQSLRKVVDNQNVSFLDAAESAGYKLNLEDLHSVFLKTDKYSAFIELHIEQGPILEKEGIPIGIVTAIAAPASLKVDFEGNGGHAGAVLMPARYSAVTSRSNQ

SEQ ID NO: 161316 - protein, 335 aa, Zea Mays
MPSKPNAASRLVFLAFLLVISAAAANDDAAARRTMEQFAGFPASDDGEGPSSDFHVDSEGLQRQIDELASFSDSPAPSVTRVLYTDKDVQARRYIKGIMNQLGLVVREDAVGNIFGRWEGSEPGLGAVATGSHVDAIPFSGKFDGVVGVLGALEAISLLKRSAFLPKRSLEVIMFTSEEPTRFGISCLGSRLMAGIEELAQSLRKVVDNQNVSFLDAAESAGYKLNLEDLHSVFLKTDKYSAFIELHIEQGPILEKEGIPIGIVTAIAAPASLKVDFEGNGGHAGAVLMPARNDAGLAAAELALAVEKHVLESGSIDTVGTVDDEAAATTSDEGV

SEQ ID NO: 161317 - protein, 50 aa, Zea Mays
MAIGDVRPQEQQEQDQPSSSTMVHPPTQDDEHVPQEEARDQGGAQEEQVT

SEQ ID NO: 161318 - protein, 89 aa, Zea Mays
MFVVVCQILKVKMDKRLGTRWYHSFWLCFMTKWYHRDFPCKSVEQETDKWIDVIQNKLDATSWVNHTERDLSPSYHWKSVALEMSANVE

SEQ ID NO: 161319 - protein, 100 aa, Zea Mays
MSGTVAMQNQADSSPEKRLRRSPTPRHGQTSPRPPNAGAMPPRSRNYNVKGFKTGGREGLKSGLRFEVHEESSGKTQALPLFGRSRAKTIEHYNDRESRM

SEQ ID NO: 161320 - protein, 466 aa, Zea Mays
MQTTGPASPDKPPVVDPEADDKVEEGARAKEDDAAKVSGEDEDEEEQEGRRGRRQRRRRGGAAGDSSVAMVKRELLARCLTCPLCDRLLRKATTISECLHTFCRNCIYNKINDEDLDHCPVCKIDLGCTPVDKLRADHNIQDVRSKVFPFKRKKVNAEEAESPIMLPVKVKERSISSLVVNTPRVTPAASTGRRTRVVTRKAAALRGLGPIIVDPLKKDNDNSNKQTDNSSLLDSLSKIPQTRRQLLSNGDTSSHPSVKDKADDNKDFDKSELWKPLNCLVEAASKTKPLTSAQSPALKGEFRESPSSEHFSRTKVKVEDNKSDDPEPIVLLRKRGRPGRKRKNPLPETNAASTATAIQARKAFSPIWFSLIASFDQKGNPPLPQIPAHYLRIKDGSIPASSIQKYIMQKLSLVSESEVGNLDPVNLHHLLRHVQMVLVASLFSHAHGKFVCPFPPSQKLYQIFEK

SEQ ID NO: 161321 - protein, 116 aa, Zea Mays
MFALHFSPSRRVCGRRPRSRNAAADLPAEGGIGAGPGRLRGRRSRVREQTIPFATEDEAATNLLPPRFFATASFVSFSELRRLPQIRTCPLGFVVLRAKSSVLEIHLLLSIDEQDK

SEQ ID NO: 161322 - protein, 130 aa, Zea Mays
MDPKGKGMVVNDKEKESVFNEPRDDKPTDSGSSHKKKDRKNKRRIKKIVYYDSDESSSSKRDDEDEKKKPVNSNFSFDYSRIPSNSNAHLLSIPHEDSGRYMIYDDICDCHQLYSINDHNYRNNDDIFRR

SEQ ID NO: 161323 - protein, 148 aa, Zea Mays
MKRPQICFRRGSSPPHPSFPSPSFDGYLRSGLARLDSSCCGPNLPFLRVFFKLVMNHLQNSLHGSAPAVQRCYLAREGKSNPCGIALAQAITWNPRIQACFFFAQFNCHVHCHINIITYAFTNNDFKHLLCNVWFQHTMFDESTIFGA

SEQ ID NO: 161324 - protein, 111 aa, Zea Mays
MQCTHRTAIKRNGEDLQRSRQAGDPPVLCVQGAAALDHRWFRRRCCSAAATAWALAATWSYLTSSRLYVRSPVPAARLTAGQARRGGMRASPRLGCPLVSFAVRPGSSVFD

SEQ ID NO: 161325 - protein, 209 aa, Zea Mays
MALSFPAEVDTPILPHAVAAAAPFANLTAVFATFGVAGGSAEAEHVRDTLRWCEAPPRPAGERVAACATSLESTVRSATRMLGAAGGDGVWAAATSARLRAGLPRGRYVVGAVAPLHGDQLVACHRVPFPYAVYQCHMTTRKTDRAYVVSLRGRGGPVLDDVLAFCHRDTSGWSPDHPAFRILRVRLGTPVCHFVPYGNPVFGRKASTT

SEQ ID NO: 161326 - protein, 53 aa, Zea Mays
MPTTFSFKWVAPFYTYAEKWCQVAIVHLCIIPSLSLQKLKDCTAEEGPALFLP

SEQ ID NO: 161327 - protein, 605 aa, Zea Mays
MDQYEVLEQIGKGAFGSALLVRHKAEKKKYVLKKIRLARQTDRTRRSAHQELIATVRNPFIVEYKDSWVEKGCYVCIVIGYCEGGDMAEAIKKVNGNHFSEEKLCKWLVQLLMALDYLHANHILHRDVKCSNIFIARDQSIRLGDFGLAKILTSDDLASSVVGTPSYMCPELLADIPYGTKSDIWSLGCCIYEMAALRPAFKAFDMQALISKITKSIVSPLPTRYSGSFRGLIKSMLRKSPEHRPSAAELLKHPHLQPYVLQVQLKSSPSRTTSPIYQALTDKVKKMTFVSDTADSARRRAARRSSLGSERTVTFCKPSPERNSVSSTRSIKEYTTTTQSARELSVGSSLQVDDEVTSKAVVTKTAGVLRTPSKSRAPASKTLVAARSRLDPPKTSYARTNRAELDSRTPLSKSSARTARRASLPLAAYRAPSGGRAGSFLEQLDSPDVSVNAPRIDRIAEFPLASSEEPLAPMNKKLSCSTPPFSTRSITKDKYTVQAVAPRAGDGDTAASDSSGRNATAASSRGSSDSSSRQQQHHLQQRFDTSSYQQRAEALEGLLEFSAQLLQQERYEELGILLKPFGPEMASPRETAIWLTKSFKETAPS

SEQ ID NO: 161328 - protein, 84 aa, Zea Mays
MLSLCYAMSVLCFEWHRLVVSAGVLFPFSFDYLPIYRMIPVKSYAPFFFFFTGRTRSLLVPLWEWQAHGRKGGCDVKRDEQLYT

SEQ ID NO: 161329 - protein, 160 aa, Zea Mays
MADGGGEGGPPAASAALKDQGNEQFKAGSYLKAAALYTQAIKLDPDNATLYSNRAAAFLQLVKLSKALADAETTVRLKPQWEKGHFRKGCVLEAMERYEEAIAAFQIALQHNSQNTEVSRKIKRLSQLAREKKRALDVENMRSNVDIAKNLESLKTELEK

SEQ ID NO: 161330 - protein, 204 aa, Zea Mays
MQIGHSAYVDSPLGPDAFREYETLLIQDHDELLKKSENLDRHKENIHKEASDFTSDVDNYSKWGSGVHYGSNSESSPTKRDFLMTKWARVFVLPSEGIIADSSLSNHHEDSLGSGLPSISTGKPFDSDEVPPGVTLTAQFLYHLANKMDLKLDIFSLGDTSKPANGEAASPKKQSPSGSRSPDLLMANTAELTTIGQNLQAKPE

SEQ ID NO: 161331 - protein, 764 aa, Zea Mays
MGNASSSEPEDSPVFNFINNLSPIPPPKPLDSAHNVQLFKSSDLAPVSSIFASPHVNPVKETKVLIRDESVHLPQELHSPSSVRTRIDTSGSFRMIRCKDIVSDNCNITCQLNEASIDSSDHTSNSTGQLTQSIQDAAGSMESDKDQCDANKTDLTISQECTGLEGMNLDESGPDKMDSSHSGIVVHENQLSEQNNDEPAAYNEGYIITHQSTSDMLTLAIPSGTETQPVNDTQMADNPYSCESLLDDQSSGYCTQNSVHEPHLYWTGAVEGSAVSYTPQTLPGALQSQLMPCNKLSEPKDYVPTEQNALSQHLRGMRRRSLFNEKAGISNKGVDKTSDHHPVNSTTPKCKTISGDNSKPLRTPPCALPGIGLHLNALATIPKEKIVPREIQSTINESSNLIGPAGSSPAPFEQNIINDDFTQTTDVATAEASSQGSPKKKRHKFDNGDGTSCKRCSCKKSKCLKLYCECFAAGVYCSEPCSCIGCQNNQSHMETVLSTRQQIESRNPLAFAPKVIHTSEPGMDLGDFSNKTPASARHKRGCNCKKSSCLKKYCECFQGGVGCSVSCRCEGCKNAFGKREGASVLGIGEPKQGLEEKYVCVKEEKSEIDKQLVVYQTTDAAPAENVLTTPSMVECRPLACLPPASSKKSSKKPRSSTKLTGHPSRPCNLQAPPKTDVVLSPFENYAEMVLGDSTSDILKGNSSPHTSVKVVSPNKKRISPPRMGIGLSPICRSGRKLILKSIPSFPSLGGDVNNEDPKAKLPAP

SEQ ID NO: 161332 - protein, 670 aa, Zea Mays
MIRCKDIVSDNCNITCQLNEASIDSSDHTSNSTGQLTQSIQDAAGSMESDKDQCDANKTDLTISQECTGLEGMNLDESGPDKMDSSHSGIVVHENQLSEQNNDEPAAYNEGYIITHQSTSDMLTLAIPSGTETQPVNDTQMADNPYSCESLLDDQSSGYCTQNSVHEPHLYWTGAVEGSAVSYTPQTLPGALQSQLMPCNKLSEPKDYVPTEQNALSQHLRGMRRRSLFNEKAGISNKGVDKTSDHHPVNSTTPKCKTISGDNSKPLRTPPCALPGIGLHLNALATIPKEKIVPREIQSTINESSNLIGPAGSSPAPFEQNIINDDFTQTTDVATAEASSQGSPKKKRHKFDNGDGTSCKRCSCKKSKCLKLYCECFAAGVYCSEPCSCIGCQNNQSHMETVLSTRQQIESRNPLAFAPKVIHTSEPGMDLGDFSNKTPASARHKRGCNCKKSSCLKKYCECFQGGVGCSVSCRCEGCKNAFGKREGASVLGIGEPKQGLEEKYVCVKEEKSEIDKQLVVYQTTDAAPAENVLTTPSMVECRPLACLPPASSKKSSKKPRSSTKLTGHPSRPCNLQAPPKTDVVLSPFENYAEMVLGDSTSDILKGNSSPHTSVKVVSPNKKRISPPRMGIGLSPICRSGRKLILKSIPSFPSLGGDVNNEDPKAKLPAP

SEQ ID NO: 161333 - protein, 468 aa, Zea Mays
MIRCKDIVSDNCNITCQLNEASIDSSDHTSNSTGQLTQSIQDAAGSMESDKDQCDANKTDLTISQECTGLEGMNLDESGPDKMDSSHSGIVVHENQLSEQNNDEPAAYNEGYIITHQSTSDMLTLAIPSGTETQPVNDTQMADNPYSCESLLDDQSSGYCTQNSVHEPHLYWTGAVEGSAVSYTPQTLPGALQSQLMPCNKLSEPKDYVPTEQNALSQHLRGMRRRSLFNEKAGISNKGVDKTSDHHPVNSTTPKCKTISGDNSKPLRTPPCALPGIGLHLNALATIPKEKIVPREIQSTINESSNLIGPAGSSPAPFEQNIINDDFTQTTDVATAEASSQGSPKKKRHKFDNGDGTSCKRCSCKKSKCLKLYCECFAAGVYCSEPCSCIGCQNNQSHMETVLSTRQQIESRNPLAFAPKVIHTSEPGMDLGDFSNKTPASARHKRGCNCKKSSCLKKYCECFQMRGL

SEQ ID NO: 161334 - protein, 531 aa, Zea Mays
MDTPDRPRAAAAAGFEDSPVFNFINNLSPIPPPKPLDSAHNVQLFKSSDLAPVSSIFASPHVNPVKETKVLIRDESVHLPQELHSPSSVRTRIDTSGSFRMIRCKDIVSDNCNITCQLNEASIDSSDHTSNSTGQLTQSIQDAAGSMESDKDQCDANKTDLTISQECTGLEGMNLDESGPDKMDSSHSGIVVHENQLSEQNNDEPAAYNEGYIITHQSTSDMLTLAIPSGTETQPVNDTQMADNPYSCESLLDDQSSGYCTQNSVHEPHLYWTGAVEGSAVSYTPQTLPGALQSQLMPCNKLSEPKDYVPTEQNALSQHLRGMRRRSLFNEKAGISNKGVDKTSDHHPVNSTTPKCKTISGDNSKPLRTPPCALPGIGLHLNALATIPKEKIVPREIQSTINESSNLIGPAGSSPAPFEQNIINDDFTQTTDVATAEASSQGSPKKKRHKFDNGDGTSCKRCSCKKSKCLKLYCECFAAGVYCSEPCSCIGCQNNQSHMETVLSTRQQIESRNPLAFAPKVIHTSEPGLFQ

SEQ ID NO: 161335 - protein, 269 aa, Zea Mays
MARLAVAARAFSAAASGGGVSLVQGASRGIGLEFVRQLLRRSDGGRVVATCRTPGSAAELQKLREEHAPGRLTVLPLDVTDESTIEAAAASITETHGSLDLLINSAGILSIPNVIQPETTLSKVQKSSLMLAYEVNAVGPILVIKHMWPLLKIGGRSETRRGFALVANMSARVSSIGDNALGGWHAYRASKTALNQLSVEFGRKDNIACVLLHPGTVDTDLSRPFQRNVPEGKLFTREFSVQRLLSVIDSVKKGDNGKFFAWDGQEIPW

SEQ ID NO: 161336 - protein, 435 aa, Zea Mays
MARDEHVKFTLKFETTVETDSTQAPISQVLYTFHSVHHSMPKLEYSSSKMDMEKEIRKQVDDAIAKAKLDEASRALLMKVLEDATQDVVQRQAKMLVLFETPAGFTLFKVLDEGKLDKVEDLWKEFTTSDSARKVVELKAFNKFENTSDALSAATLIIDSKPSKGLRKFLQKHCEGETLVVADSKLGNAIKEKLLMRGLRNQLTELITGLGAQDLGPMSLGLSHSLSRYKLKFSPEKVDTMIIQDIGLLDDLDKELNTYAMRVREWYGWHFPELTKIVTDNIQYAKVVKMMGNRVNAVNLDFSKILSDEELETQLKEAAIISMGTEVSDLDLSNIRELCDQVLAISEYRAQLYDYLRSRMNTIAPNLTALALFRALKTKHSTPKYGLIYHASLIGKASQKHKGKISHSLAAKTALAIRYDALGDGEDKIVSTIQN

SEQ ID NO: 161337 - protein, 89 aa, Zea Mays
MLLLLLPLLNSSSVKKFLLPFSKDKSGGSSGDEADCPICRSSPSIPFIALPCQHRYCYYCLRTRCSATTSYRCTRCDGAVVAIQRLGSG

SEQ ID NO: 161338 - protein, 120 aa, Zea Mays
MIFLPSQVCCIVTMIQMQFTWLWWHNISYMEMLLLLLPLLNSSSVKKFLLPFSKDKSGGSSGDEADCPICRSSPSIPFIALPCQHRYCYYCLRTRCSATTSYRCTRCDGAVVAIQRLGSG

SEQ ID NO: 161339 - protein, 278 aa, Zea Mays
MSAMLKEQLVKVFSLMKPGLLFQYEPELDAFLEFLIWRFSIWADKPTPGNALMNLRYRDERAAPITGKEVRTGLEGPGLSVSQKIFYCISFVGGQYVWSRLQSFSAFRRWGDSEQRPLARRAWALMRNAEVFYRAASFFNLLLFLYGGRYKTVVERILKARLVYGSPNMNRAVSFEYMNRQLVWNEFSEMLLLLLPLLNSSSVKKFLLPFSKDKSGGSSGDEADCPICRSSPSIPFIALPCQHRYCYYCLRTRCSATTSYRCTRCDGAVVAIQRLGSG

SEQ ID NO: 161340 - protein, 299 aa, Zea Mays
MPQVESATASEAPPPQDAWLVELGSRLPQWESLRDSSKPGLLFQYEPELDAFLEFLIWRFSIWADKPTPGNALMNLRYRDERAAPITGKEVRTGLEGPGLSVSQKIFYCISFVGGQYVWSRLQSFSAFRRWGDSEQRPLARRAWALMRNAEVFYRAASFFNLLLFLYGGRYKTVVERILKARLVYGSPNMNRAVSFEYMNRQLVWNEFSEMLLLLLPLLNSSSVKKFLLPFSKDKSGGSSGDEADCPICRSSPSIPFIALPCQHRYCYYCLRTRCSATTSYRCTRCDGAVVAIQRLGSG

SEQ ID NO: 161341 - protein, 323 aa, Zea Mays
MDSARSWLQKLQPRDKDRERGAKTPAPASPNGGAGNSARMAAAAGEEALSSATKQKVAAAKQYIENHYKSQMKSLQERKERRWMLERKLADADVSEEEQNNILKDLEKKETEYMRLRRHKMGVDDFELLTIIGRGAFGEVRLCREKATSNVYAMKKLKKSEMLRRGQVEHVRAERDLLAEVDSPYIVKLYCSFQDDEFLYLIMEYLPGGDMMTLLMRKDTLTEDESKFYVAETILAIESIHKRIYIHRDIKPDNLLLDRSGHLKLSDFGLCKPLDSSCFPNLSDLDYAAGGHNRNNYYIGRRIGGCWLTLLLVHLITLHPRYS

SEQ ID NO: 161342 - protein, 540 aa, Zea Mays
MDSARSWLQKLQPRDKDRERGAKTPAPASPNGGAGNSARMAAAAGEEALSSATKQKVAAAKQYIENHYKSQMKSLQERKERRWMLERKLADADVSEEEQNNILKDLEKKETEYMRLRRHKMGVDDFELLTIIGRGAFGEVRLCREKATSNVYAMKKLKKSEMLRRGQVEHVRAERDLLAEVDSPYIVKLYCSFQDDEFLYLIMEYLPGGDMMTLLMRKDTLTEDESKFYVAETILAIESIHKRIYIHRDIKPDNLLLDRSGHLKLSDFGLCKPLDSSCFPNLSDLDYAAGGHNRNNYYIGRRIGGCWLTLLLVHLITLHPRWSLGAIMFEMLVGYPPFYSEDPMSTCRKIVNWRSHLKFPEEASLSLEAKDLISKLLCNVDQRIGTKGAHEIKAHPWFAGVEWEKLYQMEAAFIPEVNDELDTQNFEKFEETAPPMQTSSKAGPWRKMLSSKDVNFVGYTYKNFEIVNDPELPGIAELKKTNNKPKRPTIKSLFETADSEDQPSDGSFLNLLPTQLELPESLEPSPHSSISSEDSQARNR

SEQ ID NO: 161343 - protein, 327 aa, Zea Mays
MKKLKKSEMLRRGQVEHVRAERDLLAEVDSPYIVKLYCSFQDDEFLYLIMEYLPGGDMMTLLMRKDTLTEDESKFYVAETILAIESIHKRIYIHRDIKPDNLLLDRSGHLKLSDFGLCKPLDSSCFPNLSDLDYAAGKSTNPSSDGDKQSSNSTAPRRTQQEQLLHWQKNRRMLAYSTVGTPDYIAPEVLLKKGYGMECDWWSLGAIMFEMLVGYPPFYSEDPMSTCRKIVNWRSHLKFPEEASLSLEAKDLISKLLCNVDQRIGTKGAHEIKVLSGKNYIRWKQLSFLRLMMSWTHKTLKSLRRLLLQCKLHQRQVLGERCFPPRT

SEQ ID NO: 161344 - protein, 293 aa, Zea Mays
MDSARSWLQKLQPRDKDRERGAKTPAPASPNGGAGNSARMAAAAGEEALSSATKQKVAAAKQYIENHYKSQMKSLQERKERRWMLERKLADADVSEEEQNNILKDLEKKETEYMRLRRHKMGVDDFELLTIIGRGAFGEVRLCREKATSNVYAMKKLKKSEMLRRGQVEHVRAERDLLAEVDSPYIVKLYCSFQDDEFLYLIMEYLPGGDMMTLLMRKDTLTEDESKFYVAETILAIESIHKRIYIHRDIKPDNLLLDRSGHNRNNYYIGRRIGGCWLTLLLVHLITLHPRYS

SEQ ID NO: 161345 - protein, 420 aa, Zea Mays
MKKLKKSEMLRRGQVEHVRAERDLLAEVDSPYIVKLYCSFQDDEFLYLIMEYLPGGDMMTLLMRKDTLTEDESKFYVAETILAIESIHKRIYIHRDIKPDNLLLDRSGHLKLSDFGLCKPLDSSCFPNLSDLDYAAGKSTNPSSDGDKQSSNSTAPRRTQQEQLLHWQKNRRMLAYSTVGTPDYIAPEVLLKKGYGMECDWWSLGAIMFEMLVGYPPFYSEDPMSTCRKIVNWRSHLKFPEEASLSLEAKDLISKLLCNVDQRIGTKGAHEIKAHPWFAGVEWEKLYQMEAAFIPEVNDELDTQNFEKFEETAPPMQTSSKAGPWRKMLSSKDVNFVGYTYKNFEIVNDPELPGIAELKKTNNKPKRPTIKSLFETADSEDQPSDGSFLNLLPTQLELPESLEPSPHSSISSEDSQARNR

SEQ ID NO: 161346 - protein, 68 aa, Zea Mays
MFCRHCCPYLKTCSFYFVSFSIIAFMSNVTQNIAAIFGMKPFAQLWLAHEHLYKIMYLTFPSNLIQYE

SEQ ID NO: 161347 - protein, 408 aa, Zea Mays
MQTAIEHACSVVECAATARAAMDMSHYIPDWSSSMGDTFAPLGGEDDDGLIELMWRNGHVVMQAQAPRKPPRPDDDEAAAAQAQAWFQYPVEERADLFSELFGEAQAAVGGARGEAARQSIRMMPPPPPPPRPAQAPREEKACPGDGGTATATDGAGSSVLTVVSSLCGSNGNHVQATAPGDVARARDVLMVTSSSTTRSRSCTTKSEQPGPGPGAARRSGKRKHNDATDAEDVGLECEPAQRTTTAKRRRAAQVHNLSERRRRDRINEKMKALQELIPHCNKADKASMLDEAIEYLKSLQLQLQVVWMGGGIAAAGVHQRTMVAAPGRPPHVASLPASAPDLYTRYLAVDHLPPPPLVPPPRTVELSGGDGLVPAPEPRAGDVVSFLPNDRKYAKTMASLRFRSGVW

SEQ ID NO: 161348 - protein, 342 aa, Zea Mays
MGCYPVFWRKKNSRSQVVQLDQDIPIAGNVKIYSSKELRKATGNFCPGSKLGQGSFGRVYLGKLNNGEKVAIKVLSSESRQGTKEFLNELSVISNITHHNLVKLHGCCIDGGQKMLVYNYVENNSLAQTLFGNSRSGIRFDWRTRVEICVGVADGLTYLHEEVRPPIVHRDIKASNILLDRNLRPKIADFGLAKFFPGNMTHISTRVAGTLGYLAPEYAIRGQLTKKADVYSFGVLLLEIVSGRCHTDPTLPLDEQFLLEKVWTLSESDDLESIIDGTMERDFDTEEARRLLKIGLLCTQDSPKIRPSMSMVAKMLKAVHCSRRASPQARCLGGESAPVSDC

SEQ ID NO: 161349 - protein, 483 aa, Zea Mays
MQGRDMVGRAKTGTGKTLAFGIPIMDAIIRHNEKYKPGKFPLAIVLAPTRELAKQVEREFLDSSPLETLCVYGGTPIMQQIRKLNYGVDVVIGTPGRVIDLLKRGSLSLAEIRFVVLDEADQMLSVGFDLDVETILERVPPQRQTLMFSATMPTWIRKLTQKYLNNPVTVDLVGEDDQKLAEGISLLAVSSENREKPAVLGELIKEHAKGGKCIVFTQTKRDADRLSHNMSRSFQCEALHGDISQSQRERTLAGFRDGRFNILIATDVAARGLDIPNVDLVIHFELPNSSELFVHRSGRTGRAGKKGTAIVMYNYDQSRAVRVIERDVGCKFTELPKITVDGSDLLSGGFDSFGGGYSGSNYGRSGGFGGRGGFGRSGGGGGYGNSGFGHSSGGYGRSGGGGFGDSGFGGRSGGGGGFGDSGFGGQSGGGGGFGDSGFGRTSGGGSGFGRSGGFGDSGSGRFGGGFGGSGSGGFGGFGDKNSR

SEQ ID NO: 161350 - protein, 68 aa, Zea Mays
MWRCVRLIIVHRGLVFGLSAARCSSSRAGAVDVSHDLSSGSSISVNFPLCRPERGRRNWFSGIELHVR

SEQ ID NO: 161351 - protein, 430 aa, Zea Mays
MGYTPGLFIVGLFGILIMWMYGYFWITGMLLVAGGCMCSLKHARYVIPVLTSYGVYSVAVRVGWLGVFLTLNLSFLTNDLLNKLVQGYEGSTEESQFEDMKDSDPVMDEFYRSCEFPSVPDSEPETVSCAKPYCSAPIQDVLHVQKEEPPSKVVKSDSTSLDEIKRIMDGSNHYEVLGVPRNRSIDQKTLKKEYHRMVLLVHPDKNMGNQLACESFKKLQTAYEVLSDFTKKNSYDEQLRKEESQKMTPRSCVVSQQSGGVEFLSEESRRIQCTKCGNFHIWICTKRSKTRARFCQGCDQFHQAKDGDGWVETRFSTSIKMEIPRAFVCAESKIFDVSEWATCQGMECKPNTHGPTFMVNMVGADRMPQRSYSSRYPFSLDAEMIPEDEFELWLQQALASGVFADSPKRRKSWSPFKLPQKGIKSWRRSS

SEQ ID NO: 161352 - protein, 419 aa, Zea Mays
MEDLGLWKQAWMWVLSQKHILAWAHTAACGSRERLAFLVDRHWPAVSRACATSSRLALAALRQWRGCTARGVLAVASLGPAAVFVILWSFFVCMTSPACALYALLSLGAAAAVVHYMGYTPGLFIVGLFGILIMWMYGYFWITGMLLVAGGCMCSLKHARYVIPVLTSYGVYSVAVRVGWLGVFLTLNLSFLTNDLLNKLVQGYEGSTEESQFEDMKDSDPVMDEFYRSCEFPSVPDSEPETVSCAKPYCSAPIQDVLHVQKEEPPSKVVKSDSTSLDEIKRIMDGSNHYEVLGVPRNRSIDQKTLKKEYHRMVLLVHPDKNMGNQLACESFKKLQTAYEVLSDFTKKNSYDEQLRKEESQKMTPRSCVVSQQSGGVEFLSEESRRIQCTKCGNFHIWICTKRSKTRARFCQNYVDVGL

SEQ ID NO: 161353 - protein, 319 aa, Zea Mays
MEDLGLWKQAWMWVLSQKHILAWAHTAACGSRERLAFLVDRHWPAVSRACATSSRLALAALRQWRGCTARGVLAVASLGPAAVFVILWSFFVCMTSPACALYALLSLGAAAAVVHYMGYTPGLFIVGLFGILIMWMYGYFWITGMLLVAGGCMCSLKHARYVIPVLTSYGVYSVAVRVGWLGVFLTLNLSFLTNDLLNKLVQGYEGSTEESQFEDMKDSDPVMDEFYRSCEFPSVPDSEPETVSCAKPYCSAPIQDVLHVQKEEPPSKVVKSDSTSLDEIKRIMDGSNHYEVLGVPRNRSIDQKTLKKEYHRMSCVLFL

SEQ ID NO: 161354 - protein, 809 aa, Zea Mays
MASSRGRLRLSPRAAAPQLDAGKYVRYTAEQVDALELAYGECPKPSSLRRQQLIRDCAVLTNVEPRQIKVWFQNRRCREKQRRESSRLQTVNRKLGAMNKLLMEENDRLQKQVSRLVFDNGYMKNRLHSPSVATTDTSCESVVTSGQHKQQQNPAVLHPPQRDANNPAGLLAIAEETLAEFMSKATGTAVNWVQMVGMKPGPDSVGIIAVSHNCSGVAARACGLVSLEPTKVAEILKDRASWYRDCRRVDILHVIPTGNGGTIELIYMQTYALTTLAEPRDFWTLRYTSGLDDGSLVICERSLTHSTGGPSGPKTPDFIRAEVLPSGYLIRPCDGGGSMIYIVDHVDLNACSVPEVLRPLYESPKILAQKMTAAALRHIRQIAHESSGETPYGAGRQPAVLRTFSQRLSRGFNDAVSGFPDDGWSSLLSSDGAEDISITINSSPNKLIGSDVSPSPFFSAMGGGIMCAKASMLLQNVPPALLVRFLREHRSEWADPGVDAYSAASLRANPYNVPGLRAGGFMGNQVILPLARTVEHEECLEVIRLQGHGFSHDEVLMSPDMFLLQLCSGIDEDAPGACAQLVFAPIDESFADDAPLLPSGFRVIPLDAKTDVPSATRTLDLASALEVGSGGGLCALSDSGSGTRSTRSVLTIAFQFSFENHLRESVAAMARQYVRAVMAIVQRVAMAISPSRLGPHVELKHPPGSPEALALASWIGRSYRAHTGTEIRWSDTEDAAGSPLTLFWKHSDAIICCSLKPAFTLKFANSAGFDILETTVANVQDLQLEAVLDDGGQKALVAQLPKIMLQPCL

SEQ ID NO: 161355 - protein, 788 aa, Zea Mays
MASSRGRLRLSPRAAAPQLDAGKYVRYTAEQVDALELAYGECPKPSSLRRQQLIRDCAVLTNVEPRQIKVWFQNRRCREKQRRESSRLQTVNRKLGAMNKLLMEENDRLQKQVSRLVFDNGYMKNRLHSPSVATTDTSCESVVTSGQHKQQQNPAVLHPPQRDANNPAGLLAIAEETLAEFMSKATGTAVNWVQMVGMKPGPDSVGIIAVSHNCSGVAARACGLVSLEPTKVAEILKDRASWYRDCRRVDILHVIPTGNGGTIELIYMQICERSLTHSTGGPSGPKTPDFIRAEVLPSGYLIRPCDGGGSMIYIVDHVDLNACSVPEVLRPLYESPKILAQKMTAAALRHIRQIAHESSGETPYGAGRQPAVLRTFSQRLSRGFNDAVSGFPDDGWSSLLSSDGAEDISITINSSPNKLIGSDVSPSPFFSAMGGGIMCAKASMLLQNVPPALLVRFLREHRSEWADPGVDAYSAASLRANPYNVPGLRAGGFMGNQVILPLARTVEHEECLEVIRLQGHGFSHDEVLMSPDMFLLQLCSGIDEDAPGACAQLVFAPIDESFADDAPLLPSGFRVIPLDAKTDVPSATRTLDLASALEVGSGGGLCALSDSGSGTRSTRSVLTIAFQFSFENHLRESVAAMARQYVRAVMAIVQRVAMAISPSRLGPHVELKHPPGSPEALALASWIGRSYRAHTGTEIRWSDTEDAAGSPLTLFWKHSDAIICCSLKPAFTLKFANSAGFDILETTVANVQDLQLEAVLDDGGQKALVAQLPKIMLQVPLLTLPART

SEQ ID NO: 161356 - protein, 126 aa, Zea Mays
MHPPLVGMHPAGLPLPTDAIEEPVYVNAKQYNAILRRRQSRAKAESERKLIKGRKPYLHESRHQHALKRARGAGGRFLNSKSDDKEENSDSSHKENQNGVAPHRSGQPSTPPSPNGASSANQGRQS

SEQ ID NO: 161357 - protein, 156 aa, Zea Mays
MSHAMGQYAYPNIDPYYGSLYAAAYGGQPLMHPPLVGMHPAGLPLPTDAIEEPVYVNAKQYNAILRRRQSRAKAESERKLIKGRKPYLHESRHQHALKRARGAGGRFLNSKSDDKEENSDSSHKENQNGVAPHRSGQPSTPPSPNGASSANQGRQS

SEQ ID NO: 161358 - protein, 146 aa, Zea Mays
MTSVVHSVSGDHRAEDQNQQKKQAEPGDQQEAPVTSSDSQPTVGTPSTDYVAPYAPHDMSHAMGQYAYPNIDPYYGSLYAAAYGGQPLMHPPLVGMHPAGLPLPTDAIEEPVYVNAKQYNAILRRRQSRAKAESERKLIKGRKEDS

SEQ ID NO: 161359 - protein, 73 aa, Zea Mays
MRSNLCSTSLRKLVTRVLCLTVLAPCRHYQQETVLVPRLVVQMFRVTCFHHHLQSMMDCQPSGVVVLAVELMR

SEQ ID NO: 161360 - protein, 532 aa, Zea Mays
MYPTAFPLRLKRPWASGLPMFNGGRSDEFARYSSLMWLRDGNRGAQSLNFQGLGASPWLQPRIDNPLLSLKPDTYQQMAAAALEEIRAGDHLKQASSLLPVQQTQTLNGGLDHLYGNPVLQQMQFQSQQSTLQAVQQGYGQNANDSGYVQNQLQQLQLQKQQEPPPPQQQQQTQVLQRQAHQEMQQHLSASCHDIANVASGVSMSGSACQSQSSLLSGSSFYQQNIFDGNGGPDLHLHNSFHNFSSQESSNLLNLPRSGQLMASEGWPSKRLAVESLAGHEIQPLQHKLEKVSHQSTVSHCSGTLPPLSARDGSSAQACGTNVQSHLLPSSFAIHDGLSTIRSGGVGSGTDAITIASLRYSDANLLPENSIATSSCLGESGTFNSLDDVCGVNPSQGGTFVKVYKSGSLGRSLDITRFGSYYELRVELERLFGLEGQLEDPARSGWQLVFVDRENDVLLLGDDPWQEFVNSVGCIKILSPQDLQQMARGGGGDLLSAPGARMLQGSVCDDYSAGHDVQNLTGSIAPVVPLDY

SEQ ID NO: 161361 - protein, 755 aa, Zea Mays
MVDSLFRAEQLRKSSLHWIFHNSLQCKSWLQEICMIMNGNFVIFFVPKRHLLTTGWSVFVSAKRLVAGDSIIFIWNDNNQLLLGIRRASRPQTVMPSSVLSSDSMHIGLLAAAAHAAATNSRFTIFYNPRASPSEFVIPLAKYVKAVYHTRVSVGMRFRMLFETEESSVRRYMGTITGISDLDSERWPNSHWRSVKVGWDESTAGDKQPRVSLWEIEPLTTFPMYPTAFPLRLKRPWASGLPMFNGGRSDEFARYSSLMWLRDGNRGAQSLNFQGLGASPWLQPRIDNPLLSLKPDTYQQMAAAALEEIRAGDHLKQASSLLPVQQTQTLNGGLDHLYGNPVLQQMQFQSQQSTLQAVQQGYGQNANDSGYVQNQLQQLQLQKQQEPPPPQQQQQTQVLQRQAHQEMQQHLSASCHDIANVASGVSMSGSACQSQSSLLSGSSFYQQNIFDGNGGPDLHLHNSFHNFSSQESSNLLNLPRSGQLMASEGWPSKRLAVESLAGHEIQPLQHKLEKVSHQSTVSHCSGTLPPLSARDGSSAQACGTNVQSHLLPSSFAIHDGLSTIRSGGVGSGTDAITIASLRYSDANLLPENSIATSSCLGESGTFNSLDDVCGVNPSQGGTFVKVYKSGSLGRSLDITRFGSYYELRVELERLFGLEGQLEDPARSGWQLVFVDRENDVLLLGDDPWQEFVNSVGCIKILSPQDLQQMARGGGGDLLSAPGARMLQGSVCDDYSAGHDVQNLTGSIAPVVPLDY

SEQ ID NO: 161362 - protein, 799 aa, Zea Mays
MTLQPLSPEEQKDPFLPIELGAGSKQPTNYFCKTLTASDTSTHGGFSVPRRAAEKVFPPLDFSQQPPVQELVARDLHDNEWKFRHIFRGQPKRHLLTTGWSVFVSAKRLVAGDSIIFIWNDNNQLLLGIRRASRPQTVMPSSVLSSDSMHIGLLAAAAHAAATNSRFTIFYNPRASPSEFVIPLAKYVKAVYHTRVSVGMRFRMLFETEESSVRRYMGTITGISDLDSERWPNSHWRSVKVGWDESTAGDKQPRVSLWEIEPLTTFPMYPTAFPLRLKRPWASGLPMFNGGRSDEFARYSSLMWLRDGNRGAQSLNFQGLGASPWLQPRIDNPLLSLKPDTYQQMAAAALEEIRAGDHLKQASSLLPVQQTQTLNGGLDHLYGNPVLQQMQFQSQQSTLQAVQQGYGQNANDSGYVQNQLQQLQLQKQQEPPPPQQQQQTQVLQRQAHQEMQQHLSASCHDIANVASGVSMSGSACQSQSSLLSGSSFYQQNIFDGNGGPDLHLHNSFHNFSSQESSNLLNLPRSGQLMASEGWPSKRLAVESLAGHEIQPLQHKLEKVSHQSTVSHCSGTLPPLSARDGSSAQACGTNVQSHLLPSSFAIHDGLSTIRSGGVGSGTDAITIASLRYSDANLLPENSIATSSCLGESGTFNSLDDVCGVNPSQGGTFVKVYKSGSLGRSLDITRFGSYYELRVELERLFGLEGQLEDPARSGWQLVFVDRENDVLLLGDDPWQEFVNSVGCIKILSPQDLQQMARGGGGDLLSAPGARMLQGSVCDDYSAGHDVQNLTGSIAPVVPLDY

SEQ ID NO: 161363 - protein, 109 aa, Zea Mays
MLPLLFMMATFIFFLILVFVFIFVLTPILMPMFVLLVFLVFVFVPFMLLLFVLGLTFWFTRNSRYTFFSLRQIHKSCFSKLERLPQSFHIKGLNISRFIPQICIMNKLI

SEQ ID NO: 161364 - protein, 109 aa, Zea Mays
MDTGSDRSMGPEVPVKALRRRHKHPPAAATARSRSVQSGGRRSRPSRAPLPDFCSTLEPTCNKQAQAARQSWCNTTRHAAAGLPRRAWLLAVPLPTAEGMLTCDGSPPT

SEQ ID NO: 161365 - protein, 233 aa, Zea Mays
MHGDEAKRVCPGINLVQVPVARGKANLNLYRSAGAEVVVILASKGKCERASIDEVYLDLTDAAKEMLLQAPPDSPEGIFMEATKSNILGLPADASEKEKNVRAWLCQSEADYQDKLLACGAIIVAQLRVRVLEETQFTCSAGIAHNKMLAKLVSGMYKPAQQTVVPSSSVQDLLASLPVKKMKQLGGKLGSSLQDNLGVETIGDLLSFTEEKLQEQYGVNTGFDHIIYLPTTI

SEQ ID NO: 161366 - protein, 244 aa, Zea Mays
MGGGGPHSAELSAQSRRQGASEVQSLETHHGDGPGIQDYSNANDMQLALAHRRNCTYLDGKDFVDFGSIDWGRLLRNHGISDSEKVLIFFDDHQSELKRLKQALKAGFRHLIFEDNYDTGTCDHYFLRHIYDPSYIRGCRREALATECCTPTANRGYRAGGQKQPATTVGHRDLYGPSKYTRHLQATKDTLREEGDITPPTGIRQAMEMQAEVERRICAQVLESEGKKQAQILELEGKKTAQIL

SEQ ID NO: 161367 - protein, 174 aa, Zea Mays
MDSICQKFPYLVKKKLKEGEEVRRVAQLEWKIIESDIQKPFTTSGLEFVPLPVIHGEDYICLGFLFGRKSKVAYISDVSRFPPSTEYAISKSGGGQLDLLILDCLYRTGSHNVHLCWDQTLDAVRRICPKRALLIGMTHEMDHHKDNQTLEEWSRREGIDVQLARDGLRVYIDL

SEQ ID NO: 161368 - protein, 93 aa, Zea Mays
MRSERCNTSLLIDYCQDERAHKYIIIDVGKTFREQVLRWFVRHKIPCVDSILLTHEHADAILGLDDVRVVQPFSPTNDIDPTPIYLSQFAMDR

SEQ ID NO: 161369 - protein, 258 aa, Zea Mays
MAAAVPNGHTAAAGDDDAPPAASSSLVFLGTGCSSAVPNARCLIQPPDPPCPVCSQSLSVPPELNPNYRCNTSLLIDYCQDERAHKYIIIDVGKTFREQVLRWFVRHKIPCVDSILLTHEHADAILGLDDVRVVQPFSPTNDIDPTPIYLSQFAMDSICQKFPYLVKKKLKEGEEVRRVAQLEWKIIESDIQKPFTTSGLEFVPLPVIHGEDYICLGFLFGRKSKVAYISDVSRFPPSTEYDGFSQCALVLGPDTRCC

SEQ ID NO: 161370 - protein, 265 aa, Zea Mays
MCISCRCNTSLLIDYCQDERAHKYIIIDVGKTFREQVLRWFVRHKIPCVDSILLTHEHADAILGLDDVRVVQPFSPTNDIDPTPIYLSQFAMDSICQKFPYLVKKKLKEGEEVRRVAQLEWKIIESDIQKPFTTSGLEFVPLPVIHGEDYICLGFLFGRKSKVAYISDVSRFPPSTEYAISKSGGGQLDLLILDCLYRTGSHNVHLCWDQTLDAVRRICPKRALLIGMTHEMDHHKDNQTLEEWSRREGIDVQLARDGLRVYIDL

SEQ ID NO: 161371 - protein, 84 aa, Zea Mays
MLRLMAKLCRYFFPLKSSIKHVLAIDSALCRADMGSCSPRGTFEKFLSLKQRAFRIISPFTDLFSVAAQHGTTYEKQSIAAACK

SEQ ID NO: 161372 - protein, 239 aa, Zea Mays
MKEENSYSRSPMAERNLNSTAEKAAAPKDLGGISKQMFSDSNTDTYSFKQLMSLGDEKENDPEAAVQLPPTTKARRVSLCNGGAHQRPLNPASRRTSLIPLPRRNSLLPMPVAKPAAAAAAVLPLDKITENLSSPPLCSPPAVSNDKGSRSRRINSILRRSLQKKVVIRPSLAAQAGKKAAGAAAARGTDSARRAARRVPVSDGAGGQRYSRTGTRSGGGATSDQNIAAPLLLKKPVEI

SEQ ID NO: 161373 - protein, 384 aa, Zea Mays
MLYLLLQRRPRTYPLGGDSKTLMFVQISPNENDVGETLCSLNFASRVRGIELGQAKKQVDIGELSRYKLMVGRAKQDSKNKDAQIKSMEERIQILEAKNKTKDLLTMNLQEKIKELESQLLVERKIARQHVDNKIAQDHLQKQHGMKEENSYSRSPMAERNLNSTAEKAAAPKDLGGISKQMFSDSNTDTYSFKQLMSLGDEKENDPEAAVQLPPTTKARRVSLCNGGAHQRPLNPASRRTSLIPLPRRNSLLPMPVAKPAAAAAAVLPLDKITENLSSPPLCSPPAVSNDKGSRSRRINSILRRSLQKKVVIRPSLAAQAGKKAAGAAAARGTDSARRAARRVPVSDGAGGQRYSRTGTRSGGGATSDQNIAAPLLLKKPVEI

SEQ ID NO: 161374 - protein, 329 aa, Zea Mays
MRFEYSDSDMVGLQYLSGDISGGNARCIAMLLAFREAINDYSMPSEKILNRDLTAKISSYVSFLIECRPLSISMGNAIRFLKNRITKLPLAFSESEAKVSLQSDIDRFINEKIIVADKVIVSHAVTKIRDGDVLLTFGSASVVEMIFDNAHELGKKFRVVVVDSRPNHEGQGLLRRLVAKGISCTYTHINAVSYIMHEVTRVFLGASSVLSNGTVYSRVGTALVAMVAHAFGVPVLVCCEAYKFHERVQLDSICFNELGDPDAISRVPRDESLSNLKNWAENENLHLLNLKYDITPSDYVSMLITDYGMLPPTSVPVIVREYRREHVWI

SEQ ID NO: 161375 - protein, 431 aa, Zea Mays
MASDANTKQPKTAKISLKKDVNQVNSPVASDKKTGERPPDKDRKKDAPQPRMQFDDTHRVVKAKKRSVVRQSEAQNRVELFRHLPQYAHGTQLPDLESKFFQPDLMHPSVYKVGLQYLSGDISGGNARCIAMLLAFREAINDYSMPSEKILNRDLTAKISSYVSFLIECRPLSISMGNAIRFLKNRITKLPLAFSESEAKVSLQSDIDRFINEKIIVADKVIVSHAVTKIRDGDVLLTFGSASVVEMIFDNAHELGKKFRVVVVDSRPNHEGQGLLRRLVAKGISCTYTHINAVSYIMHEVTRVFLGASSVLSNGTVYSRVGTALVAMVAHAFGVPVLVCCEAYKFHERVQLDSICFNELGDPDAISRVPRDESLSNLKNWAENENLHLLNLKYDITPSDYVSMLITDYGMLPPTSVPVIVREYRREHVWI

SEQ ID NO: 161376 - protein, 595 aa, Zea Mays
MDIRRGPPPPRTASGGVEPRFRQVGFVTAAEPARGAATPAPASPAASDGLSPVMIPPPLIPVPVPVPVAPASESLAPSSPPPDSSSRPDAVSDLDDDDDIDVSWARPPPPAFPEPNKRHLTERKNEHAPPTPVSQKPKLSKAERRAIQESQRAAKAAAKEAGLKSTAMASDANTKQPKTAKISLKKDVNQVNSPVASDKKTGERPPDKDRKKDAPQPRMQFDDTHRVVKAKKRSVVRQSEAQNRVELFRHLPQYAHGTQLPDLESKFFQPDLMHPSVYKVGLQYLSGDISGGNARCIAMLLAFREAINDYSMPSEKILNRDLTAKISSYVSFLIECRPLSISMGNAIRFLKNRITKLPLAFSESEAKVSLQSDIDRFINEKIIVADKVIVSHAVTKIRDGDVLLTFGSASVVEMIFDNAHELGKKFRVVVVDSRPNHEGQGLLRRLVAKGISCTYTHINAVSYIMHEVTRVFLGASSVLSNGTVYSRVGTALVAMVAHAFGVPVLVCCEAYKFHERVQLDSICFNELDAISRVPRDESLSNLKNWAENENLHLLNLKYDITPSDYVSMLITDYGMLPPTSVPVIVREYRREHVWI

SEQ ID NO: 161377 - protein, 71 aa, Zea Mays
MFPSMSIFSMLILPITREITPCTFYGDTIAKYSHSMKDLSQQIVVHHLRKSEPATILYTRGGWRSFPEHYY

SEQ ID NO: 161378 - protein, 157 aa, Zea Mays
MRPRGRGDNIKDDEDEYEDITPPRRTPEPETDPVRSPSPAPAPAPPHPARAPLSSLVVRPPPQQQENDGGSSPPSSSARSPSPSTGGHRGRGASPPRRRRDFSPPPPRGWVRHWSPLPPPPERRHPGSPQPQRRRFSPPPRSHLPRHPRFHDEQQDL

SEQ ID NO: 161379 - protein, 213 aa, Zea Mays
MGERDGIWTWHRVNRLFNWLPLAALIEKKIICMHGGIGRSINHIEQIENLHRPITMEAGSVVLMDLLWSDPTENDSVEGLRPNARGPGLVTFGPDRVMEFCNNNDLQLIVRAHECVMDGFERFAQGHLITLFSATNYCGTANNAGAILVLGRDLVVVPKLIHPLPPAITSPETSPEHHIEDTWMQELNANRPPTPTRGRPQAPNNDRGSVAWI

SEQ ID NO: 161380 - protein, 396 aa, Zea Mays
MVRQLSIDQFENEGRRVIYGTPENATAARKLLDRQMSINSVPKKVIASLLKPRGWKPPVRRQFFLDCNEIADLDNAERIFSSEPSVLQLKAPIKIFGDLHGQFGDLMRLFDEYGAPSTAGDIAYIDYLFLGDYVDRGQHSLETISLLLALKVEYPHNVHLIRGNHEAADINALFGFRIECIERMGERDGIWTWHRVNRLFNWLPLAALIEKKIICMHGGIGRSINHIEQIENLHRPITMEAGSVVLMDLLWSDPTENDSVEGLRPNARGPGLVTFGPDRVMEFCNNNDLQLIVRAHECVMDGFERFAQGHLITLFSATNYCGTANNAGAILVLGRDLVVVPKLIHPLPPAITSPETSPEHHIEDTWMQELNANRPPTPTRGRPQAPNNDRGSVAWI

SEQ ID NO: 161381 - protein, 951 aa, Zea Mays
MDVDSRMATESDSDSDARGGSGSGSETPTASPSPSASPSPSAPGTPTAAVASPAPVAGPRPAPGYTVVDAAMDKKEDGPGSRCGHTLTAVPAAGEEGSPGYVGPRLILFGGATALEGNSATPPSSAGSAGIRLAGATADVHCYDVLSNKWTRLTPLGEPPSPRAAHVATAVGTMVVIQGGIGPTGLSAEDLHVLDLTQQRPRWHRVVVQGPGPGPRYGHVMALVGQRFLLTIGGNDGKRPLADVWALDTAAKPYEWRKLEPEGEGPPPCMYATASARSDGLLLLCGGRDANSVPLSSAYGLAKHRDGRWEWAIAPGVSPSPRYQHAAVFVNARLHVSGGALGGGRMVEDSSSVAVLDTAAGVWCDTKSVVTTPRTGRYSADAAGGDASVELTRRCRHAAAAVGDLIFVYGGLRGGVLLDDLLVAEDLAAAETTSAANHAAAAAAASSNVQREPGRYAYNDEQSGQTVTVSSPDGAVVLGTPVAPPVNGDMYTDISPENAIIQGQRRLSKGVDYLVEASAAEAEAISATLAAVKARQVNGEMEHSPDREQSPDAAPSAKQNSSLIKPDPALMNNSTPPPGVRLHHRAVVVAAETGGALGGMVRQLSIDQFENEGRRVIYGTPENATAARKLLDRQMSINSVPKKLKAPIKIFGDLHGQFGDLMRLFDEYGAPSTAGDIAYIDYLFLGDYVDRGQHSLETISLLLALKVEYPHNVHLIRGNHEAADINALFGFRIECIERMGERDGIWTWHRVNRLFNWLPLAALIEKKIICMHGGIGRSINHIEQIENLHRPITMEAGSVVLMDLLWSDPTENDSVEGLRPNARGPGLVTFGPDRVMEFCNNNDLQLIVRAHECVMDGFERFAQGHLITLFSATNYCGTANNAGAILVLGRDLVVVPKLIHPLPPAITSPETSPEHHIEDTWMQELNANRPPTPTRGRPQAPNNDRGSVAWI

SEQ ID NO: 161382 - protein, 385 aa, Zea Mays
MHLLAIYIRRASVLSQLPHNLLVAPSPGKIWKNPHGVLLADLRHLYPGNTTKASECSTPAILNMSDDNGPSEMGVGQPMVVGRKLLPPIVPGGEPIFVCEKQYAAILRLRERRLRAKEARERRLLQAKEEPNGGSMVECNPAPGDSHQHLITTSGYQQVTTGGSEAQSSIPLGFYWYVFTTSEGGQSSTPAGMGFYYPFNTTNGGENVGGVASGSEVPSSNAPSGFFWPLIMASSEENNGEVTYGSMVPISNPAGYFCWPVAVTNEHGEDTGESADGGEAPISNPAGDFCSWPVVATNDDEENVGEVAYNSVLNLESPDHTDLLRIMMGNRYSTDEASEQFQNVARLQAPGFTALLTVMNNAGYGPAADCGPHDAHKVMTRLEGW

SEQ ID NO: 161383 - protein, 415 aa, Zea Mays
MDEICKANVTAPMHLLAIYIRRASVLSQLPHNLLVAPSPGKIWKNPHGVLLADLRHLYPGNTTKASECSTPAILNMSDDNGPSEMGVGQPMVVGRKLLPPIVPGGEPIFVCEKQYAAILRLRERRLRAKEARERRLLQAKKNRPRGPNGRFVMIKDNQEEPNGGSMVECNPAPGDSHQHLITTSGYQQVTTGGSEAQSSIPLGFYWYVFTTSEGGQSSTPAGMGFYYPFNTTNGGENVGGVASGSEVPSSNAPSGFFWPLIMASSEENNGEVTYGSMVPISNPAGYFCWPVAVTNEHGEDTGESADGGEAPISNPAGDFCSWPVVATNDDEENVGEVAYNSVLNLESPDHTDLLRIMMGNRYSTDEASEQFQNVARLQAPGFTALLTVMNNAGYGPAADCGPHDAHKVMTRLEGW

SEQ ID NO: 161384 - protein, 460 aa, Zea Mays
MPRNACMITDVITTIKLRSCLDRWMKFARFFLKIKPTPVPNTEFIIYYSVKFQYIVGYNKWVFVTLANVTAPMHLLAIYIRRASVLSQLPHNLLVAPSPGKIWKNPHGVLLADLRHLYPGNTTKASECSTPAILNMSDDNGPSEMGVGQPMVVGRKLLPPIVPGGEPIFVCEKQYAAILRLRERRLRAKEARERRLLQAKDNQEEPNGGSMVECNPAPGDSHQHLITTSGYQQVTTGGSEAQSSIPLGFYWYVFTTSEGGQSSTPAGMGFYYPFNTTNGGENVGGVASGSEVPSSNAPSGFFWPLIMASSEENNGEVTYGSMVPISNPAGYFCWPVAVTNEHGEDTGESADGGEAPISNPAGDFCSWPVVATNDDEENVGEVAYNSVLNLESPDHTDLLRIMMGNRYSTDEASEQFQNVARLQAPGFTALLTVMNNAGYGPAADCGPHDAHKVMTRLEGW

SEQ ID NO: 161385 - protein, 344 aa, Zea Mays
MSQGNTTKASECSTPAILNMSDDNGPSEMGVGQPMVVGRKLLPPIVPGGEPIFVCEKQYAAILRLRERRLRAKEARERRLLQAKDNQEEPNGGSMVECNPAPGDSHQHLITTSGYQQVTTGGSEAQSSIPLGFYWYVFTTSEGGQSSTPAGMGFYYPFNTTNGGENVGGVASGSEVPSSNAPSGFFWPLIMASSEENNGEVTYGSMVPISNPAGYFCWPVAVTNEHGEDTGESADGGEAPISNPAGDFCSWPVVATNDDEENVGEVAYNSVLNLESPDHTDLLRIMMGNRYSTDEASEQFQNVARLQAPGFTALLTVMNNAGYGPAADCGPHDAHKVMTRLEGW

SEQ ID NO: 161386 - protein, 403 aa, Zea Mays
MHLLAIYIRRASVLSQLPHNLLVAPSPGKIWKNPHGVLLADLRHLYPGNTTKASECSTPAILNMSDDNGPSEMGVGQPMVVGRKLLPPIVPGGEPIFVCEKQYAAILRLRERRLRAKEARERRLLQAKKNRPRGPNGRFVMIKDNQEEPNGGSMVECNPAPGDSHQHLITTSGYQQVTTGGSEAQSSIPLGFYWYVFTTSEGGQSSTPAGMGFYYPFNTTNGGENVGGVASGSEVPSSNAPSGFFWPLIMASSEENNGEVTYGSMVPISNPAGYFCWPVAVTNEHGEDTGESADGGEAPISNPAGDFCSWPVVATNDDEENVGEVAYNSVLNLESPDHTDLLRIMMGNRYSTDEASEQFQNVARLQAPGFTALLTVMNNAGYGPAADCGPHDAHKVMTRLEGW

SEQ ID NO: 161387 - protein, 526 aa, Zea Mays
MLGPGRSATALLFLAATAGDVKFVMDRPRAGQAAERTWAQGTGRACGGTESARVLTTIMAPDQLSAMPRNACMITDVITTIKLRSCLDRWMKFARFFLKIKPTPVPNTEFIIYYSVKFQYIVGYNKWVFVTLANVTAPMHLLAIYIRRASVLSQLPHNLLVAPSPGKIWKNPHGVLLADLRHLYPGNTTKASECSTPAILNMSDDNGPSEMGVGQPMVVGRKLLPPIVPGGEPIFVCEKQYAAILRLRERRLRAKEARERRLLQAKDNQEEPNGGSMVECNPAPGDSHQHLITTSGYQQVTTGGSEAQSSIPLGFYWYVFTTSEGGQSSTPAGMGFYYPFNTTNGGENVGGVASGSEVPSSNAPSGFFWPLIMASSEENNGEVTYGSMVPISNPAGYFCWPVAVTNEHGEDTGESADGGEAPISNPAGDFCSWPVVATNDDEENVGEVAYNSVLNLESPDHTDLLRIMMGNRYSTDEASEQFQNVARLQAPGFTALLTVMNNAGYGPAADCGPHDAHKVMTRLEGW

SEQ ID NO: 161388 - protein, 99 aa, Zea Mays
MLGPGRSATALLFLAATAGDVKFVMDRPRAGQAAERTWAQGTGRACGGTESARVLTTIMAPDQLSAMPRNACMITDVITTIKLRSCLDRWMKFARLAGS

SEQ ID NO: 161389 - protein, 450 aa, Zea Mays
MLNAAMRMDSATTSIVGVSLSFDTHQGLLAHYSVLVMSSVTFGQRSSAVQLLRKREHSVDTESVPAAEELRVQAEPLAGDTNTETISNSASSPSTSLQASQTELGTKEHQAAVVIQSAFRAFLARRALRALKGLVRLQALVRGHAVRKQAAETLQCMQALVRAQARVRARRVRVSLESQGTQKKPPEENVHEDHVRDIEEDWCGSIGSVEEMKAKTLKRQEAAAKRERAMAYALTHQWQASSRKQKAASLQGQGLAGDENQWGRNWLERWMAARPWENRLLDSNARDSVTAGDDDDKPAEEGKAKAPDLSKPKGKAPVLASQSNGSRQEKAADHEKSHSDVSGCGSSSGRSADVQPTVSLESSKVEVKVKAPQEVADEASSGPSNPASRSASNPKERPARTDAPARKRLSLPNNAASRGVGKRPTNSSRSRTNVASRPKNGRGASSPGLE

SEQ ID NO: 161390 - protein, 159 aa, Zea Mays
MPAPDGWTKKFTPQRGGRSEIVFVSPTGEEIKNKRQLSQYLKAHPGGPAASDFDWGTGDTPRRSARISEKVKVFDSPEGEKIPKRSRNSSGRKGRQGKKEAPETEEAKDAETGQDAPSEDGTKETDVEMKPAEEAKEAPTETDDAEKMRKKLRNQLKLL

SEQ ID NO: 161391 - protein, 300 aa, Zea Mays
MKPAEEAKEAPTETDDAEKAADKADDTPAPAPMEEDEKETEKPAEAVVAPLAQSEEKKEDAKPDEPEAVAPAPVSNPTENSAPAPAEPAAVPAPVPETESVAEPAAVLAPAPETKPDAKPAAVPAPAPENKPDAEPAAAAAPVPDTKSVAEPAAAPAPDTKSVAEPAAAAPVPETKLVAESAADAVAAPAPETKSDAEPAAAPVPETKPVAESAADAVAAPAPETKSDAEPAAAADPAPEIKSDAAAADPAPGTKADAAATDAAPGAEPDAAPLENTAADKGGSEESSQPVNNVNNGHST

SEQ ID NO: 161392 - protein, 65 aa, Zea Mays
MPRGDGLVTTQLQYPYWRHQFQLQTVWQNSEELKQELIPVTASMSGRLFHGSVSKGTLPLFSVDL

SEQ ID NO: 161393 - protein, 129 aa, Zea Mays
MRSPLAACLSPPSSASTGLALAMVRPTPLRCLCVSAGRAFPVRTIALCVHGKLSPCRFSSSSQDRSSSFSPTSPVESFSCASWSVRLAEHLAIDAGRVLASNFLVLGSQLAQLWWSSRPTSTRSTVSAT

SEQ ID NO: 161394 - protein, 221 aa, Zea Mays
MILWIATFWFVGSWIVPLLAHAAGFSKETLTHRGQALYSLLTDITEGLAGIAILHQCLGRFRPLPPGWFEFNLKGKWHLDVAFGCLLFPLVNLLSHINISLVPASPGPAVGVSSVEQSIVARDPVAMALYAVVVTVCAPIWEEIVFRGFLLPSLTRYMPLPWSILASAAAFALAHFNAQRVMPLVFLGVVMGGVFARSRNLLASMVLHSLWNGFVFLDLMK

SEQ ID NO: 161395 - protein, 509 aa, Zea Mays
MGSGVRALMRRKQVDSERTRAAGSAHQLRKELSVTQLVAIGVGSTIGAGVYVLVGTVAREHSGPALTLSFLIAGIAAALSAFCYAELASRCPSAGSAYHYSYICVGEGVAWLIGWALILEYTIGGSAVARGISPNLALFFGGQDSLPWILARHEIPWLDVVVDPCASFLVFVVTGLLCVGIKESSFVQGVVTVLNCFVMLFVIIAGSYIGFQTGWVGYKVAGGFFPYGANGMLAGSATVFFAYIGFDSVASTAEEVKNPQRDLPLGIGTALSICCSLYMLVSVVIVGLVPYFAMDPDTPISSAFAKHGMHWAMYLVTTGAVLALCSTLMGSILPQPRILMAMARDGLLPSFFSDVHKTTQVPVKSTVVTGICAAALAFFMDVSQLAGMVSVGTLLAFTIVAVSILILRYVPPDEVPLPSSLQASFRLSQENDEEKLRGTLGDDDHEQGSAEISDVVVEPITDPLIEKQLYASNLSEAKRRKTAACSITSVCIGVLILTTSASATFLPSR

SEQ ID NO: 161396 - protein, 596 aa, Zea Mays
MGSGVRALMRRKQVDSERTRAAGSAHQLRKELSVTQLVAIGVGSTIGAGVYVLVGTVAREHSGPALTLSFLIAGIAAALSAFCYAELASRCPSAGSAYHYSYICVGEGVAWLIGWALILEYTIGGSAVARGISPNLALFFGGQDSLPWILARHEIPWLDVVVDPCASFLVFVVTGLLCVGIKESSFVQGVVTVLNCFVMLFVIIAGSYIGFQTGWVGYKVAGGFFPYGANGMLAGSATVFFAYIGFDSVASTAEEVKNPQRDLPLGIGTALSICCSLYMLVSVVIVGLVPYFAMDPDTPISSAFAKHGMHWAMYLVTTGAVLALCSTLMGSILPQPRILMAMARDGLLPSFFSDVHKTTQVPVKSTVVTGICAAALAFFMDVSQLAGMVSVGTLLAFTIVAVSILILRYVPPDEVPLPSSLQASFRLSQENDEEKLRGTLGDDDHEQGSAEISDVVVEPITDPLIEKQLYASNLSEAKRRKTAACSITSVCIGVLILTTSASATFLPFPVRCSVCVLGGMLLLAGLGMLCWIDQDDGRHSFGHSGGFICPFVPLLPWRHVDASGGVASDGGVRLHFLWPHPQLVDGCRVCPCGRGE

SEQ ID NO: 161397 - protein, 402 aa, Zea Mays
MGSGVRALMRRKQVDSERTRAAGSAHQLRKELSVTQLVAIGVGSTIGAGVYVLVGTVAREHSGPALTLSFLIAGIAAALSAFCYAELASRCPSAGSAYHYSYICVGEGVAWLIGWALILEYTIGGSAVARGISPNLALFFGGQDSLPWILARHEIPWLDVVVDPCASFLVFVVTGLLCVGIKESSFVQGVVTVLNCFVMLFVIIAGSYIGFQTGWVGYKVAGGFFPYGANGMLAGSATVFFAYIGFDSVASTAEEVKNPQRDLPLGIGTALSICCSLYMLVSVVIVGLVPYFAMDPDTPISSAFAKHGMHWAMYLVTTGAVLALCSTLMGSILPQPRILMAMARDGLLPSFFSDVHKTTQVPVKSTVVTGICAAALAFFMDVSQLAGMMRYPSHLPCKHHSA

SEQ ID NO: 161398 - protein, 617 aa, Zea Mays
MGSGVRALMRRKQVDSERTRAAGSAHQLRKELSVTQLVAIGVGSTIGAGVYVLVGTVAREHSGPALTLSFLIAGIAAALSAFCYAELASRCPSAGSAYHYSYICVGEGVAWLIGWALILEYTIGGSAVARGISPNLDSLPWILARHEIPWLDVVVDPCASFLVFVVTGLLCVGIKESSFVQGVVTVLNCFVMLFVIIAGSYIGFQTGWVGYKVAGGFFPYGANGMLAGSATVFFAYIGFDSVASTAEEVKNPQRDLPLGIGTALSICCSLYMLVSVVIVGLVPYFAMDPDTPISSAFAKHGMHWAMYLVTTGAVLALCSTLMGSILPQPRILMAMARDGLLPSFFSDVHKTTQVPVKSTVVTGICAAALAFFMDVSQLAGMVSVGTLLAFTIVAVSILILRYVPPDEVPLPSSLQASFRLSQENDEEKLRGTLGDDDHEQGSAEISDVVVEPITDPLIEKQLYASNLSEAKRRKTAACSITSVCIGVLILTTSASATFLPFPVRCSVCVLGGMLLLAGLGMLCWIDQDDGRHSFGHSGGFICPFVPLLPVMCILINTYLLINLGGGTWMRVGVWLVMGVFVYIFYGRTHSSLTDVVYVPVAEANEIYGSSSSLGFVA

SEQ ID NO: 161399 - protein, 219 aa, Zea Mays
MLDRMRPEDVGLSPDLSFFRARDATRGGGTPTITHTTIYKCPNFSMVILFLPRNAVIPLHNHPGMTVFSKLLLGSMHVKSYDWLNTADPDPSSATSTTSSSSSDGPCLRLAELVVDDVFTAPCDTSVLYPTAGGNMHRFTAMAPCAILDVLGPPYSIEEDRDCTYYAELPYAHHSLVAAGEDVERGQGQGHLAWLEEIDMPRELKMCSVHYGGPPISDE

SEQ ID NO: 161400 - protein, 232 aa, Zea Mays
MRLLKNLNSFSYQNADRMRPEDVGLSPDLSFFRARDATRGGGTPTITHTTIYKCPNFSMVILFLPRNAVIPLHNHPGMTVFSKLLLGSMHVKSYDWLNTADPDPSSATSTTSSSSSDGPCLRLAELVVDDVFTAPCDTSVLYPTAGGNMHRFTAMAPCAILDVLGPPYSIEEDRDCTYYAELPYAHHSLVAAGEDVERGQGQGHLAWLEEIDMPRELKMCSVHYGGPPISDE

SEQ ID NO: 161401 - protein, 258 aa, Zea Mays
MSFFASQESDESNTEWLSGYVEDCFSSSTSYTNPVSAMASEGVGKPKLPPPPSSNGRRKKRSLASVMTNGDYQQFVLPLYVEPPLILIDQKHWMAESELIHPKKDDDDREVCQQQGQEQEKGVPRLVKMCSNCLSSQTPRWRDGPSGRQMMCSACGMRLKPETRLSAEQQCGQEEPTRKEQEPDRKRKKAAKKTCYESSDAPPSSDQQEKRCAHCLSSKTPQWRAGPLGPKTLCNACGVRFKSGSEADVSRNLSLEAR

SEQ ID NO: 161402 - protein, 134 aa, Zea Mays
MASHPPLAVVASGSQPPRIQLAASAPRSCPPHCRWSSSSSRRRSCSWPNLPRRSNWVRDVLVHLGEAPAVTSAAPSTPLPARDRIWERQEVAPHLQQRARTFPFLPSPPPSHRQACPLLTRLFFYKFRSTSILT

SEQ ID NO: 161403 - protein, 78 aa, Zea Mays
MSLTKLIRVDSFSCSNNGNKTLSMGLLSKTDPTKEKTLKGMLDLKGFKVRLIKFQRIIFAEKLTSSGSLCQNFTSQVK

SEQ ID NO: 161404 - protein, 127 aa, Zea Mays
MPSSTSASGAVGLGRRQPPNPIAAVGGLRRSDSSRWWWARLMEKNYSDAERFLARRPEERLINDYLLLESAARKVATGLAYLLLTWSTVVLLGGFVSVLKLIDFWCLAAISTSFAVKLNIVGFTYVV

SEQ ID NO: 161405 - protein, 62 aa, Zea Mays
MGNLNKSGKDVVLLRSMGMHADIGRHLPSVPLFDPATMEGEMIDGTISIGMKEMVLTVDARQ

SEQ ID NO: 161406 - protein, 160 aa, Zea Mays
MIDPTERRWNPGLLPLHPQLHCSTRATEALCPPRSPPVAASAAQRSILLTPPATASGGDPFQLALRPGNHFGKVVSGIALLKKLEAVGSETGNPSYQVKIVDCGEVSNTNSQDPLKGDKVSSKTDNSSSDSEKGGHRTKRSLPKGMIQVEAPGTIPFSLM

SEQ ID NO: 161407 - protein, 352 aa, Zea Mays
MLKGMGFTPSPHEAAIYRRGNGGSALLVGVYVDDLVITGAKDAEVAAFKEEMKATFQMSDLGHLSYLGIEVHQGDSRITLRQTTYVKRIVELAGLIDCNPALTPMEERLKLSRDSTTEEVDATQYRRLVGSLRYLVHTRPDLAYSVGYVSRFLQRPTTEHEQAVKRIIRYVAGTLDHGLYYPRCPGEAHLVGYSDSDHAGGIDTSKSTSEILFFLSKCLISWQSVKQQVVAMSSCEAKYIAVSTASTQALWLARLLGDLLGRDTGAVELRVDSQSALALAKNPVFNERSKHIWVRYHFIRDCLAEGSIKTRYISTKDQLADLLTKPLGRIKFLELCSRSGMAQLSHKTTPKT

SEQ ID NO: 161408 - protein, 54 aa, Zea Mays
MPTSIAFTAGELFRAASATVLLCLYQGAPCPHHQELVLPFGLLSVWGKYPQGGF

SEQ ID NO: 161409 - protein, 60 aa, Zea Mays
MPTSIAFTAGELFRAASATVLLCLYQGAPCPHHQELVLPFGLLRIQQCLGKISSRRLLNF

SEQ ID NO: 161410 - protein, 238 aa, Zea Mays
MLALFFDRIGWPTSLPTSEKGSFIKSVLREKLKALEEFSASDSLPLRPGVEKFIDDALGEGVPLAILAAYGRNGEKISRSIAMKLGPERISKIKIVGNVEVEESFYGQLVLGKGVTSGLDEQLVREAQKAASAEKQRIAEKVASILKLSVDITASESSDKVIAALRAGSEYVGCDVQSCILVAGSQSGVLAAERIGMPCIVVRSSFTARAEFHSAKAVMDGFGDTDLTVSKLLSKKWF

SEQ ID NO: 161411 - protein, 232 aa, Zea Mays
MVPPTHPPARPGGGPTNHHCPCSLPAARGIARRSPESPLPVHSPTVCFTSPVMSAAAAAAAAARCVPLRVSSPETAKSAASIPTSSAASASAPLRAAVAAGPGRRLPAPPFRCSSSSPENSAPRDLGLLLEVEGVLADVYRFGNRQAFNVAFRSLGLDCANWTEPIYADLVRKACGDEERMLALFFDRIGWPTSLPTSEKGSFIKSVLREKLKALEEFSASDSLPLRPGVEK

SEQ ID NO: 161412 - protein, 209 aa, Zea Mays
MNQRKMRRGRWGCRMYRTGEMGQIRCRTADAGRQIMSFESDNGPTHPSTRTPRRWTYQSSLSLFSSSGAGDSSPESGVAAASPQPHRLLHLARHVCCRSSCSCRSVRPSPGVLAGDREVRRFHSHLLGRLCVCSPPRRRRRGTRPPASGAAVPVLLIVAGELCPARSWIASGGGRSSCRCLPFWQSPSFQCSISKPRTRLCKLDRANIC

SEQ ID NO: 161413 - protein, 131 aa, Zea Mays
MEVTQLEDDEIVNKKKSELKRQGADAFSKEDYLNASVFYTQALKVDQFDATLFSNRSLCWLRLGDGKKALLDAIECKHLRPNWGKAYYRQGAALMSLEDYSSAYDAFSHGLELDPESEEMEKMLWEAMDLK

SEQ ID NO: 161414 - protein, 214 aa, Zea Mays
MALKHSYVSCLKLLVQRNLIHICNAGNTKYDAIQECSYDSTRLPIELAAEYGTWEDVELLFPVTSKIPTVADWSVNGVISNVHMEVTQLEDDEIVNKKKSELKRQGADAFSKEDYLNASVFYTQALKVDQFDATLFSNRSLCWLRLGDGKKALLDAIECKHLRPNWGKAYYRQGAALMSLEDYSSAYDAFSHGLELDPESEEMEKMLWEAMDLK

SEQ ID NO: 161415 - protein, 235 aa, Zea Mays
MPRREVSLPDAFNLVLGKDRDNWPPAAGLLVAAYYGDIRRLKAQRALIDKVTPLSMALKHSYVSCLKLLVQRNLIHICNAGNTKYDAIQECSYDSTRLPIELAAEYGTWEDVELLFPVTSKIPTVADWSVNGVISNVHMEVTQLEALKVDQFDATLFSNRSLCWLRLGDGKKALLDAIECKHLRPNWGKAYYRQGAALMSLEDYSSAYDAFSHGLELDPESEEMEKMLWEAMDLK

SEQ ID NO: 161416 - protein, 110 aa, Zea Mays
MTERPERHKERGPIPYSPQVARGPRGRTQAEASLATKAAMATGWLAGSLPLRSASTAPSAARAQPLPSAAAPRRIPARLSVATGGGEQQLVTAQEPAHDLPSALWWGSRT

SEQ ID NO: 161417 - protein, 202 aa, Zea Mays
MAGRPATGQLPNPFCVSSSGSVTRPSALNSLHRLRFIIIIITVVIAMAARHHAPHLLAMLMLSAAGFFSVASAARDLDAANPLAVAVAAPAAGRNNDNNNPPEPNYYSYHGGYGAVPAGYGPAGVSGAGGWGAGSGGGGGYAHGGVEAPTVMCQDKGPCYGKKVACPKRCFWSYSRSGSGYGAGGGGGSCTVDCKDKCTATC

SEQ ID NO: 161418 - protein, 138 aa, Zea Mays
MIAPPGVEIIDFLQAPSSPIPWMTDEELGRYAEKFEKTGFTGPLNYYRMLETNWRLTAPWSGSKITVPAKFILSKNDVGLQSFGTEKYVKSGALKENVPDLEISIIEGHHFVQQEEAGTVNSEILSFLGKFPSEGGSA

SEQ ID NO: 161419 - protein, 90 aa, Zea Mays
MWETNWRLLAPWNEAKITVPVKFIAGDKDIGVQSFGVEKYIKSGEFKSTVPDLEVAVIEGHHFLQQEQAERVNSEIISYLVRFTSQEASS

SEQ ID NO: 161420 - protein, 299 aa, Zea Mays
MDAGEVRHWNADVNGVSIHVAERGPEDGPAVLLIHGFPELWLSWRHQMAALAARGFRALAPDLRGYGDSSVPSDPAAYTIFHIVGDIVALLDHLQVPTHKGVRGGARLGRAGGVAPLPVPAGPGARRRRSRNTVLRSTSSPHHGGLRGVWRWLLHKSVSDELTAPPGVEIIDFLEASPSPLPWLSEEELGQYAEKFRKSGFTGPLNYYRMWETNWRLLAPWNEAKITVPVKFIAGDKDIGVQSFGVEKYIKSGEFKSTVPDLEVAVIEGHHFLQQEQAERVNSEIISYLVRFTSQEASS

SEQ ID NO: 161421 - protein, 267 aa, Zea Mays
MDKIETTTRRRRKGRSSSRRRRQGARGPAGLVATALALLCACAFSTPAATALTPDGEALLELKLAFNATVHHRLTSWRRSDPNPCVWEGISCSVPDLRVQSINLPYMQLGGIISPSIGRLDKLQRLALHQNSLHGPIPAEIKNCTELRAMRYPFGDWRARAPHHLGPVKQSVEGNDTGLHRKPHSPSLPPDPGPLCALTMNEYAIGCLCHPNAACTRGNRPGVFSALSLHARRHRKDASPVAQAGVGVARIGTATNHVVCISQEPVY

SEQ ID NO: 161422 - protein, 301 aa, Zea Mays
MASNGIAPRDVCVVGVARTPLGGFLGALSSLPATKLGSIAIEAALKRANVDPALVQEVFFGNVLSANLGQAPARQAALGAGIPNTVVCTTVNKVCASGMKATMFAAQSIQLGINDIVVAGGMESMSNAPKYIAEARKGSRFGHDTLVDAMLKDGLWDVYNDCAMGMCAELCADNHALTREDQDAFAIQSNQRGIAARDSGAFAWEIVPIEVPVGRGKPPVLIEKDESLDKFDPAKLKKLRPSFKENGGTVTAGNASSISDGAAALVLVSGQKAQELGLQVLARIRGYADAAQVSYIKKYLT

SEQ ID NO: 161423 - protein, 237 aa, Zea Mays
MASNGIAPRDVCVVGVARTPLGGFLGALSSLPATKLGSIAIEAALKRANVDPALVQEVFFGNVLSANLGQAPARQAALGAGIPNTVVCTTVNKVCASGMKATMFAAQSIQLGINDIVVAGGMESMSNAPKYIAEARKGSRFGHDTLVDAMLKDGLWDVYNDCAMGMCAELCADNHALTREDQDAFAIQSNQRGIAARDSGAFAWEIVPIEVPVGRGKPPVLIEKDESLDKASLHRDL

SEQ ID NO: 161424 - protein, 698 aa, Zea Mays
MGTNYSYQILSDNHSSNNRAQNQLNFPEGKMAYNPSVNNEFGKGYPRAGYAKPKQSFSGPSVMVSSSPSQIRSQGHPGLPPAKYHSNHFNSDARQDDVQTRNPSGPNVFSGSGNKIQGSTGRVKAHSGGPQSNLRSLKLLRSVEQYYHTLQQMKWGPMTEHVLDNLHCKIDAFQANQVLKLLHDHTVALGFFQWLKRQPGFKHDGHTYTTMIGILGQARQFGVLKELLDEMSRAHCKPTVVTYNRIIHAYGRANYLKEAVKVFEEMQEAGYEPDRVTYCTLIDIHAKAGYLDIAMDLYGRMQEVGLSPDTFTYSVMVNCLGKGGQLAAAYKLFCEMIENGCTPNLVTYNIMIALQAKARNYENVVKLYKDMQVAGFRPDKITYSIVMEVLGHCGHLDEAEAVFIEMRRDWAPDEPVYGLLVDLWGKAGNVDKALGWYQAMLQDGLQPNVPTCNSLLSAFLKMNRFQDAYIVLQNMLARGLVPSVQTYTLLLSCCTVGQAQMGLCCQLMAITGHPAHMFLLYLPDAEAGGQNVRDHTGYFLDMMHSEDRESKRGLMDAVIDFLHKSGLKEEAGFIWEVAAQKNVYPDSVREKSSSYWLINLHLMSEGTAVTALSRTLAWFHRQVLTLGTGPERIDIVTGWGRRSRVTGSSLVRQSIQKLLNLFESPFFTTRGNTGCFVGCGEPLNKWLHNPYVERMHLL

SEQ ID NO: 161425 - protein, 93 aa, Zea Mays
MGTRNLLTGDLYATARRDAGNRSEELWFWYRAATSKYTQKMYSIDLRLPICSSYVLGWPYKLIVAYTQVHHTASLYIYTHVHVAQPQLQQRNA

SEQ ID NO: 161426 - protein, 540 aa, Zea Mays
MSMASPVLHRLILLSVSLSVAIAAADASAVPVEYLYPTLNLTYIHSIDTDGVFLRSPSANFSAAIYNAAGAGQSSDDSQSRFFFSVLHTASRTPVWTATATGSTMFNSIVLSVAPTGLALYDPSAAKPDDPAWSTPRLREPVVALRLLDTGELALIDSRNTTLWSSFDRPTDTLLPGQPLLLGSPLTSSASDRDLSPGAYRLVLTPNDALLQWATNASTAFLTYWSMSSDPAALQDSNQAVAAMAVNSSGLYLFAANGRDTVYRLLFPSPPASKSESRILKLYPSGSLRAVALTAAATVSTIWAAPANDCDLPLPCPSLSLCTSDANGSTCTCPEAFSTYSNGGCEPADGSALPSIADTCAKQEATTRYNYVSLGAGIGYLSTKFAVADTSGDELPACRDLCSANCSCLGFFYKNTSGSCFLLHNRIGSVFRAGADVAVGFIKTLPLPQQQQRGSKGGAGRSTSRRAPAAAGSSCRRCCRRPPPRPTARASTRTCSSRACRPGSRTPTWTLRRTASSGRSAPAGSAPCSAASSPTGAPWR

SEQ ID NO: 161427 - protein, 383 aa, Zea Mays
MQAPAPPTLPSSKDRRRSLHGAPESESGGILSSDAEDNKGHGRRQSQSCSKSPKPRREKERRHKDGHHSSSSKDHYPKNRSRASPYSRHQSEAHSRDHLRSGERGDDTNGSDRESNDQNGKSGRHTTGTQENERERSSSHGIHDRHGDRHNDRHGSQERYRDDRTYRDKIDSLEATWKHRERSRSHSRSDLRESTRLRDQSRESERRIGSSMHRDHGSKRDTSKHRESDRVNSAYERERGRDAGDREWHRVKGSETHRAKEGRDKVSDSDRYRDSTRSKYSVSDGYKERTRSGEKGRDVDRKNRKFEEMKENYLKEEDEEKYQEKIEQQLAMQEEEDPEKIKEEARRRKEAIMAKYRQQQSQKQDMEAKPSSNDEDILLSVQK

SEQ ID NO: 161428 - protein, 489 aa, Zea Mays
MAAGGEPSPLSPAKYSRLPDDAQPDASPKRRKRHHRHHHHHHHRRHRHADSPIPEAADEEVEEGEILDDASSVSAMEVNAESAAPQSSLAPEHFGNGADINTDATKMQAPAPPTLPSSKDRRRSLHGAPESESGGILSSDAEDNKGHGRRQSQSCSKSPKPRREKERRHKDGHHSSSSKDHYPKNRSRASPYSRHQSEAHSRDHLRSGERGDDTNGSDRESNDQNGKSGRHTTGTQENERERSSSHGIHDRHGDRHNDRHGSQERYRDDRTYRDKIDSLEATWKHRERSRSHSRSDLRESTRLRDQSRESERRIGSSMHRDHGSKRDTSKHRESDRVNSAYERERGRDAGDREWHRVKGSETHRAKEGRDKVSDSDRYRDSTRSKYSVSDGYKERTRSGEKGRDVDRKNRKFEEMKENYLKEEDEEKYQEKIEQQLAMQEEEDPEKIKEEARRRKEAIMAKYRQQQSQKQDMEAKPSSNDEDILLSVQK

SEQ ID NO: 161429 - protein, 674 aa, Zea Mays
MAAGGEPSPLSPAKYSRLPDDAQPDASPKRRKRHHRHHHHHHHRRHRHADSPIPEAADEEVEEGEILDDASSVSAMEVNAESAAPQSSLAPEHFGNGADINTDATKMQAPAPPTLPSSKDRRRSLHGAPESESGGILSSDAEDNKGHGRRQSQSCSKSPKPRREKERRHKDGHHSSSSKDHYPKNRSRASPYSRHQSEAHSRDHLRSGERGDDTNGSDRESNDQNGKSGRHTTGTQENERERSSSHGIHDRHGDRHNDRHGSQERYRDDRTYRDKIDSLEATWKHRERSRSHSRSDLRESTRLRDQSRESERRIGSSMHRDHGSKRDTSKHRESDRVNSAYERERGRDAGDREWHRVKGSETHRAKEGRDKVSDSDRYRDSTRSKYSVSDGYKERTRSGEKGRDVDRKNRKFEEMKENYLKEEDEEKYQEKIEQQLAMQEEEDPEKIKEEARRRKEAIMAKYRQQQSQKQDMEAKPSSNDEEVRAMDGNVTMHQKDDNGSSSTGNDKAENKHDSSEVFDGKTDFSVGKSPAQNDTSTSTGAFTDERTIDVSGLGEGSPKGKGDGLHVERNALHDNWDDADGYYTYRFGELLDGHYEIIAAHGKGVFSKVVRAKDLKASKDDPEEVAIKIIRNKETMYKAGKQEVSILEKLASVDREDKRHCVRFISSFISFSSP

SEQ ID NO: 161430 - protein, 884 aa, Zea Mays
MQLLQKLLLRVKVSKAYTISVLVTKSTMKSSVDTELREMVAYIANTLIFILSGVVIADGVLQNNGHFERHGSSWGFLLLLYVFVQISRVIVVGVLYPMLRHFGYGLDLKEAMILVWSGLRGAVALSLSLSVKRTSDSVQPYLKPEVGTMFVFFTGGIVFLTLIFNGSTTQFLLHILGMDKLLPTKLRILKYTRYEMLKKALEAFGELRDDEELGPADWVTVKKYITCLNDLDYEPEHPHDVGDEDDCMHIMNLTDIRVRLLNGVQAAYWGMLEEGRITQVTANILMRSVDEAMDLVSGQTLCDWKGLKSNVQFPNYYRFLQRSRLPRKLVTYFTVERLESGCYICAAFLRAHRIARRQLHDFLGDSEVARTVIDESNAEGEEARKFLEDVRVTFPQVLRVLKTRQVTYSVLTHLSEYIQNLQKTGLLEEKEMVHLDDALQTDLKKLQRNPPIVKMPRVSDLLNTHPLVGALPAAVRDTLLSNTKETLRGQGTTLYREGSRPTGIWLVSIGVVKWTSQRLSRRHSLDPILSHGSTLGLYEVLIGKPYICDMTTDSMVQCFFIETEKIEELLHSDPSIEIFLWQESALVLARLLVPHRFEKMGMHEMRVLVAERSTMNIYIKGEDLEVEQNCIGILLEGFLKIENLTLITPPALLLPWNADLSLFGLESSDYCHTARRYQVEARARIIFFDEAEAAHLHVQTSASLPQGEPARSMSKEHSGLLSWPESFRRSRGSLGLAAEMLPGGLSSRALQLSMYGGSVVSLSSGQQGHRRQRPRHRVQAATTMTNQKKHSSSYPRMPSISKERHLLSVQSEGSNMKRVAALPEVAATAPAPAGAAQGQRRAMNLQEEYNSSEDSAGEEVIVRVDSPSMLSFRESTAVPPPQEQ

SEQ ID NO: 161431 - protein, 506 aa, Zea Mays
MVLGRTFDAGSIIKFLSEVSLGAVALGLAFGIMSILWLGFIFNDTIIEIALTLAVSYIAFFTAQDSLEVSGVLTVMTLGMFYAAFAKTAFKGESQQSLHHFWEMVAYIANTLIFILSGVVIADGVLQNNGHFERHGSSWGFLLLLYVFVQISRVIVVGVLYPMLRHFGYGLDLKEAMILVWSGLRGAVALSLSLSVKRTSDSVQPYLKPEVGTMFVFFTGGIVFLTLIFNGSTTQFLLHILGMDKLLPTKLRILKYTRYEMLKKALEAFGELRDDEELGPADWVTVKKYITCLNDLDYEPEHPHDVGDEDDCMHIMNLTDIRVRLLNGVQAAYWGMLEEGRITQVTANILMRSVDEAMDLVSGQTLCDWKGLKSNVQFPNYYRFLQRSRLPRKLVTYFTVERLESGCYICAAFLRAHRIARRQLHDFLGDSEVARTVIDESNAEGEEARKFLEDVRVTFPQVLRVLKTRQVTYSVLTHLSEYIQNLQKTGLLEEKEMVHLDDALQT

SEQ ID NO: 161432 - protein, 430 aa, Zea Mays
MPRVSDLLNTHPLVGALPAAVRDTLLSNTKETLRGQGTTLYREGSRPTGIWLVSIGVVKWTSQRLSRRHSLDPILSHGSTLGLYEVLIGKPYICDMTTDSMVQCFFIETEKIEELLHSDPSIEIFLWQESALVLARLLVPHRFEKMGMHEMRVLVAERSTMNIYIKGEDLEVEQNCIGILLEGFLKIENLTLITPPALLLPWNADLSLFGLESSDYCHTARRYQVEARARIIFFDEAEAAHLHVQTSASLPQGEPARSMSKEHSGLLSWPESFRRSRGSLGLAAEMLPGGLSSRALQLSMYGGSVVSLSSGQQGHRRQRPRHRVQAATTMTNQKKHSSSYPRMPSISKERHLLSVQSEGSNMKRVAALPEVAATAPAPAGAAQGQRRAMNLQEEYNSSEDSAGEEVIVRVDSPSMLSFRESTAVPPPQEQ

SEQ ID NO: 161433 - protein, 421 aa, Zea Mays
MKSSVDTELREMVAYIANTLIFILSGVVIADGVLQNNGHFERHGSSWGFLLLLYVFVQISRVIVVGVLYPMLRHFGYGLDLKEAMILVWSGLRGAVALSLSLSVKRTSDSVQPYLKPEVGTMFVFFTGGIVFLTLIFNGSTTQFLLHILGMDKLLPTKLRILKYTRYEMLKKALEAFGELRDDEELGPADWVTVKKYITCLNDLDYEPEHPHDVGDEDDCMHIMNLTDIRVRLLNGVQAAYWGMLEEGRITQVTANILMRSVDEAMDLVSGQTLCDWKGLKSNVQFPNYYRFLQRSRLPRKLVTYFTVERLESGCYICAAFLRAHRIARRQLHDFLGDSEVARTVIDESNAEGEEARKFLEDVRVTFPQVLRVLKTRQVTYSVLTHLSEYIQNLQKTGLLEEKEMVHLDDALQVAGIFNLQ

SEQ ID NO: 161434 - protein, 712 aa, Zea Mays
MELFWYSIPVIPILILLMNNFPVLVTKSTMKSSVDTELREMVAYIANTLIFILSGVVIADGVLQNNGHFERHGSSWGFLLLLYVFVQISRVIVVGVLYPMLRHFGYGLDLKEAMILVWSGLRGAVALSLSLSVKRTSDSVQPYLKPEVGTMFVFFTGGIVFLTLIFNGSTTQFLLHILGMDKLLPTKLRILKYTRYEMLKKALEAFGELRDDEELGPADWVTVKKYITCLNDLDYEPEHPHDVGDEDDCMHIMNLTDIRVRLLNGVQAAYWGMLEEGRITQVTANILMRSVDEAMDLVSGQTLCDWKGLKSNVQFPNYYRFLQRSRLPRKLVTYFTVERLESGCYICAAFLRAHRIARRQLHDFLGDSEVARTVIDESNAEGEEARKFLEDVRVTFPQVLRVLKTRQVTYSVLTHLSEYIQNLQKTGLLEEKEMVHLDDALQTDLKKLQRNPPIVKMPRVSDLLNTHPLVGALPAAVRDTLLSNTKETLRGQGTTLYREGSRPTGIWLVSIGVVKWTSQRLSRRHSLDPILSHGSTLGLYEVLIGKPYICDMTTDSMVQCFFIETEKIEELLHSDPSIEIFLWQESALVLARLLVPHRFEKMGMHEMRVLVAERSTMNIYIKGEDLEVEQNCIGILLEGFLKIENLTLITPPALLLPWNADLSLFGLESSDYCHTARRYQVEARARIIFFDEAEAAHLHVQTSASLPQGPCN

SEQ ID NO: 161435 - protein, 300 aa, Zea Mays
MGGEAEPDNAVLFVGVSLVLGIASRHLLRGTRVPYTVALLVLGVALGSLEYGTQHGLGKLGAGIRIWANINPDLLLAVFLPALLFESSFSMEVHQIKRCMAQMVLLAGPGVLISTVLLGVAVKLTFPYNWSWKTSLLLGGLLSATDPVAVVALLKELGASKKLSTIIEGESLMNDGTAIVAYQLFYRMVLGRTFDAGSIIKFLSEVSLGAVALGLAFGIMSILWLGFIFNDTIIEIALTLAVSYIAFFTAQDSLEVSGVLTVMTLGMFYAAFAKTAFKGESQQSLHHFWYVSYRNKSASQ

SEQ ID NO: 161436 - protein, 332 aa, Zea Mays
MGGEAEPDNAVLFVGVSLVLGIASRHLLRGTRVPYTVALLVLGVALGSLEYGTQHGLGKLGAGIRIWANINPDLLLAVFLPALLFESSFSMEVHQIKRCMAQMVLLAGPGVLISTVLLGVAVKLTFPYNWSWKTSLLLGGLLSATDPVAVVALLKELGASKKLSTIIEGESLMNDGTAIVAYQLFYRMVLGRTFDAGSIIKFLSEVSLGAVALGLAFGIMSILWLGFIFNDTIIEIALTLAVSYIAFFTAQDSLEVSGVLTVMTLGMFYAAFAKTAFKGESQQSLHHFWEMVAYIANTLIFILSGVVIADGVLQNNGHFERHGIASPSLTIV

SEQ ID NO: 161437 - protein, 66 aa, Zea Mays
MFSCVVSFFIIISMYNLVLCHEHVYMHGVIVFWSHKYVSMKANLSILRANKYVGRFQTTYINCRVN

SEQ ID NO: 161438 - protein, 323 aa, Zea Mays
MLPALGPPVSEKLARDNFLLWRAQFMPVLRGAQLMRYLDEKIEIPPEKITILGDDKKPAIVPNPEYLVWVAQDQQVVAYLLNSLTKGTLGHVATVETSTEAWKALSESFAAQSKAKVANLRYALRNTKKGSMTMSQYFSKMKKFADELASAGKVLEDEEIVSYILNALDSTYTPLVSSVISRMDAISVNDLYSQAHGYEHRQDMLRRDEDGFSSANVAMRGCGHDRSGSRGGRNPGRGQNQGNGRRGSFGRLGQSNSSNNKTICQICGRSNHTALDCWYRYDEDDPKSEDKFAGVIAPSYDVDTNWYMDTGAIDHITGEVDSS

SEQ ID NO: 161439 - protein, 175 aa, Zea Mays
MATALWHRTREVAALLDEIRTPKKPIEELATDVKLIPTPEKLEETLKAHGRSRRRRLRRRRWRRMTSCPLNESSTLASSHRGWAEPCQAQGGGQAAREVKIHVPRCDFRFCFTVRNRAAFHRPIAAACSTASATSSCSGAASPWAPVTLRRPCPSRPSSCSIGSRVHHLPPLVST

SEQ ID NO: 161440 - protein, 159 aa, Zea Mays
MATALWHRTREVAALLDEIRTPKKPIEELATDVKLIPTPEKLEETLKAHGRSRRRRLRRRRWRRMTSCPLNESSTLASSHRGWAEPCQAQGGGQAARESVLLGRNNMDQNFGFAKSGCTQLQLIMAILIEEHKKETTNLMGTGTGGYLKTVQNTYDTCC

SEQ ID NO: 161441 - protein, 293 aa, Zea Mays
MQCSILRGDISFEPHETVVSMEYLLGLVLALLGGSVKMQDYSDERKSQILNVVKSLAGGFDMDVIFTRTDGFTMTPEWLLLDCLDLNLRHGWIAARNELPLLKNELDATPSLKKAITRMATALWHRTREVAALLDEIRTPKKPIEELATDVKLIPTPEKLEETLKAHGRSRRRRLRRRRWRRMTSCPLNESSTLASSHRGWAEPCQAQGGGQAAREVKIHVPRCDFRFCFTVRNRAAFHRPIAAACSTASATSSCSGAASPWAPVTLRRPCPSRPSSCSIGSRVHHLPPLVST

SEQ ID NO: 161442 - protein, 369 aa, Zea Mays
MGGGATAWPLAANRGGSEVVWSQVRGVELRNQEQPFDMGKKKKRNKNVPAVVWYPTRVIEFLGRRTPIILKEKDTRCSLVAICNVLLLGEKITLDLDIKKVLESHLIHLFQRPLLCGNTQMQLEQNLELSEFNKQVLGVLPKLTCSLYFDVTFSSSCGLEKTFETALFGFLGVPLRHGWLVDPQDAELDSSIRGSSYSKLSYNLAIYESIRPKTNSGPQKHGRYEDDMFYSALAFSKTGSEKELDSTSCATISTFLQGPQLTRYGFSSLHNDLRALQPTVLIWNENLITISKFEDKIYVLLNDLSLLRTETDAVWERLTQANSKQGETNTLVLHIRRCRVCLSDNSFLRMVSLDMPDTDLADAIGLSGG

SEQ ID NO: 161443 - protein, 332 aa, Zea Mays
MGKKKKRNKNVPAVVWYPTRVIEFLGRRTPIILKEKDTRCSLVAICNVLLLGEKITLDLDIKKVLESHLIHLFQRPLLCGNTQMQLEQNLELSEFNKQVLGVLPKLTCSLYFDVTFSSSCGLEKTFETALFGFLGVPLRHGWLVDPQDAELDSSIRGSSYSKLSYNLAIYESIRPKTNSGPQKHGRYEDDMFYSALAFSKTGSEKELDSTSCATISTFLQGPQLTRYGFSSLHNDLRALQPTVLIWNENLITISKFEDKIYVLLNDLSLLRTETDAVWERLTQANSKQGETNTLVLHIRRCRVCLSDNSFLRMVSLDMPDTDLADAIGLSGG

SEQ ID NO: 161444 - protein, 215 aa, Zea Mays
MLSWTPQYVEAPTPNFRIILLSMNQFDPRQIQGLKSMVDMKMICSIQRLHSLKLDQKKNLILLLVNLDNTSVQFFCTKLYLQVPDTSFLCSLFLGATISTFLQGPQLTRYGFSSLHNDLRALQPTVLIWNENLITISKFEDKIYVLLNDLSLLRTETDAVWERLTQANSKQGETNTLVLHIRRCRVCLSDNSFLRMVSLDMPDTDLADAIGLSGG

SEQ ID NO: 161445 - protein, 249 aa, Zea Mays
MQLEQNLELSEFNKQVLGVLPKLTCSLYFDVTFSSSCGLEKTFETALFGFLGVPLRHGWLVDPQDAELDSSIRGSSYSKLSYNLAIYESIRPKTNSGPQKHGRYEDDMFYSALAFSKTGSEKELDSTSCATISTFLQGPQLTRYGFSSLHNDLRALQPTVLIWNENLITISKFEDKIYVLLNDLSLLRTETDAVWERLTQANSKQGETNTLVLHIRRCRVCLSDNSFLRMVSLDMPDTDLADAIGLSGG

SEQ ID NO: 161446 - protein, 270 aa, Zea Mays
MATLSWWMEWSVENVREAFFSYFGENQHVRLPSTPVIPVDDPKVPLLHTCLHRFKGTLGGRERHRTCFSLRCIIASGDEDLIDRFRIDATFHRFTEILGSWSHGYYFKEEAIGLLFSLLTEKYKLPQSRIYASYFSGDMSSCLSSDDESRNTLQKYIGAERILPSMSKVDFWMPGETGPCGPCIGFFLDCSDNNDGVDSVRNITDGKLVEICRLVFVEFDRQADGVLEPFQAKHVLTGINLECLAAILQKKESHYDLDVYAYVIRQVYWG

SEQ ID NO: 161447 - protein, 227 aa, Zea Mays
MQLYICKCFENECPLTQKLSYCPLILQLEQNLELSEFNKQVLGVLPKLTCSLYFDVTFSSSCGLEKTFETALFGFLGVPLRHGWLVDPQDAELDSSIRGSSYSKLSYNLAIYESIRPKTNSGPQKHGRYEDDMFYSALAFSKTGSEKELDSTSCKSRQHKFSSLHNDLRALQPTVLIWNENLITISKFEDKIYVLLNDLSLLRTETDAVWERLTQFLAHGLVGHARH

SEQ ID NO: 161448 - protein, 220 aa, Zea Mays
MSSCLSSDDESRNTLQKYIGAERILPSMSKVDFWMPGETGPCGPCIGFFLDCSDNNDGVDSVRNITDGKLVEICRLVFVEFDRQADGVLEPFQAKHVLTGINLECLAAILQKKESHYDLDVYAYVIRQVYWRTGKGFKDYTGKVGAADTDGVDTAYRLVADHMRMIAVTNAPGSQLGLGNEGREYFLKCADKQAVKYGYQVLKINEEDYDMMSSSMHRCK

SEQ ID NO: 161449 - protein, 237 aa, Zea Mays
MQLYICKCFENECPLTQKLSYCPLILQLEQNLELSEFNKQVLGVLPKLTCSLYFDVTFSSSCGLEKTFETALFGFLGVPLRHGWLVDPQDAELDSSIRGSSYSKLSYNLAIYESIRPKTNSGPQKHGRYEDDMFYSALAFSKTGSEKELDSTSCATISTFLQGPQLTRYGFSSLHNDLRALQPTVLIWNENLITISKFEDKIYVLLNDLSLLRTETDAVWERLTQFLAHGLVGHARH

SEQ ID NO: 161450 - protein, 140 aa, Zea Mays
MRRSEGDFVRSSPYRRARRSGPALVTAAAIEDAVDCGSSSVSGTGVWKRAPAGEKVPSLLNLAPLRGQVLGCGDEAVAATRQQTWWFRPSIRLDGACSGASEGPVKLGLSDLGATILNLDDDASDLGGSDVYWRCAQIQD

SEQ ID NO: 161451 - protein, 91 aa, Zea Mays
MSFRSSIDRSFLLHQPKDCRCTSCKDLMSTKQLYGCLISYYSINCWDWTTDRKTETHKTLQVCITVAPSLELRSGYKVFRHILFGKSRNQK

SEQ ID NO: 161452 - protein, 131 aa, Zea Mays
MTRCSSSRSGRTCGCGARCTVGTSTPTRTGWVCPYAGAATGRCTRCGRCSGSSMTAPPTSSSTAPPTAGTSRSRPPGAVGAQRPPRRPGGYGEWGLDPILWKPIGPGHAGYVFLRHVSNRLLRANRSRFWF

SEQ ID NO: 161453 - protein, 321 aa, Zea Mays
MAGAQHFGPILWACHQRGSHLPCHAQHHGQGWRCFPSHRQVAIALVRKQAQRSIGEETRLLSCAIAVTAANSSALFLTAAAQNLLCLKLAEEIGDTPEAPALAAEKLKNMGPVTKNEWVMIGTMLLAVSLWIFGETIGVSSVVAAMIGLSILLVLGVLNWEDCLNEKSAWDTLAWFAILVGLAGQLTNLGIVSWMSNCVAKVLQSFSLSWPAAFVVLQASYFFIHYIFASQTAHVGALYSAFLAMHLAAGVPALMSALALAYNANLFGALTHYSSGQSAVYFGAGYVDLPDVFKLGFITAAINAVIWGVAGALWWKFLGLY

SEQ ID NO: 161454 - protein, 58 aa, Zea Mays
MKSTKELQLRLMVVTKVKSDTKPKRKKDMLTPDVCIRIMYTCQVHKCTFAWAASLAYK

SEQ ID NO: 161455 - protein, 107 aa, Zea Mays
MFMAIHNIDEVEAHQQHKYIRDKTASAEQPKSMLLCEDVAQHKVLFCNTPSNPGPTILTPDSSLGSYIDPTDQHESFVCTLSSPMRTRENFPVGHPSQIAPSQARLT

SEQ ID NO: 161456 - protein, 68 aa, Zea Mays
MLGVLFIVHSVCTVVFLLSLLFGETACTYVCMDHEDYWYCIKSLSINKYTLACEKKYTSSQSCELLIR

SEQ ID NO: 161457 - protein, 171 aa, Zea Mays
MATLTMQPIGPTPAPAAQQDPSKGENPPTVDGTDLGDIDSGWVILKNSDVVSADLAAAAVCGGQRLGSSTIPSWARWVLGGVVYTLVPFYNRVRHLEDETVGFVENAVEVVEHLAEVTEKLAANVAKQLPEDGSLQKAVEEVEHIAEVVDDDAEKVEAVTEKVVFCTEMLY

SEQ ID NO: 161458 - protein, 153 aa, Zea Mays
MAYELIHSFSQLQQKRGISQSSNVDVSYAMHGQELLTESNKPHKIQLTRNEREKKYVWLKIGTAPGTEMRAEQNKCECKCGISSGCTCEHGGSQRSATCARCSHHRAQATVNKRHQAPVEEAPMHHHPPCHVSQCWPWTWKKQLESTRGQSTS

SEQ ID NO: 161459 - protein, 138 aa, Zea Mays
MDPAGDPAFHRNEAISAVQDVDQYYGDDDDFDDLYNDVNVGDGFLHASHQAPPPRPPTQQAPPPQQLHPPPQQQPPPPPQQQPPAHTLPPPPPHVPPPPQQECLVGTCSAVRRWTSLDDSCCLLLCAVLNVCVSQRYK

SEQ ID NO: 161460 - protein, 61 aa, Zea Mays
MHAMVIYINMVYSSPILMFQAYFFFRNCMYVLLLIICLASANFLYLTVDRIQWKHLRPSLE

SEQ ID NO: 161461 - protein, 74 aa, Zea Mays
MVHKLNISLFVLTPLQDENTSYYIEDCMEAPGAFVLHLLKCVLVSGGVAAFLALVHLSPITTASCVIWHRTPTF

SEQ ID NO: 161462 - protein, 121 aa, Zea Mays
MPRDLDRLRPRHLPAVPPPPPAPRRCRRRGAPDCLISALGIESRRSTLHLAAAVSLYRFFFSFPFCSGEREDRTEIEGRKWWQQSCSPFVSPKLSVVFIHSKSIIYSYEPSTKILLAYAPI

SEQ ID NO: 161463 - protein, 96 aa, Zea Mays
MLYVSSVFHRSVVEVHEEGTEAAAASAVLMMVVGASLGSSTDCSFMADHPFVFLIREDTPPVWCCSSAMWSIPCSLERIISGFVLSETNKGCGMIR

SEQ ID NO: 161464 - protein, 291 aa, Zea Mays
MTREAGQGFGSSERMRGYDQFISLLFYVLQIIYVSYIHLCCFICSNDFILSVLSYYNMIYLFVLILQSCCLYYYLFSFNCSVILYVYHIYMIYMIHMLCVLIIHIVMDIFEILISMINYLLYVIIIMLIYRIKMIRKMPIIITRSRAAVTGLRRRYQEAGSRQRAHFRGAWARKLDASETRDGEFHLLDGSSVEAPFMSSTDDDQYIASYGDLLRLPYEQGGDKHSSRGSSPCTSSSRKHETASGPWPGREAERRAWVPGQAHPNEEGPSWGDQGPQVQGVLRVRSVRAAQ

SEQ ID NO: 161465 - protein, 254 aa, Zea Mays
MLVSVLFRFGASSSSPLRQFLLVSTSALLSCSASALLARLHFGAAELLRWRTGRDYATPRRRHAAGGCRRRHGLYWAYSLVLGRDRGCSPGSPGRRSAPGRQDAEAAARVNAWAERKPSQEAGSRQRAHFRGAWARKLDASETRDGEFHLLDGSSVEAPFMSSTDDDQYIASYGDLLRLPYEQGGDKHSSRGSSPCTSSSRKHETASGPWPGREAERRAWVPGQAHPNEEGPSWGDQGPQVQGVLRVRSVRAAQ

SEQ ID NO: 161466 - protein, 269 aa, Zea Mays
MTREAGQGFGSSERMRGRLVLGNALTSEEPGRGSWTRRKQETASSTSSTGARSRRHSCPAQTTTSTLHRTETCSGSRTSKAVTSTQAEAVLHVHPPPGSTRLPPGLGPAEKLSAEPGFLDKHIPTRKVPVGETKVPRFKVSFVFEASELLNKALGLWLPFSAEEAGLVVGDPPMLYVSSVFHRSVVEVHEEGTEAAAASAVLMMVVGASLGSSTDCSFMADHPFVFLIREDTPPVWCCSSAMWSIPCSLERIISGFVLSETNKGCGMIR

SEQ ID NO: 161467 - protein, 172 aa, Zea Mays
MQPLPFCLACEYGKLAAIVGDSPDGLLIDANSGKTVHKLHGHLDYSFASAWNPDGRTFATGNQDKTCRVWDVRNLSRSVVVLGGNIGAVRSIRYTPDGKFMAMTEPADFIHIFDVESGYSRKQELDFFGEIAGISFSPDTEALFVGVHDRFFNCCLLQFSRRRFYSYLDSTL

SEQ ID NO: 161468 - protein, 179 aa, Zea Mays
MHACRERPTLLRVSAQHELRNLVWATTRHDVYLMSNFSVLHWSAMTYKKQEVINLQGHVTPCEKHHRNHYEGFYQTPVSTLAVKHNLLVTGGFHGEIICKFLDRQGVSYCCKTTNDDDGITNSLEIFEKPSGSLHFLASNNDCGLRDFDMEKFRICNHFHFAWPVNVSLQCLLNFQFSI

SEQ ID NO: 161469 - protein, 333 aa, Zea Mays
MHACRERPTLLRVSAQHELRNLVWATTRHDVYLMSNFSVLHWSAMTYKKQEVINLQGHVTPCEKHHRNHYEGFYQTPVSTLAVKHNLLVTGGFHGEIICKFLDRQGVSYCCKTTNDDDGITNSLEIFEKPSGSLHFLASNNDCGLRDFDMEKFRICNHFHFAWPVNHTSLSPDGKLAAIVGDSPDGLLIDANSGKTVHKLHGHLDYSFASAWNPDGRTFATGNQDKTCRVWDVRNLSRSVVVLGGNIGAVRSIRYTPDGKFMAMTEPADFIHIFDVESGYSRKQELDFFGEIAGISFSPDTEALFVGVHDRFFNCCLLQFSRRRFYSYLDSTL

SEQ ID NO: 161470 - protein, 342 aa, Zea Mays
MPAEKGQLYYEFQHSTRSVKPTIRHFQLRNLVWATTRHDVYLMSNFSVLHWSAMTYKKQEVINLQGHVTPCEKHHRNHYEGFYQTPVSTLAVKHNLLVTGGFHGEIICKFLDRQGVSYCCKTTNDDDGITNSLEIFEKPSGSLHFLASNNDCGLRDFDMEKFRICNHFHFAWPVNHTSLSPDGKLAAIVGDSPDGLLIDANSGKTVHKLHGHLDYSFASAWNPDGRTFATGNQDKTCRVWDVRNLSRSVVVLGGNIGAVRSIRYTPDGKFMAMTEPADFIHIFDVESGYSRKQELDFFGEIAGISFSPDTEALFVGVHDRFFNCCLLQFSRRRFYSYLDSTL

SEQ ID NO: 161471 - protein, 137 aa, Zea Mays
MSQRDGDLAAGAHPEEGDRHAVRMDGSDDELDQPTSKATEHITAMDVRKGKDMQGIPWNVMPTTRDKYRQSRLQGYANFENVPNSGRLSEKECMPAEKGQLYYEFQHSTRSVKPTIRHFQASHGFQCSLFRMFVLLG

SEQ ID NO: 161472 - protein, 416 aa, Zea Mays
MSRSLREPSGRGSLPAHWLPRGTLTRPLPSWTSRVWGLRISPRLPENLCTGCRRLIATIIPSGFKWIWNSVKGFLDPKTSSKIHVLGSNYQSRLLEVMDSSELPEFLGGSCTCSDKGGCLGSNKGPWNDPYILKLIHNLEAGCAREIKPVSEGEERNSSSFRLEQMKWQGLLSDTSNAESGSDVDDFGASFVHKVSDYGCLTPVHEEVKGTDRVTYFSYDDQSHPDMAPESYHGARRATGMEHHKPMADFSQYSANRRPGDSALNVNGTAAQSGWENVVKLVVTTLVKLFYFIRLFLSTAERRLESIHRPAPPAAPAAAEEPRPRAISDEEVCACLQRLDNLESMCSHLAAKPPQIPEDKELILLSSFERIRSVEADLERTKRVLNATVVKQKALVETLESVQESSSRVKKRMFCS

SEQ ID NO: 161473 - protein, 437 aa, Zea Mays
MKEDFAVLSGDEKMDVLYSSAPELVSLLSELKDAHEELRAIGQLTSEVTSCLGKDKMQPFEVKKACLLAHCQAITFYLLMKSEGLSVQDHPVISRLIETKNMVEKIKQITLNPVSQKGCADDHSMHCGTIQTDKIVSLDKQEGKFSNVLALDKVKQGAEVSESRKSEPCNNDYHEVNEQKNKDERMGLHSLEMLKVRANLEERLKKKGLYNLTRSKPEKSSKTRTTSDNGLQTLDDFDDEVLKNNQMMKPSKLVAAAAKSNKSMFVSGDDDLPKRDNIGERRRKHELRVLSRVGANSAEDHELPDGDASEEEDHHELPEGGDESEDDIHRDVKRKRTEKLSTKNALYSPTPGVEHLEEETEGDGKRTISYQILKNRGLTRSRNKKKKNPRKNYRDKHKNKLVKRKGQVRDIKKQSGPYGGETSGINPNVSRSVRFKS

SEQ ID NO: 161474 - protein, 546 aa, Zea Mays
MAEADYEGWDKGYISKLKRAQRAVKQIAGGDDSMDEQEDETQENVWGRGKNAYYAPGEQSGDDEVDYEEAQRIQKNKEKRLSMKDFGLEDGESDEEGNATKVSNHESKMKEDFAVLSGDEKMDVLYSSAPELVSLLSELKDAHEELRAIGQLTSEVTSCLGKDKMQPFEVKKACLLAHCQAITFYLLMKSEGLSVQDHPVISRLIETKNMVEKIKQITLNPVSQKGCADDHSMHCGTIQTDKIVSLDKQEGKFSNVLALDKVKQGAEVSESRKSEPCNNDYHEVNEQKNKDERMGLHSLEMLKVRANLEERLKKKGLYNLTRSKPEKSSKTRTTSDKSGLQTLDDFDDEVLKNNQMMKPSKLVAAAAKSNKSMFVSGDDDLPKRDNIGERRRKHELRVLSRVGANSAEDHELPDGDASEEEDHHELPEGGDESEDDIHRDVKRKRTEKLSTKNALYSPTPGVEHLEEETEGDGKRTISYQILKNRGLTRSRNKKKKNPRKNYRDKHKNKLVKRKGQVRDIKKQSGPYGGETSGINPNVSRSVRFKS

SEQ ID NO: 161475 - protein, 626 aa, Zea Mays
MGKRPRTTLRRTPARGLPKSKRADELPSMPDSDNDEIDAFHKQRDMIPFDANDVRESEDDDVEQPVFDLKGVSDSESDDSKGELSGDMAEADYEGWDKGYISKLKRAQRAVKQIAGGDDSMDEQEDETQENVWGRGKNAYYAPGEQSGDDEVDYEEAQRIQKNKEKRLSMKDFGLEDGESDEEGNATKVSNHESKMKEDFAVLSGDEKMDVLYSLLSELKDAHEELRAIGQLTSEVTSCLGKDKMQPFEVKKACLLAHCQAITFYLLMKSEGLSVQDHPVISRLIETKNMVEKIKQITLNPVSQKGCADDHSMHCGTIQTDKIVSLDKQEGKFSNVLALDKVKQGAEVSESRKSEPCNNDYHEVNEQKNKDERMGLHSLEMLKVRANLEERLKKKGLYNLTRSKPEKSSKTRTTSDKSGLQTLDDFDDEVLKNNQMMKPSKLVAAAAKSNKSMFVSGDDDLPKRDNIGERRRKHELRVLSRVGANSAEDHELPDGDASEEEDHHELPEGGDESEDDIHRDVKRKRTEKLSTKNALYSPTPGVEHLEEETEGDGKRTISYQILKNRGLTRSRNKKKKNPRKNYRDKHKNKLVKRKGQVRDIKKQSGPYGGETSGINPNVSRSVRFKS

SEQ ID NO: 161476 - protein, 554 aa, Zea Mays
MMMWSSPCLTSRVFLIAKVMTAKENCPVTWLKLIMKDGTKGIFRNEDETQENVWGRGKNAYYAPGEQSGDDEVDYEEAQRIQKNKEKRLSMKDFGLEDGESDEEGNATKVSNHESKMKEDFAVLSGDEKMDVLYSSAPELVSLLSELKDAHEELRAIGQLTSEVTSCLGKDKMQPFEVKKACLLAHCQAITFYLLMKSEGLSVQDHPVISRLIETKNMVEKIKQITLNPVSQKGCADDHSMHCGTIQTDKIVSLDKQEGKFSNVLALDKVKQGAEVSESRKSEPCNNDYHEVNEQKNKDERMGLHSLEMLKVRANLEERLKKKGLYNLTRSKPEKSSKTRTTSDKSGLQTLDDFDDEVLKNNQMMKPSKLVAAAAKSNKSMFVSGDDDLPKRDNIGERRRKHELRVLSRVGANSAEDHELPDGDASEEEDHHELPEGGDESEDDIHRDVKRKRTEKLSTKNALYSPTPGVEHLEEETEGDGKRTISYQILKNRGLTRSRNKKKKNPRKNYRDKHKNKLVKRKGQVRDIKKQSGPYGGETSGINPNVSRSVRFKS

SEQ ID NO: 161477 - protein, 346 aa, Zea Mays
MAEIKKSVEAEKKQKEEKKAKKKHKKHHHHKSKSKRHHSDENSDSDEISDGKDERRKRSHSSLHKKEENMSRHKKQHREDSSDSDDEPQRRKQDVSENDEPRRRLHDDNEPRRRWQDDVEPRRRLHDDDEPRRWQDDVEPRRRRQDDGESRRRWQDDDELRGRRQVDEKPRERSYVNRPRYDRSDADDRRRHHSPRDTKPKRVDDGHKTGNSTSEHHSRSEQGSGEQTRQESEHDRNSGPSLNRRRGGVHHMSEEERLARLHQMQADAEVHEEQRWKRLKKAADDDAKEATTVNANQFKGKNFLEDEKKSIFGTDKGGSATIEESIRRRAFYSQGGRDAEGNAFRR

SEQ ID NO: 161478 - protein, 344 aa, Zea Mays
MFLPLKQSYLKAFKLMDKELKLHPTVDCFCSGSTAVTLVKQGLDLVIGNLGDSRAIMGTRDASNNLTALQLTVDLKPNLPREAARIQQCKGRVFALQDEPEVARVWLPNNDSPGLAMARAFGDFCLKDYGLISVPEISYRRLTEKDEFIILATDGVWDVLSNKEAVDIVASAPSRATAARALVDCAVRSWRLKFPTSKSDDCAVVCLFLGHEKSADSVQGSEPNVETAEPTVEVSSSTQDSSAGVDEDIADAGMHVSSAVHISEATLQHSTTLREVDEIVPVDEPTASKEPGRCGSARSLADCISTNEEEEWSALEGVTRVNSLLNLPRLLSGDKRSTSWRKRR

SEQ ID NO: 161479 - protein, 243 aa, Zea Mays
MKEGQNDIYYITGESKKAVENSPFLEKLKKKGYEVLYMVDAIDEYAIGQLKEFEGKKLVSATKEGLKLDESEDEKKRKEELKEKFEGLCKVIKEVLGDKVEKVVVSDRVVDSPCCLVTGEYGWTANMERIMKAQALRDSSMSGYMSSKKTMEINPDNAIMEELRKRAEADKNDKSVKDLVMLLFETALLTSGFSLDDPNTFGGRIHRMLKLGLSIDEDEAPEADTDMPPLEDDAGESKMEEVD

SEQ ID NO: 161480 - protein, 316 aa, Zea Mays
MLGSLHKALDKIRFESLTDKSKLDAQPELFIHIVPDKANNTLTIIDSGIGMTKSDLVNNLGTIARSGTKEFMEALAAGADVSMIGQFGVGFYSAYLVAERVVVTTKHNDDEQYVWESQAGGSFTVTRDTSGEQLGRGTKMTLYLKDDQLEYLEERRLKDLIKKHSEFISYPISLWIEKTTEKEISDDEDEEDKKDEEGKVEDVDEKEEKEKKKKKIKEVSHEWQLVNKQKPIWMRKPEEITKEEYAAFYKSLTNDWEEHLAVKHFSVEGQLEFKAVLFVPKRAPFDLFDTRKKLNNIKLYVRRVFIMDNCEELIPE

SEQ ID NO: 161481 - protein, 266 aa, Zea Mays
MTKSDLVNNLGTIARSGTKEFMEALAAGADVSMIGQFGVGFYSAYLVAERVVVTTKHNDDEQYVWESQAGGSFTVTRDTSGEQLGRGTKMTLYLKDDQLEYLEERRLKDLIKKHSEFISYPISLWIEKTTEKEISDDEDEEDKKDEEGKVEDVDEKEEKEKKKKKIKEVSHEWQLVNKQKPIWMRKPEEITKEEYAAFYKSLTNDWEEHLAVKHFSVEGQLEFKAVLFVPKRAPFDLFDTRKKLNNIKLYVRRVFIMDNCEELIPE

SEQ ID NO: 161482 - protein, 78 aa, Zea Mays
MKKDEEGANATVAGDGDARRRSALPVRLLPLRPAAQRIEGSPGGGEGVVRVLVMGADLACGKARHRFFLISPLGGDCC

SEQ ID NO: 161483 - protein, 87 aa, Zea Mays
MAAVEVQVPTAAPVEEAAQLAAASAVETPNEETAAPAVETEVVVAKEPEPVEAETETETKEAEAVAEPTEAEPKEAEPEAAVEKSVE

SEQ ID NO: 161484 - protein, 160 aa, Zea Mays
MAAVEVQVPTAAPVEEAAQLAAASAVETPNEETAAPAVETEVVVAKEPEPVEAETETETKEAEAVAEPTEAEPKEAEPEAAAPAAETEAAAPAAETEAAAAPVEAAEPEIAAETKEVAAVEANEEEEEAAPAVAATPEVAATEEEAAAPAPEAAVEKSVE

SEQ ID NO: 161485 - protein, 130 aa, Zea Mays
MAAVEVQVPTAAPVEEAAQLAAASAVETPNEETAAPAVETEVVVAKEPEPVEAETETETKEAEAVAEPTEAEPKEAEPEIAAETKEVAAVEANEEEEEAAPAVAATPEVAATEEEAAAPAPEAAVEKSVE

SEQ ID NO: 161486 - protein, 94 aa, Zea Mays
MAAVEVQVPTAAPVEEAAQLAAASAAETETETKEAEAVAEPTEIAAETKEVAAVEANEEEEEAAPAVAATPEVAATEEEAAAPAPEAAVEKSVE

SEQ ID NO: 161487 - protein, 144 aa, Zea Mays
MAAVEVQVPTAAPVEEAAQLAAASAVETPNEETAAPAVETEVVVAKEPEPVEAETETETKEAEAVAEPTEAEPKEAEPEAAAPEAETEAAEPEIAAETKEVAAVEANEEEEEAAPAVAATPEVAATEEEAAAPAPEAAVEKSVE

SEQ ID NO: 161488 - protein, 93 aa, Zea Mays
MAMCEEVPRLHLDPTSDCTMKLRGVVGEFLEKAGSGSPRLFLPLLEKNRWFKRSHTTRSSIRSRWRLPIDFMAPRMDFSSIYIYLLFCKTFAM

SEQ ID NO: 161489 - protein, 713 aa, Zea Mays
MCSTAVLLVRTGVVLVCLAALARAPSKVHAAAGTGDGLLAIPTNASLSHCPSWCGDVQISYPFGIGPGCFRQGFELTCDHTAPSPRLFFVSGNSSIQVTSVHIGISRVRVSAVGFNVTMSAGVDTYTQSWKAPPGVISYGSNYLFTVGCGVYVYVFGDNMTDIIGYCTSICTDNREIMERANTPYSACTGLGCCMIPIRGGQGITLKLGRLNSTIPHFGEALSRVKIIVSQYYEFVADDVYTSWVNTSNVDDMLFYIAIMDQPSCASAQSQENKNTYACSSESICDDDLPPVVSQGGYNCFCPGRQIEGVNPYIEDGCIAYYNPEAPSIRNCMRLCGNISVPFPFGIEEGCYANDNLRLNCTSNGTLILDRGYAQYHVTNLSLDDGLLMVTNMLNATSFNNMERVVITNYDGYYHNNFQPTYMAVVDGNYDFSQEDTTIKWVIANITCQKAMQNNATYACVSDNSICKDVMQGNIRDGYRCKCSDGFQGNPYLQNNCTDIDECLIPNKCNGICHNFDGGFNCTSCPHGKEYDPKNHKCVMSAKQRILIFGIVIGLVCGLGSISFALGAIVLTGKWKKGIQRRIRREYFKKNQGLLLEQLISNENATNKTKIFTLDELEEATNKFDATRVLGHGGHGTVYKGILCDQRVVAIKKSKIVEQIEIDQFINEVAILSQIIHRNVVKLFGCCLEDEDCNGSIRSTCLFTLSCCNTNFP

SEQ ID NO: 161490 - protein, 521 aa, Zea Mays
MCSTAVLLVRTGVVLVCLAALARAPSKVHAAAGTGDGLLAIPTNASLSHCPSWCGDVQISYPFGIGPGCFRQGFELTCDHTAPSPRLFFVSGNSSIQVTSVHIGISRVRVSAVGFNVTMSAGVDTYTQSWKAPPGVISYGNNREIMERANTPYSACTGLGCCMIPIRGGQGITLKLGRLNSTIPHFGEALSRVKIIVSQYYEFVADDVYTSWVNTSNVDDMLFYIAIMDQPSCASAQSQENKNTYACSSESICDDDLPPVVSQGGYNCFCPGRQIEGVNPYIEDGCIAYYNPEAPSIRNCMRLCGNISVPFPFGIEEGCYANDNLRLNCTSNGTLILDRGYAQYHVTNLSLDDGLLMVTNMLNATSFNNMERVVITNYDGYYHNNFQPTYMAVVDGIVIGLVCGLGSISFALGAIVLTGKWKKGIQRRIRREYFKKNQGHGGHGTVYKGILCDQRVVAIKKSKIVEQIEIDQFINEVAILSQIIHRNVVKLFGCCLEDEDCNGSIRSTCLFTLSCCNTNFP

SEQ ID NO: 161491 - protein, 100 aa, Zea Mays
MGKLSLGWTNTKKAGPQWEWRDGESIVYSPGKRLDGGVLSSRLAGTRSGLEKTVGELTYTRVKCYICCVVGDPQLGINRFGSPNFSDMKTGSSTFSVDNK

SEQ ID NO: 161492 - protein, 544 aa, Zea Mays
MCSTAVLLVRTCVVLVCLAALARAPAKVHAASGTGDGLLAIPTNASLSHCPSWCGDVQISYPFGIGPGCFRQGFELTCDQTAPSPRLFFVSRNSSIQVTSLYVGSSVVLASAVGFNVTMSAGVDTYTKSWEAPTATGVSFYADHNFLYTVGCGVYVYVFGDNMTDIIGYCTSICTDNREIMESVGACEGLGCCSILMRGGQGFTLKLGRLNSTIPQFGEALSSVKIIFSEYYEFVTDDVYASWVNTSNVHGIVLDIAITDQPSCASARSQENKDTYACTSESICDDVQGGYSCVCPGQIEGNPYIKDGCIAYYNPEAPSIRNCTRLCGNISVPFPFGIEEGCYANDNLRLNCTINDTTLILDRGYAQYCVTNLSLDDGLLMVTNMLNATSFNNMERVVITNYDGYYQNGFYSTDEDVVDGNYDFSQEDTTIKWFIANITCQKAMQNNATYACVSDNSICKDVMRGNIRDGYRCKCSDGFQGNPYLQNNCTDINECFIPNKCNGICHNFDGGFNCTSCPHGKEYDPKNQKCVMSAKQRILIFGES

SEQ ID NO: 161493 - protein, 82 aa, Zea Mays
MAFCRAEATFSEVEEKRLGWAAWILNCTMASFDEAVMRESLERWVWESDFRYMGYLSSAGSTRLVIESLPLQGYVVSFVSKI

SEQ ID NO: 161494 - protein, 434 aa, Zea Mays
MCSTAVLLVRTCVVLVCLAALARAPAKVHAAAGTGDGLLAIPTNASLSHCPSRCGDVQISYPFGIGPGCFRQGFELSCDRTTPSPRLFFVSGNSSIQVTSLYVRNSVVWVSAVGFNVTMSAGVDTYTKSWEAPTATDNREIMESANTGSGACEGLGCCSIPIRGGQGFTLKLDDVYASWVVNTSNVHAMLLNIAITDQPSCASAQSQENKDTYACSSESICYDYLPPSVSQRGYTCFCPGQIEGNPYIEDGCIAYYNPEAPNRNCMRLCGNISVPFPFGIQEGCYANDNLRLDCTSNDTLILDRGYAQYRVTNLSLDDGLLMVTNMLNDTSSNNVGRIIITSNNDKYQEVMDGNYDFSQEDVAIKWVISNITCQKAMQNNATYACVSDNSICKDVMRGNIRDGYRCKCSDGFQGNPYLHNNCTEFKNGFHSGAT

SEQ ID NO: 161495 - protein, 604 aa, Zea Mays
MASAVGYNVTMSAGVDTYTKSWEAPTATGVSFYPDYNNLYTVGCGVYVYVFGDNMTDIIGSCTSICTDNREIMESANTGSGACEGLGCCSIPIRGGQGFTLKLGRLNSTIPQFGEALSNVKIIFSQNYDFVTDDVYASWVVNTSNVHGMLLNIAITDQPSCASAQSQENKDTYACSSESICDDDLSPSGFNLPYRVTNLSLDDGLLMVTNMLNDTSSNNMERVVLVNYDGYNQNGFYSTDFYSTDEDVVDDIDECLIPNKCNGICHNVDGGFNCTSCPHGKEYDPKKKKCVMSAKQRILIFGIVIGLVCGLGSISFALGAIILTGKWKKGIQRRIRREYFKKNQGLLLEQLISNENATTKTKIFTLDELEEATNKFDATRVLGHGGHGTVYKGILSDQRVVAIKKSKIVEQIEIDQFINEVAILSQIIHRNVVKLFGCCLEDEVPLLVYEFISNGTLYDILHENIATKCLLSWDDRIRIATEASGALAYLHSAAAIPIFHRDVKSSNILLDDNFTVKVSDFGASRSLSLDETHVVTIVQGTFGYLDPEYYYTGSLTEKSDVYSFGVILVELLTRKKPIFINELGAKQNLSHYFIEGYRKGLSWK

SEQ ID NO: 161496 - protein, 675 aa, Zea Mays
MASAVGYNVTMSAGVDTYTKSWEAPTATGVSFYPDYNNLYTVGCGVYVYVFGDNMTDIIGSCTSICTDNREIMESANTGSGACEGLGCCSIPIRGGQGFTLKLGRLNSTIPQFGEALSNVKIIFSQNYDFVTDDVYASWVVNTSNVHGMLLNIAITDQPSCASAQSQENKDTYACSSESICDDDLSPSGFNLPYRVTNLSLDDGLLMVTNMLNDTSSNNMERVVLVNYDGYNQNGFYSTDFYSTDEDVVDGNYDFSQEDTTIKWVIANITCHKAMQNNATYACVSDNSICKDVMRGNIRDGYRCKCSNGFQGNPYLQNNCTDIDECLIPNKCNGICHNVDGGFNCTSCPHGKEYDPKKKKCVMSAKQRILIFGIVIGLVCGLGSISFALGAIILTGKWKKGIQRRIRREYFKKNQGLLLEQLISNENATTKTKIFTLDELEEATNKFDATRVLGHGGHGTVYKGILSDQRVVAIKKSKIVEQIEIDQFINEVAILSQIIHRNVVKLFGCCLEDEVPLLVYEFISNGTLYDILHENIATKCLLSWDDRIRIATEASGALAYLHSAAAIPIFHRDVKSSNILLDDNFTVKVSDFGASRSLSLDETHVVTIVQGTFGYLDPEYYYTGSLTEKSDVYSFGVILVELLTRKKPIFINELGAKQNLSHYFIEGYRKGLSWK

SEQ ID NO: 161497 - protein, 808 aa, Zea Mays
MFGCKDVHIPCSDSRTKRVLIDASCMNGCRSFWALRCGLEWAAQTGLSRDFGWATVGSATTSRGDCAATSEGGSDRWCAEHTVGMAAALRLQRQSLAASPFLFSAHGLRTASSRSSSLRSIRVTSLHVRGNWVMASAVGYNVTMSAGVDTYTKSWEAPTATGVSFYPDYNNLYTVGCGVYVYVFGDNMTDIIGSCTSICTDNREIMESANTGSGACEGLGCCSIPIRGGQGFTLKLGRLNSTIPQFGEALSNVKIIFSQNYDFVTDDVYASWVVNTSNVHGMLLNIAITDQPSCASAQSQENKDTYACSSESICDDDLSPSGFNLPYRVTNLSLDDGLLMVTNMLNDTSSNNMERVVLVNYDGYNQNGFYSTDFYSTDEDVVDGNYDFSQEDTTIKWVIANITCHKAMQNNATYACVSDNSICKDVMRGNIRDGYRCKCSNGFQGNPYLQNNCTDIDECLIPNKCNGICHNVDGGFNCTSCPHGKEYDPKKKKCVMSAKQRILIFGIVIGLVCGLGSISFALGAIILTGKWKKGIQRRIRREYFKKNQGLLLEQLISNENATTKTKIFTLDELEEATNKFDATRVLGHGGHGTVYKGILSDQRVVAIKKSKIVEQIEIDQFINEVAILSQIIHRNVVKLFGCCLEDEVPLLVYEFISNGTLYDILHENIATKCLLSWDDRIRIATEASGALAYLHSAAAIPIFHRDVKSSNILLDDNFTVKVSDFGASRSLSLDETHVVTIVQGTFGYLDPEYYYTGSLTEKSDVYSFGVILVELLTRKKPIFINELGAKQNLSHYFIEGYRKGLSWK

SEQ ID NO: 161498 - protein, 525 aa, Zea Mays
MRLCGNINVPFPFGIEEGCSANDNLRLNCTSNDTLILDRGYTQYRVTNLSLDDGLLMVTNMLNDTSSNNMERVVLVNYDGYNQNGFYSTDFYSTDEDVVDGNYDFSQEDTTIKWVIANITCHKAMQNNATYACVSDNSICKDVMRGNIRDGYRCKCSNGFQGNPYLQNNCTDIDECLIPNKCNGICHNVDGGFNCTSCPHGKEYDPKKKKCVMSAKQRILIFGIVIGLVCGLGSISFALGAIILTGKWKKGIQRRIRREYFKKNQGLLLEQLISNENATTKTKIFTLDELEEATNKFDATRVLGHGGHGTVYKGILSDQRVVAIKKSKIVEQIEIDQFINEVAILSQIIHRNVVKLFGCCLEDEVPLLVYEFISNGTLYDILHENIATKCLLSWDDRIRIATEASGALAYLHSAAAIPIFHRDVKSSNILLDDNFTVKVSDFGASRSLSLDETHVVTIVQGTFGYLDPEYYYTGSLTEKSDVYSFGVILVELLTRKKPIFINELGAKQNLSHYFIEGYRKGLSWK

SEQ ID NO: 161499 - protein, 711 aa, Zea Mays
MAPTGGAPYNTTSRSVPTPRLLLEPPSPRLPLIVGQTAPSGSVAASTASANPIVSPVVTESSGIAQAAQPILVDSEPVNINDDDDEHGAKRQKKCTSEVWQYFTRETKTVTINGKNYTEKWASCNFPRCKTKYRCESTKGTTGFWTHLRTTHSVVKGQQQLAVGKDHEKDINIVEPYKYDPEVSSRKFYLAIIMHEYPSNIVEHEYLIDFLKSLRPSFPIKSRIIVRKEILSIYSEEKKKLYAYLKTFNCRFSTTMDMWTSNQNKGYMCVTAHWIDDDWRIQKRIIDFFHVEGRHTGAKLYVTFSECMVRWNLEKKLFSLTLDNASANEVAVKDIVNDLKTSVGVSIVCDGVLELMKHATECGLETNKGISLDVSTRWNSTFLMLRDALYYKDAFTQLKLADRRRYEHISPTPEEWDKAKMLFHALKKFYDLTELLSGTLYPTANLFYKGFCEIRSLLGDWSTSEDINIREMAISMSKKFEKYWNKSNVALAVASFLDPRYKRKVVEFYTRKFYGDAQYHAKLEEFVSTLRQMYQFYVSLAPTKNTPEHNKTRPSDWCMETDDKEFQEYLCDTYSSELDCSNDLDKYMAAKLFKHSGQFDILAWWKNQGKEYPTLSQMARDVLAIQVSTVASESAFSASGRVVDPYRSRLDPEMVQALVCTKDWVAAARRDSKSVASIIGDLEVIDVMTNLAAQDDDIESDSDVMDEDKEL

SEQ ID NO: 161500 - protein, 645 aa, Zea Mays
MAPTGGAPYNTTSRSVPTPRLLLEPPSPRLPLIVGQTAPSGSVAASTASANPIVSPVVTESSGIAQAAQPILVDSEPVNINDDDDEHGAKRQKKCTSEVWQYFTRETKTVTINGKNYTEKWASCNFPRCKTKYRCESTKGTTGFWTHLRTTHSVVKGQQQLAVGKDHEKDINIVEPYKYDPEVSSRKFYLAIIMHEYPSNIVEHEYLIDFLKSLRPSFPIKSRIIVRKEILSIYSEEKKKLYAYLKTFNCRFSTTMDMWTSNQNKGYMCVTAHWIDDDWRIQKRIIDFFHVEGRHTGAKLYVTFSECMVRWNLEKKLFSLTLDNASANEVAVKDIVNDLKTSVGVSIVCDGVLELMKHATECGLETNKGISLDVSTRWNSTFLMLRDALYYKDAFTQLKLADRRRYEHISPTPEEWDKAKMLFHALKKFYDLTELLSGTLYPTANLFYKGFCEIRSLLGDWSTSEDINIREMAISMSKKFEKYWNKSNVALAVASFLDPRYKRKVVEFYTRKFYGDAQYHAKLEEFVSTLRQMYQFYVSLAPTKNTPEHNKTRPSDWCMETDDKEFQEYLCDTYSSELDCSNDLDKYMAAKLFKHSGQFDILAWWKNQGKEYPTLSQMARDVLAIQVSTVASESAFSASGRVVDP

SEQ ID NO: 161501 - protein, 120 aa, Zea Mays
MCFFQLLNAYPSVFCYLHDLSFLLDIVLTFKKKAPNAIKEIRKFAQKAMGTTDIRIDVKLNKHIWSSGIRSVPRRVRVRIARKRNDEEDAKEELYSLVTVAEIPAEGLKGLGTKVVDDTD

SEQ ID NO: 161502 - protein, 151 aa, Zea Mays
MVPEELTKANLSSALDGVDIVYFDVRLHDIALLVAEEASQRKIPILIDAERKREGLDELLNFASYVVCSAKFPQAWTGASSIPVALVSMLSRLPNIKFVIVTLGEKGCLMLERSSTDASEAGEIDAEALFESLEKSIDQSSTIPKCVASKV

SEQ ID NO: 161503 - protein, 324 aa, Zea Mays
MVPCAQQPQLPTAPPFHTFRQAGRRVIPLPRLHRRSRRTIATMASASGSPNPVVLGCGGISVDYLAAVASFPNPDDKIRSLALKVQGGGNTGNALTAAARLGLRPRIISKVANDAQGRSILSELQTDGVDTSYILVAENGNSPFTYIIVDEQTKTRTCIHTPGSPPMVPEELTKANLSSALDGVDIVYFDVRLHDIALLVAEEASQRKIPILIDAERKREGLDELLNFASYVVCSAKFPQAWTGASSIPVALVSMLSRLPNIKFVIVTLGEKGCLMLERSSTDASEAGEIDAEALFESLEKSIDQSSTIPKCVASKLLFVFSQT

SEQ ID NO: 161504 - protein, 213 aa, Zea Mays
MVPCAQQPQLPTAPPFHTFRQAGRRVIPLPRLHRRSRRTIATMASASGSPNPVVLGCGGISVDYLAAVASFPNPDDKIRSLALKVQGGGNTGNALTAAARLGLRPRIISKVANDAQGRSILSELQTDGVDTSYILVAENGNSPFTYIIVDEQTKTRTCIHTPGSPPMVPEELTKANLSSALDGVDIVYFDVRLHDIALLVAEECRQVKEKSLF

SEQ ID NO: 161505 - protein, 237 aa, Zea Mays
MVISVPAARRSTSVRDAVLGGGGRQLYQPLRCAFYDGLAAALSESEEPSDSDAAARVPAGCKRQAARNVLILMSDTGGGHRASAEALRDAFRIEFGDAYKIRGFETQMEKWMAACDCIITKAGPGTIAEALIRGLPIILNDFIPGQEVGNVPYVVDNGAGVFSKDPGEAARQVARWFSSSSTDGDELRRYSRNALRLAQPEAVFHIVRDIHKQLQRQPAAVTRIPSRSLTSSFPYHM

SEQ ID NO: 161506 - protein, 55 aa, Zea Mays
MQGPTADPTPTAAGSSSPTPSNRSEKILNRVTQKCACLERQLQINDNHDFPIVWF

SEQ ID NO: 161507 - protein, 56 aa, Zea Mays
MIELEGPRTARFCCEFNSRPSPCPDGVDMLIQNGVPDLLGRIVLVPCIISQSELRR

SEQ ID NO: 161508 - protein, 130 aa, Zea Mays
MCSICSWPASCRGKPLGYKVDDTKLKRAGLDYWPYVVVKIHDSWDHFCDYFMKQEGDKRLLAFTKRGTHIHSARGLASLRFRNKRVASASPRGLLQRRPRRRDPPDSHGGDLRPVPEPLRQRRSRAVRSR

SEQ ID NO: 161509 - protein, 140 aa, Zea Mays
MEAGLRALGHRYFGGGGGGLGGFAAARATRLRRQRQRRMAAFCSREWQGIPPLPPSTSYRSGVSVYLTSLPTLANVSAVAVNGDGNGAAGGPVGSGVEVARARRMLHVVLVSPLIPGNTGSIARTCAASAVGLHLVGVSH

SEQ ID NO: 161510 - protein, 70 aa, Zea Mays
MTCMKACVLMQPLGNKCYQLLTYATSILLDMYCTLSSVYCWSKLHLCIYRRVVLNFLNLCILMQPLENSC

SEQ ID NO: 161511 - protein, 61 aa, Zea Mays
MQPLGNKCYQLLTYATSILLDMYCTLSSVYCWSKLHLCIYRRVVLNFLNLCILMQPLENSC

SEQ ID NO: 161512 - protein, 73 aa, Zea Mays
MDVLHCSTAIYFWIVLGDVCFVWTTLVLFVSTGLQLTLSILVLLAPFLFPSSPPSWFFTPGSSVSRCLYRLLR

SEQ ID NO: 161513 - protein, 411 aa, Zea Mays
MTDSTEFKAVTTCNTCKPATISRDDTEAADARSLKNLNSTAPLSNSRTRRNGPHILSWLLPKSKRKPKPDVSPNTVECENMSQLLKDWGVFSLDSLRKEVVEANEHRDAALQEVSEMKLSLGELTAKLVSLEAYCSELKKALKQATSAKNMQSHSKRSARPVSGSRDSFLPVSHEVMVEGFLQIVSEARLSIKQFCKVLIQQVEDTDNGLSDKLNLLLRPYQITLSDKHPKLVLYHLEALMNQAMYQDFENCTFQKNGSPRCLDPKQEQQESFASFVALRNLSWNEVLKKGTKHHCEDLGRFCDQKMSCVVSILNWSWPWAEQLLQCFFVASKCVWLLHLLAFSFVPPLTILRVEEDRAFDQTYMEDVLLDKQRSRNGPPPSSSQVKLMVTPGFYVQDRLLKCRVLCRYSG

SEQ ID NO: 161514 - protein, 104 aa, Zea Mays
MAEEEWPRLGSGGVRSFSMSGGMDPKNKNIPNPPWDRWGQKDTAQGSQSWNRNRNLSWRLKSQPGKSDLHEGLLSSSSGDGIQSEKEGKKIGGARKPQNPKDNK

SEQ ID NO: 161515 - protein, 925 aa, Zea Mays
MAGVCGSPFCSREASAPAPASCGRWDELLNSSTCANNILATGAAALLAVVLALQLLVRVARNGLRHAPVVALSSPLQRAAVAANACLGLAYLGLAAWMLGTDLTQRASVYLPHRWLVSLAQGLCLLLAGFAFSVRAQLLGAAFLRVWAALLAAYAAFVCCTSVVHMVADKVLAVKTCLDVLSLPGALLLLVYGIRHAREEEEGDGNGGTESSLYKPLNAEAHDDGAADSRVTPFAKAGVFSIMTFWWLNPMMKKGYEKPLEEKDMPLLGPSDRAYSQYLMFLDNLNRKKQLQAHGNPSVFWTIVSSHKSAILVSGLFALLKVLTLSAGPVLLKAFINVSLGKGSFKYEGFVLAAAMFAIKCCESLSQRQWYFRTRRLGLQVRSLLSAAIYKKQQKLSGSSKLKHSSGEIINYVTVDAYRIGEFPYWFHQTWTTSVQLCIALGILYNAVGLAMIASLVVIVLTVICNAPLSKLQHKFQTRLMEAQGVRLKAMSESLIHMKVLKLYAWETHFKKVIEGLREIEIKWLSAFNLRKSFNGFVFWTSPVLVSAATFLTCYLLKIPLDASNVFTFVATLRLVQDPIRQMPDVIGVVIQAKVAFTRITKFLDAPELSGQARKKYCVGDEYRIVMNSCSFSWDENPSKPTLKNINLVVKAGEKVAICGEVGSGKSTLLAAVLGEVPKTEGMIQICGKTAYVSQNAWIQTGTVQDNILFGSSMDRQRYQETLERCSLVKDLEMLPYGDHTQIGERGVNLSGGQKQRVQLARALYQNADIYLLDDPFSAVDAHTATSLFNEYVMGALSDKTVLLVTHQVDFLPVFDSVLLMSDGEIIRAAPYQDLLAHCQEFQNLVNAHKDTIGVSDLNRVRSHRTNENKGSIDIHGSLYKESLKPSPADQLIKTEEREMGDTGLKPYILYLRQNKGFFNGSMDR

SEQ ID NO: 161516 - protein, 1024 aa, Zea Mays
MAGVCGSPFCSREASAPAPASCGRWDELLNSSTCANNILATGAAALLAVVLALQLLVRVARNGLRHAPVVALSSPLQRAAVAANACLGLAYLGLAAWMLGTDLTQRASVYLPHRWLVSLAQGLCLLLAGFAFSVRAQLLGAAFLRVWAALLAAYAAFVCCTSVVHMVADKVLAVKTCLDVLSLPGALLLLVYGIRHAREEEEGDGNGGTESSLYKPLNAEAHDDGAADSRVTPFAKAGVFSIMTFWWLNPMMKKGYEKPLEEKDMPLLGPSDRAYSQYLMFLDNLNRKKQLQAHGNPSVFWTIVSSHKSAILVSGLFALLKVLTLSAGPVLLKAFINVSLGKGSFKYEGFVLAAAMFAIKCCESLSQRQWYFRTRRLGLQVRSLLSAAIYKKQQKLSGSSKLKHSSGEIINYVTVDAYRIGEFPYWFHQTWTTSVQLCIALGILYNAVGLAMIASLVVIVLTVICNAPLSKLQHKFQTRLMEAQGVRLKAMSESLIHMKVLKLYAWETHFKKVIEGLREIEIKWLSAFNLRKSFNGFVFWTSPVLVSAATFLTCYLLKIPLDASNVFTFVATLRLVQDPIRQMPDVIGVVIQAKVAFTRITKFLDAPELSGQARKKYCVGDEYRIVMNSCSFSWDENPSKPTLKNINLVVKAGEKVAICGEVGSGKSTLLAAVLGEVPKTEGMIQICGKTAYVSQNAWIQTGTVQDNILFGSSMDRQRYQETLERCSLVKDLEMLPYGDHTQIGERGVNLSGGQKQRVQLARALYQNADIYLLDDPFSAVDAHTATSLFNEYVMGALSDKTVLLVTHQVDFLPVFDSVLLMSDGEIIRAAPYQDLLAHCQEFQNLVNAHKDTIGVSDLNRVRSHRTNENKGSIDIHGSLYKESLKPSPADQLIKTEEREMGDTGLKPYILYLRQNKGFFNGSMGILCHVIFVCGQIAQNSWMAANVQNPDVGTLKLISVYIAIGFITVFFLLFRSIALVVLGIQTSRSLFSQLLNSLFRAPMSFFDSTPLGRILSRGIFRFEHC

SEQ ID NO: 161517 - protein, 767 aa, Zea Mays
MDRQRYQETLERCSLVKDLEMLPYGDHTQIGERGVNLSGGQKQRVQLARALYQNADIYLLDDPFSAVDAHTATSLFNEYVMGALSDKTVLLVTHQVDFLPVFDSVLLMSDGEIIRAAPYQDLLAHCQEFQNLVNAHKDTIGVSDLNRVRSHRTNENKGSIDIHGSLYKESLKPSPADQLIKTEEREMGDTGLKPYILYLRQNKGFFNGSMGILCHVIFVCGQIAQNSWMAANVQNPDVGTLKLISVYIAIGFITVFFLLFRSIALVVLGIQTSRSLFSQLLNSLFRAPMSFFDSTPLGRILSRVSSDLSIVDLDVPFGLMLALGASINAYSNLGVLAVVTWQVLFVSVPMMVLALRLQKYYLASAKELMRINGTTKSALANHLGESVAGSITIRAFEEEDRFFEKNSELVDKNAASYFYNFAATEWLIQRLETMSAAVLSFSAFIMALLPAGTFSSGFIGMALSYGLSLNNSFVFSIQNQCQLSNQIISVERVNQYMDIPSEAAEVIEENRPSPNWPQVGRVELRDLKIRYREDAPLVLHGITCTFEGGDKIGIVGRTGSGKTTLIGALFRLVEPTGGKIIIDSVDITTIGLHDLRSRLGIIPQDPTLFQGTIRYNLDPLEQFSDQQIWEVLDKCQLLEAVQEKEQGLDSLVVEDGSNWSMGQRQLFCLGRALLRRCRVLVLDEATASIDNATDAILQKTIRTEFRDCTVITVAHRIPTVMDCSMVLALSDGKLVEYDKPTKLMETEGSLFRDLVKEYWSYASNGNI

SEQ ID NO: 161518 - protein, 1190 aa, Zea Mays
MAGVCGSPFCSREASAPAPASCGRWDELLNSSTCANNILATGAAALLAVVLALQLLVRVARNGLRHAPVVALSSPLQRAAVAANACLGLAYLGLAAWMLGTDLTQRASVYLPHRWLVSLAQGLCLLLAGFAFSVRAQLLGAAFLRVWAALLAAYAAFVCCTSVVHMVADKVLAVKTCLDVLSLPGALLLLVYGIRHAREEEEGDGNGGTESSLYKPLNAEAHDDGAADSRVTPFAKAGVFSIMTFWWLNPMMKKGYEKPLEEKDMPLLGPSDRAYSQYLMFLDNLNRKKQLQAHGNPSVFWTIVSSHKSAILVSGLFALLKVLTLSAGPVLLKAFINVSLGKGSFKYEGFVLAAAMFAIKCCESLSQRQWYFRTRRLGLQVRSLLSAAIYKKQQKLSGSSKLKHSSGEIINYVTVDAYRIGEFPYWFHQTWTTSVQLCIALGILYNAVGLAMIASLVVIVLTVICNAPLSKLQHKFQTRLMEAQGVRLKAMSESLIHMKVLKLYAWETHFKKVIEGLREIEIKWLSAFNLRKSFNGFVFWTSPVLVSAATFLTCYLLKIPLDASNVFTFVATLRLVQDPIRQMPDVIGVVIQAKVAFTRITKFLDAPELSGQARKKYCVGDEYRIVMNSCSFSWDENPSKPTLKNINLVVKAGEKVAICGEVGSGKSTLLAAVLGEVPKTEGMIQICGKTAYVSQNAWIQTGTVQDNILFGSSMDRQRYQETLERCSLVKDLEMLPYGDHTQIGERGVNLSGGQKQRVQLARALYQNADIYLLDDPFSAVDAHTATSLFNEYVMGALSDKTVLLVTHQVDFLPVFDSVLLMSDGEIIRAAPYQDLLAHCQEFQNLVNAHKDTIGVSDLNRVRSHRTNENKGSIDIHGSLYKESLKPSPADQLIKTEEREMGDTGLKPYILYLRQNKGFFNGSMGILCHVIFVCGQIAQNSWMAANVQNPDVGTLKLISVYIAIGFITVFFLLFRSIALVVLGIQTSRSLFSQLLNSLFRAPMSFFDSTPLGRILSRVSSDLSIVDLDVPFGLMLALGASINAYSNLGVLAVVTWQVLFVSVPMMVLALRLQKYYLASAKELMRINGTTKSALANHLGESVAGSITIRAFEEEDRFFEKNSELVDKNAASYFYNFAATEWLIQRLETMSAAVLSFSAFIMALLPAGTFSSVPAIKPDNLCGKGEPVHGHTK

SEQ ID NO: 161519 - protein, 1021 aa, Zea Mays
MAGVCGSPFCSREASAPAPASCGRWDELLNSSTCANNILATGAAALLAVVLALQLLVRVARNGLRHAPVVALSSPLQRAAVAANACLGLAYLGLAAWMLGTDLTQRASVYLPHRWLVSLAQGLCLLLAGFAFSVRAQLLGAAFLRVWAALLAAYAAFVCCTSVVHMVADKVLAVKTCLDVLSLPGALLLLVYGIRHAREEEEGDGNGGTESSLYKPLNAEAHDDGAADSRVTPFAKAGVFSIMTFWWLNPMMKKGYEKPLEEKDMPLLGPSDRAYSQYLMFLDNLNRKKQLQAHGNPSVFWTIVSSHKSAILVSGLFALLKVLTLSAGPVLLKAFINVSLGKGSFKYEGFVLAAAMFAIKCCESLSQRQWYFRTRRLGLQVRSLLSAAIYKKQQKLSGSSKLKHSSGEIINYVTVDAYRIGEFPYWFHQTWTTSVQLCIALGILYNAVGLAMIASLVVIVLTVICNAPLSKLQHKFQTRLMEAQGVRLKAMSESLIHMKVLKLYAWETHFKKVIEGLREIEIKWLSAFNLRKSFNGFVFWTSPVLVSAATFLTCYLLKIPLDASNVFTFVATLRLVQDPIRQMPDVIGVVIQAKVAFTRITKFLDAPELSGQARKKYCVGDEYRIVMNSCSFSWDENPSKPTLKNINLVVKAGEKVAICGEVGSGKSTLLAAVLGEVPKTEGMIQICGKTAYVSQNAWIQTGTVQDNILFGSSMDRQRYQETLERCSLVKDLEMLPYGDHTQIGERGVNLSGGQKQRVQLARALYQNADIYLLDDPFSAVDAHTATSLFNEYVMGALSDKTVLLVTHQVDFLPVFDSVLLMSDGEIIRAAPYQDLLAHCQEFQNLVNAHKDTIGVSDLNRVRSHRTNENKGSIDIHGSLYKESLKPSPADQLIKTEEREMGDTGLKPYILYLRQNKGFFNGSMGILCHVIFVCGQIAQNSWMAANVQNPDVGTLKLISVYIAIGFITVFFLLFRSIALVVLGIQTSRSLFSQLLNSLFRAPMSFFDSTPLGRILSRVYLQI

SEQ ID NO: 161520 - protein, 292 aa, Zea Mays
MSSAGPPPPLPPWSRLEGQVVLVTGASSGIGRDFCLDLARAGCRVVAAARRADRLRSLCDEINASAASRAPRAVAVEVDVAAGGSALEAAVQKAWDAFGRIDALVNNAGIRGAVHSPLDWPEDEWDRIIKTNLTGSWLVAKHVCRRMRDAKLKGSVVNITSIAGLNRGHLPGSTGYASSKAAVHYATKIMALELGADRIRVNSIAPGLFKSEITAPLFQKRWLSTVASKIVPLKEHGATDPALTSLVRFLIHEASSYVTGNIFIVDSVLLDTSTTSCEGSLLGTVPVRLGYS

SEQ ID NO: 161521 - protein, 333 aa, Zea Mays
MSSAGPPPPLPPWSRLEGQVVLVTGASSGIGRDFCLDLARAGCRVVAAARRADRLRSLCDEINASAASRAPRAVAVEVDVAAGGSALEAAVQKAWDAFGRIDALVNNAGIRGAVHSPLDWPEDEWDRIIKTNLTGSWLVAKHVCRRMRDAKLKGSVVNITSIAGLNRGHLPGSTGYASSKAAVHYATKIMALELGADRIRVNSIAPGLFKSEITAPLFQKRWLSTVASKIVPLKEHGATDPALTSLVRFLIHEASSYVTGNIFIVDSGATIPGVPIFSSLAMESRRNEDGNNDNSPTTTTKICYVAGLAETHRSSTRPVCLFCSYSRLTFTVC

SEQ ID NO: 161522 - protein, 315 aa, Zea Mays
MSSAGPPPPLPPWSRLEGQVVLVTGASSGIGRDFCLDLARAGCRVVAAARRADRLRSLCDEINASAASRAPRAVAVEVDVAAGGSALEAAVQKAWDAFGRIDALVNNAGIRGAVHSPLDWPEDEWDRIIKTNLTGSWLVAKHVCRRMRDAKLKGSVVNITSIAGLNRGHLPGSTGYASSKAAVHYATKIMALELGADRIRVNSIAPGLFKSEITAPLFQKRWLSTVASKIVPLKEHGATDPALTSLVRFLIHEASSYVTGNIFIVDSEQWNQDGMKTATTTTLQQQQQRSATLQAWRRRTGPQPVLSVSSAAIRG

SEQ ID NO: 161523 - protein, 247 aa, Zea Mays
MSKDQPGPSGKAVAGPAASKKAKAEADVGSLLEKTAPIIVCRKRSSIAKAAAAATAKEERSEKAESDKEGEKQQEAVGKRKAAAAAKDRAAWGPRTNKTRGGPAVRKASAQSHKGASAAADNGSDSDAPPEEAKKQPAADKKGGGGGGVAKKRNAVNFLNRMKQGGSAPSTERVSLLETLKLSAAAEQKKAGKGEGKEPAGGSGSKKATPGRRNVGRPPKRAAAPPSPPPSKRAKGGGGGGKRGGRK

SEQ ID NO: 161524 - protein, 155 aa, Zea Mays
MEVQEWHLIKATADHTDMSLESVERFLCNFAPREALEAAQWEVGRLWVEMARSEERDRELSGLRARTECLEAEATCLRSGREEARKDAKCLHGERTRLQQDLREVTSRAEETESTLRAANVRLGEANMDLQREREVARGRSSSSWVFLLGSVVIY

SEQ ID NO: 161525 - protein, 338 aa, Zea Mays
MIEVAAKKGARDLNLQGKLMNQIEWLPDSIGKLTGLVTLDISENRILALPEAIGMLSSLAKLDLHANRIAQLPESIGDLSNLIYLDLRGNQLASLPASLGRLVKLEELDVSANHLTSLPDSIGSLTRLKKLIAETNDLDELPYTIGNCVSLVELRVGYNHLKALPEAVGKLESLEVLSVRYNTIRGLPTTMASLTKLKEVDASFNELESIPENFCFVTSLIKLNVGNNFADLQSLPRSIGNLEMLEELDISNNQIRVLPDSFGNLQRLRVLRAEENPLQVPPRDVALKGAQAAVQYMAEYVAKKATRSQPMKTKKTWAQFCFFSRPNKRKHDRIDTAS

SEQ ID NO: 161526 - protein, 438 aa, Zea Mays
MATASTTLLLSLAFLAFAWAASPSPSPDAEAISRFQEYLRIDTAQPAPDYAAAVAFLRKQAADAGLEARTLELVAGKPLLLLRWPGRRPSLPSILLNSHTDVVPSEPNKWDHPPFSAALDEPSGRIYARGSQYLEAIRRLRSAGFVPDRNIYITFVPDEEIGGHGGVEPFVSSKEFKDMNVALVLDEGLASPGEEYRVFYAERSPWWLTIKATGAPGHGAKLYDGSAMENLMKSVEAIRRFRTSQFDLVKSGEKAEGDVVSVNFAYLKAGTPTPTGFVMNLQPSEAEVGLDIRIPPSAHVEALERRLVEEWAPPSRNLTFEFKQKMSVLDNFGKPAMTAADSTNPWWTLLEEAVKSADGKLGKAEIFPASTDARYFRKIGLPAFGFSPMANTPILLHDHNEFLSKDEYLKGIGIYESIIRALATHEDGGKDDESRAEL

SEQ ID NO: 161527 - protein, 443 aa, Zea Mays
MATASTTLLLSLAFLAFAWAASPSPSPDAEAISRFQEYLRIDTAQPAPDYAAAVAFLRKQAADAGLEARTLELVAGKPLLLLRWPGRRPSLPSILLNSHTDVVPSEPNKWDHPPFSAALDEPSGRIYARGSQCVGMQYLEAIRRLRSAGFVPDRNIYITFVPDEEIGGHGGVEPFVSSKEFKDMNVALVLDEGLASPGEEYRVFYAERSPWWLTIKATGAPGHGAKLYDGSAMENLMKSVEAIRRFRTSQFDLVKSGEKAEGDVVSVNFAYLKAGTPTPTGFVMNLQPSEAEVGLDIRIPPSAHVEALERRLVEEWAPPSRNLTFEFKQKMSVLDNFGKPAMTAADSTNPWWTLLEEAVKSADGKLGKAEIFPASTDARYFRKIGLPAFGFSPMANTPILLHDHNEFLSKDEYLKGIGIYESIIRALATHEDGGKDDESRAEL

SEQ ID NO: 161528 - protein, 135 aa, Zea Mays
MTSHLSCQPERSNSLLYLRPVLLRVIVVDVLARHSVEAVVPAVEGHPDGRDDVAPSLAGVLQRVLQVVQAVVPFAALESMSLAASPGGLCQLLSRPFTRPSAKASTSPKDLRLVKSGPIPVMATLTLESVAACSG

SEQ ID NO: 161529 - protein, 668 aa, Zea Mays
MASRDDGWGGGEDGSSLFEGMVLFAPEPTAAEDSVPAPAPAPAPAEDSVPVPAAVPELPSAARHDADAASSVPPPLDEDLFSDLTLFAPPQEPLSLEQTPPPLLPQGEDRSHAALAPAPLAPTPGLSRQPSTSSLRKKKRAVRIGYARSPQPAPPSPPATVPASAAAAAISASTIAFLDASPYPAATRTLDQLPDRQLDVHVNGYEAHAEAVDVDTNSPHVVEAVDVDTNSPRVEEEEAKEDDDGKEDEDAGVAALGVKERLGLLRSQISGKLDSIQQRAAAVAAKRRLLAGRRRKVAEEATSVASRHKDLERELEVACEAEDFERAESISDSLAALEKEKDGLLTALRDAELDYDSVDSELQEVLESRIAAEEEAAILLEQFAKDANEHAISESKQAQELSSKEIEGWQTSMELLETKKLEMEVETQLVLEARSGLEGSIEHLVEEDKLEEGTLSIKGEVLTKELADLLELVRLKEAEIAENNARIHEVQERISAVVSRFHGSQSDVDLKLNSLKEAQCKLDLETEALVLKKNEIDNFISLTEQKDSELREIIGACFSEAKTCQQSVEIRRKLASSILKSREDRIGLLKMEEEILQDIQMLRQKITDARTTLQEVSSRRTSIQQEMDSFKQKLSFIDKRGPELEAEKKVAAAARNFKEAGRIAAEQN

SEQ ID NO: 161530 - protein, 323 aa, Zea Mays
MIRRPRRSSREGIIDPATIFAILFGSELFEEYIGQLAMASMASLDNFGEDEQIDARKLQERMQAVQKDREEKLAETLKNRLHIYVQGNKAEFIQHAEAEVSKLRNAAYGVVMLNTIGYVYSRQAAKELAKKVMFLGVPFIAEWFRDKGHFIKSQVTAATGAIALMQLQDNLTKYMSAEGQYTEEELEMYMENHKKVMVDSLWKLNVADIEATLSHVCQMVLQDSSARKEELRLRAKGLKTLGRIFQGAKVNPSEGETSQTKNIDNMDGNDGSSPDSSPNREAQFTPNQPPVPSPYVEAPHVNGVYCPFPMPAAPPGARRDRIP

SEQ ID NO: 161531 - protein, 212 aa, Zea Mays
MLNTIGYVYSRQAAKELAKKVMFLGVPFIAEWFRDKGHFIKSQVTAATGAIALMQLQDNLTKYMSAEGQYTEEELEMYMENHKKVMVDSLWKLNVADIEATLSHVCQMVLQDSSARKEELRLRAKGLKTLGRIFQGAKVNPSEGETSQTKNIDNMDGNDGSSPDSSPNREAQFTPNQPPVPSPYVEAPHVNGVYCPFPMPAAPPGARRDRIP

SEQ ID NO: 161532 - protein, 226 aa, Zea Mays
MIVAEPELWEKLILAHPKVAKYQKKPFPLYYSLEALHEGSVATGDLNFTYTQQMPPPSFIPVRPLNAPPGGPLAAPPSGPLATAFGSATAHSNRSTSEQSHSPLHPNTNPFSMDFQEISNEAQSGHVEGGNGRKRKQSQIGAAIESFVDFKRSATSKTLEGIEEVSMEKCLDKLDRIDGFTDEDRSYAMEVFESAINREVFMKSKNHNARLLWLKRKISVLSGSNT

SEQ ID NO: 161533 - protein, 971 aa, Zea Mays
MADKAKVVGAHGERDDVFLWGELQHDDCRSGDQLGGVKLLSLMATESAFRLIGGTGARDWSKGFGAFGSSAGALSGEDLGFVDNDTGVYGGWNKSVPNRSGSAPPSMEGSLAALGHLIDQQSGSFEASLTTLDNITDSSKSEEQLRADPAYFEYYGSKVNLNPRLPPPLISRESRRLMNRVGKAKEWRMVSQDNSSKGSIYVPRSMLSTHKEEPEDDKSPRLDSSSVEDAQIVSSASNFQSQDFMLERFQQSVASSPDSSSSNPSNSNTGDSMPVYSDINLLKSLSFDALKQSDLNSWTPKGPLKSNVNNDLSSPPLSSSSYPGSKTGTQTFEQEKAAADTKHGNVVLGSGAAVTEVDNVDSIMKNLKLSLDVHTSSPAKQRWQDNVLQQYGSFLPAQGDPIQLTTQGPHPPHVPFVDNLSHAQLKLPDIHQNLPQPSMTTPFYTPNSFGNPYYQNLHPANAFPTSIGTGGYAVSGSILPPFMAGYAPQGPLATPLDSSMTPSFSGRPSGFLPAGNLTGGTDFMQSCKVYGQFEPGMQPSIPDPNFIHFFQHPSLFQYTGGNQYNTMGPRFTVVGNLAESFDSQNTIPQAASAYPSDQRLPLPITGFPNSPTARRGGTVPNYQGISSYIGVPMTYPTSPVFQGQTLPGVLPPVRRNDSAGFLPPSRNITGSPGIQGQRARQKFDESKTCSFLEELKSNRARMVELSDITGRVVEYSRFIQQKLENCTAEEKTSVFAEILPHASALMTDVFGNYVIQKFFEHGTREQRRDLATKLVGHVLPLSLQMYGCRVIQKALEVMELDQKIDLVHELDGHIMRCVRDQNGNHVIQKCIECVPTEHIGFVVSAFQGQVTSLSMHPYGCRVIQRILEHCGGNSQGQCIIDEILQWVCILAQDQYGNYVTQHVLERGKAHERSQIITKLAGQVVTMSQNKYASNVIEKCFQHGDIAERDLLIRRIVEQTEGNNNLLVCLVV

SEQ ID NO: 161534 - protein, 977 aa, Zea Mays
MADKAKVVGAHGERDDVFLWGELQHDDCRSGDQLGGVKLLSLMATESAFRLIGGTGARDWSKGFGAFGSSAGALSGEDLGFVDNDTGVYGGWNKSVPNRSGSAPPSMEGSLAALGHLIDQQSGSFEASLTTLDNITDSSKSEEQLRADPAYFEYYGSKVNLNPRLPPPLISRESRRLMNRVGKAKEWRMVSQDNSSKGSIYVPRSMLSTHKEEPEDDKSPRLDSSSVEDAQIVSSASNFQSQDFMLERFQQSVASSPDSSSSNPSNSNTGDSMPVYSDINLLKSLSFDALKQSDLNSWTPKGPLKSNVNNDLSSPPLSSSSYPGSKTGTQTFEQEKAAADTKHGNVVLGSGAAVTEVDNVDSIMKNLKLSLDVHTSSPAKQRWQDNVLQQYGSFLPAQGDPIQLTTQGPHPPHVPFVDNLSHAQLKLPDIHQNLPQPSMTTPFYTPNSFGNPYYQNLHPANAFPTSIGTGGYAVSGSILPPFMAGYAPQGPLATPLDSSMTPSFSGRPSGFLPAGNLTGGTDFMQSCKVYGQFEPGMQPSIPDPNFIHFFQHPSLFQYTGGNQYNTMGPRFTVVGNLAESFDSQNTIPQAASAYPSDQRLPLPITGFPNSPTARRGGTVPNYQGISSYIGVPMTYPTSPVFQGQTLPGVLPPVRRNDSAGFLPPSRNITGSPGIQGQRARQKFDESKTCSFLEELKSNRARMVELSDITGRVVEYSADQHGSRFIQQKLENCTAEEKTSVFAEILPHASALMTDVFGNYVIQKFFEHGTREQRRDLATKLVGHVLPLSLQMYGCRVIQKALEVMELDQKIDLVHELDGHIMRCVRDQNGNHVIQKCIECVPTEHIGFVVSAFQGQVTSLSMHPYGCRVIQRILEHCGGNSQGQCIIDEILQWVCILAQDQYGNYVTQHVLERGKAHERSQIITKLAGQVVTMSQNKYASNVIEKCFQHGDIAERDLLIRRIVEQTEGNNNLLVCLVV

SEQ ID NO: 161535 - protein, 144 aa, Zea Mays
MQIFVKTLTGKTITLEVESSDTIDNVKAKIQDKEGIPPDQQRLIFAGKQLEDGRTLADYNIQKESTLHLVLRLRGGAKKRKKKTYTKPKKIKHKHKKVKLSVLQFYKVDDTTSKVTRLRKECPNTECGAGVFMANHFDRHYCVM

SEQ ID NO: 161536 - protein, 67 aa, Zea Mays
MVRRASEAGEPQARAAVVDCIKHCDIRMNVLCWLLSFAIDFFATNPNVEVICCKAQSWTKAVGIVQK

SEQ ID NO: 161537 - protein, 333 aa, Zea Mays
MTESEGEAEAARAAVLTPPLSLGAGGLAGELRPANLGQRVLSLFRNVRPGSDLSHFQVPALRCVACVRAPLPTAHHQLTLTLVWLNSTIWNDTAAGDVQPAQVAAAAVRRGRVLRRRGHAGAVRARRRQPAAHVRRGGVEHLHHAAPHLRLRALQPGARGDAPRLHVRRPQRAPGAGLAPAARDGAARDARAWGGGAGVVPEPRAAVPRRQRGGRGAGRAGAAAAAPRRDVRRRVPGPRDPPAAVAGLRVGRRRPRLLRRVRARGHAQLPPQPPLLPRPRRRRRALRQGQGLPLRRARRHAVRGGRVLGPPGLAQGRRHRRGLRALRRTANHR

SEQ ID NO: 161538 - protein, 190 aa, Zea Mays
MIYNSKRRVAPKGSGGIDSFGWSSFVKRSVLESLYVTNDGWFVVVGAVKVVQEEDPLDLPPSNIGSHLGLLLDSTAGSDVTFVVDGERFAAHRAMLAARSPVFKAQLLGSMADATMSSIPLHGISAATFRAMLRFMYTDACPEEADDSDSDSSPAEKEVPWFLRRGEGLQDKGCVNGWFCSAGNGIPMDS

SEQ ID NO: 161539 - protein, 109 aa, Zea Mays
MPLSYSLSLLISRRPSWLLLAPSVDRPCSSPSMAVLGLHLKPCPRIVFQHPLHTLASSSPAPSVRPAMATSPRPQPRRHPPLSKSCLAYRLFDEMPKPVDCRHHICSLS

SEQ ID NO: 161540 - protein, 241 aa, Zea Mays
MSIPRLLLLAVLAAAAACAPAHAAGAGACAAEKFSGNRAFAACADLARLGASLHWSYDAAAASLSVAFLAAPPSAGGWVAWGLNPRAQSMDGTQALVAVPSSGGGGAYEVQTYSISGTSLGAPGPLSAYRTSGLAAEVGGDGRVRVFATLVLPNGTGAEVNHVWQVGPYSGGIQIHDTKGDNMNAKGTLNLLTGATAAASGGGSIIRKKNGSSSIQPRQSAGIFYSTRYKPSRSNSSVPAM

SEQ ID NO: 161541 - protein, 105 aa, Zea Mays
MGDEPDGEAEEYLFKVVILGDIRQVPVEEGKALAEAEGLFFMETSALDATNVRTAFEIVIREIYSNVSRKVLNSDSYKAELSLNRVSIDGDSKDEQKQGSRFGCC

SEQ ID NO: 161542 - protein, 574 aa, Zea Mays
MQENVTSGTIVPSQVDILDSSPSATAHEVNIVGSINDDDEKSQDGKSSADLASYEVKEMVVKDNFEEKQQTKEVIVDPTPHEANNFPSTDNHEENEQNKEIVADTTSHKISAVQSMGSTEEKEHIEDFIAKLASEEIIFTSNRDIVEQQDETDMKTNYEIDRARNLEATEEIAAGGESNTGTITDVVEDKFPNEEITLGTISLNMADSSVKEEKMHDEEVNEDLDSRDDIMVHGPDNVKEKMCEETMSGPTLDKFSLPTSTDSPEEGNKDESTRADPMSHETNVAQTSDGADEEKKIRELAVDPTSSIGTMGNIGNAEDKKPSEETTTDPRPVENTTTQGTEDATDPKPVENTTPQGTEDADSSKQNENTASVGGVEGKKQGEETTADPRSVENTTVEGKKQGEETTADPRSVENTTAQGTEDAESSKQNENTNVMEEERVTVEDTTSREISAIESTDDLKGKATNENEEIADKEMVTDSDKNHVSLKVLLADKNVEAKEKEKKATSAKDRVLSFRRRVSKDNVSPPVKPGSPTKDKDGSGQQDWNSPARLPVEKKPKGRKQQWVPFICCSSVQ

SEQ ID NO: 161543 - protein, 974 aa, Zea Mays
MESAHKSGGGSAPGAGAGGEGVLCHACGYQYPNGHPSAKQRRAHRKHCGKPASAAAAAEGSGEHEASELLLDPSGNGAGHRVVGDTSAEDCLISGSSVLSEITSESSRTDDGTLTTVATQYSEKGSSTEDGDPSDPAVGSEQIQDVPTSVVPAEPEDRAKFSSEISESEIQNPSIVRPESDAAGGGTSELTDDVARQQDEVAVTGEDAVFDAIDGSKSSERNSVQGDELNLSCQDILQTETGGGHSSTVVEEDSGSKDPTASDGQEILIEETEPNQQSKHALTGSFEKVPDIESVGSSAEKSVGTGDDLLQSGKGACHSEIPVDIIAQLQLDPTSGTADHPAISKGADNFEGQHYHTTDESIGAIPSTFEPAVGAKVVSVDVTADLTEDVCSSDITIDDGMQENVTSGTIVPSQVDILDSSPSATAHEVNIVGSINDDDEKSQDGKSSADLASYEVKEMVVKDNFEEKQQTKEVIVDPTPHEANNFPSTDNHEENEQNKEIVADTTSHKISAVQSMGSTEEKEHIEDFIAKLASEEIIFTSNRDIVEQQDETDMKTNYEIDRARNLEATEEIAAGGESNTGTITDVVEDKFPNEEITLGTISLNMADSSVKEEKMHDEEVNEDLDSRDDIMVHGPDNVKEKMCEETMSGPTLDKFSLPTSTDSPEEGNKDESTRADPMSHETNVAQTSDGADEEKKIRELAVDPTSSIGTMGNIGNAEDKKPSEETTTDPRPVENTTTQGTEDATDPKPVENTTPQGTEDADSSKQNENTASVGGVEGKKQGEETTADPRSVENTTVEGKKQGEETTADPRSVENTTAQGTEDAESSKQNENTNVMEEERVTVEDTTSREISAIESTDDLKGKATNENEEIADKEMVTDSDKNHVSLKVLLADKNVEAKEKEKKATSAKDRVLSFRRRVSKDNVSPPVKPGSPTKDKDGSGQQDWNSPARLPVEKKPKGRKQQWVPFICCSSVQ

SEQ ID NO: 161544 - protein, 110 aa, Zea Mays
MSGVHRTSKRAQKTEPQRSIQRLVGDVAVAPDMSGVHRTVRCTIRQTAPPTVMFGGWGYKYPNHSTIHGIQVFQLPTTIQELAFIAKHTKKRSNPLPTPHKALVTSESDL

SEQ ID NO: 161545 - protein, 218 aa, Zea Mays
MELGSSPLRPTFFHRKQQELHLPWRPFFSAVQLPTPCRCPFSSPARSPSRNSSRVFFLPCCPRRAANRELSSISPHGRTQQQLAPPLLADAALSHGALQQMPWSIPSMHCDSVSFLRVCCCACAIDACWVLDKMCSSPDGSARCRLAVLLRSEQHAVMPVGGLLFLRSPAAVVVRPGEEPRVWRGEEGKPLVDVCSDAQIGITVILANVDWVCLWTER

SEQ ID NO: 161546 - protein, 83 aa, Zea Mays
MGAFMLPSFDYLYTLFTPETFWVVLAIALCGLGMEIHYSGLFCYYLVIITVHVKIIKLMGTWSDHPGKQCYHKGLMGRPWLIN

SEQ ID NO: 161547 - protein, 1099 aa, Zea Mays
MRKTPPMGEEAEGSPRKKAPRLDDAARTTAPVASAPSPTRKTPPEGEETEGNPRNKSPRPDDAARTTVPVASAPSPTRKTPPNGEEAEGSPRKKSPRLDDAARTTVPVASAPSPTRKTPPNGEETGGSPRKKSPRPAEALPVAMVPVEAAVGASDEKLCKCNHAITDSDIWELVHSLTTKDAWICCACRRKDEKRDLLICVGCYSHLCCGVGSIAYPFGHSRSHALKKKHWFAVLYSDPERGYCFKCNAEVPMLRKCGEDGNEGGLELIRDIVSQLPDQPSVDFPSPGNTPPKGKETERLDDAARTTVPVASAPRPTVQTPPKGEEAGFRNKAPRLDDAALITVPVASAPTLTGKTPPKGEEAQGSPRNKASRLDDAALATPRPTGTAPPKGEEAEGSPRNKSPLLQDKRPSEALPVAKVESTDEKRCKCNHVIDVLDIHGLVGSLTTKDAWICCDCRSEDEKLIFKARPEKSDLLICVRCYRHLCCGVGSIAYPFGHSRAHALKKEHWFAVLYSDPERRYCFKCNAEVPMPVKSGEDGNEVDIEVIRDIVRQLPSHPSSVVISPVISQTEPEVINPGEEEVAESAPSGFVVAVDPADRWPCYESKSSDAQGYAIKGIPNLGNTCYLSAVLQCLFVLGKLRERMLTLDGPKSLITEVLEELFLEASAAGGVLNPIKLLNCLNLRDPSGFQIGTMEDSHDLLTALRAIWNESDKNNNKQSDAPTMMDSIFRFEMARTLSCKKCGHSSAAVRYPFEDLLLGFPSKGHPTKSAALPQTSESPGWAGSRKRVIARQLFPEDVQGSVDSEVFDVETLEVDFTEVQRISQSKDAVQSPLQIQDGKPVDSETADSIFIEDLILQFCDDHQMQWRCPNCAKDHEEPSASESKNGEQMVGSGKEDTTVVGDQIEQSDRKARHSKESECHGGNLSAAKQTELLGTNQTADDSKQLMMHPENVKESEQKDDGGDNIMIHRFATLPPVLTLQLKRTSHHIVGSKISDHVRFMEYLDVERFMDPSCADKGSTLFRLAAVVVHIGMGSLKSGHYIAYVRARKLGCQQEEASWFCADDSQIRRVTIEQVLNSQAYILFYERMEDQDVSGMTRQN

SEQ ID NO: 161548 - protein, 1060 aa, Zea Mays
MRKTPPMGEEAEGSPRKKAPRLDDAARTTAPVASAPSPTRKTPPEGEETEGNPRNKSPRPDDAARTTVPVASAPSPTRKTPPNGEEAEGSPRKKSPRLDDAARTTVPVASAPSPTRKTPPNGEETGGSPRKKSPRPAEALPVAMVPVEAAVGASDEKLCKCNHAITDSDIWELVHSLTTKDAWICCACRRKDEKRDLLICVGCYSHLCCGVGSIAYPFGHSRSHALKKKHWFAVLYSDPERGYCFKCNAEVPMLRKCGEDGNEGGLELIRDIVSQLPDQPSVDFPSPGNTPPKGKETERLDDAARTTVPVASAPRPTVQTPPKGEEAGFRNKAPRLDDAALITVPVASAPTLTGKTPPKGEEAQGSPRNKASRLDDAALATPRPTGTAPPKGEEAEGSPRNKSPLLQDKRPSEALPVAKVESTDEKRCKCNHVIDVLDIHGLVGSLTTKDAWICCDCRSEDEKLIFKARPEKSDLLICVRCYRHLCCGVGSIAYPFGHSRAHALKKEHWFAVLYSDPERRYCFKCNAEVPMPVKSGEDGNEVDIEVIRDIVRQLPSHPSSVVISPVISQTEPEVINPGEEEVAESAPSGFVVAVDPADRWPCYESKSSDAQGYAIKGIPNLGNTCYLSAVLQCLFVLGKLRERMLTLDGPKSLITEVLEELFLEASAAGGVLNPIKLLNCLNLRDPSGFQIGTMEDSHDLLTALRAIWNESDKNNNKQSDAPTMMDSIFRFEMARTLSCKKCGHSSAAVRYPFEDLLLGFPSKGHPTKSAALPQTNFTEVQRISQSKDAVQSPLQIQDGKPVDSETADSIFIEDLILQFCDDHQMQWRCPNCAKDHEEPSASESKNGEQMVGSGKEDTTVVGDQIEQSDRKARHSKESECHGGNLSAAKQTELLGTNQTADDSKQLMMHPENVKESEQKDDGGDNIMIHRFATLPPVLTLQLKRTSHHIVGSKISDHVRFMEYLDVERFMDPSCADKGSTLFRLAAVVVHIGMGSLKSGHYIAYVRARKLGCQQEEASWFCADDSQIRRVTIEQVLNSQAYILFYERMEDQDVSGMTRQN

SEQ ID NO: 161549 - protein, 637 aa, Zea Mays
MRKTPPMGEEAEGSPRKKAPRLDDAARTTAPVASAPSPTRKTPPEGEETEGNPRNKSPRPDDAARTTVPVASAPSPTRKTPPNGEEAEGSPRKKSPRLDDAARTTVPVASAPSPTRKTPPNGEETGGSPRKKSPRPAEALPVAMVPVEAAVGASDEKLCKCNHAITDSDIWELVHSLTTKDAWICCACRRKDEKRDLLICVGCYSHLCCGVGSIAYPFGHSRSHALKKKHWFAVLYSDPERGYCFKCNAEVPMLRKCGEDGNEGGLELIRDIVSQLPDQPSVDFPSPGNTPPKGKETERLDDAARTTVPVASAPRPTVQTPPKGEEAGFRNKAPRLDDAALITVPVASAPTLTGKTPPKGEEAQGSPRNKASRLDDAALATPRPTGTAPPKGEEAEGSPRNKSPLLQDKRPSEALPVAKVESTDEKRCKCNHVIDVLDIHGLVGSLTTKDAWICCDCRSEDEKLIFKARPEKSDLLICVRCYRHLCCGVGSIAYPFGHSRAHALKKEHWFAVLYSDPERRYCFKCNAEVPMPVKSGEDGNEVDIEVIRDIVRQLPSHPSSVGKLSPDIALCGPMALLLESPVSFLTSQQGFMFSDVFHQSSHKSSHKSNRAGGHQSRRGGSSRKRPIWVCCGCGSCR

SEQ ID NO: 161550 - protein, 478 aa, Zea Mays
MRKTPPMGEEAEGSPRKKAPRLDDAARTTAPVASAPSPTRKTPPEGEETEGNPRNKSPRPDDAARTTVPVASAPSPTRKTPPNGEEAEGSPRKKSPRLDDAARTTVPVASAPSPTRKTPPNGEETGGSPRKKSPRPAEALPVAMVPVEAAVGASDEKLCKCNHAITDSDIWELVHSLTTKDAWICCACRRKDEKRDLLICVGCYSHLCCGVGSIAYPFGHSRSHALKKKHWFAVLYSDPERGYCFKCNAEVPMLRKCGEDGNEGGLELIRDIVSQLPDQPSVDFPSPGNTPPKGKETERLDDAARTTVPVASAPRPTVQTPPKGEEAGFRNKAPRLDDAALITVPVASAPTLTGKTPPKGEEAQGSPRNKASRLDDAALATPRPTGTAPPKGEEAEGSPRNKSPLLQDKRPSEALPVAKVESTDEKRCKCNHVIDVLDIHGLVGSLTTKDAWICCDCRSEDEKLIFKARPEKSDLLIC

SEQ ID NO: 161551 - protein, 207 aa, Zea Mays
MERERGASAALWGHAHLPLLARAGSKESVEYILQALWRTRRTGLDAADRTVARDALQLSSDAELDPLLVCLRILIRRCVNEDFAKDDIPKLFPEEVPPELQKLLTLLLQKFQPEWQADAAKDQEAALHSSAAECQSNQNGDTSEHRDAANAENGAAPVKGSLESGQKEVKKSPLAKDSLDKMLKDLFSTRDQMATDGRNTGHELTMG

SEQ ID NO: 161552 - protein, 200 aa, Zea Mays
MDQWGSETRPDNLFRSSYGYDPPAVRCHTAAELVTTQSVELVVRLFRSWSVVLFRVLGKMDAEAARRKQVAPPQEKRKRGRLELRRIQDRTSRQVRFSKRRSGLFKKAHELSVLCDAEVAMVVFSPAGRLYHYASLGTSIEKTFCRYWDLANTDIDLNIEARDSRDNYNTQEEETMDHLFVPCVFTREFWFHLLRPFGLE

SEQ ID NO: 161553 - protein, 171 aa, Zea Mays
MDQWGSETRPDNLFRSSYGYDPPAVRCHTAAELVTTQSVELVVRLFRSWSVVLFRVLGKMDAEAARRKQVAPPQEKRKRGRLELRRIQDRTSRQVRFSKRRSGLFKKAHELSVLCDAEVAMVVFSPAGRLYHYASLGTSIEKTFCRYWDLANTDIDLNIEARDSRDNYNTQ

SEQ ID NO: 161554 - protein, 145 aa, Zea Mays
MDQWGSETRPDNLFRSSYGYDPPAVRCHTAAELVTTQSVELVVRLFRSWSVVLFRVLGKMDAEAARRKQVAPPQEKRKRGRLELRRIQDRTSRQVRFSKRRSGLFKKAHELSVLCDAEVAMVVFSPAGRLYHYASLGTRFIALTT

SEQ ID NO: 161555 - protein, 181 aa, Zea Mays
MRWTCSSSTSLATARCCPYSKQGGRRTSVDIGKSCANGCAGMMENNREHKIALVATGLATGIASACWIGPRCVLPMINQSITNSNHTNQLNIQHASGSVFKGWSEEKIYFAPTYNYSCNSDSYAGETATSKKKRRTPAWCDRILWHGDGIAQLSYFRGESQFSDHRPVCGTFTVEVKRLDG

SEQ ID NO: 161556 - protein, 211 aa, Zea Mays
MYLSTLHPSKERRRKVDGGKMGVAVFGARCTLRYEMDLQFFNIPGNSKMLSLRGRRTSVDIGKSCANGCAGMMENNREHKIALVATGLATGIASACWIGPRCVLPMINQSITNSNHTNQLNIQHASGSVFKGWSEEKIYFAPTYNYSCNSDSYAGETATSKKKRRTPAWCDRILWHGDGIAQLSYFRGESQFSDHRPVCGTFTVEVKRLDG

SEQ ID NO: 161557 - protein, 238 aa, Zea Mays
MRWTCSSSTSLATARCCPYSKQGGRRTSVDIGKSCANGCAGMMENNREHKIALVATGLATGIASACWIGPRCVLPMINQSITNSNHTNQLNIQHASGSVFKGWSEEKIYFAPTYNYSCNSDSYAGETATSKKKRRTPAWCDRILWHGDGIAQLSYFRGESQFSDHRPVCGTFTVEMDEIVDKAISIMQVTSKHLMYIRKEKLHSGKALSAIEVKELCEALEAIAEDLDQDSLLCQSLV

SEQ ID NO: 161558 - protein, 56 aa, Zea Mays
MAASHGADTLKSTSINGQPSVSSHPSNPSIRRHSPLTAAIPQPSVACGALAANLSL

SEQ ID NO: 161559 - protein, 161 aa, Zea Mays
MNLDGYCDADWASSKDDRRSTSGYCVFVGGNLVSWRSKKQAVVSRSTAEAEHRAMALAVCEMIWLKSLLKELQVLKNETMLLHCDNVAAINIANNPVQFDRMKHVEIDKFFIKEKIDSGALKLKYVKSRNQVADSLTKGLGPKDNELACNKMGMLNIFGPS

SEQ ID NO: 161560 - protein, 335 aa, Zea Mays
MEKRRRGSGGVPSLAVAVLAALLAAASMPSPPRVAAALSPDYYKDSCPGLESIVRYEVARKKNETVVTIPATLRLVFHDCMGCDAAVLIASKNNDAEKDAPDNESLAGDGFDTINRVKAAVEKRCPGVVSCADIIALAARDVVYLADGPYWRVELGRLDGLDSRASDVKGKLPDPDMHVKDLTPVFQRNGFTEVDMVALSGAHTVGFAHCSRFTDRLYSYGGARTDPSFNPAYAYQLKQACPIDVGPTIAVNMDPVSPIRFDNAYYANLQDGLGLFTSDQVLYADEATRPIVDMFAASQKDFFDAFVAAMLKLGRLGVKTGKDGEIRRVCTAFNH

SEQ ID NO: 161561 - protein, 55 aa, Zea Mays
MRTLQSLNRRFSLHSASAFYRLVSVVATSNNKVACSLYKIVEVFFSVLVVRHNCE

SEQ ID NO: 161562 - protein, 410 aa, Zea Mays
MYVPPPPTGGAGEQPRVYQVWRGSNEFFLQGRFIFGPDVRSVFLTMFLIIAPVVVFCVFVARHLINDFPDSWGISVMVVVVVFTVYDLTLLLCTSGVQTPQQFRLPRTKEVVVNGISVRVKYCDTCMLYRPPRCSHCSICNNCVERFDHHCPWVGQCIGLRNYRFFYMFVSSTTLLCLYVFAFCWVYVIKIRAAEHLSIWKALLKTPASIVLIIYCFLCVWFVGGLSVFHLYLMGTNQTTYENFRYRYDRRDNPYNRGTLNNFLEIFCTAIPPSKNNFRARVTVEQGLQQTRSQSRGFMSPSMGKPTIGELEMGRKPVVPWDEPRTAADIRDLEAGFGGMFDEKEGRVAHASPDLSRDLPAEFVEGRTGMHSRQSSWVQRGGDASEASALQMATVHTAEDSNHVPWSGTR

SEQ ID NO: 161563 - protein, 160 aa, Zea Mays
MHAAYMEKRRVTHVLVQRRGEAVLVHDPAGLQGRRRQRRRLLPAAGHERHRPLHAHQEAPSATRAGQHHRLLLPRRLPPPARGRPATSTSAAALAAARRPHREEVFLPLAPRICWRQAAQKKKNKKIGPLVLSLLVLPSIAVTDTNDRCSLEASSRGGVY

SEQ ID NO: 161564 - protein, 162 aa, Zea Mays
MVPYIYGEHREQQTEGEVMCCVDDGWTNDLREPQPRTRFSFRSRSSAHQGDLLRGSDGVRPRGRDREACRREDRQRDACAEQGQRHAAVQGEEEEPQVREAHPVRVEEAAGGHEEAGERAVRQVDRSTQRRQIQRMRQPYIYIYMHGLRADEFAARLRYYVR

SEQ ID NO: 161565 - protein, 176 aa, Zea Mays
MIKSYSDMLKDISSGTTKDLEDIYDSRYCSTAEDIMSSNICQLSSKNVSTGSNKRKVRSCAASTMDGPTTSGNHNHVPASASGPGAALTREISFGDQTVSAPAAETERPAAVRIDSETLAQNRDSAMQRYREKKKNRRYEKHIRYESRKLRADTRKRVKGRFVKSTEALNAARYNG

SEQ ID NO: 161566 - protein, 143 aa, Zea Mays
MIKSYSDMLKDISSGTTKDLEDIYDSRYCSTAEDIMSSNICQLSSKNVSTGSNKRKVRSCAASTMDGPTTSGNHNHVPASASGPGAALTREISFGDQTVSAPAAETERPAAVRIDSETLAQNRDSAMQRYREKKKNRRHGSMS

SEQ ID NO: 161567 - protein, 695 aa, Zea Mays
MTKFTIALREIGTYKEVLRSQVEHMLNDRLLNFVDIDLHDVKDAHKRFDKASLSYDQIREKYLSLKKGTRPDITTAIEDELHSARSSFEQARFNLVTSLSHVEAKKRFEFLEAVSATMDSHLRYFKQGYELLHQMEPYINQTIGRSSHKQIEAVMQSTSKGKVETIRQGYLSKRSSNLRADWKRRFFVLDSRGMLYYYRKQITRPPAGCSMQRNVNPPEHGSGLLSRLFSSHYHIHDEKSVARHTVNLLTSTIKVDAEQSDLRFCFRIISPTKIYTLQAESAVDQMDWIEKITGVIASLLSSQSPEQCFMSSPKGSGHDRSTSDGSSFTSSVEFEPSVIDDLVLEKYSGNGQHDVIRGTHHHRTSMKPEKPIDLLRKVDGNNMCADCGALEPDWASLNLGALLCIECSGVHRNLGVHISKVRSLTLDVRVWEPSVINLFQSLGNMFVNNIWEDMLPDDNSSADGSDTSQYLSVSKPKHKDVFSAKEKFIHAKYVDKEFIRKRSMDENQLAEQMWNSVAANDKKTAYSLIVRSRANVNLVYGEMPSSPFLTLGKALQQEQPVSPPDGSPKFFDCNSHDKISPREPLSPASTSSRTDDMEDGCEGLSLLHLACRVADVGMVELLLQYGASVNMNDSRGRTPLHHCILKGRHRHAKLLLSRGADSQAMDRDGRTALQYAIDGGTSDEDILALLEDHSR

SEQ ID NO: 161568 - protein, 120 aa, Zea Mays
MGAGLDPSPSFGGCSDPVLVELSMGGDYYRACCGEPDSDIPEGPKLPCVGDKTCTDLVQILVVAVCTALGGSDSAAAQLSVGYLVFKLCWSLFPLQQPSFSLAAPFYKRKLSCSANNMVL

SEQ ID NO: 161569 - protein, 962 aa, Zea Mays
MQLLKETNNILKSSMSSLGGGSPEEIERFWSACVLYCVSRLSKAGRSKEDGSVSLCQILRASKLNIVDFFKEMPQFCIKVAHILTGLYGSDWEKRLELKELQANVVHLSLLSSYYKRAYQELFLSNDGKSSDNSSESNNQEASDYYRFGWLLFLVLRIQTFSRFKDLVTSTNELVSVLAVLIIHVPVRLRNFDIKDSSYFGKKSDRGVSLIASLCEKHHTSEDELSKALEKTNTLIMDILKKKPCPATSACQQDNLSFIDPEGLTVFKDLLQGDSLKPSLIILEKEYENAINTKGELDERMFANDEDSLLGSGSLSGGAINLPGTKRKYDVMASPAKSISSPNPMSPPRFCLSPKGNGFCNSKMAPSTPVSTAMTTAKWLRNTVSPLPSRPSGELLRFFSACDKDLTDDIAHRAGIILGAIFTSSSFGERICTSMRSASRMDAIWTEQRKMEALKLYYRVLESMCRAESQILSGNNLTSLLSNERFHRCMIACSAELVLATHKTVTMMFPAVLEKTGITAFDLSKVIEGFVRHEDTLPRELKRHLNSLEERLLESMAWEKGSSMYNSLIVARPALSVEISRLGLLAEPMPSLDAIAAHHNISLGGLPPLPFQKQERLQDKDEVRSPKRACTERRNVLVDSNSLRSPVKDIIKPKLPPLQSAFASPTRPNPAAGGETCAETGIGVFFSKISKLAAIRIRSLCERLQLPQQVLERVYSLVQQILSQQTGLFFNRHIDQIILCSIYGVAKISQLELSFKEIIFGYRKQPQCKPQVFRSVYVHWPPRSRNGKTGEDHVDIITFYNEVFIPAVKSLLVEVGPGASASPKKKEEEKGPADVGPFPESPRLARFPNLPDMSPKKVSATHNVYVSPLRSSKMDTLLSPSSKSYYACVGESTYAFQSPSKDLKAINNRLNSVSGGKKVSGRLNFDVVSDLVVASSLGSDRDAKPAADPAKTTPVKCEPSDS

SEQ ID NO: 161570 - protein, 52 aa, Zea Mays
MPDVQLEIWDFISTSFAKHNSTNYCLHNQLADLESVPVEFCCLLGLGGWKPF

SEQ ID NO: 161571 - protein, 365 aa, Zea Mays
MASLVPGVLLKLLQHMNSDVKVAGEHRSSLLQVVSIVPALAGSDLFTNQGFYLKVSDSSHATYVSLPDEQHDLILSDVIQLGQFVHVDRLEAATPVPILRGVRPVPGRHACVGSPEDLVVTSSSTFLLGSGKAAQASSTNGSSKDAGALSLEKEQGRLEKINAPPKSNGTESKKPQLTKSNSNLSKQALNGLLSDKKDVVSSKAKSTSARSTPSSPTSAHSLPASFDKFSSDMKQRVRTKGAEKSPPSRLSLLEKAASVLKATTAGRKSSLGNSISNTLLSFESGPKALRRSWEGKADAKDKGNSDSKPAKAEKKSENRSSSTPRRKSLAEEKPSNKDDSKILTPPRKSSASAPADDSDKETDRC

SEQ ID NO: 161572 - protein, 689 aa, Zea Mays
MIRHREQLHEREQYILELEMKLNDKDRELNALKIDHQTVWANQDLIREQTKELATVRRERDNSEAERAQHLTQIHELQEHLREKESQFIALEEQHRAAQDNILYKDEQLREAHAWVSQVREMDALQSQSLQVELRERMEQFNQYWISSQQQYAEMQRSLLHTIQQLQQELTEAREQSGAQKDGPQVSREGSAESSLVQSMGNSVASNGSATADGNQQLLKNNGSVDVSVQANSASAVPVPSSLLGIGGPAAHIAAMHAFMIHPQGIPQPLVASPNSGVPQFGSFQSQSTIQPNSQWPNQQEVQNVSQPQDETNYQTSQSDRTVLQQGAINTDELSSKPSQDSQPDHLNAHVKQQQSPASAPTESTHELTVVEANVAEHVSCDEQQKILNEQDSLSNMNNHIGIVEHLEQNTESKVSMDERAASDKQPEPVSRQHKHLNFPPFTTQIHLKKSATENPNVVNQVDIMKSVAGGFSSQLPRAPKEPSLLDERSLLACIVRAVPAGTEGGIRISSTLPNRLGKMLAPLHWHDYKKQYGKLDDFVASHPELFVIEGDFIHLRDGAQQIISATTAAAKIAAATASSASYSSLLPSVAVTPVAQNTRQKRRPAVDSRSSNAIPSGNGFTDQFNIIQGVSDVTISGKVRNIQDNGFIDEVRTGQPSVLTAATANGARHDKCANNTRHGYGGKQQGRR

SEQ ID NO: 161573 - protein, 360 aa, Zea Mays
MIRHREQLHEREQYILELEMKLNDKDRELNALKIDHQTVWANQDLIREQTKELATVRRERDNSEAERAQHLTQIHELQEHLREKESQFIALEEQHRAAQDNILYKDEQLREAHAWVSQVREMDALQSQSLQVELRERMEQFNQYWISSQQQYAEMQRSLLHTIQQLQQELTEAREQSGAQKDGPQVSREGSAESSLVQSMGNSVASNGSATADGNQQLLKNNGSVDVSVQANSASAVPVPSSLLGIGGPAAHIAAMHAFMIHPQGIPQPLVASPNSGVPQFGSFQSQSTIQPNSQWPNQQEVQNVSQPQDETNYQTSQSDRTVLQQGAINTDELSSKPSQDSQPDHLNAHVKQQQSPASC

SEQ ID NO: 161574 - protein, 471 aa, Zea Mays
MEAWMSLFSASAVPVPSSLLGIGGPAAHIAAMHAFMIHPQGIPQPLVASPNSGVPQFGSFQSQSTIQPNSQWPNQQEVQNVSQPQDETNYQTSQSDRTVLQQGAINTDELSSKPSQDSQPDHLNAHVKQQQSPASAPTESTHELTVVEANVAEHVSCDEQQKILNEQDSLSNMNNHIGIVEHLEQNTESKDERAASDKQPEPVSRQHKHLNFPPFTTQIHLKKSATENPNVVNQVDIMKSVAGGFSSQLPRAPKEPSLLDERSLLACIVRAVPAGTEGGIRISSTLPNRLGKMLAPLHWHDYKKQYGKLDDFVASHPELFVIEGDFIHLRDGAQQIISATTAAAKIAAATASSASYSSLLPSVAVTPVAQNTRQKRRPAVDSRSSNAIPSGNGFTDQFNIIQGVSDVTISGKVRNIQDNGFIDEVRTGQPSVLTAATANGARHDKCANNTRHGYGGKQQGRTTGTTYLSRR

SEQ ID NO: 161575 - protein, 799 aa, Zea Mays
MEPAGARKEWRAVPGSSLRSNGAEDAAEHGKLGQSEDRAIYEEGAGGLEDFCAITIDGSGGLSEDILQQRLQSVVRQREQLQQVEMELRAQAIAHPQIIQAQQSFQATSKEHAAAVAKIKEQLHEREQYILELEMKLNDKDRELNALKIDHQTVWANQDLIREQTKELATVRRERDNSEAERAQHLTQIHELQEHLREKESQFIALEEQHRAAQDNILYKDEQLREAHAWVSQVREMDALQSQSLQVELRERMEQFNQYWISSQQQYAEMQRSLLHTIQQLQQELTEAREQSGAQKDGPQVSREGSAESSLVQSMGNSVASNGSATADGNQQLLKNNGSVDVSVQANSASAVPVPSSLLGIGGPAAHIAAMHAFMIHPQGIPQPLVASPNSGVPQFGSFQSQSTIQPNSQWPNQQEVQNVSQPQDETNYQTSQSDRTVLQQGAINTDELSSKPSQDSQPDHLNAHVKQQQSPASAPTESTHELTVVEANVAEHVSCDEQQKILNEQDSLSNMNNHIGIDERAASDKQPEPVSRQHKHLNFPPFTTQIHLKKSATENPNVVNQVDIMKSVAGGFSSQLPRAPKEPSLLDERSLLACIVRAVPAGTEGGIRISSTLPNRLGKMLAPLHWHDYKKQYGKLDDFVASHPELFVIEGDFIHLRDGAQQIISATTAAAKIAAATASSASYSSLLPSVAVTPVAQNTRQKRRPAVDSRSSNAIPSGNGFTDQFNIIQGVSDVTISGKVRNIQDNGFIDEVRTGQPSVLTAATANGARHDKCANNTRHGYGGKQQGRTTGTTYLSRR

SEQ ID NO: 161576 - protein, 798 aa, Zea Mays
MEPAGARKEWRAVPGSSLRSNGAEDAAEHGKLGQSEDRAIYEEGAGGLEDFCAITIDGSGGLSEDILQQRLQSVVRQREQLQQVEMELRAQAIAHPQIIQAQQSFQATSKEHAAAVAKIKEQLHEREQYILELEMKLNDKDRELNALKIDHQTVWANQDLIREQTKELATVRRERDNSEAERAQHLTQIHELQEHLREKESQFIALEEQHRAAQDNILYKDEQLREAHAWVSQVREMDALQSQSLQVELRERMEQFNQYWISSQQQYAEMQRSLLHTIQQLQQELTEAREQSGAQKDGPQVSREGSAESSLVQSMGNSVASNGSATADGNQQLLKNNGSVDVSVQANSASAVPVPSSLLGIGGPAAHIAAMHAFMIHPQGIPQPLVASPNSGVPQFGSFQSQSTIQPNSQWPNQQEVQNVSQPQDETNYQTSQSDRTVLQQGAINTDELSSKPSQDSQPDHLNAHVKQQQSPVVEANVAEHVSCDEQQKILNEQDSLSNMNNHIGIVEHLEQNTESKDERAASDKQPEPVSRQHKHLNFPPFTTQIHLKKSATENPNVVNQVDIMKSVAGGFSSQLPRAPKEPSLLDERSLLACIVRAVPAGTEGGIRISSTLPNRLGKMLAPLHWHDYKKQYGKLDDFVASHPELFVIEGDFIHLRDGAQQIISATTAAAKIAAATASSASYSSLLPSVAVTPVAQNTRQKRRPAVDSRSSNAIPSGNGFTDQFNIIQGVSDVTISGKVRNIQDNGFIDEVRTGQPSVLTAATANGARHDKCANNTRHGYGGKQQGRTTGTTYLSRR

SEQ ID NO: 161577 - protein, 188 aa, Zea Mays
MAWMTAVCASVVLKSSQSLKEFKTQATTLASLQHPNLCKLIGYYAKEDSNERMLVYERLYHGSLDKLLFGRSDGRFMDWSKRLKVALGAARGHVQRVLNLNIQIDKGFTAKLSGYGCVGFNTEEISNAPVSAANLSVETLEKGLLTQFVYCCNKSGLDRSKVNVNGGAIALGHPLGATGARLHGYSSE

SEQ ID NO: 161578 - protein, 72 aa, Zea Mays
MASFICVKDFPQDLCMHAWHKFLCSPKWDLRSCEAKLFIKMALVVIYGSIYPILPWTPATTTDAKYCCIYAA

SEQ ID NO: 161579 - protein, 279 aa, Zea Mays
MMRANREQRVAFSSTKEAAAVPKEEVWEVRPGGMLVQKRSPDADPPPGGAPVPTIRVKVKFNGVYHEIYINSQASFGELKKLLSEKTGLHPDDQKVVYKDKERDSKAIARAALDVDKLATKVSALETIVSKGGKVVDADVVTLTEALMNELVKLDSVAAEGEVKAARRAQEKRVQKYVETLDAIRAKNKAAAAAAPAKARSGSNKARPPRPPPASAHAHQSQQQRRQFQPPAPVSQTQTASWETFDLLSSVPSTSAAPVTTMAPATSTTPSPRFDWELF

SEQ ID NO: 161580 - protein, 233 aa, Zea Mays
MALPVDSPVYSGEEQVLSSSSSPEPPSLLQQQPTPSASGSGDMGEENERLRRENAWLARELGQMKKLCNNILLLMSKYAATKQPDAAKAAAAGNCSGGESSGAAAAPPLPSILELLPSCRRDPASAAVDAAAAAAGTEHEVDEKAGARLFGVSIGRKRMRDESSGHGGGGEDPVGRSAEVKAEPVDARLDHQHSATEPQSWPIYRPRPVYHPLRACSGLVSAGSDHDWSNNSR

SEQ ID NO: 161581 - protein, 396 aa, Zea Mays
MCAHQKSDANLPFPLQRKQALLGLGRLLLLVVERRCLLLLLGTAAAAAEVRREVLRLHLHHVLAHPDVGDVPAGAVHAGGDGGHAERAGGGQEVERGGEERGQRHADGGRGLPAPPDPGCGGGQQRRPAVEREVLAVVPEHVVVAEAAVPEEVHGAAHGGGARVGARRGARAPAQPGQERRRGRAVLEAVRRAAAQEAVQAGQHHAAVGELEAAVREGGGTRGAVGPLLREEEAAGRGDHGRVQARVARLLLTREVHHLAAADVDPCMICCRMRTLFRIHMHAILFSPTHASDEGSPRLGRTSIMCGSGTTKCRSPTAAAQSDRNRTGCGSFTLRLLASGCRSSMAGEVRRCKGKEPCMRGNSLSLSWTNAWERKDTKSKSMCLCWSPDLTTTTTA

SEQ ID NO: 161582 - protein, 97 aa, Zea Mays
MGLKDEFQKARDWVAESLDFDKDYDASVFETTIRVVGGLLSSYDLSGDKVFLDKAKDIIDRLLPAWDTTSGIPYNRINLAHGRALNPGWTNAIAEIN

SEQ ID NO: 161583 - protein, 535 aa, Zea Mays
MVVSVAATGPGTDAEPVSSTFFASRYVRDPLPRYRMPERSIPREAAQQIISDELMLDGNPRLNLASFVTTWMEPECDKLIMDSINKNYVDMDEYPVTTELQNRCVNMIAHLFNAPIKEDETAIGVGTVGSSEAIMLAGLAFKRKWQNKRKEQGKPCDRPNIVTGANVQVCWEKFARYFEVELKEVKLSEGYYVMDPVKAVEMVDENTICVAAILGSTLTGEFEDVKQLNDLLTEKNKETGWDVPIHVDAASGGFIAPFLYPELEWDFRLPLVKSINVSGHKYGLVYPGVGWVIWRSKDDLPEELIFHINYLGTDQPTFTLNFSKGSCQIIAQYYQLIRLGFEKHHGELPGERGDTAGGHRGDGPVRRPVQGRRGAAGGLLAQGQQPVQRVRRLREPAAVRLDRAGVHDAGRRGARGGAPSRRQGGLQPQPRRTAGLGRPQDPARAGRARDPRREGRHRHRRAVGRRRRGQEKRAGDRAGGRRALDERREQEEDGGLLMRRGSETGRFRHGSFVYMSRACLCLCRALGCVGPVPRM

SEQ ID NO: 161584 - protein, 307 aa, Zea Mays
METAGQTTLQESAVHARRQAACWWPLDTTACSSLDLDDASTFSSSSLLLGWEWDPQLCCFGSPHARDSELFGPTSSMADCARVIGMESPVSEASAAAATGELDDELLLMSLWGECHLFSSCSALKEKTATSSQRTPKSLQSDDDHHSDLPTSPAKTTPATAQAAEPSHCDVDLRASYTGGAQQQQQQQHRTTRAANSSSKRSATEPEEKGAEGGKRSRKAPGSTAVAAYPFAVVKPGGADGGVTLADINRWILTPPARPVRHPVGEFACAPRVSAANRPGPSGRTVAGFTRLRTAGRGTITIVRTRG

SEQ ID NO: 161585 - protein, 106 aa, Zea Mays
MAFLHIQCLGFPPCSLCPPHRVSAVFSCCVDFAQAAEEERMRKEFEVEGRTLAQKEKSEAIDSNVITPETQTRSSCLYYIRNFSTTYSSDLNTRLDGSLSRCLLDL

SEQ ID NO: 161586 - protein, 100 aa, Zea Mays
MVGDFGILVRSGFTVSKALFFNFLSALVALAGTALALSLGKDPGHSSLIEGFTAGGFIYIAVAGVLPQMNDQKTTIKSSVAQLISLAMGMLVALGISLVE

SEQ ID NO: 161587 - protein, 316 aa, Zea Mays
MLGDSFLHQLPHAFGGGHSHSHDHEGHDHAHAHEHAHAHSLQDLSVGLSVLFGIVLFFIVEKIVRYVEDNSQNGAHSMGHGHHHHNHKRHDSSDKAKLNYQKSDTDGKDIDHAEEEPSVNDTTGKISDGHESEATIRKRSSSKATDGEATNSGRDPAPEKAPSISNSNLVFGYLNLFSDGVHNFTDGMALGSAFLLHGSVGGWSRTLFLLAHELPQEVGDFGILVRSGFTVSKALFFNFLSALVALAGTALALSLGKDPGHSSLIEGFTAGGFIYIAVAGVLPQMNDQKTTIKSSVAQLISLAMGMLVALGISLVE

SEQ ID NO: 161588 - protein, 446 aa, Zea Mays
MRRQSLATVLLLLVAAAALAAPAAGHFESSCPFYDHGGHGEPHERHDHGHSCGGGADHEHHHHHHHGHGHGEIQRLLPEEMAEEADLELESFGYEDHDHGHHHHHHHHHSHGDMETSPMGVWLSAMGCSLLVSMASLVCLVLLPVIFFKGKPSKAIVDSLAVFGAGAMLGDSFLHQLPHAFVGIVLFFIVEKIVRYVEDNSQNGAHSMGHGHHHHNHKRHDSSDKAKLNYQKSDTDGKDIDHAEEEPSVNDTTGKISDGHESEATIRKRSSSKATDGEATNSGRDPAPEKAPSISNSNLVFGYLNLFSDGVHNFTDGMALGSAFLLHGSVGGWSRTLFLLAHELPQEVGDFGILVRSGFTVSKALFFNFLSALVALAGTALALSLGKDPGHSSLIEGFTAGGFIYIAVAGVLPQMNDQKTTIKSSVAQLISLAMGMLVALGISLVE

SEQ ID NO: 161589 - protein, 385 aa, Zea Mays
MSSCVAPRVLIVSRRTVRKNKFVDFVGEYHLDLIVGYGAVPVIVPRVAGVDALLDSFEPIHGVLLCEGEDVDPSLYESADDADGSLSPEQLEAMRRLHPSDVAIDREKDSIELRLARRCLERNIPYLGICRGSQVLNVACGGSLYQDLEHELVRPAAQVQHINYGDYDGHRHPLPPPGRAAAGAAVRAHGDRTGRARRGVLRPGHVQPRRGQVHRGPPVPPGAHAQARLRRVRLPRLRQGVPGVRPRRGRVPGEDGGSAAPAPQRTPPRVTEAEQGDDEAAQGHPPELLARHGHVPIRQPHQAGGEARPRSRRRVPRVEHGVGERVAGEAAEADGRHGAERVGVPQRRQGERRTRGGGAGTHGGDEREPAIRPRHLLPDHGQDLL

SEQ ID NO: 161590 - protein, 529 aa, Zea Mays
MLDSLDLNLCTEDDRDEDNNALLCDITDKDDSSDSRLFMHQTKPEPQVHRESRTSSWEHRTTTMLSKISDIRLARLRPPSVADIVTHYQVTFTARTFCYIDPEYQWQIQETNLARLANHKKDRALREAPAMSSCVAPRVLIVSRRTVRKNKFVDFVGEYHLDLIVGYGAVPVIVPRVAGVDALLDSFEPIHGVLLCEGEDVDPSLYESADDADGSLSPEQLEAMRRLHPSDVAIDREKDSIELRLARRCLERNIPYLGICRGSQVLNVACGGSLYQDLEHELVRPAAQVQHINYGDYDGHRHPLMVNSYHHQGVRRLAQRFVPMAIAPDGLVEGFYDPDTYNPGEGRFIVGLQFHPERMRKPGSDEFDYPGCARAYQEFVRAVVAYQEKTAAPPHLPLSAPLPASPKLSKEMMRRRKVIPRSFSLAMDMYLSGSHTKPAEKRDHEAGAEFLESNTASVSAWQEKRLKQMGATARNASGYLNSVKVNGVREAAARALMAEMSVNQLSDLATFYQTMGKICSEVLDTKLQG

SEQ ID NO: 161591 - protein, 131 aa, Zea Mays
MGKSWSLISHLHTVAGPSITLLYPLYASVCAMESPSKADDEQWLSYWIIHSFVTLLEMLAEPLLHWVPVWYPAKVLFAAWLALPQFKGASFVYEKLVREQLRNYRARYPRKGAAAAAVGGDDDDHKVHIAK

SEQ ID NO: 161592 - protein, 99 aa, Zea Mays
MALLEHRMDPIARHRAEPHHHRLWLGVGRWYGGRGQRRRRGGLGERRTEARAVKDWLQPTRCGRGERLGELRAVSGWGRRLRAAHDDFSATGGVTVSGR

SEQ ID NO: 161593 - protein, 69 aa, Zea Mays
MYGHKQGQILGLGHLGRGPGRSPKTFLYMYRFLVKKTLNGPQRPATRSLQSQFPGPLSFCCLGSGHARR

SEQ ID NO: 161594 - protein, 161 aa, Zea Mays
MARRRDGLGPWLRPGEVASARAWPAPRCARGQPPGARDSASASLVGPRRTAAPSARKRSDAAPYVRSARTTSPATVSNHNAQRSSRTARAPPRAGLLCATDGACLWVQPRGLRDGASSSRAWPNKCSCRRGAESAPQLSDWKAPRGWLARRDARESDSLQG

SEQ ID NO: 161595 - protein, 291 aa, Zea Mays
MASAVCGVTARAHLPSAVPAAARKLFFRCRAASTMNEASASSPDAEEKKTTTVFVAGSTGRTGKLVVEKLLAKGFGVVAGTTDVSRARGSLPQDPNLQLVRADVTEGVDKLVEAVRGVDAVVCATGFRRSFDPFAPWKVDNFGTVNLVEACRKAGVARFVLVSSILVNGAAMGQLLNPAYIVLNLLGLTLVAKLQAENHIRKSGIDYTIVRPGGLTDQPPTGNIVMEPEDTLYSGSISRSQVAEVAVEALVCPESSYKVVEIIARTDAPNRSLKDIINRLFYDYGGKKSKI

SEQ ID NO: 161596 - protein, 270 aa, Zea Mays
MASAVCGVTARAHLPSAVPAAARKLFFRCRAASTMNEASASSPDAEEKKTTTVFVAGSTGRTGKLVVEKLLAKGFGVVAGTTDVSRARGSLPQDPNLQLVRADVTEGVDKLVEAVRGVDAVVCATGFRRSFDPFAPWKVDNFGTVNLVEACRKAGVARFVLVSSILVNGAAMGQLLNPAYIVLNLLGLTLVAKLQAENHIRKSGIDYTIVRPGGLTDQPPTGNIVMEPEDTLYSGSISRSQVAEVAVEALYIFDSRKSPEAFSLGRLVHL

SEQ ID NO: 161597 - protein, 239 aa, Zea Mays
MPYTGYPLAPSHNRASAVLPPTSAPPTSAPASLAALPSPPSAITAAASFCTGSVAATTPQIRWVDVHGAAPGMSSSASSVEGDAAGEFTEVVIVRHGETSWNASRIIQGHLDAELNDIGRQQAVAVAHRLSKEVKPVAIYSSDLKRAAETAQTIARICNVPNVVFDPALRERHIGDLQGMTLQDAATERPEAYKAFMSHKRNQQVPGGGESLDQLSERCVSFLYDIVGKHKDTAAWVVL

SEQ ID NO: 161598 - protein, 269 aa, Zea Mays
MAPVYAAADHGTNGGSGLTLNPVARRALSLVGAPTTPSSSTPPAYGSIVTVLSIDGGGVRGIIPGTILAFLEEKLQEYDERPDARLADYFDVIAGTSTGGLVTAMLTAPNKDGRPLFAAKDINGFYLDHCPRIFPPGGGAGGPLGLLKKLSGPKYDGKYLHALVRDLLGETRVSQALQNIVIPTFDIKLLQPTVFSKYDAITDVSKDALLSDVCISTSAAPTYLPGHQFQTTDKDGKARAFNLIDGGVAANNPVSQHACIRTNMHNIRD

SEQ ID NO: 161599 - protein, 251 aa, Zea Mays
MHNKGARHIAAESRLREKELSKKHEISKRLALSSDVSHSNSGNPRTSVWPTNIKEKPLIEETRRAILEAQSSRFNDFQGKKVSCDSEWMTITSSFDSNVASSDVPKELSTGNTGSREWSCKGQSFAGNQTQDKLFSDRQTEVRKRQEQELWFTASGWKRDGHGRWYRDENAIGIELSYGPSGSIEFITMQYQVQSLPTKNGPIRFCQTVSFSDQWKCQIMFLLNLNVCFIVSQTCIMIVEKYSVYLFCENI

SEQ ID NO: 161600 - protein, 291 aa, Zea Mays
MSVFGGDSWARDAQQRKRRLDELLLPITAPSSPSTPDSFKKLHNGKLACLICPHRPVLDTPLMLSMHNKGARHIAAESRLREKELSKKHEISKRLALSSDVSHSNSGNPRTSVWPTNIKEKPLIEETRRAILEAQSSRFNDFQGKKELSTGNTGSREWSCKGQSFAGNQTQDKLFSDRQTEVRKRQEQELWFTASGWKRDGHGRWYRDENAIGIELSYGPSGSIEFITMQYQVQSLPTKNGPIRFCQTVSFSDQWKCQIMFLLNLNVCFIVSQTCIMIVEKYSVYLFCENI

SEQ ID NO: 161601 - protein, 236 aa, Zea Mays
MSVFGGDSWARDAQQRKRRLDELLLPITAPSSPSTPDSFKKLHNGKLACLICPHRPVLDTPLMLSMHNKGARHIAAESRLREKELSKKHEISKRLALSSDVSHSNSGNPRTSVWPTNIKEKPLIEETRRAILEAQSSRFNDFQGKKVSCDSEWMTITSSFDSNVASSDVPKELSTGNTGSREWSCKGQSFAGNQTQDKLFSDRQTEVRKRQEQELWFTASGWKRDGHGRWYRDENG

SEQ ID NO: 161602 - protein, 418 aa, Zea Mays
MGTIPSQLGRPLSSPLQHRQQGLLGERSKISMSTLNKNIVSSQPPLVSSSADLTIPKVTATPSLLASPHQSTSVSTSLHTGFLRSRSTSGLPRQPSYTTGFGTALNIETLVAVAEQRDTPIETPPPEVQDKILFMINNISISNMEAKAKEFNEVIQEQYYPWFAQYMVMKRASIESNFHDLYLKFFDKVNSKSLNKEILKATYENCKVLLRSDLIKSSPEERSLLKNLGSWLGKFTIGRNQALRAIRRLIQNLLSWRVNVTKFFQMPKNLLPAHVCHWCGTWKGDKICSSCKKARYCSEKHQALHWGTGHKNDCLQIISSSAASNSVLPTVGKVPANTSWPEFEIKIDYEGIFDSDSGDENNSKLLVMQRHGKPDAMMQSWMDQFEVLGPFSFRITSVGLLLMHQSLYLFNAVWVGRF

SEQ ID NO: 161603 - protein, 268 aa, Zea Mays
MGTIPSQLGRPLSSPLQHRQQGLLGERSKISMSTLNKNIVSSQPPLVSSSADLTIPKVTATPSLLASPHQSTSVSTSLHTGFLRSRSTSGLPRQPSYTTGFGTALNIETLVAVAEQRDTPIETPPPEVQDKILFMINNISISNMEAKAKEFNEVIQEQYYPWFAQYMVMKRASIESNFHDLYLKFFDKVNSKSLNKEILKATYENCKVLLRSDLIKSSPEERSLLKNLGSWLGKFTIGRNQALRAIRRLIQNLLSWSPCMPLVWYLER

SEQ ID NO: 161604 - protein, 143 aa, Zea Mays
MINNISISNMEAKAKEFNEVIQEQYYPWFAQYMVMKRASIESNFHDLYLKFFDKVNSKSLNKEILKATYENCKVLLRSDLIKSSPEERSLLKNLGSWLGKFTIGRNQALRAIRRLIQNLLSWRYCFSALNSLVVGDLEFQKLP

SEQ ID NO: 161605 - protein, 210 aa, Zea Mays
MAVVRLRVSPRLRSIPLLLSQPDAATVRRSFACASASQAPAPARAMAAPSSSSATPSPYTTLVGRVSCEREIKRSKFIAIAAPVPNERAAMAFLDQVKDPRATHNCWAYKLGDQFRYNDDGEPSSTAGKPIYSAIISSGIDKVMVVVIRYFGGIKLGTGGLVRAYGGVASECLKDAPTCLVKPKARVGMEVPFNLLGTVYHQNILVHCKY

SEQ ID NO: 161606 - protein, 97 aa, Zea Mays
MHYSSNLQNPSRLIGSTTEKELDQKWWICTKRLLKIAELKEAEKEHQKESERIEKELAEMEEMRKKISTMTADDYFEKYPELRKKFDDEIRNDNWGY

SEQ ID NO: 161607 - protein, 292 aa, Zea Mays
MTSFRTRSLLVWPHIKRNIRISATHSCWTCRPNTLLVFYSRCKSYERAKKKLTIEEAPNILTIALKRYQSGKFGKISKAIRFPETLNLARYMNPDTDDISPVYSLYAVVVHHDVMNAAFSGHYVCYVKDTQGKWFKADDSQVKPVSLDNVMSKCAYMLLYARLCRTQHTRSRPSRGWFQEDQHGEEVPSTGTKLASGTATTRKTTTPHMLHLTNIDTHHIRLQILRALARVHPSSATPTQGRTAPTAARARGTRQAPRSTSTCSEPLIRCTAWEGGHLWRVAIRRIPVRGPA

SEQ ID NO: 161608 - protein, 196 aa, Zea Mays
MPSPPKDRPSGRVGRLLTALRPSRAGPLPVQTGFPTSLADLVVKNHGRLKKQPSPSSKRGRRAAAAATSPSPSPCSPTTSPSPSPPSASPPPPVAAAAVSPSDRPRPDLPPAQSPRRDSGLGLGFLAVSGKTCMNMCVVLANTSKKLMSLLQELDDALPIQESKTRTGKRGEDRNQWRRACERRAPRGGGLGVRRR

SEQ ID NO: 161609 - protein, 419 aa, Zea Mays
MEPVPRKRKGAPPVCSAARSLQDLASRKRACRGSVPQQSHCTDAPAPAVVMTAPAASGASASAGVLPGRGLKRKVGCIDNATRIGRRKRLENEYDLGEEIGHGKFGSVRVCRPKARTRGEEEFACKALPKNGGDTAHREVEIMQHLSGHPGVVTLRAVFEDTDAFYLVMELCHGGRLLDEVAREGKLSERRAANVIKELMAVLKYCHEMGVVHRDVKPENVLLTKSGRLKLADFGLAVRVADGQQLTGVAGSPAYLAPEVLLGNYSQKVDVWAAGVLLHVLLMGTLPFQGKSVEAIFDAIKTAELDFHSSQWASVSLLARDLIGRMLNREVSSRPDAEDVLRHPWVLFYTDCPQKAEFSNLWGTNKTAAPMIHQEIVSNNTGEDLRAQEESAVQPTQRVVATKQEQSPNMKRMNPCVAF

SEQ ID NO: 161610 - protein, 378 aa, Zea Mays
MEPVPRKRKGAPPVCSAARSLQDLASRKRACRGSVPQQSHCTDAPAPAVVMTAPAASGASASAGVLPGRGLKRKVGCIDNATRIGRRKRLENEYDLGEEIGHGKFGSVRVCRPKARTRGEEEFACKALPKNGGDTAHREVEIMQHLSGHPGVVTLRAVFEDTDAFYLVMELCHGGRLLDEVAREGKLSERRAANVIKELMAVLKYCHEMGVVHRDVKPENVLLTKSGRLKLADFGLAVRVADGQQLTGVAGSPAYLAPEVLLGNYSQKVDVWAAGVLLHVLLMGTLPFQGKSVEAIFDAIKTAELDFHSSQWASVSLLARDLIGRMLNREVSSRPDAEDVLRHPWVLFYTDCPQKAEFSNLWGTNKTAAPMIHQEIVS

SEQ ID NO: 161611 - protein, 315 aa, Zea Mays
MGSNTERARKALGAMKLIGFSKKQAIPVLKELLKIFNNNWEPIEDESYRALADAILDRQDSKQTPPSQQGTQAAHADLEPLRSTRDDRQQYLSASLDDTCEDDNETPLVKRPRMGTANFRPELQPPQQSSVSTQGALPASPQTSRRQTRSLTVEPHAAGHEYPLAVNDALVVKEPKPEPQIDRAEDFVAGPNATQLNDGSSEQTSGFGARGNIVHQAQSLGRSLQAAAVCKNGVGSTVQNTHETSIVEVDVASSANGEVKMSLKCSLGSSNFSISMEEVFKMVEEKCLHSYKMLPSDLSIGKLLSERQFHVLVQE

SEQ ID NO: 161612 - protein, 345 aa, Zea Mays
MGSNTERARKALGAMKLIGFSKKQAIPVLKELLKIFNNNWEPIEDESYRALADAILDRQDSKQTPPSQQGTQAAHADLEPLRSTRDDRQQYLSASLDDTCEDDNETPLVKRPRMGTANFRPELQPPQQSSVSTQGALPASPQTSRRQTRSLTVEPHAAGHEYPLAVNDALVVKEPKPEPQIDRAEDFVAGPNATQLNDGSSEQTSGFGARGNIVHQAQSLGRSLQAAAVCKNGVGSTVQNTHETSIVEVDVASSANGEVKMSLKCSLGSSNFSISMEEVFKMVEEKCLHSYKMLPSDLSIGKLLSENSLVAWNPELAHCNQKTTHDTTDISKGEERRQFHVLVQE

SEQ ID NO: 161613 - protein, 418 aa, Zea Mays
MGSNTERARKALGAMKLIGFSKKQAIPVLKELLKIFNNNWEPIEDESYRALADAILDRQDSKQTPPSQQGTQAAHADLEPLRSTRDDRQQYLSASLDDTCEDDNETPLVKRPRMGTANFRPELQPPQQSSVSTQGALPASPQTSRRQTRSLTVEPHAAGHEYPLAVNDALVVKEPKPEPQIDRAEDFVAGPNATQLNDGSSEQTSGFGARGNIVHQAQSLGRSLQAAAVCKNGVGSTVQNTHETSIVEVDVASSANGEVKMSLKCSLGSSNFSISMEEVFKMVEEKCLHSYKMLPSDLSIGKLLSEVCQSVVQLGTMHSEVNRDSGSLHNEVVVPFVKPISCEAAVGISDDVAGGSSVLESSEPCLQNSLVAWNPELAHCNQKTTHDTTDISKGEERIVVLIVLATVYQRQFHVLVQE

SEQ ID NO: 161614 - protein, 435 aa, Zea Mays
MCGPSCAVEQDRVAETPRPQSLVGSLTARPVIFGVNIPALPKPENEWPEKWGGVGRPAAAAEQSSGEEAAAECFPFQEQQVRPATATPTPPRAFFVFGDSLVDSGNNNYLATTARADSPPYGLDYPTHRATGRFSNGKNVPDIISEYLGAEPALPYLSPHLDGRKLLVGANFASAGVGVLNDTGVQFANIIRVQKQLRYFRQYQDRLSRLVGEDAAARLVRGALVLVTLGGNDFINNYYLVPFSARSREFALPDYVRYVVSEYAKVLRQLYSLGARRVLVTGSGPLGCAPAELALRGSRDGECDAELQRAAALYNPQLVDMIKGVNAELGADVFVAVNAYRMHMDFISDPAAYGFVTSKVACCGQGPYNGVGLCTAASSVCPDRSVYAFWDNFHPTEKANRIIVSQFMDGPQEYMHPLNLSTILAVDARAAATFN

SEQ ID NO: 161615 - protein, 81 aa, Zea Mays
MPPPQSGMTLCRLPKATLGLPLSLPSLLYRPSLSLAARRTKAVSARASSSSPSPDSSFGSRMEDSVKKTVADNPVVIYSKS

SEQ ID NO: 161616 - protein, 544 aa, Zea Mays
MHNCVTEIPNASYISQYGRPQVVEEPWILESIVSAKKPVAKVKDKKGQKKLVNYKHTLSGVSKNMHEQYQPVEEPWLFQSILELNETIVLADGKVEARDIIRKLRKIEKPLTPLDESKPTGGEPSSRVILMNSSVCTMQRIAVLEDGKLVELLLEPIKNNVQCDSIYLGVVTKLVPHMGGAFVDIGISRPSLMSIKQNRDPFVYPQVFKNRGTDHVGDYCNEENLPAYENDDDMSDDEFADEEAHDGSSFPVENVTDNNVDDDEVDSISVYDVDKDEENDHMEDEYSEGILQGYQSEISNDLKTLSSIQHALRESNDDTNGSRWSQVRKGTKVMVQVVKEGLGTKGPTLSPFPCLRSRFWILVSRGNKVGVSKKITGIERTRLKGITKLLRPPGFTLTARTVAAGHSWEELQKDLDGLLSTWKGITEHAQSAALAADEGVEGAVPVMLHRAKGQTLSVVQDDFNEKVKRLVVDSPRTYHEVTSYLEEVAPELYSRVELYEKRKPIFDEYNIEKEIDNILCKRCYFIVSILFHSSCWWIFSLVFF

SEQ ID NO: 161617 - protein, 820 aa, Zea Mays
MAACVLGLAPTLVSMWPLRCATACSAATEASTTAAHASRRGVGAVSSALSGLRGRHSLSSAQFMDGLRSNLQVERNLTLSPKSPMSRSAITCKGFCTILWNLKADLQDGCLIFITGDPLTLGCWESNMAVQLAPSVESNNIWTAEIKVPYGVHFKYSYFVREEMSSSSDIIWRPGPVYSLSIPSDGQKKQVIIVKDLWMKTSLPGLPTPTWGSWLMEADSLEGELFDGGNNQNIVKDHSVRDTRNQGLSVGDHIILKLGNGTPLHAKLLSDNQSTIMHNCVTEIPNASYISQYGRPQVVEEPWILESIVSAKKPVAKVKDKKGQKKLVNYKHTLSGVSKNMHEQYQPVEEPWLFQSILELNETIVLADGKVEARDIIRKLRKIEKPLTPLDESKPTGGEPSSRVILMNSSVCTMQRIAVLEDGKLVELLLEPIKNNVQCDSIYLGVVTKLVPHMGGAFVDIGISRPSLMSIKQNRDPFVYPQVFKNRGTDHVGDYCNEENLPAYENDDDMSDDEFADEEAHDGSSFPVENVTDNNVDDDEVDSISVYDVDKDEENDHMEDEYSEGILQGYQSEISNDLKTLSSIQHALRESNDDTNGSRWSQVRKGTKVMVQVVKEGLGTKGPTLSPFPCLRSRFWILVSRGNKVGVSKKITGIERTRLKGITKLLRPPGFTLTARTVAAGHSWEELQKDLDGLLSTWKGITEHAQSAALAADEGVEGAVPVMLHRAKGQTLSVVQDDFNEKVKRLVVDSPRTYHEVTSYLEEVAPELYSRVELYEKRKPIFDEYNIEKEIDNILCKRCYFIVSILFHSSCWWIFSLVFF

SEQ ID NO: 161618 - protein, 617 aa, Zea Mays
MEARSSILLINTFRWPEKAGELFDGGNNQNIVKDHSVRDTRNQGLSVGDHIILKLGNGTPLHAKLLSDNQSTIMHNCVTEIPNASYISQYGRPQVVEEPWILESIVSAKKPVAKVKDKKGQKKLVNYKHTLSGVSKNMHEQYQPVEEPWLFQSILELNETIVLADGKVEARDIIRKLRKIEKPLTPLDESKPTGGEPSSRVILMNSSVCTMQRIAVLEDGKLVELLLEPIKNNVQCDSIYLGVVTKLVPHMGGAFVDIGISRPSLMSIKQNRDPFVYPQVFKNRGTDHVGDYCNEENLPAYENDDDMSDDEFADEEAHDGSSFPVENVTDNNVDDDEVDSISVYDVDKDEENDHMEDEYSEGILQGYQSEISNDLKTLSSIQHALRESNDDTNGSRWSQVRKGTKVMVQVVKEGLGTKGPTLSPFPCLRSRFWILVSRGNKVGVSKKITGIERTRLKGITKLLRPPGFTLTARTVAAGHSWEELQKDLDGLLSTWKGITEHAQSAALAADEGVEGAVPVMLHRAKGQTLSVVQDDFNEKVKRLVVDSPRTYHEVTSYLEEVAPELYSRVELYEKRKPIFDEYNIEKEIDNILCKRCYFIVSILFHSSCWWIFSLVFF

SEQ ID NO: 161619 - protein, 793 aa, Zea Mays
MAACVLGLAPTLVSMWPLRCATACSAATEASTTAAHASRRGVGAVSSALSGLRGRHSLSSAQFMDGLRSNLQVERNLTLSPKSPMSRSGDPLTLGCWESNMAVQLAPSVESNNIWTAEIKVPYGVHFKYSYFVREEMSSSSDIIWRPGPVYSLSIPSDGQKKQVIIVKDLWMKTSLPGLPTPTWGSWLMEADSLEGELFDGGNNQNIVKDHSVRDTRNQGLSVGDHIILKLGNGTPLHAKLLSDNQSTIMHNCVTEIPNASYISQYGRPQVVEEPWILESIVSAKKPVAKVKDKKGQKKLVNYKHTLSGVSKNMHEQYQPVEEPWLFQSILELNETIVLADGKVEARDIIRKLRKIEKPLTPLDESKPTGGEPSSRVILMNSSVCTMQRIAVLEDGKLVELLLEPIKNNVQCDSIYLGVVTKLVPHMGGAFVDIGISRPSLMSIKQNRDPFVYPQVFKNRGTDHVGDYCNEENLPAYENDDDMSDDEFADEEAHDGSSFPVENVTDNNVDDDEVDSISVYDVDKDEENDHMEDEYSEGILQGYQSEISNDLKTLSSIQHALRESNDDTNGSRWSQVRKGTKVMVQVVKEGLGTKGPTLSPFPCLRSRFWILVSRGNKVGVSKKITGIERTRLKGITKLLRPPGFTLTARTVAAGHSWEELQKDLDGLLSTWKGITEHAQSAALAADEGVEGAVPVMLHRAKGQTLSVVQDDFNEKVKRLVVDSPRTYHEVTSYLEEVAPELYSRVELYEKRKPIFDEYNIEKEIDNILCKRCYFIVSILFHSSCWWIFSLVFF

SEQ ID NO: 161620 - protein, 222 aa, Zea Mays
MEYMYIYRHGKSKIARELRLRDIGGIIIVDFIDMSDDSNKKLVYEEMKKAVEKDRSTVGVSELSKLGLMEITRKRVRPSVTFMISEPCTCCHGTGRVEALDTSFSKIEREICRRLAASRRKSDPEKPKSWPRFLLRVDHEMCTYLTSGKKTKLGLLSSSLKVWILLKIARGFSRGAFELLPYSEKENYSMEKETSELPQKESRPKLSVFPIKKWMSRAKRAK

SEQ ID NO: 161621 - protein, 308 aa, Zea Mays
MSPSKTTFSLPRAGSASASQKEGTVENWTQAGDKDSPILLPPLAKVKPYEQQFSWRLKPGWLAPDDGDQDVHVQRRGISLTRVTVASPTPRRVSDRIPTLSHGGTCDKRLRWVPLNNGGSLVIEQTEALVSVDVNGGHSMFGQGTSQEKAILEVNLEAAKQVRPSVTFMISEPCTCCHGTGRVEALDTSFSKIEREICRRLAASRRKSDPEKPKSWPRFLLRVDHEMCTYLTSGKKTKLGLLSSSLKVWILLKIARGFSRGAFELLPYSEKENYSMEKETSELPQKESRPKLSVFPIKKWMSRAKRAK

SEQ ID NO: 161622 - protein, 64 aa, Zea Mays
MASTMMIGSTMLLSVPFHDARAKWWWKRRRWLRLRWFWLGFWIWLGWFGLGFGIWLRLGLWERW

SEQ ID NO: 161623 - protein, 333 aa, Zea Mays
MISNHLLFKLASGEVFGQDQPIALKLLGSERSFQALEGVAMELEDSLYPLLREVSIGIDPYVVFQDVDWALLIGAKPRGPGMERAALLDINGQIFADQGKALNAVASRNAKVLVVGNPCNTNALICLKNAPNIPAKNFHALTRLDENRAKCQLALKAGVFYDKVSNVTIWGNHSTTQVPDFLNAKIDGRPVKEVIKDTKWLEEEFTLTVQKRGGVLIQKWGRSSAASTAVSIVDAIRSLVTPTPEGDWFSTGVYTTGNPYGIAEDIVFSMPCRSKGDGDYELASDVLMDDFLWERIKKSEAELLAEKKCVAHLTGEGNAFCDLPEDTMLPGEV

SEQ ID NO: 161624 - protein, 222 aa, Zea Mays
MGLSTVYSPAGPRLVPAPLGRCRSAQPRRPRRAPLATVRCSVDATKQAQDGVATAVATEAPASRKECFGVFCTTYDLKAEDKTKSWKKLVNVAVSGAAGMISNHLLFKLASGEVFGQDQPIALKLLGSERSFQALEGVAMELEDSLYPLLREVSIGIDPYVVFQDVDWALLIGAKPRGPGMERAALLDINGQIFADQGKALNAVASRNAKVLVVGNPCNTMR

SEQ ID NO: 161625 - protein, 400 aa, Zea Mays
MGLSTVYSPAGPRLVPAPLGRCRSAQPRRPRRAPLATVRCSVDATKQAQDGVATAVATEAPASRKECFGVFCTTYDLKAEDKTKSWKKLVNVAVSGAAGMISNHLLFKLASGEVFGQDQPIALKLLGSERSFQALEGVAMELEDSLYPLLREVSIGIDPYVVFQDVDWALLIGAKPRGPGMERAALLDINGQIFADQGKALNAVASRNAKVLVVGNPCNTNALICLKNAPNIPAKNFHALTRLDENRAKCQLALKAGVFYDKVSNVTIWGNHSTTQVPDFLNAKIDGRPVKEVIKDTKWLEEEFTLTVQKRGGVLIQKWGRSSAASTAVSIVDAIRSLVTPTPEGDWFSTGVYTTGNPYGIAEDIVFSMPCRSKGDGDYELASDVLMDDFLWERIKKLTL

SEQ ID NO: 161626 - protein, 240 aa, Zea Mays
MTSDDGENDEYCQNVNFVLGPTGICIVYEQYIFPAAKQYAETLRTSDEFYWDNGPKIREGGGAYFLFLLSIAFLMSFFGILVPGVPTNCIGDIADAPPATTGGIDDVGAGTGGATGVGTDACRGNVAGACEGAGSGGGRVTSGRKLKGVRNWWRGSRQKIISLPTAPCSGDTTNSNKNKRGPASALEKDWALEDHKHMDALISRSIYSGGYLSIFCEIYIFEKHLPLLAAASCKGYIIPG

SEQ ID NO: 161627 - protein, 634 aa, Zea Mays
MHTRATRYWRRGAMPGMDAFAAVSLLATLFLVRAAAAHPPAAAADAMTPTDYWRAVLPETPMPRAILDLLTTSTVGEGSRKVTTSNGYQGHDLRTVSTSYASQDGDNSWKATMSYGFQSGEGSRKVTTSYPYRGQDLRMVSTSYVSQDEDNSWKVSMPSRFQVGEGSRKVTTSNGYQGHDLRTVSTSYASQDGDNSWKVTTSNGYQGHDLRTVSTSYASQDGDNSWKATMSYGFQSGEGSRKVTTSYPYRGQDLRMVSTSYVSQDEDNSWKVSMPSRFQVGEGSRKLTTPFESQREDSRKATASYGIQDDEDTRKATTSYGIHGEDPRKATTSYGSQDEKGSRKVIMSYGSNGEDDPRKATTSYGIQDKEYPRKATTSYGVQGDIHHHDHAAVHIHSSGNKLVADVFFFHDVLRPGSVITPIIPPTITLPPLLPLREADALPFSTGRFADILAMFAPTTSDAMGEEIRSTLDTCENTRPLPGEKAACATSLESLARIPAVLLGTRNVRAFSGDMPTDPAGTSAKRGRYNVTAVQKLSESLTAAACHDLTYPYVVFYCHTTNPAATYLVKLAAQDGGTPDMEALVVCHLDTSLWSPRHPFLVAHSLKPGDDAVVCHFLSKLSIVWVPAGEQGWRA

SEQ ID NO: 161628 - protein, 326 aa, Zea Mays
MHTRATRYWRRGAMPGMDAFAAVSLLATLFLVRAAAAHPPAAAADAMTPTDYWRAVLPETPMPRAILDLLTTSTGDIHHHDHAAVHIHSSGNKLVADVFFFHDVLRPGSVITPIIPPTITLPPLLPLREADALPFSTGRFADILAMFAPTTSDAMGEEIRSTLDTCENTRPLPGEKAACATSLESLARIPAVLLGTRNVRAFSGDMPTDPAGTSAKRGRYNVTAVQKLSESLTAAACHDLTYPYVVFYCHTTNPAATYLVKLAAQDGGTPDMEALVVCHLDTSLWSPRHPFLVAHSLKPGDDAVVCHFLSKLSIVWVPAGEQGWRA

SEQ ID NO: 161629 - protein, 561 aa, Zea Mays
MHTRATRYWRRGAMPGMDAFAAVSLLATLFLVRAAAAHPPAAAADAMTPTDYWRAVLPETPMPRAILDLLTTSTVGEGSRKVTTSNGYQGHDLRTVSTSYASQDGDNSWKATMSYGFQSGEGSRKVTTSYPYRGQDLRMVSTSYVSQDEDNSWKATMSYGFQSGEGSRKVTTSYPYRGQDLRMVSTSYVSQDEDNSWKVSMPSRFQVGEGSRKLTTPFESQREDSRKATASYGIQDDEDTRKATTSYGIHGEDPRKATTSYGSQDEKGSRKVIMSYGSNGEDDPRKATTSYGIQDKEYPRKATTSYGVQGDIHHHDHAAVHIHSSGNKLVADVFFFHDVLRPGSVITPIIPPTITLPPLLPLREADALPFSTGRFADILAMFAPTTSDAMGEEIRSTLDTCENTRPLPGEKAACATSLESLARIPAVLLGTRNVRAFSGDMPTDPAGTSAKRGRYNVTAVQKLSESLTAAACHDLTYPYVVFYCHTTNPAATYLVKLAAQDGGTPDMEALVVCHLDTSLWSPRHPFLVAHSLKPGDDAVVCHFLSKLSIVWVPAGEQGWRA

SEQ ID NO: 161630 - protein, 498 aa, Zea Mays
MASFAPSGEVSSKHGVVGYGIVGGPNGNAVAPAAKSTVVETTIERFAYASSVPRLLLLQINEVSKEYFLKTVSNIVGDKLLKQAASQYQMQAQRSPQTNPSNYSLSGQVSGQQTAPSGSVTGDEQKGYPWAHTIPMRQAIASTRPPQFRPSSSGQMRSNTVQTMQHHVQRPQTSSPVFGANSIHARPFLRPVGGPAAPFRPQMADSNPRAHLIQGAVTTISRSVPKRSIVSGNAPVNQALGSSKVSAGMESQSQQLSAPKPLAATSLSQTQSHGIQEEPKIQGKKQLLFESLPATDLKYWSLERKLCQPLLITEKMFAYRETVLEEAHQGMELHEHCRHIVDNDDQHCRFHSLCVHQVGLRNTEQQQQYRKESAYVGQMEATQPLVAPPFQQWPPTGAVLPLPGSTASVTNPPSPPIPGASDIVAADEVCTIFMDLPIDVKETEMHNLLCWLLGFEAFEMNFKGNQPMGFALFSTVHQAITAKAMFQVCFNACCGDEM

SEQ ID NO: 161631 - protein, 478 aa, Zea Mays
MRINEVSKEYFLKTVSNIVGDKLLKQAASQYQMQAQRSPQTNPSNYSLSGQVSGQQTAPSGSVTGDEQKGYPWAHTIPMRQAIASTRPPQFRPSSSGQMRSNTGNPPSQTNLHKANKMGNMSDGKGVHMLQTHPPNNSIPVQTMQHHVQRPQTSSPVFGANSIHARPFLRPVGGPAAPFRPQMADSNPRAHLIQGAVTTISRSVPKRSIVSGNAPVNQALGSSKVSAGMESQSQQLSAPKPLAATSLSQTQSHGIQEEPKIQGKKQLLFESLPATDLKYWSLERKLCQPLLITEKMFAYRETVLEEAHQGMELHEHCRHIVDNDDQHCRFHSLCVHQVGLRNTEQQQQYRKESAYVGQMEATQPLVAPPFQQWPPTGAVLPLPGSTASVTNPPSPPIPGASDIVAADEVCTIFMDLPIDVKETEMHNLLCWLLGFEAFEMNFKGNQPMGFALFSTVHQAITAKAMFQVCFNACCGDEM

SEQ ID NO: 161632 - protein, 304 aa, Zea Mays
MASFAPSGEVSSKHGVVGYGIVGGPNGNAVAPAAKSTVVETTIERFAYASSVPRLLLLQINEVSKEYFLKTVSNIVGDKLLKQAASQYQMQAQRSPQTNPSNYSLSGQVSGQQTAPSGSVTGDEQKGYPWAHTIPMRQAIASTRPPQFRPSSSGQMRSNTVQTMQHHVQRPQTSSPVFGANSIHARPFLRPVGGPAAPFRPQMADSNPRAHLIQGAVTTISRSVPKRSIVSGNAPVNQALGSSKVSAGMESQSQQLSAPKPLAATSLSQTQSHGIQEEPKIQGKKQLLFESLPATDLKVRASGM

SEQ ID NO: 161633 - protein, 165 aa, Zea Mays
MADSNPRAHLIQGAVTTISRSVPKRSIVSGNAPVNQALGSSKVSAGMESQSQQLSAPKPLAATSLSQTQSHGIQEEPKIQGKKQLLFESLPATDLKYWSLERKLCQPLLITEKMFAYRETVLEEAHQGMELHEHCRHIVDNDDQHCRFHSLCVHQAMRFSRLLRP

SEQ ID NO: 161634 - protein, 99 aa, Zea Mays
MRINEVSKEYFLKTAQRSPQTNPSNYSLSGQVSGQQTAPSGSVTGDEQKGYPWAHTIPMRQAIASTRPPQFRPSSSGQMRSNTASRAATTNIFTSVWGK

SEQ ID NO: 161635 - protein, 272 aa, Zea Mays
MSSIHRKEACPPGSIFGSDRPPSGLSSINEVSKEYFLKTVSNIVGDKLLKQAASQYQMQAQRSPQTNPSNYSLSGQVSGQQTAPSGSVTGDEQKGYPWAHTIPMRQAIASTRPPQFRPSSSGQMRSNTVQTMQHHVQRPQTSSPVFGANSIHARPFLRPVGGPAAPFRPQMADSNPRAHLIQGAVTTISRSVPKRSIVSGNAPVNQALGSSKVSAGMESQSQQLSAPKPLAATSLSQTQSHGIQEEPKIQGKKQLLFESLPATDLKVRASGM

SEQ ID NO: 161636 - protein, 176 aa, Zea Mays
MASFAPSGEVSSKHGVVGYGIVGGPNGNAVAPAAKSTVVETTIERFAYASSVPRLLLLQINEVSKEYFLKTVSNIVGDKLLKQAASQYQMQAQRSPQTNPSNYSLSGQVSGQQTAPSGSVTGDEQKGYPWAHTIPMRQAIASTRPPQFRPSSSGQMRSNTASRAATTNIFTSVWGK

SEQ ID NO: 161637 - protein, 341 aa, Zea Mays
MASFAPSGEVSSKHGVVGYGIVGGPNGNAVAPAAKSTVVETTIERFAYASSVPRLLLLQINEVSKEYFLKTVSNIVGDKLLKQAASQYQMQAQRSPQTNPSNYSLSGQVSGQQTAPSGSVTGDEQKGYPWAHTIPMRQAIASTRPPQFRPSSSGQMRSNTGNPPSQTNLHKANKMGNMSDGKGVHMLQTHPPNNSIPVQTMQHHVQRPQTSSPVFGANSIHARPFLRPVGGPAAPFRPQMADSNPRAHLIQGAVTTISRSVPKRSIVSGNAPVNQALGSSKVSAGMESQSQQLSAPKPLAATSLSQTQSHGIQEEPKIQGKKQLLFESLPATDLKVRASGM

SEQ ID NO: 161638 - protein, 373 aa, Zea Mays
MSSIHRKEACPPGSIFGSDRPPSGLSSINEVSKEYFLKTVSNIVGDKLLKQAASQYQMQAQRSPQTNPSNYSLSGQVSGQQTAPSGSVTGDEQKGYPWAHTIPMRQAIASTRPPQFRPSSSGQMRSNTVQTMQHHVQRPQTSSPVFGANSIHARPFLRPVGGPAAPFRPQMADSNPRAHLIQGAVTTISRSVPKRSIVSGNAPVNQALGSSKVSAGMESQSQQLSAPKPLAATSLSQTQSHGIQEEPKIQGKKQLLFESLPATDLKYWSLERKLCQPLLITEKMFAYRETVLEEAHQGMELHEHCRHIVDNDDQHCRFHSLCVHQGIGVSSRTMPFPFPSFSAHAEPADSLSFAFLLLAYVDLAMRFSRLLRP

SEQ ID NO: 161639 - protein, 335 aa, Zea Mays
MSSIHRKEACPPGSIFGSDRPPSGLSSINEVSKEYFLKTVSNIVGDKLLKQAASQYQMQAQRSPQTNPSNYSLSGQVSGQQTAPSGSVTGDEQKGYPWAHTIPMRQAIASTRPPQFRPSSSGQMRSNTVQTMQHHVQRPQTSSPVFGANSIHARPFLRPVGGPAAPFRPQMADSNPRAHLIQGAVTTISRSVPKRSIVSGNAPVNQALGSSKVSAGMESQSQQLSAPKPLAATSLSQTQSHGIQEEPKIQGKKQLLFESLPATDLKYWSLERKLCQPLLITEKMFAYRETVLEEAHQGMELHEHCRHIVDNDDQHCRFHSLCVHQAMRFSRLLRP

SEQ ID NO: 161640 - protein, 115 aa, Zea Mays
MLDKCFVNNPNLCGPGTTKPCPDAPPFSPPPPYNPTTPMQSPGDLFRLSSEILEFNRTFPSLLFHLNDILIGKMYTSKTSIMLSRLESGKEELHVFLKIKLKIICNQELERYMVL

SEQ ID NO: 161641 - protein, 197 aa, Zea Mays
MADSNPRAHLIQGAVTTISRSVPKRSIVSGNAPVNQALGSSKVSAGMESQSQQLSAPKPLAATSLSQTQSHGIQEEPKIQGKKQLLFESLPATDLKYWSLERKLCQPLLITEKMFAYRETVLEEAHQGMELHEHCRHIVDNDDQHCRFHSLCVHQVGLRNTEQQQQYRKESAYVGQMVCHIFSSLMMLQRCIFSFLG

SEQ ID NO: 161642 - protein, 342 aa, Zea Mays
MRINEVSKEYFLKTVSNIVGDKLLKQAASQYQMQAQRSPQTNPSNYSLSGQVSGQQTAPSGSVTGDEQKGYPWAHTIPMRQAIASTRPPQFRPSSSGQMRSNTVQTMQHHVQRPQTSSPVFGANSIHARPFLRPVGGPAAPFRPQMADSNPRAHLIQGAVTTISRSVPKRSIVSGNAPVNQALGSSKVSAGMESQSQQLSAPKPLAATSLSQTQSHGIQEEPKIQGKKQLLFESLPATDLKYWSLERKLCQPLLITEKMFAYRETVLEEAHQGMELHEHCRHIVDNDDQHCRFHSLCVHQVGLRNTEQQQQYRKESAYVGQMVCHIFSSLMMLQRCIFSFLG

SEQ ID NO: 161643 - protein, 217 aa, Zea Mays
MFAQAQRSPQTNPSNYSLSGQVSGQQTAPSGSVTGDEQKGYPWAHTIPMRQAIASTRPPQFRPSSSGQMRSNTVQTMQHHVQRPQTSSPVFGANSIHARPFLRPVGGPAAPFRPQMADSNPRAHLIQGAVTTISRSVPKRSIVSGNAPVNQALGSSKVSAGMESQSQQLSAPKPLAATSLSQTQSHGIQEEPKIQGKKQLLFESLPATDLKVRASGM

SEQ ID NO: 161644 - protein, 96 aa, Zea Mays
MTVRGGECPLKAEAAPTGYSRCHRSPHRTPHCPPDRAPGPYGDRRPLRMDQCGTAAFRRTPSAGEGALLLDLEQAHGNNAGSKMASSLEGHEFDPP

SEQ ID NO: 161645 - protein, 289 aa, Zea Mays
MASFAPSGEVSSKHGVVGYGIVGGPNGNAVAPAAKSTVVETTIERFAYASSVPRLLLLQINEVSKEYFLKTVSNIVGDKLLKQAASQYQMQAQRSPQTNPSNYSLSGQVSGQQTAPSGSVTGDEQKGYPWAHTIPMRQAIASTRPPQFRPSSSGQMRSNTVQTMQHHVQRPQTSSPVFGANSIHARPFLRPVGGPAAPFRPQMADSNPRAHLIQGAVTTISRSVPKRSIVSGNAPVNQALGSSKVSAGMESQSQQLSAPKPLAATSLSQTQSHGIQEEPKIQEYMRSWS

SEQ ID NO: 161646 - protein, 202 aa, Zea Mays
MFAQAQRSPQTNPSNYSLSGQVSGQQTAPSGSVTGDEQKGYPWAHTIPMRQAIASTRPPQFRPSSSGQMRSNTVQTMQHHVQRPQTSSPVFGANSIHARPFLRPVGGPAAPFRPQMADSNPRAHLIQGAVTTISRSVPKRSIVSGNAPVNQALGSSKVSAGMESQSQQLSAPKPLAATSLSQTQSHGIQEEPKIQEYMRSWS

SEQ ID NO: 161647 - protein, 105 aa, Zea Mays
MFFLGRFVHSWTCTDGPVPPYFSSTLRPEPTTPPRSSATACPSRRSPSSVSPRFPVPVLAQRAAALTGQLVVMATEPPPAAEKKKAPLPKVVTLNKALKLARSWC

SEQ ID NO: 161648 - protein, 550 aa, Zea Mays
MQSMALTSPSLPEVGPVSGRRLQRIRATAVGVSSVWYEGNTCNMHLLRLAEAVRDGVREAGMVGFRFNTVGVSDAISMGTRGMCYSLQSRDLIADSIETVMGAQHYDANISIPGCDKNMPGTIMAMGRLNRPSIMIYGGTIKPGHFQGNSYDIVSAFQCYGEYVSGSITDEQRKNVLRNSCPGAGACGGMYTANTMASAIETLGMSLPYSSSTPAEDPLKLEECRLAGKYLLELLKMDLKPKDIITEKSLRNAMVIVMALGGSTNAVLHLIAIARSVGLHLTLDDFQKVSDQVPFLADLKPSGKYVMEDLHKIGGTPAVIHYLLEQGLLDGDCMTVTGKTLAENAKIFPPLSEGQQIIRPLDNPIKPTGHIQILYGNLAPEGSVAKITGKEGLFFSGPALVFEGEESMITAISENPANFKGKVVVIRGEGPKGGPGMPEMLTPTSAIMGAGLGKECALLTDGRFSGGSHGFVVGHICPEAQEGGPIGLVHSGDVITIDVSKRVIDVDLTEQQLEERRRKWTPPPYKSTCGALWKYIKLVAPASRGCVTDE

SEQ ID NO: 161649 - protein, 723 aa, Zea Mays
MGQPGMDSVPGKENNGIAPNLNGVVSPAKQQLEGKEAMRYANILRSRNKFADAINLYTIVLEKDGTNVEALIGKGICLQAQNLPRQAIECFTEAVKIEPGNASALTHCGMIYKDEGHLVEAAEAYQKARMADPSYKPASEFLAIVLTDLGTSLKLAGNTEEGIQKYCEALEVDNHYAPAYYNLGVVYSEMMQFDMALSCYEKAALERPLYAEAYCNMGVIYKNRGDLDAAIICYERCLTISPNFEIAKNNMAIALTDLGTKVKIEGDINRGVAYYKKALYYNWHYADAMYNLGVAYGEMLNFEMGKMDSAASMIEKAIHANPTYAEAYNNLGVLYRDAGSITLAIHAYERCLQIDPDSRNAGQNRLLAMNYIDEGSDDKLYEAHREWGKRFMKLYPQYTSWDNSKVADRPLIIGYLSPDYFTHSVSYFIEAPLTHHDSTVCKVVVYSGVVKADAKTLRFKDKVLKKGGLWRDIYGIDEKRVASLVREDKVDILVELTGHTANNKLGTMACRPAPIQVTWIGYPNTTGLPTIDYRISDSLTDPPMTKQKHVEELVRLPESFLCYTPSPEAGPVCPTPAISNGFVTFGSFNNLAKITPKVLQVWARILCSVPNSRLVVKCKPFCCENIRQKFLATLEELGLESLRVDLLPLIHLNHDHMQAYSLMDISLDTFPYAGTTTTCESLYMGVPCVTMAGAVHAHNVGVSLLSKVGLGRLVAKTEDEYGA

SEQ ID NO: 161650 - protein, 390 aa, Zea Mays
MGQPGMDSVPGKENNGIAPNLNGVVSPAKQQLEGKEAMRYANILRSRNKFADAINLYTIVLEKDGTNVEALIGKGICLQAQNLPRQAIECFTEAVKIEPGNASALTHCGMIYKDEGHLVEAAEAYQKARMADPSYKPASEFLAIVLTDLGTSLKLAGNTEEGIQKYCEALEVDNHYAPAYYNLGVVYSEMMQFDMALSCYEKAALERPLYAEAYCNMGVIYKNRGDLDAAIICYERCLTISPNFEIAKNNMAIALTDLGTKVKIEGDINRGVAYYKKALYYNWHYADAMYNLGVAYGEMLNFEMAIVFYELALHFNPRCAEACNNLGVIYKDRDNLDKAVECYQMALSIKPLFAQSLNNLGVVYTVQVCSSVINFLLHNSYFVFLITLLF

SEQ ID NO: 161651 - protein, 124 aa, Zea Mays
MAMRTALTSLPARLRAPAPPAATGGRRLLSDGKGRVLSEEERAKESIYIQKMERERQEKLKKRLEQEKADSDKAKPADADKVFSDSELWIWSTTRTKAEPDEGRGQPKLYAGKLRRDGTRGNRP

SEQ ID NO: 161652 - protein, 214 aa, Zea Mays
MAMPTLRLAPDLPPVSRLCFGTMTMGEQSGAACSLRLLDAAYDAGVNFFDSAEMYPVPQRSETRGRSEELLGRWLRARRAPRDSVVVATKVAGPSGQMTWIRGGPTSLDSQNIAEAIDGCLRRLGVDYIDLYQIHWPDRYVPMFGETEYDPNCQYTSVPMEEQLEALGRAIDAGKIRYIGLSNETPYGLMKFLQLSKDSQLLPKLLTLQVSSAV

SEQ ID NO: 161653 - protein, 149 aa, Zea Mays
MKGKVSGTLDAHLQTCLLVRYPVPQRSETRGRSEELLGRWLRARRAPRDSVVVATKVAGPSGQMTWIRGGPTSLDSQNIAEAIDGWWVNCLRRLGVDYIDLYQIHWPDRYVPMFGETEYDPNCQYTSVPMEEQLEALGRAIDAGKVHWP

SEQ ID NO: 161654 - protein, 120 aa, Zea Mays
MAMGILSGKYHLSDNCGPPDARMNLFKGRYSEGESRYKLQSPKVKAAVKEYTQISAKYGISPVTLAIAFVLRHPLVASAVFGATKLWQLDEVLQATTVHLCEEIVAEINDVHARYPNPCP

SEQ ID NO: 161655 - protein, 648 aa, Zea Mays
MFLGKQVLEYVVIGVYTAVVFSVAMLYIRCTSINPADPGIMSKFDNVLIDAPGSAANIQGTDLPVKAGIGAGTISPSATSTCRNSVDGHSNAGALAAGDTNLDLRSQPPTSPWSCLLGGLVCFLFVKEDCRKYDDSENQVDGEGALFCTLCDAEVRKFSKHCRSCDKCVDGFDHHCRWLNNCVGRKNYFTFLALMATSLLWLAIEIGVGIGVLVICFANKNSERIIQDRLGNGLPRPAFATIVAFFTLLSLVACIPLGELFFFHMILIRKGITTYEYVVAMRAMSETPQEEEEHEEEEGVNIVYSPTNSATTAFSGASSLSLHYKGSWCTPPRIFVDQDEVIPHLEPGMVPSTIDPDAVGRAERANKAKKQVKISAWKLAKLDSNEAMKAAAKVRASSSVLRPIDSRRVPGASPGSSGNASMRSSMSAGYSASGTKERGAGMLQSPSYPQSPASQDDYESGTQSGSSRTSPVHIHRPAAPHAQINVPLPPRVPQAPPRPAPALAPRPPVPATQMSKPTFQSATSYVRENRKVSVVWDQEAARYVSVAPAPTRPVTGNHGRTLASMNPSSSALPSGQPSERLAYTGQSIFFGGPLLGAAAADPRRNEAVAGVPPETRRNDGTGGERRRTAESFPVFAPGSLEKNPPSNR

SEQ ID NO: 161656 - protein, 454 aa, Zea Mays
MATSLLWLAIEIGVGIGVLVICFANKNSERIIQDRLGNGLPRPAFATIVAFFTLLSLVACIPLGELFFFHMILIRKGITTYEYVVAMRAMSETPQEEEEHEEEEGVNIVYSPTNSATTAFSGASSLSLHYKGSWCTPPRIFVDQDEVIPHLEPGMVPSTIDPDAVGRAERANKAKKQVKISAWKLAKLDSNEAMKAAAKVRASSSVLRPIDSRRVPGASPGSSGNASMRSSMSAGYSASGTKERGAGMLQSPSYPQSPASQDDYESGTQSGSSRTSPVHIHRPAAPHAQINVPLPPRVPQAPPRPAPALAPRPPVPATQMSKPTFQSATSYVRENRKVSVVWDQEAARYVSVAPAPTRPVTGNHGRTLASMNPSSSALPSGQPSERLAYTGQSIFFGGPLLGAAAADPRRNEAVAGVPPETRRNDGTGGERRRTAESFPVFAPGSLEKNPPSNR

SEQ ID NO: 161657 - protein, 520 aa, Zea Mays
MIQRIKLMGKEPCSARYVTPRKMIFQVRKFSKHCRSCDKCVDGFDHHCRWLNNCVGRKNYFTFLALMATSLLWLAIEIGVGIGVLVICFANKNSERIIQDRLGNGLPRPAFATIVAFFTLLSLVACIPLGELFFFHMILIRKGITTYEYVVAMRAMSETPQEEEEHEEEEGVNIVYSPTNSATTAFSGASSLSLHYKGSWCTPPRIFVDQDEVIPHLEPGMVPSTIDPDAVGRAERANKAKKQVKISAWKLAKLDSNEAMKAAAKVRASSSVLRPIDSRRVPGASPGSSGNASMRSSMSAGYSASGTKERGAGMLQSPSYPQSPASQDDYESGTQSGSSRTSPVHIHRPAAPHAQINVPLPPRVPQAPPRPAPALAPRPPVPATQMSKPTFQSATSYVRENRKVSVVWDQEAARYVSVAPAPTRPVTGNHGRTLASMNPSSSALPSGQPSERLAYTGQSIFFGGPLLGAAAADPRRNEAVAGVPPETRRNDGTGGERRRTAESFPVFAPGSLEKNPPSNR

SEQ ID NO: 161658 - protein, 370 aa, Zea Mays
MIDDQIHWFSIVNSLMIVLFLSGMVAMIMLRTLYRDISRYNQLETEEEAQEETGWKLVHGDVFRPPANSDLLCVCVGTGVQFFGMLLVTMIFAVLGFLSPSNRGGLMTAMLLTWVLMGLFAGYASSRLYKMLKGSEWRSITLRTAFLFPGIAFGIFFILNALIWGEKSSGAVPFTTMFALVLLWFGISVPLVFVGSYLGFKQPAIEAPVKTNKIPRQVPEQAWYMNPAFTILIGGILPFGAVFIELFFILTSIWLHQFYYIFGFLFLVFIILIITCAEITIVLCYFQLCSEDYLWWWRSFLTSGSSAIYLFLYAGFYFFTKLQITKVVSGMLYFGYMLLASFAFCVLTGTIGFYACFCFTRLIYSSVKID

SEQ ID NO: 161659 - protein, 544 aa, Zea Mays
MGEPKMCQIICKAKIDDKQAKELKEKIEDEYRVNMILDNLPLVVPIARQDRGATVYQAGYHVGVKGQYTGNNDEKSFIHNHLAFLVKYHKDETTDLSRIVGFEVKPFSINHQFEGPWNDKNTRLITCDPHASKLVVNSDTPQEVEAGKEIIFTYDVGFEESDIKWASRWDTYLLMIDDQIHWFSIVNSLMIVLFLSGMVAMIMLRTLYRDISRYNQLETEEEAQEETGWKLVHGDVFRPPANSDLLCVCVGTGVQFFGMLLVTMIFAVLGFLSPSNRGGLMTAMLLTWVLMGLFAGYASSRLYKMLKGSEWRSITLRTAFLFPGIAFGIFFILNALIWGEKSSGAVPFTTMFALVLLWFGISVPLVFVGSYLGFKQPAIEAPVKTNKIPRQVPEQAWYMNPAFTILIGGILPFGAVFIELFFILTSIWLHQFYYIFGFLFLVFIILIITCAEITIVLCYFQLCSEDYLWWWRSFLTSGSSAIYLFLYAGFYFFTKLQITKVVSGMLYFGYMLLASFAFCVLTGTIGFYACFCFTRLIYSSVKID

SEQ ID NO: 161660 - protein, 286 aa, Zea Mays
MLLVTMIFAVLGFLSPSNRGGLMTAMLLTWVLMGLFAGYASSRLYKMLKGSEWKSITLRTAFLFPGIAFGIFFVLNALIWGEKSSGAVPFTTMFALVLLWFGISVPLVFVGSYLGFKQPAIEAPVKTNKIPRQVPEQAWYMNPAFTILIGGILPFGAVFIELFFILTSIWLHQFYYIFGFLFLVFIILIVTCAEITIVLCYFQLCSEDYLWWWRSFLTSGSSAIYLFLYAGFYFFTKLQITKVVSGMLYFGYMLLASFAFCVLTGTIGFYACFCFTRLIYSSVKID

SEQ ID NO: 161661 - protein, 203 aa, Zea Mays
MERNRCYPMRTKYNNMEPDVVDFFGECMNSPRNGRTPLANEIYEQMVAEKERELEEGEAQKSPSKIVADSLSQISRSSTFLLNIGVCLNASNLCGGTFVCLNLYCGRTSVLELCMTCDENVVYDGFYVYYDSVSYHESSVYHESSVYDSASLLEELPRSKHESTSMPGKQKLLQKQGKSELIGNMTHILGNTKLRMMIFILLA

SEQ ID NO: 161662 - protein, 638 aa, Zea Mays
MGPPRPASPACATAGVTVKVSDRYVEIKNGIFDLTLSNPDGIVTGVRYNGVDNLMEILNKEDNRGYWDLVWNPPGQKTGIFDVIKGTEFRIVYQDENQAEVSFTRNWDPSLEGKAVPLNIDKRFIVLRGSSGFYTYGIYEHKEGWPDFGLGETRVAFKLRKDMFHYMALADDRQRIMPMPDDRLPPRGQPLAYPEAVLLVDPINPELRGEVDDKYQYSCEDQYNNVHGWMSFDPPIGFWQITPSDEFRTGGPLKQNLTSHVGPTMLAMFLSAHYAGDDLSPKFTNGEYWKKVHGPVFMYLNSSWDASDPTMLWEDAKVQMMIEKGNWPYCFALSEDFQKTEQRGCVSGRLLVRDRYIDDQDLYASGAYVGLALPGEAGSWQRECKGYQFWCRADVDGSFYIRNIVTGNYNLYAWVPGFLGDYKLDATVTIASGDDIYLGDLVYEPPRDGPTMWEIGVPDRSAAEFYVPDPNPNYVNRLFRQYGLWERYAELYPDSDLVYTVGQSDYSTDWFYAQVNRKIDDNTYQPTTWQIKFDLDSVSPSSTYKFRVALASSALAELQISFNDQDRAVPHFATGLIGRDNAIARHGIHGLYWLFNIDVASAWLVQGVNTIYLKQPRSQSPFQGLMYDYLRLEGPCGC

SEQ ID NO: 161663 - protein, 56 aa, Zea Mays
MHFRPLATFGPSLLVTFEVQSNSLVKFWYASNLSVLVFNFILLYEIMMYWYFSYVV

SEQ ID NO: 161664 - protein, 80 aa, Zea Mays
MVFFVADQGVGSLLVMLPMLCSRITHEPCSEMFLMVLGIGSLIPHCYCHENTFVPSWTLGQSPSGGGGIKSGATPPPMQR

SEQ ID NO: 161665 - protein, 53 aa, Zea Mays
MNALHKHIAFQKHCSLNYNLLCASTVFLWGGGGRDPRRTLIRRHFGMRIKYTI

SEQ ID NO: 161666 - protein, 295 aa, Zea Mays
MASRAHLPGSPASIAVLILSFFQGSVCGITFTFTNRCGDTVWPGLLSGSGTPPLETTGFALAPGQSRSLYAPQGWSGRFWGRSGCAFDASGKGSCATGDCGSGEVECRGAGASPPATLAEFTLDGDGGKDFYDVSLVDGYNLPMLVQPAAAGCPDTGCLVDLNERCPDELRADGGRACRSACEAFGSPEYCCNGAYGNPNTCHPSQYSQLFKSACPKSYSYAYDDATSTFTCNHTDYTITFCPESTPSRFFLLPPAQSRSFLHLATSTVTLSFSFSCNFKLQGLFDIDYVRRARS

SEQ ID NO: 161667 - protein, 66 aa, Zea Mays
MDTDNKVGMFLSCIQSAVFEEATGITHFHSISHLNAAHAGLSEHRGTGLARNQQHHQRERTVLVPT

SEQ ID NO: 161668 - protein, 379 aa, Zea Mays
MNEDFSDGAEGSESPYSNGVSKRVCVMPKELKSLGSKAEESESSNWDAVKCIDEDITSVDPCLVESESSESESSYEEDPDRTPVSTNMEENCGPKPKFARTASSKSEIIISDRTPEDFATWQRIIRVDAIRANTEWVLFARNQAEVSKEKALQSAISVGLKDFDHLEPYMIYHAARLVALLEAYALYDPEIGYCQGMSDLLSPIIAVMEEDHEAFWCFVGFMRKARHNFRLDEVGIKRQLKTVSQIIKRKDSHLYRHLQKLQAEDCFFLYRMVVVLFRRELTFEQTMCLWEVMWADQAAIRAGIGRSTWARIRLHAPPTDDLLLYAIAACVLQKRKLIIEKYSSMDEILRECNSMAGQLDVWKLLDDAHHLVVDLHDKI

SEQ ID NO: 161669 - protein, 560 aa, Zea Mays
MRGGAMKALRRSSTSSAPSPRVPSSPRSYSWIHRRSLLVTSPASPATSSVSESANLPAEGSDSAPASVVAASSSPSLAASSPNMECTFHSRGGIKSPWSRRKRKRALTCQHWNRLFSANGKLRDGGRKFLKKVRSGGIEPGIRAEVWPFLLGVKEYEKLRRQCHRILHCNRENGLNVINEFMNEDFSDGAEGSESPYSNGVSKRVCVMPKELKSLGSKAEESESSNWDAVKCIDEDITSVDPCLVESESSESESSYEEDPDRTPVSTNMEENCGPKPKFARTASSKSEIIISDRTPEDFATWQRIIRVDAIRANTEWVLFARNQAEVSKEKALQSAISVGLKDFDHLEPYMIYHAARLVALLEAYALYDPEIGYCQGMSDLLSPIIAVMEEDHEAFWCFVGFMRKARHNFRLDEVGIKRQLKTVSQIIKRKDSHLYRHLQKLQAEDCFFLYRMVVVLFRRELTFEQTMCLWEVMWADQAAIRAGIGRSTWARIRLHAPPTDDLLLYAIAACVLQKRKLIIEKYSSMDEILRECNSMAGQLDVWKLLDDAHHLVVDLHDKI

SEQ ID NO: 161670 - protein, 352 aa, Zea Mays
MASTDRSTPAEDEQQQKRPSLFSPYQMPRFRLAHRFPRVPGIYNQEQTDAWRKVVDAVHAKGAIFFCQLWHVGRASHQVYQPGAAAPISSTDKPISSRWRILMPDGSYGKYPTPRRLATSEIPEIVEQYRQAAVNAIKAGFDGIEIHGAHGYLIDQFLKGGINDRTDEYGGSLSNRCRFLLEVTRAVVSAIGADRVAVRVSPAIDHLDAYDSNPLQLGLAVVERLNALQQEAGRLAYLHVTQPRYTAYGQTESGQHGSAEEESRLMRAVRGAYRGTFMCSGGYTRELGVEAIESGDADLVSYGRLFIANPDLVERFRRDAPLNKYVRKTFYTPDPVVGYTDYTFLGQPKARM

SEQ ID NO: 161671 - protein, 104 aa, Zea Mays
MYGNSHEPRAAQVYETAAPKRHASLSRNSLVTLASSSSRSSSSISIEEHELPEHLDSPRSPDGFISAPRSGSCVPDASVPRSLSMMDLHRLNRSSSSVRLKDGK

SEQ ID NO: 161672 - protein, 203 aa, Zea Mays
MCEGVHPFEIQIRTKEMHLQAEYGFAAHWRYKEGGCRHSFVLQMVEWARWVLTWQCETLSKERPSSLSSSVGIRPPCPFPLHSEDCSYSYSRQCNYEGPIFVIMLEHDKMSVQELPANSTVVDLMERVGANSPRWSPCSFPLKEELRPRVNHKPISDPNRKLSMGDVVELTPALPDKSLSEYREEIQRMYERGGFALATTPRS

SEQ ID NO: 161673 - protein, 390 aa, Zea Mays
MFLAMADARAVLIKLADRLHNMNTIEALPLVKQQRFAKETMEIFVPLANRLGIASWKDHLENICFKHLNPEEHKELSSKLLMSFDEALLTSTLHNLDKSLRDEGISYHSLSGRHKSLYSIYSKMIKKNLTMDDVHDIHGLRLVVETEEDCYRALDIVHKLWPRVTGRFKDYICHPKLNGYRSLHTVIMCEGVHPFEIQIRTKEMHLQAEYGFAAHWRYKEGGCRHSFVLQMVEWARWVLTWQCETLSKERPSSLSSSVGIRPPCPFPLHSEDCSYSYSRQCNYEGPIFVIMLEHDKMSVQELPANSTVVDLMERVGANSPRWSPCSFPLKEELRPRVNHKPISDPNRKLSMGDVVELTPALPDKSLSEYREEIQRMYERGGFALATTPRS

SEQ ID NO: 161674 - protein, 254 aa, Zea Mays
MVPLISVSFSLSLFWLTLLLAEAKGDMDLAASRGGSDQNCAHAFHACAAGATACRSPMRQAASAVLVAPAATRSAVLRSAAVQRPLRAAPAAAPAAFPAAAARRHQAAAIADPSAAAAALVVAAARTARAPAPAPRAAAAPASSPVRGARLAASALSTGVSAACRRAAVRCDLPAASASRRAARGVRPAAAPARERAAAVRASVPRRRRARSAPAAACAPAPGAKEDAAARPVVVIPAVPVDACARSEYYITTS

SEQ ID NO: 161675 - protein, 350 aa, Zea Mays
MYISVPLALYVGERTLRAFRSKAYAVKILKVCLLPGNVLTVTMSKPYGFRYRSGQYIFLQCPTISPFEWHPFSITSAPGDDCVSVHVQTRGDWTQELKRIFVENYFTPCVPRRAAFGDLGAVDHKTKSPPRLLVDGPYGAPAQDFRNYDVLLLVGLGIGATPFISILRDLLNNIKLADELMDLAMETGRAEDSASNLSASTASGGGNKRRAYRTTCAHFYWVTREPGSFEWFKGVMNEVAEMDNKGVIELHNYLTSVYEERDARTTLLSMVQALNHAKHGVDIVSGTRVRTHFARPNWKEVFTRIASKHPNSTVGVFYCGRPTLAKELKKLSLDMSHRTGTRFDFHKEYF

SEQ ID NO: 161676 - protein, 428 aa, Zea Mays
MVTLMAVSFTLATRPFRKREEASRDKKKAAACACRGVPLAGFNAFWYSHHLLIVVYLLLLVHGWFMFLVDKWYQRTTWMYISVPLALYVGERTLRAFRSKAYAVKILKVCLLPGNVLTVTMSKPYGFRYRSGQYIFLQCPTISPFEWHPFSITSAPGDDCVSVHVQTRGDWTQELKRIFVENYFTPCVPRRAAFGDLGAVDHKTKSPPRLLVDGPYGAPAQDFRNYDVLLLVGLGIGATPFISILRDLLNNIKLADELMDLAMETGRAEDSASNLSASTASGGGNKRRAYRTTCAHFYWVTREPGSFEWFKGVMNEVAEMDNKGVIELHNYLTSVYEERDARTTLLSMVQALNHAKHGVDIVSGTRVRTHFARPNWKEVFTRIASKHPNSTVGVFYCGRPTLAKELKKLSLDMSHRTGTRFDFHKEYF

SEQ ID NO: 161677 - protein, 92 aa, Zea Mays
MVEKAIEIWNIISNGGYLYICGDAKGMARDVHKMLHTIVQEQRSLDSSKTESYVKSMQMEGARDERVDVLSTVKSNWRRLQFCITPTKNSQT

SEQ ID NO: 161678 - protein, 145 aa, Zea Mays
MACIRHCLHKGRRSVVEDHLIVSHGRLACSSLAQYVASGFSRLCDHQNIMGSKVGLLRNARRWCMHDEAVVHYIDMIDQTTLGHRMIKKQFNKTPRAGWQIDPFGHSAVQAYLLGAELGFDSLHFARIDYQDKKKCKAGKGLEVI

SEQ ID NO: 161679 - protein, 157 aa, Zea Mays
MACIRHCLHKGRRSVVEDHLIVSHGRLACSSLAQYVASGFSRLCDHQNIMGSKVGLLRNARRWCMHDEAVVHYIDMIDQTTLGHRMIKKQFNKTPRAGWQIDPFGHSAVQAYLLGAEANFTRTNHIMWTMGDDFSYQYAESWFRNMDKLIYHVNKLC

SEQ ID NO: 161680 - protein, 177 aa, Zea Mays
MESANEERKEERVNGGSIAGWCRCCWFENSGGKISWREAMRTPRKGEIIVRLWRLSMGGSTSARAQYVASGFSRLCDHQNIMGSKVGLLRNARRWCMHDEAVVHYIDMIDQTTLGHRMIKKQFNKTPRAGWQIDPFGHSAVQAYLLGAELGFDSLHFARIDYQDKKKCKAGKGLEVI

SEQ ID NO: 161681 - protein, 151 aa, Zea Mays
MACIRHCLHKGRRSVVEDHLIVSHGRLACSSLAQYVASGFSRLCDHQNIMGSKVGLLRNARRWCMHDEAVVHYIDMIDQTTLGHRMIKKQFNKTPRAGWQIDPFGHSAVQAYLLGAEDDILMFDYNVEERVNDFVVVAIEQVNFQYCCHRL

SEQ ID NO: 161682 - protein, 299 aa, Zea Mays
MESANEERKEERVNGGSIAGWCRCCWFENSGGKISWREAMRTPRKGEIIVRLWRLSMGGSTSARAQYVASGFSRLCDHQNIMGSKVGLLRNARRWCMHDEAVVHYIDMIDQTTLGHRMIKKQFNKTPRAGWQIDPFGHSAVQAYLLGAEANFTRTNHIMWTMGDDFSYQYAESWFRNMDKLIYHVNKDGQVHALYSTPSIYTDAKHLSNVSWPVKYDEYFPYADSKNSYWTGYYTSRPTFKRYVRVLSGYYLAARQIEFLVGRRSSLGLFTTSLEDPMAIAQHHDAVSGTTNNTRQMTT

SEQ ID NO: 161683 - protein, 203 aa, Zea Mays
MHDEAVVHYIDMIDQTTLGHRMIKKQFNKTPRAGWQIDPFGHSAVQAYLLGAEANFTRTNHIMWTMGDDFSYQYAESWFRNMDKLIYHVNKDGQVHALYSTPSIYTDAKHLSNVSWPVKYDEYFPYADSKNSYWTGYYTSRPTFKRYVRVLSGYYLAARQIEFLVGRRSSLGLFTTSLEDPMAIAQHHDAVSGTTNNTRQMTT

SEQ ID NO: 161684 - protein, 143 aa, Zea Mays
MHQGRRSVVEDHLIVSHGRLACSSLAQYVASGFSRLCDHQNIMGSKVGLLRNARRWCMHDEAVVHYIDMIDQTTLGHRMIKKQFNKTPRAGWQIDPFGHSAVQAYLLGAEVTTINIIFGMKPFFYQNQYDKLLHFSKQKIQFS

SEQ ID NO: 161685 - protein, 161 aa, Zea Mays
MACIRHCLHKGRRSVVEDHLIVSHGRLACSSLAQYVASGFSRLCDHQNIMGSKVGLLRNARRWCMHDEAVVHYIDMIDQTTLGHRMIKKQFNKTPRAGWQIDPFGHSAVQAYLLGAEANFTRTNHIMWTMGDDFSYQYAESWFRNMDKLIYHVNKVLLILN

SEQ ID NO: 161686 - protein, 183 aa, Zea Mays
MESANEERKEERVNGGSIAGWCRCCWFENSGGKISWREAMRTPRKGEIIVRLWRLSMGGSTSARAQYVASGFSRLCDHQNIMGSKVGLLRNARRWCMHDEAVVHYIDMIDQTTLGHRMIKKQFNKTPRAGWQIDPFGHSAVQAYLLGAEDDILMFDYNVEERVNDFVVVAIEQVNFQYCCHRL

SEQ ID NO: 161687 - protein, 229 aa, Zea Mays
MRSPHCLFRRAAPPDFISLIYSIHPCCLGRRLVCTLQSHFPTITFSPHLLLLLLPFFLPPLFLYLNSARVWCVSQASPHPKSDRRRERERGNNGEGRAEQAPVHDQEVALVEPHRLPRPVAIISPRRRHLRRRALRLVPRRGRGAQGPPPGLRRQVAPPVPRRRGARGPPAIPDPRPPHRRHHRGSGSRHRRRLRGRPLRAPPLDAGERRPAAGVPRRAGRLLRLLSQC

SEQ ID NO: 161688 - protein, 53 aa, Zea Mays
MPPVGCAATVTQAPLDVGQLGGRTTPDRRSSSVWTRLDDGVPIHSIESEPLIR

SEQ ID NO: 161689 - protein, 157 aa, Zea Mays
MKLRHSDKELEKSLKATCEEFIMSITKLVVDPMLSFVTKVTAVKVALSSGSQGQKLDSVLAKPLKTQAFASPDKVAELVQKVAAAIQQDLPKVMTKMRLYLQNPSTRMILFKPIKTNIVEAHIQLHSLLKSEYSSEEMQSIGMLPIPDLQSQLDSLL

SEQ ID NO: 161690 - protein, 135 aa, Zea Mays
MSITKLVVDPMLSFVTKVTAVKVALSSGSQGQKLDSVLAKPLKTQAFASPDKVAELVQKVAAAIQQDLPKVMTKMRLYLQNPSTRMILFKPIKTNIVEAHIQLHSLLKSEYSSEEMQSIGMLPIPDLQSQLDSLL

SEQ ID NO: 161691 - protein, 608 aa, Zea Mays
MRGQEEIKSHSHHSWKQVSSSFYSQNMNIGNEQFLPLLKRLDDCISYVENNPQYAESAVYLVKFRQLQSRALGMIRSHVLSILKGASSQVQAAIRSSDSGKNIVTEGVEASLIYVRFKAAASELKPILGEIESRSSRKEYAQILSECHSLFCEQRLYLVRGMVQQRILEFARKEALPSLTRSGCAYLMEACQFEHQLFAHFFPASAADVSSMAPLMDPLCTYLYDTLRPRLIYEGNIDSLCELVDILKVEVLGEQLSRRGESVAGLRPILQRILADVHERLAFCARTHIREEIANFRPSVEDLDYPGKLERPVDMSSSATVGDNSDIYITWYRPLEKTVSCLSKLYRCLEPSVFTGLAQEAVEVCSTSLQNASRVISKKATPMDGQLFLIKHLLILREQIAPFDIEFSVTHKELDFSHLLDHLRRILRGQVSLFDWSRSTSLARTFSPRVLENQIDARKELEKSLKATCEEFIMSITKLVVDPMLSFVTKVTAVKVALSSGSQGQKLDSVLAKPLKTQAFASPDKVAELVQKVAAAIQQDLPKVMTKMRLYLQNPSTRMILFKPIKTNIVEAHIQLHSLLKSEYSSEEMQSIGMLPIPDLQSQLDSLL

SEQ ID NO: 161692 - protein, 457 aa, Zea Mays
MTGKKAPVPPPPPPQAPKPPGVVPPPPPPSSKISNAPAPPPLLGRGRGNTTGPTKGRGIGLAQQSNPPKKASLKPLHWVKVTRAMQGSLWADAQKQGNQARSPDIDLSELESLFSTAVVTSTSEKGATRRGSAINKPEIVHLVDMRRANNCEIMLTKIKMPLPDMINAILALDTSVLDNDQVENLIKFCPTKEEIEMLKGYNGNKEMLGKCEQFFLELMKVPRVEAKLRVFAFRITFSTQVDELRTNLTTINDATKEVKESLKLRQIMKTILTLGNALNQGTARGSAVGFRLDSLLKLSDTRSRNNKMTLMHYLCKLLAEKMPELLDFDKDLIYLEAASKIQLKLLAEEMQAINKGLEKVEQELAASESDGAISVGFRKALKSFLDAAEAEVRSLISLYAEVYFGEDPARCPFEQVTSILVIFVNMFKKSRDENARNAEAEKKKLEKEKEKASVSAK

SEQ ID NO: 161693 - protein, 259 aa, Zea Mays
MTGKKAPVPPPPPPQAPKPPGVVPPPPPPSSKISNAPAPPPLLGRGRGNTTGPTKGRGIGLAQQSNPPKKASLKPLHWVKVTRAMQGSLWADAQKQGNQARSPDIDLSELESLFSTAVVTSTSEKGATRRGSAINKPEIVHLVDMRRANNCEIMLTKIKMPLPDMINAILALDTSVLDNDQVENLIKFCPTKEEIEMLKGYNGNKEMLGKCEQFFLELMKVPRVEAKLRVFAFRITFSTQVDELRTNLTTINDATKENL

SEQ ID NO: 161694 - protein, 242 aa, Zea Mays
MTGKKAPVPPPPPPQAPKPPGVVPPPPPPSSKISNAPAPPPLLGRGRGNTTGPTKGRGIGLAQQSNPPKKASLKPLHWVKVTRAMQGSLWADAQKQGNQARSPDIDLSELESLFSTAVVTSTSEKGATRRGSAINKPEIVHLVDMRRANNCEIMLTKIKMPLPDMINAILALDTSVLDNDQVENLIKFCPTKEEIEMLKGYNGNKEMLGKCEQFFLELMKVPRVEAKLRVFAFRITFSTQMN

SEQ ID NO: 161695 - protein, 242 aa, Zea Mays
MTGKKAPVPPPPPPQAPKPPGVVPPPPPPSSKISNAPAPPPLLGRGRGNTTGPTKGRGIGLAQQSNPPKKASLKPLHWVKVTRAMQGSLWADAQKQGNQARSPDIDLSELESLFSTAVVTSTSEKGATRRGSAINKPEIVHLVDMRRANNCEIMLTKIKMPLPDMINAILALDTSVLDNDQVENLIKFCPTKEEIEMLKGYNGNKEMLGKCEQFFLELMKVPRVEAKLRVFAFRITFSTQVW

SEQ ID NO: 161696 - protein, 248 aa, Zea Mays
MKVPRVEAKLRVFAFRITFSTQVDELRTNLTTINDATKEVKESLKLRQIMKTILTLGNALNQGTARGSAVGFRLDSLLKLSDTRSRNNKMTLMHYLCKLLAEKMPELLDFDKDLIYLEAASKIQLKLLAEEMQAINKGLEKVEQELAASESDGAISVGFRKALKSFLDAAEAEVRSLISLYAEVGRNADSLAQYFGEDPARCPFEQVTSILVIFVNMFKKSRDENARNAEAEKKKLEKEKEKASVSAK

SEQ ID NO: 161697 - protein, 325 aa, Zea Mays
MTGKKAPVPPPPPPQAPKPPGVVPPPPPPSSKISNAPAPPPLLGRGRGNTTGPTKGRGIGLAQQSNPPKKASLKPLHWVKVTRAMQGSLWADAQKQGNQARSPDIDLSELESLFSTAVVTSTSEKGATRRGSAINKPEIVHLVDMRRANNCEIMLTKIKMPLPDMINAILALDTSVLDNDQVENLIKFCPTKEEIEMLKGYNGNKEMLGKCEQFFLELMKVPRVEAKLRVFAFRITFSTQVDELRTNLTTINDATKEVKESLKLRQIMKTILTLGNALNQGTARGSAVGFRLDSLLKLSDTRSRNNKMTLMHYLCKFHGKPTLLF

SEQ ID NO: 161698 - protein, 253 aa, Zea Mays
MSLLSRFFYKRPPDGLLEFLDRIYVFDSCFSTEVLPQGMYPVYLIGILTELHEEHVESSFLAINFRDGDKRSQLADILREYNIPVIDYPRHFEGCPVLPLSLIQHFLRVCEHWLSSGTNQNIILLHCERGAWPLLAFLLSCLLIYKKLNSAEHKTLDIIYREAPKGFLQLFSALNPMPSQLRYMQYVARRNISPQWPPMERSLSLDCLILRAIPSFDSDNGCRPLVRIFGRNLLGKFSSMTNMTFSMPKKKSL

SEQ ID NO: 161699 - protein, 215 aa, Zea Mays
MYPVYLIGILTELHEEHVESSFLAINFRDGDKRSQLADILREYNIPVIDYPRHFEGCPVLPLSLIQHFLRVCEHWLSSGTNQNIILLHCERGAWPLLAFLLSCLLIYKKLNSAEHKTLDIIYREAPKGFLQLFSALNPMPSQLRYMQYVARRNISPQWPPMERSLSLDCLILRAIPSFDSDNGCRPLVRIFGRNLLGKFSSMTNMTFSMPKKKSL

SEQ ID NO: 161700 - protein, 183 aa, Zea Mays
MELTRLSDTSKLDRLSTPDAFNMCRIARPEPGCLMLGGTVSKRCSGPGPVGKAIKLNEEKTEALQLEKACVVASLIQVINTQKASGVRRRLYYGPVPIMGRTNLDAGTDLVAKTQKYPLSNFKDDMLHFRKKLAAILLFSDINKRKGCPLYKYDKEVDAGSSSDVQILDSPTNPKKMKLLCVS

SEQ ID NO: 161701 - protein, 181 aa, Zea Mays
MLYLFGEYVLSADAKGNVFMWAFRGAEPNIEPVGSISLGDKFTPTCIMHPDTYLNKVIVGSEEGFLQLWNISTKKKLYDFNGWNSPVRCCVSSPVLDVVAVGCSDGSVHVHNMIAKVAVVFHDVNVAHSSHQYVATGMPTKAALKISVETPVDCATVVVQGVLNADAESEKLWKKKDVIQK

SEQ ID NO: 161702 - protein, 200 aa, Zea Mays
MLYLFGEYVLSADAKGNVFMWAFRGAEPNIEPVGSISLGDKFTPTCIMHPDTYLNKVIVGSEEGFLQLWNISTKKKLYDFNGWNSPVRCCVSSPVLDVVAVGCSDGSVHVHNVRYDEELMSFNHQIRGAVTALSFRTVVFHDVNVAHSSHQYVATGMPTKAALKISVETPVDCATVVVQGVLNADAESEKLWKKKDVIQK

SEQ ID NO: 161703 - protein, 323 aa, Zea Mays
MLYLFGEYVLSADAKGNVFMWAFRGAEPNIEPVGSISLGDKFTPTCIMHPDTYLNKVIVGSEEGFLQLWNISTKKKLYDFNGWNSPVRCCVSSPVLDVVAVGCSDGSVHVHNMIAKVAVVFHDVNVAHSSHQYVATGMPTKAALKISVETPVDCATVVVQGVLNADAESEKLWKKKDVIQKFGRDWKKIEEHVGTKTTVQIRSHAQKYFLKVQKLGLAAGLPPMYPRHHFAMQQQQQSSVAGGSSAAAMPLLHGRQPTCASVAMPGLAEPDAVAHHGSIGWSSPSVVVPAASSAARMQGLDLEWATDASVLGAAAAARVNADA

SEQ ID NO: 161704 - protein, 221 aa, Zea Mays
MFGRDWKKIEEHVGTKTTVQIRSHAQKYFLKVQKLGLAAGLPPMYPRHHFAMQQQQQSSVAGGSSAAAMPLLHGRQPTCASVAMPGLAEPDAVAHHGSIGWSSPSVVVPAASSAASGSQFIGAPSLCDTSIDWAGGGGGSGSPKDVSFAQVYRFVGDMFDADAPVPVEAHLQKLKEMDNITTKTVLLVLRNLENNLSAPQFEPVRRLLSMYDPTRALFGQL

SEQ ID NO: 161705 - protein, 569 aa, Zea Mays
MNLTIRHMAQINIFIRFFYLHPQSRPHGFDRQMPFASWWFLLLSGHLEATMLQKLQLRREAYQFYHQEPISQGSGVLLDLLAFLFFGLLKQPHQNSLILHAFTDLVCSYVRVNLLLSSKVNRQGNISRMADMYLTGRSLHAKNNNVRATEFTIKQGWLHTGDIGYFDEGGQLFVVDRLKELIKYKGFQIAPAELEGLLLSHLEIMDAVVIPLPNAKAGEVPIAYIVRSPDSSLTEVDVQKFIEKQVTTTSPTGTHKLANPKGFSLHFSGSDIGGGYELYVDEAKPRGDDQRGGGRSGGRSGGRFGDRSGGRRGGGRFGERSGAGMVAADSMADAVEVELDGDVYITGNGSLVLLSGASLTCEKYGCVISANFLGEVRLSRGVRVTAGRVSLVATNITVADTVVVNTSALAGDPPDQTSGVPTGTHGNGGEHGGRGASCFVKQGQTQEDSWGGDAYAWSDLEHPWSYGSKGGSTRVEKDYGGAGGGIVWLFAEDLVMNGIVLANGGDSNEKGGGGSGGSIFIRAASIDLRCGNASLVNQAEFGKQLPIGEDQQYKLELDVMMRNHFVCLK

SEQ ID NO: 161706 - protein, 717 aa, Zea Mays
MNLTIRHMAQINIFIRFFYLHPQSRPHGFDRQMPFASWWFLLLSGHLEATMLQKLQLRREAYQFYHQEPISQGSGVLLDLLAFLFFGLLKQPHQNSLILHAFTDLVCSYVRVNLLLSSKVNRQGNISRMADMYLTGRSLHAKNNNVRATEFTIKQGWLHTGDIGYFDEGGQLFVVDRLKELIKYKGFQIAPAELEGLLLSHLEIMDAVVIPLPNAKAGEVPIAYIVRSPDSSLTEVDVQKFIEKQVTTTSPTGTHKLANPKGFSLHFSGSDIGGGYELYVDEAKPRGDDQRGGGRSGGRSGGRFGDRSGGRRGGGRFGERSGAGMVAADSMADAVEVELDGDVYITGNGSLVLLSGASLTCEKYGCVISANFLGEVRLSRGVRVTAGRVSLVATNITVADTVVVNTSALAGDPPDQTSGVPTGTHGNGGEHGGRGASCFVKQGQTQEDSWGGDAYAWSDLEHPWSYGSKGGSTRVEKDYGGAGGGIVWLFAEDLVMNGIVLANGGDSNEKGGGGSGGSIFIRAASIDLRCGNASLVNQAEFGKQLPIGEDQQYKLVATWSRHEEKVNMLYLFGEYVLSADAKGNVFMWAFRGAEPNIEPVGSISLGDKFTPTCIMHPDTYLNKVIVGSEEGFLQLWNISTKKKLYDFNGWNSPVRCCVSSPVLDVVAVGCSDGSVHVHNVRYDEELMSFNHQIRGAVTALSFRTGDAIVYCKMKKKL

SEQ ID NO: 161707 - protein, 85 aa, Zea Mays
MRQGQLCGCAAAQSRPKCSTDITSRRGRRVSFLDTSHRPSLMEWPPIAADHCAHQGQEGEASERGSSIVRPRHWWRIGTEHSKLV

SEQ ID NO: 161708 - protein, 818 aa, Zea Mays
MLLPIVSQNSLSGPIPPEIGNCQSLQWLELDANQLDGTVPEEFANLRSLSKLFLFENRLMGDFPENIWSIQTLESVLLYSNRFTGKLPSVLAELKFLKNITLFDNFFTGVIPQELGVNSPLVQIDFTNNSFVGSIPPNICSRKALRILDLGFNHLNGSIPSSVVDCPSLKRVILQNNNLNGSIPQFVNCANLSYMDLSHNSLSGNIPASFSRCVNITEINWSENKLFGAIPPEIGNLVNLKRLDLSHNILHGSIPVQISSCSKLYSLDLSFNSLNGSALRTVSNLKFLTQLRLQENRFSGGLPDSLSQLEMLIELQLGGNILGGSIPSSLGQLVKLGTALNLSSNGLMGDIPTQLGNLVELQNLDFSFNNLTGGLATLRSLGFLQALNVSYNQFSGPVPDNLLKFLSSTPYSFDGNPGLCISCSTSGSSCMGANVLKPCGGSKKRGVHGQLKIVLIVLGSLFVGGVLVLVLCCILLKSRDWKKNKVSNMFEGSSSKLNEVTEATENFDDKYIIGTGAHGTVYKATLRSGDVYAIKKLAISAHKGSYKSMVRELKTLGEIKHRNLIKLKEFWLRSDNGFILYDFMEKGSLHDILHVIQPAPALDWCVRYDIALGTAHGLAYLHDDCRPAIIHRDIKPRNILLDKDMVPHISDFGIAKHMDQSSTTAPQTTGIVGTIGYMAPELAFSTKSSMESDVYSYGVVLLELLTRRTAVDPLFPDSADIVGWVSSVLDGTDKIEAVCDPALMEEVFGTVEMEEVRKVLSVALRCAAREVSQRPSMTAVVKELTDARPASASSGSRSLSKSREGKPGLQSSSSAYWQ

SEQ ID NO: 161709 - protein, 73 aa, Zea Mays
MSSAPLSSWHTTRLTPATLATGLDPSRPLSRYKHWVVAEILRRAKVYVPPAATASSQSSEHNSKSQKAGVATK

SEQ ID NO: 161710 - protein, 123 aa, Zea Mays
MSVPEFAVNPLSQRLLRMLDGLNFKEFVAFLSAFSPRTSLQEKIEFIFRVYDTDCNGKVAFDDILSILRDLTGSFMTEQQRQKVLTHVLEEAGYTKNSHFTLPDFMKIIGNSELKMEVEVPID

SEQ ID NO: 161711 - protein, 159 aa, Zea Mays
MGSTSSMLTQYDIEEVQDHCNHAFSQQEIVSLYHRFCQLDRNGGGFVSADEFMSVPEFAVNPLSQRLLRMLDGLNFKEFVAFLSAFSPRTSLQEKIEFIFRVYDTDCNGKVAFDDILSILRDLTGSFMTEQQRQKVLTHVLEEAGYTKNSHFTLPDFMK

SEQ ID NO: 161712 - protein, 169 aa, Zea Mays
MGSTSSMLTQYDIEEVQDHCNHAFSQQEIVSLYHRFCQLDRNGGGFVSADEFMSVPEFAVNPLSQRLLRMLDGLNFKEFVAFLSAFSPRTSLQEKIEFIFRVYDTDCNGKVAFDDILSILRDLTGSFMTEQQRQKVLTHVLEEAGYTKNSHFTLPDFMKLEGSTIFSLT

SEQ ID NO: 161713 - protein, 76 aa, Zea Mays
MGGPEHTLRLGVFIGMVRLRQQSKWSRTRRVVSLKESYGICHGKSRKLTTNGRRTHCSCSPRLLQPGLPAAVESGS

SEQ ID NO: 161714 - protein, 185 aa, Zea Mays
MALARRLLRLTPYLGTLSLPPPNSHLLRNRTYISDMRRSAFVDRLLRSVRSEISFLDNSAPPPPPPPPKPFTIEDRPGEQWARLRRVFPAAEGEEEEVRVDATLVDGALPPSRSGADTGGPPRMHISVKVEVSKAARPGVALTFECSAWPDEMEVRRVFPVRRGGPAPVQQYVGRQFRVWSSPSG

SEQ ID NO: 161715 - protein, 193 aa, Zea Mays
MALARRLLRLTPYLGTLSLPPPNSHLLRNRTYISDMRRSAFVDRLLRSVRSEISFLDNSAPPPPPPPPKPFTIEDRPGEQWARLRRVFPAAEGEEEEVRVDATLVDGALPPSRSGADTGGPPRMHISVKVEVSKAARPGVALTFECSAWPDEMEVRRVFPVRRGGPAPVQQYVGRQFRLSAIQHPFLHMFLYR

SEQ ID NO: 161716 - protein, 244 aa, Zea Mays
MGSCFSRLDAGVISSGRSVLERTRLVNISIVEFGAEQVNEKQNRKRKGVSTNLTSRKAQRGPTKAVSKEVERIDQFFYTYADNSSVMIDPEGIETLCSHLEVPHTDVRILMLAWKMGCEKQGYFTLDEWRAGLKALRADSISKLKKAFPELVQEVTRPSNFQDFYIYAFRYCLTEDKKKCIEIPVACELLNLVLGLQFRPQVDKLSNYLKAMDSTFLCGSTHPFFMKTRCSIDMLYLDCVSVPK

SEQ ID NO: 161717 - protein, 122 aa, Zea Mays
MDEWRAGLKALRADSISKLKKAFPELVQEVTRPSNFQDFYIYAFRYCLTEDKKKCIEIPVACELLNLVLGLQFRPQVDKLSNYLKYQNDYKINFPSLDNYDSDLAWPLILDNFVEWLRENKS

SEQ ID NO: 161718 - protein, 204 aa, Zea Mays
MRRASKKSLSSAATASAGPTKAVSKEVERIDQFFYTYADNSSVMIDPEGIETLCSHLEVPHTDVRILMLAWKMGCEKQGYFTLDEWRAGLKALRADSISKLKKAFPELVQEVTRPSNFQDFYIYAFRYCLTEDKKKCIEIPVACELLNLVLGLQFRPQVDKLSNYLKYQNDYKINFPSLDNYDSDLAWPLILDNFVEWLRENKS

SEQ ID NO: 161719 - protein, 75 aa, Zea Mays
MRRASKKSLSSAATASAGAEQVNEKQNRKRKGVSTNLTSRKAQRGPTKAVSKEVERIDQFFYTYADNSSVMIERH

SEQ ID NO: 161720 - protein, 238 aa, Zea Mays
MRRASKKSLSSAATASAGAEQVNEKQNRKRKGVSTNLTSRKAQRGPTKAVSKEVERIDQFFYTYADNSSVMIDPEGIETLCSHLEVPHTDVRILMLAWKMGCEKQGYFTLDEWRAGLKALRADSISKLKKAFPELVQEVTRPSNFQDFYIYAFRYCLTEDKKKCIEIPVACELLNLVLGLQFRPQYQNDYKVINMDQWMGFMRFCNEINFPSLDNYDSDLAWPLILDNFVEWLRENKS

SEQ ID NO: 161721 - protein, 231 aa, Zea Mays
MRRASKKSLSSAATASAGAEQVNEKQNRKRKGVSTNLTSRKAQRGPTKAVSKEVERIDQFFYTYADNSSVMIDPEGIETLCSHLEVPHTDVRILMLAWKMGCEKQGYFTLDEWRAGLKALRADSISKLKKAFPELVQEVTRPSNFQDFYIYAFRYCLTEDKKKCIEIPVACELLNLVLGLQFRPQVDKLSNYLKYQNDYKINFPSLDNYDSDLAWPLILDNFVEWLRENKS

SEQ ID NO: 161722 - protein, 147 aa, Zea Mays
MLEIAPSFWGRWKRRHSNFDKSIPFALLSQVAGIREYFAANPALTSELPSTVVKSKASETLIIQSEHEDSELGDEFYDALTRGESFEDGDSDDDDDATTPKLWLRQVNWLQILVQLLLTPATSMAPFIERKLKMIKILGVHLVGRSL

SEQ ID NO: 161723 - protein, 127 aa, Zea Mays
MLEIAPSFWGRWKRRHSNFDKSIPFALLSQVAGIREYFAANPALTSELPSTVVKSKASETLIIQSEHEDSELGDEFYDALTRGESFEDGDSDDDDDATTPKARKVKLKNVSWAIAGLALKTTKGCWR

SEQ ID NO: 161724 - protein, 204 aa, Zea Mays
MVLTSKVGNGANTLFWTDKWIHGQKIADLVPRLFDIIPKKITNRRTVQEALTDRRWIADITGSLSVGVLLDYLHLWNLISDFELLPDIEDKHTFSIAANGTYSAKAAYDGLFIGAVHFGHYERVWKTWAPSKCHFFLWLSVLNKCWTTDRLAKRGLDHPEKCPLCDQESESLDHILVSCVFAREFWFRLKVDVHFQTTKSGSYT

SEQ ID NO: 161725 - protein, 378 aa, Zea Mays
MSTLPWNVLIVLSLSASTWEIRTLYTSGSSSPKCVVTLMLEIAPSFWGRWKRRHSNFDKSIPFALLSQVAGIREYFAANPALTSELPSTVVKSKASETLIIQSEHEDSELGDEFYDALTRGESFEDGDSDDDDDATTPKARKVKLKNVSWAIAGLALKTTKALVETSELVTNSSPVTVDPSHFHGTLHRAKTQNDQNSWSAPGGEKFMIRGKTYLTDYHKSEAAKKLPFILVINLQVPAKPNYNLVMYYAAERPVNKDSLLGRFIDGTDAYRDARFKLIPSIVEGYWMVKRAVGTKACLLGKAVTCNYLRQDNFLEIDVDIGSSSVARSIIGLVLGYVTSIVVDLAILIEAKEEKELPEYILGTVRLNRVNPDSAVSI

SEQ ID NO: 161726 - protein, 108 aa, Zea Mays
MAKITMAPLQLLAAPILPKRSRGATKHGTALRRSRHVAGAGVEFNMQDLENRATKQVMRTLRVITENASINQQAVKDYENLFQHPLTQSHVEALAALFGWETPGNLFP

SEQ ID NO: 161727 - protein, 123 aa, Zea Mays
MLLRQSSDLQGQEIVNTNFGGDTGDAFEAHEWRYVRTFNGIRIFEDISITNPKVGKVILLKSVGVVSANPDTVFEVVLDLDKHKRYEWDMLTADLELVERIDGYYDVVYGTYEPKYLNWWKCQ

SEQ ID NO: 161728 - protein, 228 aa, Zea Mays
MVEELGRRRVNHGDVYVLRLYNRLNQTKKGEIACATPGEARKWIEAFEQAKQQADYDLMRGVNWNRLQNENEINLDGHRPRVRRYAQGLGKFVRIGKGPEMLLRQSSDLQGQEIVNTNFGGDTGDAFEAHEWRYVRTFNGIRIFEDISITNPKVRDIKVGKVILLKSVGVVSANPDTVFEVVLDLDKHKRYEWDMLTADLELVERIDGYYDVVYGTYEPKYLNWWKCQ

SEQ ID NO: 161729 - protein, 165 aa, Zea Mays
MRGVNWNRLQNENEINLDGHRPRVRRYAQGLGKFVRIGKGPEMLLRQSSDLQGQEIVNTNFGGDTGDAFEAHEWRYVRTFNGIRIFEDISITNPKVGKVILLKSVGVVSANPDTVFEVVLDLDKHKRYEWDMLTADLELVERIDGYYDVVYGTYEPKYLNWWKCQ

SEQ ID NO: 161730 - protein, 223 aa, Zea Mays
MVEELGRRRVNHGDVYVLRLYNRLNQTKKGEIACATPGEARKWIEAFEQAKQQADYDLMRGVNWNRLQNENEINLDGHRPRVRRYAQGLGKFVRIGKGPEMLLRQSSDLQGQEIVNTNFGGDTGDAFEAHEWRYVRTFNGIRIFEDISITNPKVGKVILLKSVGVVSANPDTVFEVVLDLDKHKRYEWDMLTADLELVERIDGYYDVVYGTYEPKYLNWWKCQ

SEQ ID NO: 161731 - protein, 326 aa, Zea Mays
MATAARLPTVPPSAAAGDVSEVELSEAGSPDLGSRSSGSGSGGSGRSTAEYSGWVYHLGVNSIGHEYCHLRFLVIRAKFVAMYKRDPHDNPGLEPIRKGAVSHTLMVEELGRRRVNHGDVYVLRLYNRLNQTKKGEIACATPGEARKWIEAFEQAKQQADYDLMRGVNWNRLQNENEINLDGHRPRVRRYAQGLGKFVRIGKEMLLRQSSDLQGQEIVNTNFGGDTGDAFEAHEWRYVRTFNGIRIFEDISITNPKVGKVILLKSVGVVSANPDTVFEVVLDLDKHKRYEWDMLTADLELVERIDGYYDVVYGTYEPKYLNWWKCQ

SEQ ID NO: 161732 - protein, 261 aa, Zea Mays
MATAARLPTVPPSAAAGDVSEVELSEAGSPDLGSRSSGSGSGGSGRSTAEYSGWVYHLGVNSIGHEYCHLRFLVIRAKFVAMYKRDPHDNPGLEPIRKGAVSHTLMVEELGRRRVNHGDVYVLRLYNRLNQTKKGEIACATPGEARKWIEAFEQAKQQADYDLMRGVNWNRLQNENEINLDGHRPRVRRYAQGLGKFVRIGKGPEMLLRQSSDLQGQEIVNTNFGGDTGDAFEAHEWRYVRTFNGWKGYTSEICWGGQCKP

SEQ ID NO: 161733 - protein, 328 aa, Zea Mays
MATAARLPTVPPSAAAGDVSEVELSEAGSPDLGSRSSGSGSGGSGRSTAEYSGWVYHLGVNSIGHEYCHLRFLVIRAKFVAMYKRDPHDNPGLEPIRKGAVSHTLMVEELGRRRVNHGDVYVLRLYNRLNQTKKGEIACATPGEARKWIEAFEQAKQQADYDLMRGVNWNRLQNENEINLDGHRPRVRRYAQGLGKFVRIGKGPEMLLRQSSDLQGQEIVNTNFGGDTGDAFEAHEWRYVRTFNGIRIFEDISITNPKVGKVILLKSVGVVSANPDTVFEVVLDLDKHKRYEWDMLTADLELVERIDGYYDVVYGTYEPKYLNWWKCQ

SEQ ID NO: 161734 - protein, 329 aa, Zea Mays
MATAARLPTVPPSAAAGDVSEVELSEAGSPDLGSRSSGSGSGGSGRSTAEYSGWVYHLGVNSIGHEYCHLRFLVIRAKFVAMYKRDPHDNPGLEPIRKGAVSHTLMVEELGRRRVNHGDVYVLRLYNRLNQTKKGEIACATPGEARKWIEAFEQAKQQADYDLMRGVNWNRLQNENEINLDGHRPRVRRYAQGLGKFVRIGKGPEMLLRQSSDLQGQEIVNTNFGGDTGDAFEAHEWRYVRTFNGIRIFEDISITNPKVGKVILLKSVGVVSANPDTVFEVVLDLDKHKRYEWDMLTADLELVERIDGYYDVVYGTYEPKYLNWMQLKA

SEQ ID NO: 161735 - protein, 50 aa, Zea Mays
MYMSGYRSPEYLFIRYDHVDMTERTIICCAMEFSFSSDAYSYHTMYISRI

SEQ ID NO: 161736 - protein, 69 aa, Zea Mays
MNVWSGDRISTQKKQSAALTGVPFTQQPKRLPATGRVSSASSFRRRCDRIGQRLQFNSRSATRAEASSA

SEQ ID NO: 161737 - protein, 110 aa, Zea Mays
MNVWSAEAAPSDGAREQRLFFSSPLRQDRPAPSIQFKECDKSRGVVRLTPDRTPTALPVGCSRLPNKKRRTFHNRIQQRPAYRRIVAHASSILVRMRFSVAKCQQPCLVP

SEQ ID NO: 161738 - protein, 105 aa, Zea Mays
MTQSAARQTRDAAMGSEYRGERQAQRRTTRRRAQRRTTRRPAGIPGSRARGSWRFGEQITRELWRDRNTTTTLWTSREHRMRRHDWWRPVAKASELRRTQSGTRS

SEQ ID NO: 161739 - protein, 189 aa, Zea Mays
MTNTFRPFSDDIFRYGKEFNEPLKLQNGWLLWSAIGLFVAIVAIALAGAAMTFLNGETPQRETDSLVLLLPLIGSSNISTACLLGITGILAPILEETVFRGFLMVSLTMWFPTPYAVLMTAAVFAFAHFTPGEFPQLFVLGVVLGFSYAQTRNLLTPIAIHAVWNSGVILLLTFLQMQGYDIREILQAS

SEQ ID NO: 161740 - protein, 169 aa, Zea Mays
MASPSCFLFRPRPPLCSRRRRSSSRSLYLLSKQSLHRLPSPRTCRRPVAEQLVLRSLPPGNGRRMGATGFACYCSYDTENGLPTPSPDKGKSSDEWPILRRWDVPWEWPTISLTMVACAVSFLLTGIAEQSILEQLGFRAGETTLDEKAEILFLGQLYRSKFLSLLARR

SEQ ID NO: 161741 - protein, 163 aa, Zea Mays
MGATGFACYCSYDTENGLPTPSPDKGKSSDEWPILRRWDVPWEWPTISLTMVACAVSFLLTGIAEQSILEQLGFRAGETTLDEKAEILFLGQLSTTVVVLGVIFGMTNTFRPFSDDIFRYGKGLVLLRLCSFSCSFLYIGHTLVPFQRLPNLIRGLYKMLKCN

SEQ ID NO: 161742 - protein, 217 aa, Zea Mays
MRRPIARGEPKGLRKGYTHGLQQIMLWGLLGVIQTTPLGLLNLVTLVTGEPVPPKFSHMLKFGDVSYNLYSHSFLHLGLNVAYESLHDLLSSPGLRSMATHLISQAKYKDPCTPRGFTRIAGSAKLPVGVLEPKVEYRPFAHSAGNFSECRSAALTLLQKGNEGCTYHECRLGAAFVPELEGKFLATENFYHTSKVQFFLYRWGLSERGLNLNILHA

SEQ ID NO: 161743 - protein, 159 aa, Zea Mays
MLKFGDVSYNLYSHSFLHLGLNVAYESLHDLLSSPGLRSMATHLISQAKYKDPCTPRGFTRIAGSAKLPVGVLEPKVEYRPFAHSAGNFSECRSAALTLLQKGNEGCTYHECRLGAAFVPELEGKFLATENFYHTSKHILLLYCMIRLKCHWIIKGLML

SEQ ID NO: 161744 - protein, 495 aa, Zea Mays
MRRPIARGEPKVQTLALAPPSAAAPTKMGAHRRQPSSHRRVAGALTLLAASALALLLLASRRVPPTYGVIIDAGSTGSRVHVLAYRSTAGLPQLDWARMASMKATPGLSSFAADPRGAGLSLAPLLEFARRRVPRESWGETEVRLMATAGLRLLDSAVAESILQSCREVLRGSGFQFQDEWATVISGAEEGIYAWVAANYALGTLGGDPNDTTGIIELGGASIQVTLVTGEPVPPKFSHMLKFGDVSYNLYSHSFLHLGLNVAYESLHDLLSSPGLRSMATHLISQAKYKDPCTPRGFTRIAGSAKLPVGVLEPKVEYRPFAHSAGNFSECRSAALTLLQKGNEGCTYHECRLGAAFVPELEGKFLATENFYHTSKFFGLSSKPFLSDLMVAGEKFCHGDWSKIKNKIDVVNQIHGVPVDWALGAFIVQTTMNRTEYSDSSVSYLNSYDSPGLVPLLFIIVVVFTALSILRWRKPRLKTIYDMEKGRYIITRVSQ

SEQ ID NO: 161745 - protein, 398 aa, Zea Mays
MRRPIARGEPKVQTLALAPPSAAAPTKMGAHRRQPSSHRRVAGALTLLAASALALLLLASRRVPPTYGVIIDAGSTGSRVHVLAYRSTAGLPQLDWARMASMKATPGLSSFAADPRGAGLSLAPLLEFARRRVPRESWGETEVRLMATAGLRLLDSAVAESILQSCREVLRGSGFQFQDEWATVISGAEEGIYAWVAANYALGTLGGDPNDTTGIIELGGASIQVTLVTGEPVPPKFSHMLKFGDVSYNLYSHSFLHLGLNVAYESLHDLLSSPGLRSMATHLISQAKYKDPCTPRGFTRIAGSAKLPVGVLEPKVEYRPFAHSAGNFSECRSAALTLLQKGNEGCTYHECRLGAAFVPELEGKFLATENFYHTSKHILLLYCMIRLKCHWIIKGLML

SEQ ID NO: 161746 - protein, 265 aa, Zea Mays
MDLAVRAMLQGWKFLYVGDIKVKSELPSTFKAYRFQQHRWSCGPANLFKKMMVEILENKRVSLWSKIHLWYDFFFVGKVAAHTVTFIYYCFAIPVSVLFPEIQIPLWGVVYVPTVITLLKALGTPSSFHLVILWVLFENVMSLHRIKAAVSGLLDAGGRVNEWVVTEKLGDTSKAKPGTNGSDTAVKVIDVKLTEPLVPKLVKRRARFWERYHCSELFVGTCIILCGFYDLLFANKGYYIFLFLQGTAFLVVGFGYVGTLPPCTA

SEQ ID NO: 161747 - protein, 182 aa, Zea Mays
MASVTARAPVAALRPSSASLKSSSAFLGHSSRLGRTASPTRRSLKAEAKGEWLPGLPSPSYLDGSLAGDNGFDPLGLAEDPENLRWFVQAELVNGRWAMLGVAGMLIPEVLTKAGLINAPQWTSRTPAASTRTPSSRATACRRTSAATRAASSTRSTSRPRSRPRRRSSPTGGWRCWRSWAS

SEQ ID NO: 161748 - protein, 75 aa, Zea Mays
MDNRDDPTWILGTRLSVQLCIFHYNRMHLLLPIIHIIKYCSCSVLHSCPFLNRQLGNRVKMVFVDFLAGNTNVKM

SEQ ID NO: 161749 - protein, 324 aa, Zea Mays
MRSSRRCAACRGFLQGGEHGGGARSSRGTDQEHWRGEEIEEALCFLGVPRQQLGAGEPMACSSCPSLPSPPCSPDSARIWYYLAHRAVLDNTTTTTRHRCGAVGAICDAPLPLALTTEAHRSIRRGPARLKPTTRPCWGIAYCVKGGPEKELKAMQYLERRECEYDQKISIDFYKEGDPLKPAVMGVLVFVSTPDPIGNKYYLGPAPLQNMARQIATTNGSTGYNRDYLFSMEKALASISHEDDSIIELANKVRKVLNRTKETKITGRVNSSTTSRVSRWTMARSTARLAATTGLGEYITQVTILFVMSTTQCILWGTLLARRL

SEQ ID NO: 161750 - protein, 109 aa, Zea Mays
MLFLQQLSEGSCQNSIPTHKLPVVPCKPQKSPQLSDILWSRPCQHSSCLCRVRRDPFTGYNMSKISQLFLRKHTLLMLQEKLLFSELGQYPPNMFVVLLQTRTVDQYII

SEQ ID NO: 161751 - protein, 162 aa, Zea Mays
MRSSRRCAACRGFLQGGEHGGGARSSRGTDQEHWRGEEIEEALCFLGVPRQQLGAGEPMACSSCPSLPSPPCSPDSARIWYYLAHRAVLDNTTTTTRHRCGAVGAICDAPLPLALTTEAHRSIRRGPARLKPTTRPCWGIAYCVKGGPEKELKAMQYLERRE

SEQ ID NO: 161752 - protein, 110 aa, Zea Mays
MIFASAVLTELCPRIVDHRAHHLFDETLPRTAYVFDRSTRATGQPPAAARFVLIRELHPLGTEMTRALSTANCHAAMEMTHGRTSGLCADGSTYADPWTKIKTHMFETTA

SEQ ID NO: 161753 - protein, 261 aa, Zea Mays
MAEIPVIDLRAAVRALFDLPDDAKRRNADVITGSGYVAPSPTNPLYEAFGLLDAAVPTDVDAFCALLDAPPNIRETVKAYAEKMHDVIVGVARELASSLGLVEEHSFQDWPCQFRINRYNYTRETVGSSGVQTHTDSGFLTVLHEDECVGGLEVLDPGTGEFVPVDPVAGSFLVNIGDVGTAWSNGRLHNVKHRVRCVAPVPRISIAMFLLAPKDDSVSAPAAFVDADHPRRYKVFNYNDYRRLRLSTGEHAGEALARMAA

SEQ ID NO: 161754 - protein, 694 aa, Zea Mays
MANRCNGDSYDDSVINCSQVTVSKDVSSREASNDFTWLGASWKCQRSLKHYKSFCRRGITISVHSFVYIMGEEMKRLIAYVEDLYEDTNSCNMVKVQWFGKADEVGVLLPMDFDDREIFFSLGRQDLNVVCIDGLAAVLSAQHYEKFKSDTRYSLWQPYFCYRQIDNGEAKPFDVTQLQGYWSQEVLRTMFNATSCLKVRFKVPKSGPNSDGGLKRKRDAFNNDANRQKFICSGAFTSRFYGENIEHLCPGCHVEVLSQDSGIKIKSRVRYLELQDADETGNLEEWVLLTRIAKPDQLGVRFLGRPMVRPQHVEESKASCFDVGAIVDAWWHGGWWEGIVLCQGGRGRLQVYFPGEKRITEFGEDELRYSLEWVGNKWNPLKGRKDIAHKLTSTADRGSEYLIGKQDHLNFDVLLKPEPQLEGLQYDKRGIEKSSVTTISRDQKRVLADLTNDLKLDSLRWRPRKRSRRSGSRKQSDTSSGSSSGDMDLSSPGPSGFCQLNLVPDDETCKSSGEQPFMGVPVQAPKSDCLPLHAPKFRAYAIQPTDQPSMRGETSAFSVVRALATASLVAEPSSRRASSSLATKLGEKRSWVGGSGGGPLRALRSEEEGRVKRATEVAAVEAVPRRRIAIAKCLRCPPPSFKVVGDKRKRSSSPPSSSSSIRSSALDLSRERYDLRFRLRICSIQFALYFVRFF

SEQ ID NO: 161755 - protein, 437 aa, Zea Mays
MDEVATAALAAARGRWTQWEEVVVSNDRGSRLVHYYLRGNGEAKELAVVGRERSPRHMSYAVQGRFLRALAAAAGAVAVASSPSRSPLAAAVADGGAPRRWRSRREVVEWLSSLVSDFDDFERGLARLVLFLARFGVTFCVEIALVLGPIEGGSCSGSLLFVFGAFYAVEHHSSLIWPEEPPCLAIFGYSYGSSMANRCNGDSYDDSVINCSQVTVSKDVSSREASNDFTWLGASWKCQRSLKHYKSFCRRGITISVHSFVYIMGEEMKRLIAYVEDLYEDTNSCNMVKVQWFGKADEVGVLLPMDFDDREIFFSLGRQDLNVVCIDGLAAVLSAQHYEKFKSDTRYSLWQPYFCYRQIDNGEAKPFDVTQLQGYWSQEVLRTMFNATSCLKVRFKVPKSGPNSDGGLKRKRDAFNNDANRQKFICSGAFTSRFYDV

SEQ ID NO: 161756 - protein, 505 aa, Zea Mays
MFNATSCLKVRFKVPKSGPNSDGGLKRKRDAFNNDANRQKFICSGAFTSRFYGENIEHLCPGCHVEVLSQDSGIKIKSRVRYLELQDADETGNLEEWVLLTRIAKPDQLGVRFLGRPMVRPQHVEESKASCFDVGAIVDAWWHGGWWEGIVLCQGGRGRLQVYFPGEKRITEFGEDELRYSLEWVGNKWNPLKGRKDIAHKLTSTADRGSEYLIGKQDHLNFDVLLKPEPQLEGLQYDKRGIEKSSVTTISRDQKRVLADLTNDLKLDSLRWRPRKRSRRSGSRKQSDTSSGSSSGDMDLSSPGPSGFCQLNLVPDDETCKSSGEQPFMGVPVQAPKSDCLPLHAPKFRAYAIQPTDQPSMRGETSAFSVVRALATASLVAEPSSRRASSSLATKLGEKRSWVGGSGGGPLRALRSEEEGRVKRATEVAAVEAVPRRRIAIAKCLRCPPPSFKVVGDKRKRSSSPPSSSSSIRSSALDLSRERYDLRFRLRICSIQFALYFVRFF

SEQ ID NO: 161757 - protein, 91 aa, Zea Mays
MDVASSVECYIKEHNVPSEVALARINSLVEDAWKTINQAPFKYPALFPVVQRVTSLAKSMTLLFLDKRDAYTYSKDFQTTLETHFVRHIPL

SEQ ID NO: 161758 - protein, 126 aa, Zea Mays
MYLAEFKTGPERKESAESTMMAYKAAQDIALAELAPTHPIRLGLALNFSVFYYEILNSPDKACNLAKQAFDEAISQLDTLGEESYKDSTLIMQLLRDNLTLWTSDLTEDGADEGKEAPKGEAGDGQ

SEQ ID NO: 161759 - protein, 82 aa, Zea Mays
MKICQLQLTATRFSKQNNSGEDDELLSELKDKVAYKVIFLYANNLGTKNYDDVYYSGMQWRTSPLLPCMVLEQSSLSGYPWS

SEQ ID NO: 161760 - protein, 238 aa, Zea Mays
MELAATNNYEDMELQTRALTEPLPTSQQAYKDHHLYALEKWLHKNQIFHPKGPVLGFCKGHPVYPRSCVQTLQSRHGWLREGLQVRENELPAKVVTRPKRTFNAQSVQSSGNEDGLKPTLELYGEWQLEPLQLPHAVNGVVPKNERGQVDLWSDKCLPPGTVHLRLPRLFQVAKRLGIDYAPAMVGFDYRSGRCLPVFDGIVVCTEFRSAILEVCFYGRMFFFSIFETFHHAVIIIYT

SEQ ID NO: 161761 - protein, 456 aa, Zea Mays
MNQQTGDLGKLKQTSACKRSLYKTLSSIKSDHESSCASTSKDKSSSNQFPSTSSNNAEVLKRKGDVEFELQLEMALSATAAETQNNKLATHMNQLTVSLQDSSSPLKKLRQNVEALSSSSAVWSRSAGAPLYWAEVYCGGQASTGRWVHVDVVNNLIDAEQNVEASSAVCKKPLRYVIAFAGNGAKDVTRRYCLQWHRIAQGRVNSEWWDNVLAPLKQMELAATNNYEDMELQTRALTEPLPTSQQAYKDHHLYALEKWLHKNQIFHPKGPVLGFCKGHPVYPRSCVQTLQSRHGWLREGLQVRENELPAKVVTRPKRTFNAQSVQSSGNEDGLKPTLELYGEWQLEPLQLPHAVNGVVPKNERGQVDLWSDKCLPPGTVHLRLPRLFQVAKRLGIDYAPAMVGFDYRSGRCLPVFDGIVVCTEFRSAILEVCFYGRMFFFSIFETFHHAVIIIYT

SEQ ID NO: 161762 - protein, 122 aa, Zea Mays
MVRPRKPYAVESDLEDSSAEIEEEVPINMTRKSFERTGNKLWSAISGQRQRHAVDVAVHDEYFAALGNLHGVGLDPQLTVVKDLLHSVPALIFHHRLSPARCYSVVDDDARTYKSIFALQKA

SEQ ID NO: 161763 - protein, 53 aa, Zea Mays
MPYQTKVSCKSFMGSKLHAKAINHALLLPKVIHHVFVSAYKMHSPVSTLKCKF

SEQ ID NO: 161764 - protein, 223 aa, Zea Mays
MNRHVHTAYLHNVQSSDHYTIQNSIGRRDKRTRCRSSELVFMHLVSVKNRTAKTSMSSTVIHPDRPEGFFIQDARRNQLASVDMLLLHLAGRGIGLDCRARHADGMLRQVHALPCGEPDHPEEPNPTCNIGCVFSTLAQNAHEIEADPQTHKAKICFSLNKSQRAFMLQGKCFVRTDFSMLTSYILGITISMKFLKRIETEAIFAKGIPLYSPLGLIRLHGDR

SEQ ID NO: 161765 - protein, 59 aa, Zea Mays
MFEHCDHRAYECQYNCSTTVIRPALSCDVGDRFFSPLMGQCELFDHWLLCLHISVVGQD

SEQ ID NO: 161766 - protein, 102 aa, Zea Mays
MDIIIIISLVILLALGALFVIPKSQNKGKSKRNDLGAGTTSRSFTTEEISKHSTRKDCWIIIKDKVYDVTPYVEEHPGGDAILNNAGGDSTEGFFGRYAYLS

SEQ ID NO: 161767 - protein, 166 aa, Zea Mays
MVTTRENLSNPKGPMAAKKMKSSRRGFSIIGFIQKQMARVLSLDYQLDCLDYGNEKWQHADLDYETFKQLQSERGESILTFAIDMTLKSTKALVQPSNMPDGLNFWRSKLLWASRVLPMPLVGLLVITGLCLPVEKQDGFPELEALSRLDFGAALKIFLAKQLTSE

SEQ ID NO: 161768 - protein, 319 aa, Zea Mays
MLSTASVPSTSFAAAFLSSRARRRRRAPWLRSVAAAATSGVGDGEVERFATSSSITDYLRYRRPELGCAGGAGGGGLPGGELQTAVVRFKKRFPWSLLHPFLHVDLVSTVHIADKEYFDRLQRELEDYDCVLYEMVTTRENLSNPKGPMAAKKMKSSRRGFSIIGFIQKQMARVLSLDYQLDCLDYGNEKWQHADLDYETFKQLQSERGESILTFAIDMTLKSTKALVQPSNMPDGLNFWRSKLLWASRVLPMPLVGLLVITGLCLPVEKQDGFPELEALSRLDFGAALKIFLAKQLTSENQLSLGRGTELLPRRSRKQ

SEQ ID NO: 161769 - protein, 244 aa, Zea Mays
MDEWIRQAEVWVRQSESWIRQQPPEQIYVAATVVAVTILLLIVASYLKSSKPSTIVLSGLSGSGKTTIFYQLRDGSSHQGTVTSMEENSDTFVLHSEQERKGKVKPVHIVDVPGHARLKPKLDEVLPKAAGVVFIVDAQDFLSSMQAAAEYLYDILTKASVVKKRIPVLIFCNKTDKVTAHSKEFIKKQLEKELNKLRESRNAISSADISDEVQLGVPGEAFNFSQCQNKVAVAEGAGSTGMTR

SEQ ID NO: 161770 - protein, 265 aa, Zea Mays
MSDNPMNSIFVPMKSPTKQSLIETVGITDAGVFIEASSGFSQSDDSIHCHHGIMSAEIGQISTIPPKQRSLDQIQEYVRNKHSLPKEVFDGGFILEKIDGPLSTGSLVLADTDVDSNPSVSFNYFQHPQDLRRCVYGIQTIERILKTNHFANLTANGAGYPMETLLNLSVSANINLIPKHTDDTTSLEQFCRDTVTTIWHYHGGCHVGKVVDRHYRVIGISGLRVIDGSTLFSSPGTNPQATVLMMGRYMGVKILRERLGRAAGV

SEQ ID NO: 161771 - protein, 190 aa, Zea Mays
MMLGKRSGRPSPAARQHMRRTTSMTEFAAPHVLVDVAEEEEDEELQLLPAHAEATGEAAEQEDPYGWAIGGAAAAGRADWLAAYRARAAPALAGLRRNSADFSAAETAAFLRACGLCNRRLGPGRDTFMYRGDTAFCSLECRQQHITIEEWKEKCALATPPTAPASDPVVPLPPSGAGSDKPAQQRYAEF

SEQ ID NO: 161772 - protein, 144 aa, Zea Mays
MSSFSSLERTIARLRSRVNFVKTEDASTAFFHAQARFRTKKNFIHKLMVDEHLITSQEAKQQAMFLFYKDLIGKEVEQNFSLNLADFHKGNLELSHFDNPISLAEIKSAVLSLPKDKAPGPDGFTRRFYKCCWDIIKWDLLAVS

SEQ ID NO: 161773 - protein, 236 aa, Zea Mays
MAALGTAITPAAATTAPCCYNRHPRSHITARRNRVASARRLDLCASSSPAVTAPDIPDEALVEPLVAPAPETKLRKLACPICYYPLASSSDQLDDATSLECPTCKKCYPNKQDYWDLTVSVGSTEYSESMPVATELFRTPLVSFLYERGWRQNFIWGGFPGLEREFEMAKTYLKPTIGGTIVDASCGSGLFSRLFIKSGLYSLVVALDFSENMLKQCNQYIKQENISDEYAFGHYV

SEQ ID NO: 161774 - protein, 145 aa, Zea Mays
MAALGTAITPAAATTAPCCYNRHPRSHITARRNRVASARRLDLCASSSPAVTAPDIPDEALVEPLVAPAPETKLRKLACPICYYPLASSSDQLDDATSLECPTCKKCYPNKQDYWDLTVSVGSTEYSESMPVATELFSLKWQKLI

SEQ ID NO: 161775 - protein, 252 aa, Zea Mays
MAALGTAITPAAATTAPCCYNRHPRSHITARRNRVASARRLDLCASSSPAVTAPDIPDEALVEPLVAPAPETKLRKLACPICYYPLASSSDQLDDATSLECPTCKKCYPNKQDYWDLTVSVGSTEYSESMPVATELFRTPLVSFLYERGWRQNFIWGGFPGLEREFEMAKTYLKPTIGGTIVDASCGSGLFSRLFIKSGLYSLVVALDFSENMLKQCNQYIKQENISDEKTAPPCGSRGSTAPIEMRRNWLF

SEQ ID NO: 161776 - protein, 78 aa, Zea Mays
MRRTGQYRGISNENHHGARRQGQTRGRLILQFLVRHFIKQLAIDTTKLRCLSTMECVVELDILSFQGGQPLRSWRGHA

SEQ ID NO: 161777 - protein, 170 aa, Zea Mays
MRVALWRGLWSSWRSWRSQEASAKLLAGTRPQRKSERRRAAAWRPRRRGWRTGTRHNQKWANACRATSPVSVVGVDHKLRRRGGSKEKAIVDGGAEIAKDPLESGEIGLPQGVHVTAHLLDNVGNVGPGEGQILKCTGEAPVERPIVFKELHLSVDRHGARLAIEHANPL

SEQ ID NO: 161778 - protein, 171 aa, Zea Mays
MHPSAVSFDSGDGRRRGGAQMLLFGGGGSANSNGFFRGVPMAVLAMDDATRVGKRPFFTTHEELLEEEYYDEQAPEKKRRLTAEQVQLLERSFEEENKLEPERKTELARRLGMAPRQVAVWFQNRRARWKTKQLETDYDRLKAAYNALAADHQGLLADNDSLRAQVLEIKF

SEQ ID NO: 161779 - protein, 498 aa, Zea Mays
MWLHRCHLSLSAGMSRYPAPYPMIRPGFVPRPMPPPGVVPIQRPTIISGIRAIPPLVAPTARPPAPAVKLADKPPTAVYVGKIAPTVDSDFLLSLLRLCGSVKSWKRAQDPSNGKPKGFGFCEFESAEGILRATRLLNKLSIDGQELVININDATKEYLKKHVEGKKRAQEKEKETEDASGDGTTAVAENESSKPVPDELDETGDAGDKYREDNTDKFGIVTDEDSQTDKDVAEKISNMIEEWLKTRPPPPPSPVQPSADSSGVDKAKNDSDDKNAADADKRAANETERSETASPDKRKDREHDKDKRDKDLERHDRERERVRRDREKDHKHREADRLYRDRLKEWESREREREYQRYSEKEKERDRDHNRRREILKQEDESDDEDNRKRKRRSISSLEDRKRRRQREKEEDLADKIREEEEIAEARRLAVELQRQADEAAAAAAAAAEESASLMEIDGDDEKETDAQNKSAVVEADNISSFANGVGAVREIMVRKHV

SEQ ID NO: 161780 - protein, 734 aa, Zea Mays
MSRYPAPYPMIRPGFVPRPMPPPGVVPIQRPTIISGIRAIPPLVAPTARPPAPAVKLADKPPTAVYVGKIAPTVDSDFLLSLLRLCGSVKSWKRAQDPSNGKPKGFGFCEFESAEGILRATRLLNKLSIDGQELVININDATKEYLKKHVEGKKRAQEKEKETEDASGDGTTAVAENESSKPVPDELDETGDAGDKYREDNTDKFGIVTDEDSQTDKDVAEKISNMIEEWLKTRPPPPPSPVQPSADSSGVDKAKNDSDDKNAADADKRAANETERSETASPDKRKDREHDKDKRDKDLERHDRERERVRRDREKDHKHREADRLYRDRLKEWESREREREYQRYSEKEKERDRDHNRRREILKQEDESDDEDNRKRKRRSISSLEDRKRRRQREKEEDLADKIREEEEIAEARRLAVELQRQADEAAAAAAAAAEESASLMEIDGDDEKETDAQNKSAVVEADNISSFANGVGAGRLSKGNNGEETCMTPGQTADTKQNNNVPAKKLGFGLIGLGKRTSVPSVFAVEDDENNVDKSIRPLVPIDYSTEELQAVHANSSTGANVTAAAEFAKRISVSNSKEEKAEAEKDRNRRSSEARPNDERREKLHDREKDKPKSENKKILDAKQLIDMIPRTKEELFAYDINWAIYDKHELQERMRPWISKKIIEFLGEEESTLVDYIVSCTKDHVQAEKMLDLLQSIFDVEAEMFVLKMWRMLIFEIKKVESGLSGRAKS

SEQ ID NO: 161781 - protein, 754 aa, Zea Mays
MQVCYPVHEVERCHLSLSAGMSRYPAPYPMIRPGFVPRPMPPPGVVPIQRPTIISGIRAIPPLVAPTARPPAPAVKLADKPPTAVYVGKIAPTVDSDFLLSLLRLCGSVKSWKRAQDPSNGKPKGFGFCEFESAEGILRATRLLNKLSIDGQELVININDATKEYLKKHVEGKKRAQEKEKETEDASGDGTTAVAENESSKPVPDELDETGDAGDKYREDNTDKFGIVTDEDSQTDKDVAEKISNMIEEWLKTRPPPPPSPVQPSADSSGVDKAKNDSDDKNAADADKRAANETERSETASPDKRKDREHDKDKRDKDLERHDRERERVRRDREKDHKHREADRLYRDRLKEWESREREREYQRYSEKEKERDRDHNRRREILKQEDESDDEDNRKRKRRSISSLEDRKRRRQREKEEDLADKIREEEEIAEARRLAVELQRQADEAAAAAAAAAEESASLMEIDGDDEKETDAQNKSAVVEADNISSFANGVGAGRLSKGNNGEETCMTPGQTADTKQNNNVPAKKLGFGLIGLGKRTSVPSVFAVEDDENNVDKSIRPLVPIDYSTEELQAVHANSSTGANVTAAAEFAKRISVSNSKEEKAEAEKDRNRRSSEARPNDERREKLHDREKDKPKSENKKILDAKQLIDMIPRTKEELFAYDINWAIYDKHELQERMRPWISKKIIEFLGEEESTLVDYIVSCTKDHVQAEKMLDLLQSIFDVEAEMFVLKMWRMLIFEIKKVESGLSGRAKS

SEQ ID NO: 161782 - protein, 274 aa, Zea Mays
MLPPDVRVARDAQDLLVECCVEFINLLSSESNEVCSREEKKTIAPEHVIKALSDLGFREYIEEVYAAYEQHKLDTLDSPKAGKFTGIEMTEEEAVAEQQRMFAEARARMNNGAPKPKETEQEPPQQPQAQPQLQLHTEPQQPVQSQVQLHSPTQHSLQPQVQLHPQPQQLPQVQVHSQTQLHPQPQQPQVQVHPQLQQLPQLQAHSQPPQPQVQIHPQPQQPPQVQLQSSVQQTSQPQPQVHLYNHRGGSQAQLQPQLPGQLQTQGQTGPGIDS

SEQ ID NO: 161783 - protein, 253 aa, Zea Mays
MFKIIKEMLPPDVRVARDAQDLLVECCVEFINLLSSESNEVCSREEKKTIAPEHVIKALSDLGFREYIEEVYAAYEQHKLDTLDSPKAGKFTGIEMTEEEAVAEQQRMFAEARARMNNGAPKPKETEQEPPQQPQAQPQLQLHTEPQQPVQSQVQLHSPTQHSLQPQVQLHPQPQQLPQVQVHSQTQLHPQVQIHPQPQQPPQVQLQSSVQQTSQPQPQVHLYNHRGGSQAQLQPQLPGQLQTQGQTGPGIDS

SEQ ID NO: 161784 - protein, 388 aa, Zea Mays
MKVKRNSFSWRECAISVALSVGLITGAPTFGPPAYASSLEPVLPDVSVLISGPPIKDPGALLRYALPIDNKAIREVQKPLEDITDSLKVAGVRALDSVERNVRQASKALNNGRSLILAGLAEPKRANGEELLNKLAVGFEELQRIVEDRNRDAVAPKQKELLHVEEDMVDGFPFEIPEEYSNMPLLKGRATVDMKVKIKDNPNMEDCVFRIVLDGYNAPVTAGNFVDLVKRKFYDGMEIQRADGFVVQTGDPEGPAEGFIDPSTGKIRTVPLEIMVDGDKAPVYGETLEELGRYKAQTKLPFNAFGTMAMAREEFDDNSASSQVFWLLKESELTPSNANILDGRYAVFGYVTENEDYLADVKVGDVIESIQVVSGLDNLVNPSYKIVG

SEQ ID NO: 161785 - protein, 392 aa, Zea Mays
MKVKRNSFSWRECAISVALSVGLITGAPTFGPPAYASSLEPVLPDVSVLISGPPIKDPGALLRYALPIDNKAIREVQKPLEDITDSLKVAGVRALDSVERNVRQASKALNNGRSLILAGLAEPKRANGEELLNKLAVGFEELQRIVEDRNRDAVAPKQKELLQYVGTVEEDMVDGFPFEIPEEYSNMPLLKGRATVDMKVKIKDNPNMEDCVFRIVLDGYNAPVTAGNFVDLVKRKFYDGMEIQRADGFVVQTGDPEGPAEGFIDPSTGKIRTVPLEIMVDGDKAPVYGETLEELGRYKAQTKLPFNAFGTMAMAREEFDDNSASSQVFWLLKESELTPSNANILDGRYAVFGYVTENEDYLADVKVGDVIESIQVVSGLDNLVNPSYKIVG

SEQ ID NO: 161786 - protein, 210 aa, Zea Mays
MVDGFPFEIPEEYSNMPLLKGRATVDMKVKIKDNPNMEDCVFRIVLDGYNAPVTAGNFVDLVKRKFYDGMEIQREGPAEGFIDPSTGKIRTVPLEIMVDGDKAPVYGETLEELGRYKAQTKLPFNAFGTMAMAREEFDDNSASSQVFWLLKESELTPSNANILDGRYAVFGYVTENEDYLADVKVGDVIESIQVVSGLDNLVNPSYKIVG

SEQ ID NO: 161787 - protein, 422 aa, Zea Mays
MAAALASSRYCWSRPSLPPQPTRGRRSVTSCALSGREKRNSFSWRECAISVALSVGLITGAPTFGPPAYASSLEPVLPDVSVLISGPPIKDPGALLRYALPIDNKAIREVQKPLEDITDSLKVAGVRALDSVERNVRQASKALNNGRSLILAGLAEPKRANGEELLNKLAVGFEELQRIVEDRNRDAVAPKQKELLHVEEDMVDGFPFEIPEEYSNMPLLKGRATVDMKVKIKDNPNMEDCVFRIVLDGYNAPVTAGNFVDLVKRKFYDGMEIQRADGFVVQTGDPEGPAEGFIDPSTGKIRTVPLEIMVDGDKAPVYGETLEELGRYKAQTKLPFNAFGTMAMAREEFDDNSASSQVFWLLKESELTPSNANILDGRYAVFGYVTENEDYLADVKVGDVIESIQVVSGLDNLVNPSYKIVG

SEQ ID NO: 161788 - protein, 224 aa, Zea Mays
MAAALASSRYCWSRPSLPPQPTRGRRSVTSCALSGREKRNSFSWRECAISVALSVGLITGAPTFGPPAYASSLEPVLPDVSVLISGPPIKDPGALLRYALPIDNKAIREVQKPLEDITDSLKVAGVRALDSVERNVRQASKALNNGRSLILAGLAEPKRANGEELLNKLAVGFEELQRIVEDRNRDAVAPKQKELLQYVGTWLRSSWDIAFLQCRRRHGRWLSL

SEQ ID NO: 161789 - protein, 332 aa, Zea Mays
MAPHLLTPPALTVTGAAAPGRLGSAGSADPRTPRPRAPWPTFCSSPSRGRRELRKRKGLSVAAAAEVAEPGGPAGAMRLNEYMVAVDRPLGVRFALGVDGRVFVHSLRKGGNAEKSRIIMVGDTLKKAGADGEGLVTIKDLGDTETALRDKSGPCSLVLERPFAPFPIHQLHQNEDYHILFNRGRAAVASWNSAVWSTKMNESSTGDGKLGFAVFSPRLLSSQGWALLSNEKGGLNQSSTNLANRVSEIVGLYSDEDDDNAEWAHGSFPLEEYIKALDRAKGELYYNHSLGMQYSKITEQIFVGSCIQTEKDVKMLSETMASGYYCCSEFPK

SEQ ID NO: 161790 - protein, 322 aa, Zea Mays
MAPHLLTPPALTVTGAAAPGRLGSAGSADPRTPRPRAPWPTFCSSPSRGRRELRKRKGLSVAAAAEVAEPGGPAGAMRLNEYMVAVDRPLGVRFALGVDGRVFVHSLRKGGNAEKSRIIMVGDTLKKAGADGEGLVTIKDLGDTETALRDKSGPCSLVLERPFAPFPIHQLHQNEDYHILFNRGRAAVASWNSAVWSTKMNESSTGDGKLGFAVFSPRLLSSQGWALLSNEKGGLNQSSTNLANRVSEIVGLYSDEDDDNAEWAHGSFPLEEYIKALDRAKGELYYNHSLDNRTNICWVMYTNRERCEDVIRNYGFRVLLLF

SEQ ID NO: 161791 - protein, 397 aa, Zea Mays
MNESSTGDGKLGFAVFSPRLLSSQGWALLSNEKGGLNQSSTNLANRVSEIVGLYSDEDDDNAEWAHGSFPLEEYIKALDRAKGELYYNHSLGMQYSKITEQIFVGSCIQTEKDVKMLSETMGITAVLNFQSESERINWGINSEIINSSCRENNILMVNYPIREVDSLDLRKKLPFCVGLLLRLIRKNYRIYVTCTTGYDRSPACVISYLHWVQDTPLHIAHKFITGLHSCRPDRAAIVWATWDLIALVENGRHDGSPTHSVCFIWNSGREGEDVELVGDFTSNWKDKIRCSHKGGSRYEAEVRLRHGKYYYKFIVGGQWRHSTSLPTETDEHGNVNNVIRVGDIARIRPAPSQLHIKDPSVVKVIERALTEDERFLLAFAARRMAFAICPIRLSPKQ

SEQ ID NO: 161792 - protein, 289 aa, Zea Mays
MNESSTGDGKLGFAVFSPRLLSSQGWALLSNEKGGLNQSSTNLANRVSEIVGLYSDEDDDNAEWAHGSFPLEEYIKALDRAKGELYYNHSLGMQYSKITEQIFVGSCIQTEKDVKMLSETMGITAVLNFQSESERINWGINSEIINSSCRENNILMVNYPIREVDSLDLRKKLPFCVGLLLRLIRKNYRIYVTCTTGYDRSPACVISYLHWVQDTPLHIAHKFITGLHSCRPDRAAIVWATWDLIALVENGRHDGSPTHSVCFIWNSGREVSSFYTKKYYGRVSIWHKR

SEQ ID NO: 161793 - protein, 631 aa, Zea Mays
MPMDTDERPLVELASAAAATTLAASSTSSAPFPAPATPGFSRAVRCNAPASSLPADGGAGAQPAYPENAISTTKYTPASFVPKSLFEQFRRAANCFFLVVACVSFSPLAPYRAVSVLLPLVVVVSAAMAKEAVEDWRRKQQDIEVNNRKVEVYDGIQSFHETEWKKLRVGDIIKVKKDEFFPADLIFLSSSSCDGLCYVETMNLDGETNLKRKQALEVTMGLNDDHFHSFKAFIRCEDPNEKLYSFLGTLYYNGQQYSLSPEQVLLRDSKLRNTMYIYGTIIFTGHDTKVMQNAMEPPSKRSSVERRMDKIIYLLFVILFVIATFGSIVFGMRTKHEISPGSYAWYLRPDQANIFFDPNNASFAAFCHFLTSLMLYVCLVPISLYISIEIVKVLQSTFINQDQNMYCAESDKPARARTSNLNEELGQVHTILSDKTGTLTCNSMEFLKCSIAGVAYGSRPTEVETCYGEIVETNGSFGRKDTTEFKRSVKGFNFTDSHLMNGRWAKECSRDAIEMFFRVLAVCHTAIPVADGNSAGMPYEAESPDEAALVTAAREFGFEFYHRTQTTISVHEYDPVVGGKVDRTYKLLNILEFSSARKRMSVIVRTEEGRLFLFCKGADRLQCNIRKALQG

SEQ ID NO: 161794 - protein, 627 aa, Zea Mays
MPMDTDERPLVELASAAAATTLAASSTSSAPFPAPATPGFSRAVRCNAPASSLPADGGAGAQPAYPENAISTTKYTPASFVPKSLFEQFRRAANCFFLVVACVSFSPLAPYRAVSVLLPLVVVVSAAMAKEAVEDWRRKQQDIEVNNRKVEVYDGIQSFHETEWKKLRVGDIIKVKKDEFFPADLIFLSSSSCDGLCYVETMNLDGETNLKRKQALEVTMGLNDDHFHSFKAFIRCEDPNEKLYSFLGTLYYNGQQYSLSPEQVLLRDSKLRNTMYIYGTIIFTGHDTKVMQNAMEPPSKRSSVERRMDKIIYLLFVILFVIATFGSIVFGMRTKHEISPGSYAWYLRPDQANIFFDPNNASFAAFCHFLTSLMLYVCLVPISLYISIEIVKVLQSTFINQDQNMYCAESDKPARARTSNLNEELGQVHTILSDKTGTLTCNSMEFLKCSIAGVAYGSRPTEVETCYGEIVETNGSFGRKDTTEFKRSVKGFNFTDSHLMNGRWAKECSRDAIEMFFRVLAVCHTAIPVADGNSAGMPYEAESPDEAALVTAAREFGFEFYHRTQTTISVHEYDPVVGGKVDRTYKLLNILEFSSARKRMSVIVRTEEGRLFLFCKGADRFNNCFYM

SEQ ID NO: 161795 - protein, 1132 aa, Zea Mays
MPMDTDERPLVELASAAAATTLAASSTSSAPFPAPATPGFSRAVRCNAPASSLPADGGAGAQPAYPENAISTTKYTPASFVPKSLFEQFRRAANCFFLVVACVSFSPLAPYRAVSVLLPLVVVVSAAMAKEAVEDWRRKQQDIEVNNRKVEVYDGIQSFHETEWKKLRVGDIIKVKKDEFFPADLIFLSSSSCDGLCYVETMNLDGETNLKRKQALEVTMGLNDDHFHSFKAFIRCEDPNEKLYSFLGTLYYNGQQYSLSPEQVLLRDSKLRNTMYIYGTIIFTGHDTKVMQNAMEPPSKRSSVERRMDKIIYLLFVILFVIATFGSIVFGMRTKHEISPGSYAWYLRPDQANIFFDPNNASFAAFCHFLTSLMLYVCLVPISLYISIEIVKVLQSTFINQDQNMYCAESDKPARARTSNLNEELGQVHTILSDKTGTLTCNSMEFLKCSIAGVAYGSRPTEVETCYGEIVETNGSFGRKDTTEFKRSVKGFNFTDSHLMNGRWAKECSRDAIEMFFRVLAVCHTAIPVADGNSAGMPYEAESPDEAALVTAAREFGFEFYHRTQTTISVHEYDPVVGGKVDRTYKLLNILEFSSARKRMSVIVRTEEGRLFLFCKGADSVIFERLSKDNGTAHLTKTKCHIDEYSEDYSSAKNSVHTDHVAAVEKVSEDIEKDLVLLGATAVEDRLQNGVPECIYKLAQAGIKIWILTGDKLETAVNIGYACNLLRKEMEEIFITLENSSTSASEGSSGEGNKIATFEEIDRKLKDARGKISQKGTSTSFALIIDGNALTHALTGSLKNSFLDLAVNCASVLCCRVSPKQKALVTRLVKIRTSKTTLAIGDGANDVGMLQEADIGVGISGAEGMQAVMASDFAIAQFRFLERLLLVHGHWCYRRIAAMICYFFFKNITFGFTLFWFEAHAMFSAQPAYNDWFISFYNVAFTSLPVIALGVFDKDVSSHVCLEVPSLHQDGVNNVFFSWSRILSWMLNGMCCSIIIYFGSLNAILVQAVRQDGRVAGFDILGVTMYTCVVWTVNCQLALYISYFTWIQHFVIWGSILIWYTFLVIYGLFSPAISTTAYHVFVEACAPSPLYWLSTLMIVVTALIPFFVYKISRTLYYPQYHDQVQRANSKNW

SEQ ID NO: 161796 - protein, 599 aa, Zea Mays
MEILLVCLMKLSLLMKQLLLQLQESLALNFIIGHKQLYQCMSTILSLVERTYKLLNILEFSSARKRMSVIVRTEEGRLFLFCKGADSVIFERLSKDNGTAHLTKTKCHIDEYSEDYSSAKNSVHTDHVAAVEKVSEDIEKDLVLLGATAVEDRLQNGVPECIYKLAQAGIKIWILTGDKLETAVNIGYACNLLRKEMEEIFITLENSSTSASEGSSGEGNKIATFEEIDRKLKDARGKISQKGTSTSFALIIDGNALTHALTGSLKNSFLDLAVNCASVLCCRVSPKQKALVTRLVKIRTSKTTLAIGDGANDVGMLQEADIGVGISGAEGMQAVMASDFAIAQFRFLERLLLVHGHWCYRRIAAMICYFFFKNITFGFTLFWFEAHAMFSAQPAYNDWFISFYNVAFTSLPVIALGVFDKDVSSHVCLEVPSLHQDGVNNVFFSWSRILSWMLNGMCCSIIIYFGSLNAILVQAVRQDGRVAGFDILGVTMYTCVVWTVNCQLALYISYFTWIQHFVIWGSILIWYTFLVIYGLFSPAISTTAYHVFVEACAPSPLYWLSTLMIVVTALIPFFVYKISRTLYYPQYHDQVQRANSKNW

SEQ ID NO: 161797 - protein, 1153 aa, Zea Mays
MPMDTDERPLVELASAAAATTLAASSTSSAPFPAPATPGFSRAVRCNAPASSLPADGGAGAQPAYPENAISTTKYTPASFVPKSLFEQFRRAANCFFLVVACVSFSPLAPYRAVSVLLPLVVVVSAAMAKEAVEDWRRKQQDIEVNNRKVEVYDGIQSFHETEWKKLRVGDIIKVKKDEFFPADLIFLSSSSCDGLCYVETMNLDGETNLKRKQALEVTMGLNDDHFHSFKAFIRCEDPNEKLYSFLGTLYYNGQQYSLSPEQVLLRDSKLRNTMYIYGTIIFTGHDTKVMQNAMEPPSKRSSVERRMDKIIYLLFVILFVIATFGSIVFGMRTKHEISPGSYAWYLRPDQANIFFDPNNASFAAFCHFLTSLMLYVCLVPISLYISIEIVKVLQSTFINQDQNMYCAESDKPARARTSNLNEELGQVHTILSDKTGTLTCNSMEFLKCSIAGVAYGSRPTEVETCYGEIVETNGSFGRKDTTEFKRSVKGFNFTDSHLMNGRWAKECSRDAIEMFFRVLAVCHTAIPVADGNSAGMPYEAESPDEAALVTAAREFGFEFYHRTQTTISVHEYDPVVGGKVDRTYKLLNILEFSSARKRMSVIVRTEEGRLFLFCKGADSVIFERLSKDNGTAHLTKTKCHIDEYSEAGLRTLALAYCELTEEQYVVWNQDYSSAKNSVHTDHVAAVEKVSEDIEKDLVLLGATAVEDRLQNGVPECIYKLAQAGIKIWILTGDKLETAVNIGYACNLLRKEMEEIFITLENSSTSASEGSSGEGNKIATFEEIDRKLKDARGKISQKGTSTSFALIIDGNALTHALTGSLKNSFLDLAVNCASVLCCRVSPKQKVTRLVKIRTSKTTLAIGDGANDVGMLQEADIGVGISGAEGMQAVMASDFAIAQFRFLERLLLVHGHWCYRRIAAMICYFFFKNITFGFTLFWFEAHAMFSAQPAYNDWFISFYNVAFTSLPVIALGVFDKDVSSHVCLEVPSLHQDGVNNVFFSWSRILSWMLNGMCCSIIIYFGSLNAILVQAVRQDGRVAGFDILGVTMYTCVVWTVNCQLALYISYFTWIQHFVIWGSILIWYTFLVIYGLFSPAISTTAYHVFVEACAPSPLYWLSTLMIVVTALIPFFVYKISRTLYYPQYHDQVQRANSKNW

SEQ ID NO: 161798 - protein, 238 aa, Zea Mays
MQLEKGSLDLVLVPCGLVVMLSYHLLLLYRILRHPATTVIGYENHNKLAWVRRMVQATPDETGLALSVISSNISASTNLASLSIALGSLIGAWVSSTTKMFMTELVYGDRSQSTATVKYYVQASFLVTTLDSDVPATYVQHAVIRGGNFWSMGLRALYLATTLLMWVFGPIPMFACSVLMVLILHMLDTNSLPLHQHQFTVRKRQALTPTIATTTRQQTSPQNPMLSNPVLSPVTFFT

SEQ ID NO: 161799 - protein, 1118 aa, Zea Mays
MPLLNPTGSSGGTSRVPSSAARFSSSTSSTPPLVESSEVMPHSARPPGTGANFNRARDQRGTRRVFLRRPPPPLRRPPHVTANGHRGEGGSGGGGARRSAGEEAGGRYTRRGGVADREVAVSASADPVGRNAATVATGGEAPPPREEDGGGRGGVLVSKRPSAAPVLPPPKRRAVSVTRQFPPASRWTSAAPAPLAGADADGGLRTRYEGQRENRASDAFKKPAVARPLAGLKDGVGVGVMSRAVSPKAAGTRVLKKPCARDGAAPMSNTDRHDAGLVKSSAAHDRGRGARIDELRGKKGPVTGARFPPKPEIISTTRTLLPGHGKDGGCHSKVHRPLESGRAHGSSLADGRAVEIVAACTGTSAGAVQDGKLENGEVPSKKAWGSQVSSDAVLLDPASYRDVSARDFPGLSGNFGRKTLSWALVKDRKVMNKYAEVSGEGTVLGSKDMFTNQSTVKPDNVVQKFVTDAQHIPFSKGKKETVRERWVTTNGIQDSVELTKDRVMQAPMSADMCPMPMTHKKKAATTRDFFGHKRMVKAKALGHQQRMFASGSKSKRDDEVASNLKIHDIFREIVLNERNLELYLNSSSGLPSVRCQRQYRYMNADARSRFKMLCRMFEFVCRTLVQTMEQRSLKMRIDNEAAKVMKALPGFTKHGPIVGQVPGVEVGDEFLYRAQLAIAGLHSEYRRGISTTTYRNGMLIAISIVASGGYPDELGCSGELIYTGSGGKSAVKKKDEDQKLKCGNLALKNCIKTKTPVRVIHGFKCRNTDRGSHSGAKLIPKYTYDGLYLVVDFWMDGKPGSRVFKYKLKKIHGQPELPMHIAKRLKSFKSRPGLCMTDISQGKEATPICVINTVDDVQPGPFQYTTRIRYPFGLTEKHNQGCDCTNGCSDSESCACAVKNGGEIPFDLSGAILNEKSVIFECGSSCKCPPSCRNRVSQHDMKIPLEVFRTTKTGWGVRSLWSIPAGSFICEYIGEVQHQKAADKRRNNNYLFDVGLNYDDENVSSVLLSNVSGLNSSSSCSQAMEDVRFTIDASVYGNIGRFINHSCSPNLQAQNVLRDHGDKRMPHIMFFAAETIPPLQELTYDYNNSEIDRVQGVNRRMKSKVCQYSSSLCRRRFY

SEQ ID NO: 161800 - protein, 1088 aa, Zea Mays
MPLLNPTGSSGGTSRVPSSAARFSSSTSSTPPLVESSEVMPHSARPPGTGANFNRARDQRGTRRVFLRRPPPPLRRPPHVTANGHRGEGGSGGGGARRSAGEEAGGRYTRRGGVADREVAVSASADPVGRNAATVATGGEAPPPREEDGGGRGGVLVSKRPSAAPVLPPPKRRAVSVTRQFPPASRWTSAAPAPLAGADADGGLRTRYEGQRENRASDAFKKPAVARPLAGLKDGVGVGVMSRAVSPKAAGTRVLKKPCARDGAAPMSNTDRHDAGLVKSSAAHDRGRGARIDELRGKKGPVTGARFPPKPEIISTTRTLLPGHGKDGGCHSKVHRPLESGRAHGSSLADGRAVEIVAACTGTSAGAVQDGKLENGEVPSKKAWGSQVSSDAVLLDPASYRDVSARDFPGLSGNFGRKTLSWALVKDRKVMNKYEVSGEGTVLGSKDMFTNQSTVKPDNVVQKFVTDAQHIPFSKGKKETVRERWVTTNGIQDSVELTKDRVMQAPMSADMCPMPMTHKKKAATTRDFFGHKRMVKAKALGHQQRMFASGSKSKRDDEVASNLKIHDIFREIVLNERNLELYLNSSSGLPSVRCQRQYRYMNADARSRFKMLCRMFEFVCRTLVQTMEQRSLKMRIDNEAAKVMKALPGFTKHGPIVGQVPGVEVGDEFLYRAQLAIAGLHSEYRRGISTTTYRNGMLIAISIVASGGYPDELGCSGELIYTGSGGKSAVKKKDEDQKLKCGNLALKNCIKTKTPVRVIHGFKCRNTDRGSHSGAKLIPKYTYDGLYLVVDFWMDGKPGSRVFKYKLKKIHGQPELPMHIAKRLKSFKSRPGLCMTDISQGKEATPICVINTVDDVQPGPFQYTTRIRYPFGLTEKHNQGCDCTNGCSDSESCACAVKNGGEIPFDLSGAILNEKSVIFECGSSCKCPPSCRNRVSQHDMKIPLEVFRTTKTGWGVRSLWSIPAGSFICEYIGEVQHQKAADKRRNNNYLFDAMEDVRFTIDASVYGNIGRFINHSCSPNLQAQNVLRDHGDKRMPHIMFFAAETIPPLQELTYDYNNSEIDRVQGVNRRMKSKVCQYSSSLCRRRFY

SEQ ID NO: 161801 - protein, 232 aa, Zea Mays
MANVMYAKFQKYWENPNIVLLIAAVLDPSMKTEFVKFYFYTIGDNVDVKMRELKRYLKKYYLEYEKIIRSPSLHVFIPHEDQMRSETFTSSPLCGKRRVEHAFAQFASQNMDARPERTEMDTYLEDPRILVKPDENFNVLGWWKKNIDAYPILSLMARDFLAIPVSTVSSESAFSAAGRILGKNRTSLSPETLEALVCAKDWLIGFNDEEEGEPMTGKRMFDSDDEEDDWEI

SEQ ID NO: 161802 - protein, 109 aa, Zea Mays
MESPPLTAEAIAYTEKKMDMALEDIIKMSKKKNPGGKKPPRQPIKKHPFQNGNSNKGNGKVQSFMESRSTIRQRRSNLGGNQFPATKQAAKKAAVMPMHKGAIRWNKPR

SEQ ID NO: 161803 - protein, 111 aa, Zea Mays
MLYGRTPFRGKNRKRTFHNILHKDLTFPSSIPVSPAAKQLIHGLLQRDPSSRLGSSAAANDIKQHPFFEDIHWPLIRCMEPPELDVPLKLTRKEPEQKVKPEEDIYSCSDY

SEQ ID NO: 161804 - protein, 136 aa, Zea Mays
MSEVITGVPHTSAIDWWALGILLYEMLYGRTPFRGKNRKRTFHNILHKDLTFPSSIPVSPAAKQLIHGLLQRDPSSRLGSSAAANDIKQHPFFEDIHWPLIRCMEPPELDVPLKLTRKEPEQKVKPEEDIYSCSDY

SEQ ID NO: 161805 - protein, 345 aa, Zea Mays
MEKIIKSGVKIGLKHFKPIKPLGYGDTGSVHLVELQGSGELFAMKAMDKSVMLNRNKVHRACMEREIYSLLDHPFLPTLYTSFQTPTHVCLITDFCPGGELFALLDMQPMKLFREESARFYAAEVVIGLEYLHCLGIIYRDLKPENILLQEDGHIVLTDFDLSFLTSSKPHVIKHSTSRRRRSKEYLPPSFVSDPATPSNSFVGTEEYIAPEVITGVPHTSAIDWWALGILLYEMLYGRTPFRGKNRKRTFHNILHKDLTFPSSIPVSPAAKQLIHGLLQRDPSSRLGSSAAANDIKQHPFFEDIHWPLIRCMEPPELDVPLKLTRKEPEQKVKPEEDIYSCSDY

SEQ ID NO: 161806 - protein, 590 aa, Zea Mays
MQVEVSKYTEGLSEKRMRPNEMPVSLIHYDDRQKETAMSSITEVVQTVKHPRARSEGEQEPVEPAPPVMASPLVAPGTPSGGASLKSPLWDVKKEDSRLSRKSSRRSSLMGFKMGKRSSIGSKDALPAEVEAPAPAPAPPESTTEKQRKNSWEQEGRERDIRQGIDLATTLERIEKNFVITDPRLPDNPIIFASDSFLELTEYTREEILGRNCRFLQGPETDMSTVDKIREAIREQKEITVQLINYTKSGKKFWNLFHLQPMRDQKGELQYFIGVQLDGSDHVEPLRNRLSENTELQSAKLVKATAENVDEAVRELPDPNLRPEDLWDIYSRYVSPKPHKRYNSSWIAMEKIIKSGVKIGLKHFKPIKPLGYGDTGSVHLVELQGSGELFAMKAMDKSVMLNRNKVHRACMEREIYSLLDHPFLPTLYTSFQTPTHVCLITDFCPGGELFALLDMQPMKLFREESARFYAAEVVIGLEYLHCLGIIYRDLKPENILLQEDGHIVLTDFDLSFLTSSKPHVIKHSTSRRRRSKEYLPPSFVSDPATPSNSFVGTEEYIAPGAGSQIRDEQKRWCLLAPREQQPVGPCRWLQ

SEQ ID NO: 161807 - protein, 101 aa, Zea Mays
MRTGRRNSHGRPDVDQPPNSAPVHELQLQVLCAAASSSLSLLQLCLCPCPLLSPELNSGRATTPEPLATPSQATCAPPQSMPKRGEWARPTCQYAKTVYGR

SEQ ID NO: 161808 - protein, 276 aa, Zea Mays
MDHSTKPIHTLSFFCVSVSAPAGFLDHPHRGFENVTYMLEGGISYHDFSGHKGTINPGDVQWLTAGRGVVHAEMPAAGQGVQRGINIWINLSAADKMVEPRYQDLASHDIPAAAADAAGGVSVKVIAGECLGARSPLRPRTPALCLDVALRPGARLRQPVPRGWSACAYVIHGEAAFGTASGEGNGASTATARTLVVFGGDGDGVELRGDAAGQGARVMLVAARSHGEAVARDGPFVMNTREEVDQAREDYRHRRNGFEMADGWTSDHASAAEKHS

SEQ ID NO: 161809 - protein, 205 aa, Zea Mays
MACRHPEVKWAQRIDKVYITVQLPDAKDAKVNLDPDGVFTFSGSAGTNLYELKLDLNDKVNVEASKISVGVRSIFCIVEKAEAKWWKKLVRDDQRAPHFVKVDWDKWVDEDDDGADINMDGMDFSNFGGMGGMGGMGGMGDMAGMGGLGGMGGMGGLGGMGGMGMDDFEDESDDEEVSKPQAADKAVEAEETESAETKIEAAQSS

SEQ ID NO: 161810 - protein, 240 aa, Zea Mays
MVGELSEESSLGTFREYQGFHAKFVHENTENSNTMIELEAEKYRLEKELKDHEWKLSVLNKKIERSNQALAKLHSSWSPSEQSADREHLTEEEKIMFRRIGRKMDGLVLLGRRGIFDGVIEEIHQHWKHKEVVKVITKQNQTRQIMYAASLLEVETGGILIAVEKLTTSHAIILYRGKNYRRPAKSSFSNLLTKREALRRSIEVQRRGSMKYFVRERQKSILELKRKLRYVTRQIRYRTP

SEQ ID NO: 161811 - protein, 675 aa, Zea Mays
MAPPPLPLFSPSLKAPPPPPWLHGSSTQSRDSAPPVPPLPAEATPSKFRIDSPKPAPARKNTKTAAKPLTAGVPGGRTHRAVLGIIRRVRSLELSDAPSPNSVHTSNSGAAAAAFHLTIELSPPREPGQYVVEKEKSRAVPWAAARDEGLKVALRREKKPREPTRAETELETHELHRLRRLARGIGRWARAKKAGVTDEVVKEVRREWASGEELAAVRIVEPLRRSMDRAREILEIKTGGLVVWTKGDMHFVYRGSKYQQNAKHSHTFLTNVHKDDAFQENDQSICGQKDEEPVKGTLYEREVNRLLDTLGPRFVDWWWDTPLPVDADLLPEFVPGFKTPYRLCPPGVRPTLADEELTYLRKLARLLPTHFALGRNTRLQGLAAAILKLWEKSLIAKIAVKIGIQNTNNEQMAWNLKHLTGGTVILRNKDFIILYRGKDFLPGGVAQTVIQREAQVHDEQVKEEEARLKAVDSLQMVGELSEESSLGTFREYQGFHAKFVHENTENSNTMIELEAEKYRLEKELKDHEWKLSVLNKKIERSNQALAKLHSSWSPSEQSADREHLTEEEKIMFRRIGRKMDGLVLLGRRGIFDGVIEEIHQHWKHKEVVKVITKQNQTRQIMYAASLLEVETVNEILCSGETEVHFGIEKETEVCDKANQVSNPMIMKSLDSMVSK

SEQ ID NO: 161812 - protein, 438 aa, Zea Mays
MAPPPLPLFSPSLKAPPPPPWLHGSSTQSRDSAPPVPPLPAEATPSKFRIDSPKPAPARKNTKTAAKPLTAGVPGGRTHRAVLGIIRRVRSLELSDAPSPNSVHTSNSGAAAAAFHLTIELSPPREPGQYVVEKEKSRAVPWAAARDEGLKVALRREKKPREPTRAETELETHELHRLRRLARGIGRWARAKKAGVTDEVVKEVRREWASGEELAAVRIVEPLRRSMDRAREILEIKTGGLVVWTKGDMHFVYRGSKYQQNAKHSHTFLTNVHKDDAFQENDQSICGQKDEEPVKGTLYEREVNRLLDTLGPRFVDWWWDTPLPVDADLLPEFVPGFKTPYRLCPPGVRPTLADEELTYLRKLARLLPTHFALGRNTRLQGLAAAILKLWEKSLIAKIAVKIGIQNTNNEQMAWNLKRQGFSSWWSCSNCHSTRSSGT

SEQ ID NO: 161813 - protein, 427 aa, Zea Mays
MAPPPLPLFSPSLKAPPPPPWLHGSSTQSRDSAPPVPPLPAEATPSKFRIDSPKPAPARKNTKTAAKPLTAGVPGGRTHRAVLGIIRRVRSLELSDAPSPNSVHTSNSGAAAAAFHLTIELSPPREPGQYVVEKEKSRAVPWAAARDEGLKVALRREKKPREPTRAETELETHELHRLRRLARGIGRWARAKKAGVTDEVVKEVRREWASGEELAAVRIVEPLRRSMDRAREILEIKTGGLVVWTKGDMHFVYRGSKYQQNAKHSHTFLTNVHKDDAFQENDQSICGQKDEEPVKGTLYEREVNRLLDTLGPRFVDWWWDTPLPVDADLLPEFVPGFKTPYRLCPPGVRPTLADEELTYLRKLARLLPTHFALGRNTRLQGLAAAILKLWEKSLIAKIAVKIGIQNTNNEQMAWNLKCSILREALLY

SEQ ID NO: 161814 - protein, 439 aa, Zea Mays
MAPPPLPLFSPSLKAPPPPPWLHGSSTQSRDSAPPVPPLPAEATPSKFRIDSPKPAPARKNTKTAAKPLTAGVPGGRTHRAVLGIIRRVRSLELSDAPSPNSVHTSNSGAAAAAFHLTIELSPPREPGQYVVEKEKSRAVPWAAARDEGLKVALRREKKPREPTRAETELETHELHRLRRLARGIGRWARAKKAGVTDEVVKEVRREWASGEELAAVRIVEPLRRSMDRAREILEIKTGGLVVWTKGDMHFVYRGSKYQQNAKHSHTFLTNVHKDDAFQENDQSICGQKDEEPVKGTLYEREVNRLLDTLGPRFVDWWWDTPLPVDADLLPEFVPGFKTPYRLCPPGVRPTLADEELTYLRKLARLLPTHFALGRNTRLQGLAAAILKLWEKSLIAKIAVKIGIQNTNNEQMAWNLKLLSAASYGRHCYIEKQGFYYSI

SEQ ID NO: 161815 - protein, 418 aa, Zea Mays
MEVMTGALPSLIPKLANLVAGEYNLQKGVKGDIMFLQEELESMRDALEEISKVPADQLPNRDKIWARNVRELSYDIEPKIRHKMATEIRTIKRRIVEVHERHIRYEINLGPDKLGNAAVDPRIFGQYTELKELVGIDETRDELIDIMMEGNVVPMKQVSQTPDLKKLFKSLLYDLGKYINEESLDERQLINVLREFLQERRYLIVIDDIWDISVWKMIRCALPDNDIGYIIVTTTRISDVAEKVGGAYKLKPLSLNNSRELMYKIIFGNENRENTKDKEICLDEELAEVSNKILKKCAGVPLAIITMASVLACKARNEMEWYEVYNSIGVGIENNLDVGNMRKILSFSYYDMASHLKTCLLYLSMFPEDYKIEKDRLIWMWIAEGFVQYVKQGKSLFEHGESYFNELINRECQTGLGA

SEQ ID NO: 161816 - protein, 743 aa, Zea Mays
MEVMTGALPSLIPKLANLVAGEYNLQKGVKGDIMFLQEELESMRDALEEISKVPADQLPNRDKIWARNVRELSYDIEPKIRHKMATEIRTIKRRIVEVHERHIRYEINLGPDKLGNAAVDPRIFGQYTELKELVGIDETRDELIDIMMEGNVVPMKQGKIISIVGFGGLGKTTLANAVYEKIRALFDCCAFVSVSQTPDLKKLFKSLLYDLGKYINEESLDERQLINVLREFLQERRYLIVIDDIWDISVWKMIRCALPDNDIGSEGFVQYVKQGKSLFEHGESYFNELINRGMIQPIYNQAGMIYECRVHDMVLGLICSLSNGENFVTTLNGLGHGSPSNMIRRLSVQNGNESQAMTLQTRNLQQVRSVVAFPDATASVVTVLRSFRVLRVLDLQDCDLSQCCSLKYLGNLFHLRYLGLCNTSITQLPEEIVNLQLLQILDVWNNKMYCLPSTIVQLRYLMCLYIDGFTRVPNGIGSLTSLEELTFLGIYDSTVDIIEELGQLTELRVLHIVLFGEWNDKLVECLHKLKKLKYLYIKDRSGQLNIGGLDAWVAPPNLQILNTRSGCWFTTLSASAWMNPSLLQDLSLSTTVRELQQDDIIILGSLPALRYLNLMIVGEDLGVHNEIHGECIVGAGLFPSLVYCQLWGNVAPIVFQRGAMPRLRTLDFRLSVQEVRGINGRDGGIDLGLRNLPSLQKVWVHLDPEGANKAEVKELEAELTRAIKIHPNHPQLYGIQDEDADDE

SEQ ID NO: 161817 - protein, 897 aa, Zea Mays
MEVMTGALPSLIPKLANLVAGEYNLQKGVKGDIMFLQEELESMRDALEEISKVPADQLPNRDKIWARNVRELSYDIEPKIRHKMATEIRTIKRRIVEVHERHIRYEINLGPDKLGNAAVDPRIFGQYTELKELVGIDETRDELIDIMMEGNVVPMKQGKIISIVGFGGLGKTTLANAVYEKIRALFDCCAFVSVSQTPDLKKLFKSLLYDLGKYINEESLDERQLINVLREFLQERRYLIVIDDIWDISVWKMIRCALPDNDIGYIIVTTTRISDVAEKVGGAYKLKPLSLNNSRELMYKIIFGNENRENTKDKEICLDEELAEVSNKILKKCAGVPLAIITMASVLACKARNEMEWYEVYNSIGVGIENNLDVGNMRKILSFSYYDMASHLKTCLLYLSMFPEDYKIEKDRLIWMWIAEGFVQYVKQGKSLFEHGESYFNELINRGMIQPIYNQAGMIYECRVHDMVLGLICSLSNGENFVTTLNGLGHGSPSNMIRRLSVQNGNESQAMTLQTRNLQQVRSVVAFPDATASVVTVLRSFRVLRVLDLQDCDLSQCCSLKYLGNLFHLRYLGLCNTSITQLPEEIVNLQLLQILDVWNNKMYCLPSTIVQLRYLMCLYIDGFTRVPNGIGSLTSLEELTFLGIYDSTVDIIEELGQLTELRVLHIVLFGEWNDKLVECLHKLKKLKYLYIKDRSGQLNIGGLDAWVAPPNLQILNTRSGCWFTTLSASAWMNPSLLQDLSLSTTVRELQQDDIIILGSLPALRYLNLMIVGEDLGVHNEIHGECIVGAGLFPSLVYCQLWGNVAPIVFQRGAMPRLRTLDFRLSVQEVRGINGRDGGIDLGLRNLPSLQKVWVHLDPEGANKAEVKELEAELTRAIKIHPNHPQLYGIQDEDADDE

SEQ ID NO: 161818 - protein, 665 aa, Zea Mays
MEVMTGALPSLIPKLANLVAGEYNLQKGVKGDIMFLQEELESMRDALEEISKVPADQLPNRDKIWARNVRELSYDIEPKIRHKMATEIRTIKRRIVEVHERHIRYEINLGPDKLGNAAVDPRIFGQYTELKELVGIDETRDELIDIMMEGNVVPMKQVSQTPDLKKLFKSLLYDLGKYINEESLDERQLINVLREFLQERRYLIVIDDIWDISVWKMIRCALPDNDIGYIIVTTTRISDVAEKVGGAYKLKPLSLNNSRELMYKIIFGNENRENTKDKEICLDEELAEVSNKILKKCAGVPLAIITMASVLACKARNEMEWYEVYNSIGVGIENNLDVGNMRKILSFSYYDMASHLKTCLLYLSMFPEDYKIEKDRLIWMWIAEGFVQYVKQGKSLFEHGESYFNELINRGIYDSTVDIIEELGQLTELRVLHIVLFGEWNDKLVECLHKLKKLKYLYIKDRSGQLNIGGLDAWVAPPNLQILNTRSGCWFTTLSASAWMNPSLLQDLSLSTTVRELQQDDIIILGSLPALRYLNLMIVGEDLGVHNEIHGECIVGAGLFPSLVYCQLWGNVAPIVFQRGAMPRLRTLDFRLSVQEVRGINGRDGGIDLGLRNLPSLQKVWVHLDPEGANKAEVKELEAELTRAIKIHPNHPQLYGIQDEDADDE

SEQ ID NO: 161819 - protein, 425 aa, Zea Mays
MMEGNVVPMKQVSQTPDLKKLFKSLLYDLGKYINEESLDERQLINVLREFLQERRYLIVIDDIWDISVWKMIRCALPDNDIGYIIVTTTRISDVAEKVGGAYKLKPLSLNNSRELMYKIIFGNENRENTKDKEICLDEELAEVSNKILKKCAGVPLAIITMASVLACKARNEMEWYEVYNSIGVGIENNLDVGNMRKILSFSYYDMASHLKTCLLYLSMFPEDYKIEKDRLIWMWIAEGFVQYVKQGKSLFEHGESYFNELINRGMIQPIYNQAGMIYECRVHDMVLGLICSLSNGENFVTTLNGLGHGSPSNMIRRLSVQNGNESQAMTLQTRNLQQVRSVVAFPDATASVVTVLRSFRVLRVLDLQDCDLSQCCSLKYLGNLFHLRYLGLCNTSITQLPEEIVNLQLLQILDSAKRDWEPNKP

SEQ ID NO: 161820 - protein, 220 aa, Zea Mays
MEVMTGALPSLIPKLANLVAGEYNLQKGVKGDIMFLQEELESMRDALEEISKVPADQLPNRDKIWARNVRELSYDIEPKIRHKMATEIRTIKRRIVEVHERHIRYEINLGPDKLGNAAVDPRIFGQYTELKELVGIDETRDELIDIMMEGNVVPMKQVSQTPDLKKLFKSLLYDLGKYINEESLDERQLINVLREFLQERRSQLVIIRWKMEEQSGGLMD

SEQ ID NO: 161821 - protein, 185 aa, Zea Mays
MSLQYVAPPVRALAVLPAPGPPRRRTSHVSLYLPSRRPGLAVAPVRAAESSSPPTVPASAAGKAVVPDDEFSLAKVSFGVIGLGLGLSLLSYGFGSYFNLLPGSEWSALLLTYGFPLTIIGMALKYAELKPVPCITYADAFALREKCATPILKQVRSDVTRFRYGDEQHLDEALQRIFQYGWGHS

SEQ ID NO: 161822 - protein, 155 aa, Zea Mays
MSLQYVAPPVRALAVLPAPGPPRRRTSHVSLYLPSRRPGLAVAPVRAAESSSPPTVPASAAGKAVVPDDEFSLAKVSFGVIGLGLGLSLLSYGFGSYFNLLPGSEWSALLLTYGFPLTIIGMALKYAELKPVPCITYADAFALREKCATPILKQE

SEQ ID NO: 161823 - protein, 146 aa, Zea Mays
MEAQSGTTLSPRGSTPDVKESQEVKEALRAQMEVQRRLHEQVEKHMQIRMEANQKYIDTILDKAFKIVSEQLSGFSISDQDLPILTSARAMLSPADHLSSSVFPQLSVSSVSLHNPGPGGGKGLPHVADSHVFSQRPPEQFKRKSR

SEQ ID NO: 161824 - protein, 148 aa, Zea Mays
MEAQSGTTLSPRGSTPDVKESQEVKEALRAQMEVQRRLHEQVEVQKHMQIRMEANQKYIDTILDKAFKIVSEQLSGFSISDQDLPILTSARAMLSPADHLSSSVFPQLSVSSVSLHNPGPGGGKGLPHVADSHVFSQRPPEQFKRKSR

SEQ ID NO: 161825 - protein, 286 aa, Zea Mays
MYALIQEINILHNSNVPVAEMSSQLSPWAAALFQFLPPFIRRELLLHQESDNSAQLSQIDTEQLLAHLVETEMIKRTKEGRYKGRKFSSVCHFFGYQARGSTPSNFDCDYAYALGRISLHMIAVGLTGYMATVANLKDPVDKWRCAAAPLTAMMSVKRHLRGPGAIPIGRPSIHPSPIDLKGKAYELLREKASSFLLDDFYRTPGGIQFEGPGSDAKPITLTIENQDYMGDIEILKEYLGKVRTMVKPGCSREILKAAISSMVSVTDVLTVMSHPLNAELPLYHFK

SEQ ID NO: 161826 - protein, 356 aa, Zea Mays
MGRKASHVAFECALQSHPNMLILGEEVALSKLTLMEIISKICDGVQARAELGKYHGVLVIPEGLIESIPEMYALIQEINILHNSNVPVAEMSSQLSPWAAALFQFLPPFIRRELLLHQESDNSAQLSQIDTEQLLAHLVETEMIKRTKEGRYKGRKFSSVCHFFGYQARGSTPSNFDCDYAYALGRISLHMIAVGLTGYMATVANLKDPVDKWRCAAAPLTAMMSVKRHLRGPGAIPIGRPSIHPSPIDLKGKAYELLREKASSFLLDDFYRTPGGIQFEGPGSDAKPITLTIENQDYMGDIEILKEYLGKVRTMVKPGCSREILKAAISSMVSVTDVLTVMSHPLNAELPLYHFK

SEQ ID NO: 161827 - protein, 95 aa, Zea Mays
MKCLIIKIHALIVKCLIIKIHAIINVLNQLMVCQQTMSETSGERKTKKVSIIRLGYSSAIFEMRRVPILDPVPPPKEWQTWNPDHSKKNKGVFSL

SEQ ID NO: 161828 - protein, 84 aa, Zea Mays
MLPRRYCRLLASPGSAEPRVLNPLLRQARSPTVQLIRRHLASALVTLVFAEVSGQVAAFHVTVDRCAFYCCRFLGWQAAALLRE

SEQ ID NO: 161829 - protein, 117 aa, Zea Mays
MPRIPRTTAPNRDSPRARGESRARPAPRGESPPTRDESPTRTSRHHRGEPRANLSATPILVQICRHHHPLRPLSTTSASIAVRLGHPSTLRFTPLSRTPALKNHAPKEVLQTARKSW

SEQ ID NO: 161830 - protein, 99 aa, Zea Mays
MLPRRYCRLLASPGSAEPRVLNPLLRQARSPTVQLIRRHLASALVTLVFAEVSGQVAAFHVTVDRCAFYCCRFLGWQLFSRDHMIRITLPVCCTTLDCA

SEQ ID NO: 161831 - protein, 99 aa, Zea Mays
MLPRRYCRLLASPGSAEPRVLNPLLRQARSPTVQLIRRHLASALVTLVFAEVSGQVAAFHVTVDRCAFYCCRFLGWQVLSFLLPYWLYEFIVFCYFSFY

SEQ ID NO: 161832 - protein, 50 aa, Zea Mays
MIRITLPVCCTTLDCASTHQPIIPRWISRQKMHLFEEERTSFSCSDETSK

SEQ ID NO: 161833 - protein, 264 aa, Zea Mays
MAATATAMAIATISPAAPIPSAPFPSLPLPLGLRLRSQPLLFAASRRRFLHVPKAASWDESVPEDGGDAEESVAAGDDEDEEEKQRPEPVSSSEFQFAAPPEGYVEPAAFDELPPESPEDVAAAYESLYGPAFSGETLLGNNVFEVKVNRVTKVVKGGRQLSYRAIVVVGDMKGHVGVGVGKAKEVTEAITKAAMNGRRNLVTVPLTKYSTFPHRADADYGAAKQLRSKNPLNNARATIKATQMMKQFKDVAEERGIPMEELWK

SEQ ID NO: 161834 - protein, 145 aa, Zea Mays
MAYWCRVSRKQVGQTSPPCAPARPHTATSTARRPAPAPPPPLHTPASPHSSTSTARRPAPAPPPPLHAPASPHSSTSTSTARRQAPAPPPPLRAPASPLLHRIRKASQRSSDPRKGGNTSVIRSRSPGSSIQWSGSLKPGTSLYY

SEQ ID NO: 161835 - protein, 173 aa, Zea Mays
METRFWELRIAFGNYLSSSRLLLELASPAVQGVWFYALVGITAEESTALILAALESKAQKDLTPVGRDALSRIRGRDFDSACGLTEDTGALVKWIPVKEKLVVLKKNVEPYVQKEAKRFSKPYIDQIAEITTLREQFMRMGHFLRLQPHTIDRRPSWTTSISMGYPGHLQRRS

SEQ ID NO: 161836 - protein, 140 aa, Zea Mays
MDGGNMLPTTPSSQPSSTILSQVGHGSGVAQNRGAAFIHEPSLTPESHKVSSSAKCNIQTTPHQGDNLLQGTEIITSPPNVQAPSGAAYSVLDGSTNKAHKSVAGKRSRTSPSKKVAKKLFRDEDTGDDDVAGSTDVDAE

SEQ ID NO: 161837 - protein, 162 aa, Zea Mays
METRFWELRIAFGNYLSSSRLLLELASPAVQGVWFYALVGITAEESTALILAALESKAQKDLTPVGRDALSRIRGRDFDSACGLTEDTGALVKWIPVKEKLVVLKKNVEPYVQKVSTRSVKFYKSSRDAVTPHIVKVKEFAHPRKPRGFLSLTLIKLLRSLH

SEQ ID NO: 161838 - protein, 141 aa, Zea Mays
MDGGNMLPTTPSSQPSSTILSQAVGHGSGVAQNRGAAFIHEPSLTPESHKVSSSAKCNIQTTPHQGDNLLQGTEIITSPPNVQAPSGAAYSVLDGSTNKAHKSVAGKRSRTSPSKKVAKKLFRDEDTGDDDVAGSTDVDAE

SEQ ID NO: 161839 - protein, 196 aa, Zea Mays
MDHSFTEKGKKRFVPVKLSDVRKEVQCPICLGIIRKTRTVMECLHRFCRECIDKSMRLGNNECPACRTHCASRRSLRDDPNYDALIAALYPDIDKYEEEELAFNEEENDRNKQIQASIAEAFRKQSEVIGRKSTAKATAAAFMKRMETVKAVAKRPHLRRRVPQRKSRNDCQNGQHRVLHLPEHAMMRLLLMKRMM

SEQ ID NO: 161840 - protein, 270 aa, Zea Mays
MPTQKRPPPPPPPSPSPSAAPGAGSPPPSSPPLPTAEPAEKKPKLEVNGSAGAEANGNANDFGAKEGTEVEASESESEDADAAKQEFVPVKLSDVRKEVQCPICLGIIRKTRTVMECLHRFCRECIDKSMRLGNNECPACRTHCASRRSLRDDPNYDALIAALYPDIDKYEEEELAFNEEENDRNKQIQASIAEAFRKQSEVIGRKSTAKATAAAFMKRMETVKAVAKRPHLRRRVPQRKSRNDCQNGQHRVLHLPEHAMMRLLLMKRMM

SEQ ID NO: 161841 - protein, 420 aa, Zea Mays
MPTQKRPPPPPPPSPSPSAAPGAGSPPPSSPPLPTAEPAEKKPKLEVNGSAGAEANGNANDFGAKEGTEVEASESESEDADAAKQENNECPACRTHCASRRSLRDDPNYDALIAALYPDIDKYEEEELAFNEEENDRNKQIQASIAEAFRKQSEVIGRKSTAKATAAAFVRRSRRNIRPNGQNTYFRGRGKASSDDVALACSEDEEDGNGESCSKEASSAEESSPEKKQKRLPKWPTPRSSPARACNDEVASDEKDDVGISRENFSTSPLRAWGKNGTRSQTRHSSFSGSNGRMVKGGRMIKLVECLRNSDDNEGERDVHLCLLPLDGQTAPNLEKSYLCCGPTLSIKQLCQFVASQTSHKDEEVEMYALKPSCSKPVSTNTCGPDKARLAGEERLSDLRSSFTFPNGVLELVYAIKVAN

SEQ ID NO: 161842 - protein, 257 aa, Zea Mays
MLLDFTNNWNDSWVEKEERKWEIALLVVTVVCYLSTLAFSGVLFMWFNPSGHDCGLNVFFIVMTLILAFAFAIVALHPQVHGSVMPASVISVYCAYLCYTSLSSEPDDYECNGLHRHSKQVSMSALILGMLTTVLSVVYSAVRAGSSTTFLSPPSSPRSGAKNPLLGDEEDGKGDGKESEPRPVSYSYTFFHLIFALASMYSAMLLTGWTSAASESSELMDVGWTTVWVRICTEWVTAGLYIWTLIAPLLFPDRDFS

SEQ ID NO: 161843 - protein, 181 aa, Zea Mays
MQVQGKDVIHGARYSSPLDCAVKTLESEGVKGIFRGGLATLFREAIGNAVFFCTYEYSRYWMHNYLDSSRFSGSSHFVAAKDIGIGVVSGGVSGMAFWTATLPLDVAKTIIQTDPDPHVSRNPLQILSMVYKRAGLGGCYAGLGPTLARAFPANAAAIVAWEYSAKILDQKTETNQVGICS

SEQ ID NO: 161844 - protein, 244 aa, Zea Mays
MERCTRMPSTAPVGYCLTKELQGCTKGSYEVGRPHLQVIIPSAACSGALISCILTPTELTKCRMQVQGKDVIHGARYSSPLDCAVKTLESEGVKGIFRGGLATLFREAIGNAVFFCTYEYSRYWMHNYLDSSRFSGSSHFVAAKDIGIGVVSGGVSGMAFWTATLPLDVAKTIIQTDPDPHVSRNPLQILSMVYKRAGLGGCYAGLGPTLARAFPANAAAIVAWEYSAKILDQKTETNQVGICS

SEQ ID NO: 161845 - protein, 174 aa, Zea Mays
MAGAGDAAKEYVAGSAAGVAQVVVGHPFDTVKVKLQAHNTTAHGKVYKNAFHCTSRILLDEGITGLYKGASSSFIGIAVESSLFFGTYSQAKQLLQGSYEVGRPHLQVIIPSAACSGALISCILTPTELTKCRMQVQGKDVIHGARYSSPLDCAVKTLESEGRGDRQCCLLLHL

SEQ ID NO: 161846 - protein, 516 aa, Zea Mays
MHHLVLIMNVTKDSQSCDQSFKEMVAMCLVKDQTKRPTAEKLLKHSFFKNAKPPELTIKSILSGLPPLWDRVKALQLKDEAQLALKKMPSSEQEALSLSEYQRGVSAWNFDIEDLKAQASLIHDDEPPEIKEDEDIARNIEVEKVEAKCNGISVCNCHLLALQQDLSSRNHLGKSFANECNSRQRAFVTTLKSDGNRPTTNEAFDFDFDFSEAATTRRADGHERNIRENDSLPSTAKRDPESNHWTSDVGQRQLSSGGSNSSTAERGYGFERDAVVQTIPEKQRSEARKTASLSGPLSLPTRASANSLSAPIRSSGGFVDSSGDKSKRSVVEIKGRFSVTSENVDLAKVQEGPLSSLSRKSPEGSLLKKSASTGDCLINTKLMRNANQLKEFCNSSVSSSVLIPHLNNLVQQTMFQQDVIMNLLSNLQQDEKVDRTQPGISSQVRTMENGKVADTANSEKERSLLVKISELQSRMITLTDELIAAKTKHVQLQQELNALYYREEIEDVRDEDIEET

SEQ ID NO: 161847 - protein, 708 aa, Zea Mays
MGRNGSVRRSAFSGAAGAAAGPPSFSVNPADYRLMEEVGYGAHAVVYRAIFLPTKGVVAVKCLDLDQLNNNIDEIQREAQIMSLIDHPNVIRAYCSFVVEHSLWVIMPFMTEGSCLHLMKISYQEGFDEPIIGSILKETLKALDYLHRQGQIHRDVKAGNILIDGAGVVKLGDFGVSACMFDRGDRQRSRNTFVGTPCWMAPEVLQPGTGYNFKADIWSFGITALELAHGHAPFSKYPPMKVLLMTLQNAPPGLDYERDKRFSKPPELTIKSILSGLPPLWDRVKALQLKDEAQLALKKMPSSEQEALSLSEYQRGVSAWNFDIEDLKAQASLIHDDEPPEIKEDEDIARNIEVEKDLSSRNHLGKSFANECNSRQRAFVTTLKSDGNRPTTNEAFDFDFDFSEAATTRRADGHERNIRENDSLPSTAKRDPESNHWTSDVGQRQLSSGGSNSSTAERGYGFERDAVVQTIPEKQRSEARKTASLSGPLSLPTRASANSLSAPIRSSGGFVDSSGDKSKRSVVEIKGRFSVTSENVDLAKVQEGPLSSLSRKSPEGSLLKKSASTGDCLINTKLMRNANQLKEFCNSSVSSSVLIPHLNNLVQQTMFQQDVIMNLLSNLQQDEKVDRTQPGISSQVRTMENGKVADTANSEKERSLLVKISELQSRMITLTDELIAAKTKHVQLQQELNALYYREEIEDVRDEDIEET

SEQ ID NO: 161848 - protein, 713 aa, Zea Mays
MGRNGSVRRSAFSGAAGAAAGPPSFSVNPADYRLMEEVGYGAHAVVYRAIFLPTKGVVAVKCLDLDQLNNNIDEIQREAQIMSLIDHPNVIRAYCSFVVEHSLWVIMPFMTEGSCLHLMKISYQEGFDEPIIGSILKETLKALDYLHRQGQIHRDVKAGNILIDGAGVVKLGDFGVSACMFDRGDRQRSRNTFVGTPCWMAPEVLQPGTGYNFKADIWSFGITALELAHGHAPFSKYPPMKVLLMTLQNAPPGLDYERDKRFSKSFKEMVAMCLVKDQTKRPTAEKLLKHSFFKNAKPPELTIKSILSGLPPLWDRVKALQLKDEAQLALKKMPSSEQEALSLSEYQRGVSAWNFDIEDLKAQASLIHDDEPPEIKEDEDIARNIEVEKDLSSRNHLGKSFANECNSSEAATTRRADGHERNIRENDSLPSTAKRDPESNHWTSDVGQRQLSSGGSNSSTAERGYGFERDAVVQTIPEKQRSEARKTASLSGPLSLPTRASANSLSAPIRSSGGFVDSSGDKSKRSVVEIKGRFSVTSENVDLAKVQEGPLSSLSRKSPEGSLLKKSASTGDCLINTKLMRNANQLKEFCNSSVSSSVLIPHLNNLVQQTMFQQDVIMNLLSNLQQDEKVDRTQPGISSQVRTMENGKVADTANSEKERSLLVKISELQSRMITLTDELIAAKTKHVQLQQELNALYYREEIEDVRDEDIEET

SEQ ID NO: 161849 - protein, 493 aa, Zea Mays
MHHLVLIMNVTKDSQSCDQSFKEMVAMCLVKDQTKRPTAEKLLKHSFFKNAKPPELTIKSILSGLPPLWDRVKALQLKDEAQLALKKMPSSEQEALSLSEYQRGVSAWNFDIEDLKAQASLIHDDEPPEIKEDEDIARNIEDLSSRNHLGKSFANECNSRQRAFVTTLKSDGNRPTTNEAFDFDFDFSEAATTRRADGHERNIRENDSLPSTAKRDPESNHWTSDVGQRQLSSGGSNSSTAERGYGFERDAVVQTIPEKQRSEARKTASLSGPLSLPTRASANSLSAPIRSSGGFVDSSGDKSKRSVVEIKGRFSVTSENVDLAKVQEGPLSSLSRKSPEGSLLKKSASTGDCLINTKLMRNANQLKEFCNSSVSSSVLIPHLNNLVQQTMFQQDVIMNLLSNLQQDEKVDRTQPGISSQVRTMENGKVADTANSEKERSLLVKISELQSRMITLTDELIAAKTKHVQLQQELNALYYREEIEDVRDEDIEET

SEQ ID NO: 161850 - protein, 144 aa, Zea Mays
MIRSVEPGAPASVCMRAAVSVPPHGRRREVSHLHRTHTKVPYPGGIYDEPWRLFQRSRDARHAVPPPTSVTDIVIGVTPPQRQRQRRQQSLRLSPSNARPVQPSMPLLGFWLRVKKLLFTRENLFNAIKSYNNTFNAIKNMCSL

SEQ ID NO: 161851 - protein, 535 aa, Zea Mays
MKPRRTQTDLKFILVILNPRSGHGRSSKVFHGKVEPIFKLAGFKMEVVKTTHAGHAKSLVSTIDFSTCPDGIVCVGGDGIVNEVLNGLLCRDDQNMSASVPIGIIPAGSDNSLIWTVLGVKDPISAALSIVRGGLTPIDVFSVEWIQSGTMHYGTTVSYFGFVSDVLELSEKYQKHFGPLRYFVAGFLKFLCLPKYSFELEYLPVSDVNGAEHKILVGQEKVDASDLYDDVIRRSRAECLPRASSLSSIDSIMSTGIMSGAELEVCSPRANNEPSEVVRGLDPKSKRLSLGRASTFKEPEEVLHPHSHGTSTPSWRRSKSKSRTEKAKPGLSATHDAKSSKVNADKEDTSSTISDPGPVAVWDSGPKWDDEPKWDNQPNWEPETSIELHSPREDIELGLTKELVPSLDERWTVRKGRYLGVLVCNHSCKTVQSLSSQVVAPKAEYDDNCLDLLLVGGSGRLRLLRFLVLLQFGKHISLPNVEYVKVKSVRLKAGPNTHDGCGIDGELLHVKGQVRCSLLPQQCQLMGRPVKNPVQ

SEQ ID NO: 161852 - protein, 566 aa, Zea Mays
MKPRRTQTDLKFVSSSPHEAFRWVNSFADQQCYVNLLPHPMASSKKHSSELIQFDAMFDPYVKCRSPPKILVILNPRSGHGRSSKVFHGKVEPIFKYLRNFGIVCVGGDGIVNEVLNGLLCRDDQNMSASVPIGIIPAGSDNSLIWTVLGVKDPISAALSIVRGGLTPIDVFSVEWIQSGTMHYGTTVSYFGFVSDVLELSEKYQKHFGPLRYFVAGFLKFLCLPKYSFELEYLPVSDVNGAEHKILVGQEKVDASDLYDDVIRRSRAECLPRASSLSSIDSIMSTGIMSGAELEVCSPRANNEPSEVVRGLDPKSKRLSLGRASTFKEPEEVLHPHSHGTSTPSWRRSKSKSRTEKAKPGLSATHDAKSSKVNADKEDTSSTISDPGPVAVWDSGPKWDDEPKWDNQPNWEPETSIELHSPREDIELGLTKELVPSLDERWTVRKGRYLGVLVCNHSCKTVQSLSSQVVAPKAEYDDNCLDLLLVGGSGRLRLLRFLVLLQFGKHISLPNVEYVKVKSVRLKAGPNTHDGCGIDGELLHVKGQVRCSLLPQQCQLMGRPVKNPVQ

SEQ ID NO: 161853 - protein, 711 aa, Zea Mays
MQKSDHHEQKLTSPRGLIHKILRRTNSRRSPTAADQQPSPVSPETSNSSIFSKQKDVDDAIKDSEKLSTHTIRIEDEKSDLLGSEIYSGKLTLDNKTKSSSNEQSGSGSSSNCFDARLSTEALIWGSNILKLEDIVSVSYNSGLRYFTVHACPLEKISSGLSCFMKPRRTQTDLKFVSSSPHEAFRWVNSFADQQCYVNLLPHPMASSKKHSSELIQFDAMFDPYVKCRSPPKILVILNPRSGHGRSSKVFHGKVEPIFKLAGFKMEVVKTTHAGHAKSLVSTIDFSTCPDGIVCVGGDGIVNEVLNGLLCRDDQNMSASVPIGIIPAGSDNSLIWTVLGVKDPISAALSIVRGGLTPIDVFSVEWIQSGTMHYGTTVSYFGFVSDVLELSEKYQKHFGPLRYFVAGFLKFLCLPKYSFELEYLPVSDVNGAEHKILVGQEKVDASDLYDDVIRRSRAECLPRASSLSSIDSIMSTGIMSGAELEVCSPRANNEPSEVVRGLDPKSKRLSLGRASTFKEPEEVLHPHSHGTSTPSWRRSKSKSRTEKAKPGLSATHDAKSSKVNADKEDTSSTISDPGPVAVWDSGPKWDDEPKWDNQPNWEPETSIELHSPREDIELGLTKELVPSLDERWTVRKGRYLGVLVCNHSCKTVQSLSSQVVAPKAEYDDNCLDLLLVGGSGRLRLLRFLVLLQFGKHISLPNVEYVKAYNCF

SEQ ID NO: 161854 - protein, 371 aa, Zea Mays
MQKSDHHEQKLTSPRGLIHKILRRTNSRRSPTAADQQPSPVSPETSNSSIFSKQKDVDDAIKDSEKLSTHTIRIEDEKSDLLGSEIYSGKLTLDNKTKSSSNEQSGSGSSSNCFDARLSTEALIWGSNILKLEDIVSVSYNSGLRYFTVHACPLEKISSGLSCFMKPRRTQTDLKFVSSSPHEAFRWVNSFADQQCYVNLLPHPMASSKKHSSELIQFDAMFDPYVKCRSPPKILVILNPRSGHGRSSKVFHGKVEPIFKLAGFKMEVVKTTHAGHAKSLVSTIDFSTCPDGIVCVGGDGIVNEVLNGLLCRDDQNMSASVPIGIIPAGSDNSLIWTVLGVKDPISAALSIVRFLSSQRSIRSILVLYDTL

SEQ ID NO: 161855 - protein, 385 aa, Zea Mays
MHYGTTVSYFGFVSDVLELSEKYQKHFGPLRYFVAGFLKFLCLPKYSFELEYLPVSDVNGAEHKILVGQEKVDASDLYDDVIRRSRAECLPRASSLSSIDSIMSTGIMSGAELEVCSPRANNEPSEVVRGLDPKSKRLSLGRASTFKEPEEVLHPHSHGTSTPSWRRSKSKSRTEKAKPGLSATHDAKSSKVNADKEDTSSTISDPGPVAVWDSGPKWDDEPKWDNQPNWEPETSIELHSPREDIELGLTKELVPSLDERWTVRKGRYLGVLVCNHSCKTVQSLSSQVVAPKAEYDDNCLDLLLVGGSGRLRLLRFLVLLQFGKHISLPNVEYVKVKSVRLKAGPNTHDGCGIDGELLHVKGQVRCSLLPQQCQLMGRPVKNPVQ

SEQ ID NO: 161856 - protein, 693 aa, Zea Mays
MQKSDHHEQKLTSPRGLIHKILRRTNSRRSPTAADQQPSPVSPETSNSSIFSKQKDVDDAIKDSEKLSTHTIRIEDEKSDLLGSEIYSGKLTLDNKTKSSSNEQSGSGSSSNCFDARLSTEALIWGSNILKLEDIVSVSYNSGLRYFTVHACPLEKISSGLSCFMKPRRTQTDLKFVSSSPHEAFRWVNSFADQQCYVNLLPHPMASSKKHSSELIQFDAMFDPYVKCRSPPKILVILNPRSGHGRSSKVFHGKVEPIFKLAGFKMEVVKTTHAGHAKSLVSTIDFSTCPDGIVCVGGDGIVNEVLNGLLCRDDQNMSASVPIVLELSEKYQKHFGPLRYFVAGFLKFLCLPKYSFELEYLPVSDVNGAEHKILVGQEKVDASDLYDDVIRRSRAECLPRASSLSSIDSIMSTGIMSGAELEVCSPRANNEPSEVVRGLDPKSKRLSLGRASTFKEPEEVLHPHSHGTSTPSWRRSKSKSRTEKAKPGLSATHDAKSSKVNADKEDTSSTISDPGPVAVWDSGPKWDDEPKWDNQPNWEPETSIELHSPREDIELGLTKELVPSLDERWTVRKGRYLGVLVCNHSCKTVQSLSSQVVAPKAEYDDNCLDLLLVGGSGRLRLLRFLVLLQFGKHISLPNVEYVKVKSVRLKAGPNTHDGCGIDGELLHVKGQVRCSLLPQQCQLMGRPVKNPVQ

SEQ ID NO: 161857 - protein, 314 aa, Zea Mays
MQKSDHHEQKLTSPRGLIHKILRRTNSRRSPTAADQQPSPVSPETSNSSIFSKQKDVDDAIKDSEKLSTHTIRIEDEKSDLLGSEIYSGKLTLDNKTKSSSNEQSGSGSSSNCFDARLSTEALIWGSNILKLEDIVSVSYNSGLRYFTVHACPLEKISSGLSCFMKPRRTQTDLKFILVILNPRSGHGRSSKVFHGKVEPIFKLAGFKMEVVKTTHAGHAKSLVSTIDFSTCPDGIVCVGGDGIVNEVLNGLLCRDDQNMSASVPIGIIPAGSDNSLIWTVLGVKDPISAALSIVRFLSSQRSIRSILVLYDTL

SEQ ID NO: 161858 - protein, 58 aa, Zea Mays
MLRWSPLSSNTRDHTCLAGPSSITVSHRHAVGVLRPACDGGPCIVAILSGQVCKDVLF

SEQ ID NO: 161859 - protein, 257 aa, Zea Mays
MTMEMLSEILAKLEDLSAQWPSGAAVLSHRSSTPSSCTYRRHRGFWTRVPHLHGLQQRVSDGRWSPCHRPRVTHPGLHAYTTSHQLRGSHYLLRARRGDAPQLFDAEPASSPPTPTTASSRSRSPPPAWTSSPLYPSPALTTKNHPQPLLPHKSQHVNLAEAYASTKLVQVMPARCLMPGHGCSLCVPMPVRKSSTVLTLPAVLPCLGTIPCNAHKVSEVMPVSPYVLLVTVSESHGISQHVINEVGELVSDQHTIQ

SEQ ID NO: 161860 - protein, 520 aa, Zea Mays
MDATQLNRSMDATPTRLFLGALLFLVPAALLLLLRARGRRRLPPGPPSLPLLGSVVWLTNSPAEIEPLLRRLFERYGPVVALRVGARLSVFVADRRIAHEALVDRGATLADRPALASVKFLDESDNTITRASYGPVWRLLRRNLVAETLHPSRVKLFAPARAWVRRVLVEKLGEAGPDAAPPRVVETFQYAINCLLVLMCFGERLDEPAVRAIASAQREALIYRSKNMQVFAFLPAVTKHLFRARLDKARALRRRVKELFVPLINARREYKKRGEEPRRETTFEHSYVDTLLDIKLHEDGDRPLTDDEIILLCSEFLDAGTDTTSTGLQWIMAELVKNPAIQEKLYSEIKAATDDNKEGVSEEDVHSMPYLKAVILEGLRKHPPAHFVLPHKAAEEMEIGGYLIPKGTVVNFMVAEMGRDEQEWKNPMQFSPERFLPGGDGEGVDVTGTKAIRMMPFGVGRRICAGLGIAMLHLEYFVANMVREYEWKEVPGDEVDFAEKNEFTVVMKKPLRPRLVPRSM

SEQ ID NO: 161861 - protein, 499 aa, Zea Mays
MSRPHDGHRSFFPMGNPFRMILPRGARLSPKLTELLTSYEDGLASSLRKVKPEATSEVFTLSWMKLAVECLSELHTNIATLITELELPLSDWDEKWVDIYLNSSVKLLDICIALSSELSRLDQGQLLVRYLLNVLDSGSDMPSQEQIRRAEVSLKEWIERASERSPRLDSCLAALQELSGNLCLMKVRHSAKGKVLMRALYGIEAVTVLICSVLVAVLSGTFKPLVDFDVPEKFGWSTAFIDLQKAISGELSRQLSRGSVAALKELEDVDVCARQLHTLTCTAQLEEENASLAHSFSRSKEVVLTDTTAQGRGHVDNLKLADDSSCQHEVIMLQSITTEGGIGTADIKEDTETIGHTREVMAPEKIIDRGHQDDNTKQDTGVVTDISCLERREELLNCISQMSKSAERLQLGLDSLSKRVDNFFHIVLTGRDALLCNLRFSNGGKVAAEPLFATRRNAYDFCRNRTASSRPLYSESTVVLVVAAKSDYHALYHLPDESL

SEQ ID NO: 161862 - protein, 1456 aa, Zea Mays
MPGTSSTTSLTYKYLEQVGVDFDDKNSWEYLFKLYWLDLKGKHLLTIEELKSAKNYWTVPTTAGRREKEESSDELYDASNDQDATFDISSKKQRQNNSSGKRGQKRKKDGGITSRKRGISINSAGSLPNGSTGEGMSLAGDTKWASSELLEFIGHMRNGDSSYISQFDVQVLLLEYIKQNNLSDPRRKSQIICDARLSNLFRKPRVGHFEMLKLLEMHYLVKQVPTLNADSERAFDSYSAQVNHGGYNELSDKLGSDKRRKAHMKIERESTINPEDYAAIDMHNINLIYLRRSVMEDLIDEVAVFSDKIAGAFVRIRISGLGNKQDMYRLVKVLGTHKVAERYTVGKKTTDYALEISNLEKKEIITMDTISNQDFTEEECKRLRQSMKFGLTARLKVRDVYDKAKIFQSLQFKDWLENEKQRLSRLRDRASETGRRKELRECVEKLQLLNTPEETERMINEAPEVHVDPQMDPSYESAEEPDYKKAVDWTMHRNGPDLLFPGRKGTKLNSVENHTQNSLDASGHISSLPTEDVDHRLGAGSNINLNNMAPEPASLGVLSNDTEPEKVWHYKDPNGNVQGPFTLLQLSNWASFFPRDLRIWLTFESEENSLLLTEVLPKQQKDFIQPSTVTTSDKSIWAGSGQDRINSNANNSSSPSLSAECYDPTKYLKPLGGTSPSRSLKDSHALHEVQNQVNDSSTILSSAGSYVPTSSHDERVSRDRVDEWNSSQDNGGIWNPTMNHSRKSNAQQHPDGFTGKDQMLTESKCSSHMVSVLTPQQSERDPATSLSTTSRPECKTMCRQEGSSWSSATNAGVHDLQLTIALTKPETCSPTNPVEDRDSSSASAVSCQSGAPACIPQPDPTSTCNSSKIEATMDLHKTCQPDTSNESFGRLPEPQSGSLFSLKTLNLESEHPSSTPKLEGKETSMNQSGSTSVAHENLATKTRVRPPTSKIDSLQPLKERSCPTERDSITQLEHLFEENVVKRNNEVVNPVSDAEGIAVSDVLESLTEQDCEKYSTHGADCEKYSTHGAAPLQNLVPASAEEEQPQCSSPIALSPWGEPSYYQGEAVDSALWGVQDGNDMWSMPSPTPGLQPSSADGKNASCIIEEARADHGDGAFVETLPRQGDEKTEHANSSVSGSGVPEQVKPKASTASGPSLDGSTKALGWQLLGSSLEGSAKASGWKPPALSIEGIANASGSQALYPTQGSTKSSGCQRSSSSPDGSRKASGWQQSSTSPVGSGKAHGWQRSGSFTQGGTKAAGWQPSGSSTDRSAKVDGWQRTSSSPEGNRKASGWHSSGRESSKITYGASENRKSFSSHQATTPTGRHSLARRQGSSDKGAAGWEESLGNTWEASKRQQRNSDKNAGCGEALGSNRTWHPSSGNPSRSSQGNHQHDRHSHGSDSRRGSSNYPRRSDHRHDHGSGGSSRPSSRGQPQRGVCKYYENGHCWKGSKCQYLHR

SEQ ID NO: 161863 - protein, 989 aa, Zea Mays
MINEAPEVHVDPQMDPSYESAEEPDYKKAVDWTMHRNGPDLLFPGRKGTKLNSVENHTQNSLDASGHISSLPTEDVDHRLGAGSNINLNNMAPEPASLGVLSNDTEPEKVWHYKDPNGNVQGPFTLLQLSNWASFFPRDLRIWLTFESEENSLLLTEVLPKQQKDFIQPSTVTTSDKSIWAGSGQDRINSNANNSSSPSLSAECYDPTKYLKPLGGTSPSRSLKDSHALHEVQNQVNDSSTILSSAGSYVPTSSHDERVSRDRVDEWNSSQDNGGIWNPTMNHSRKSNAQQHPDGFTGKDQMLTESKCSSHMVSVLTPQQSERDPATSLSTTSRPECKTMCRQEGSSWSSATNAGVHDLQLTIALTKPETCSPTNPVEDRDSSSASAVSCQSGAPACIPQPDPTSTCNSSKIEATMDLHKTCQPDTSNESFGRLPEPQSGSLFSLKTLNLESEHPSSTPKLEGKETSMNQSGSTSVAHENLATKTRVRPPTSKIDSLQPLKERSCPTERDSITQLEHLFEENVVKRNNEVVNPVSDAEGIAVSDVLESLTEQDCEKYSTHGADCEKYSTHGAAPLQNLVPASAEEEQPQCSSPIALSPWGEPSYYQGEAVDSALWGVQDGNDMWSMPSPTPGLQPSSEEARADHGDGAFVETLPRQGDEKTEHANSSVSGSGVPEQVKPKASTASGPSLDGSTKALGWQLLGSSLEGSAKASGWKPPALSIEGIANASGSQALYPTQGSTKSSGCQRSSSSPDGSRKASGWQQSSTSPVGSGKAHGWQRSGSFTQGGTKAAGWQPSGSSTDRSAKVDGWQRTSSSPEGNRKASGWHSSGRESSKITYGASENRKSFSSHQATTPTGRHSLARRQGSSDKGAAGWEESLGNTWEASKRQQRNSDKNAGCGEALGSNRTWHPSSGNPSRSSQGNHQHDRHSHGSDSRRGSSNYPRRSDHRHDHGSGGSSRPSSRGQPQRGVCKYYENGHCWKGSKCQYLHR

SEQ ID NO: 161864 - protein, 1060 aa, Zea Mays
MKFGLTARLKVRDVYDKAKIFQSLQFKDWLENEKQRLSRLRDRASETGRRKELRECVEKLQLLNTPEETERMINEAPEVHVDPQMDPSYESAEEPDYKKAVDWTMHRNGPDLLFPGRKGTKLNSVENHTQNSLDASGHISSLPTEDVDHRLGAGSNINLNNMAPEPASLGVLSNDTEPEKVWHYKDPNGNVQGPFTLLQLSNWASFFPRDLRIWLTFESEENSLLLTEVLPKQQKDFIQPSTVTTSDKSIWAGSGQDRINSNANNSSSPSLSAECYDPTKYLKPLGGTSPSRSLKDSHALHEVQNQVNDSSTILSSAGSYVPTSSHDERVSRDRVDEWNSSQDNGGIWNPTMNHSRKSNAQQHPDGFTGKDQMLTESKCSSHMVSVLTPQQSERDPATSLSTTSRPECKTMCRQEGSSWSSATNAGVHDLQLTIALTKPETCSPTNPVEDRDSSSASAVSCQSGAPACIPQPDPTSTCNSSKIEATMDLHKTCQPDTSNESFGRLPEPQSGSLFSLKTLNLESEHPSSTPKLEGKETSMNQSGSTSVAHENLATKTRVRPPTSKIDSLQPLKERSCPTERDSITQLEHLFEENVVKRNNEVVNPVSDAEGIAVSDVLESLTEQDCEKYSTHGADCEKYSTHGAAPLQNLVPASAEEEQPQCSSPIALSPWGEPSYYQGEAVDSALWGVQDGNDMWSMPSPTPGLQPSSEEARADHGDGAFVETLPRQGDEKTEHANSSVSGSGVPEQVKPKASTASGPSLDGSTKALGWQLLGSSLEGSAKASGWKPPALSIEGIANASGSQALYPTQGSTKSSGCQRSSSSPDGSRKASGWQQSSTSPVGSGKAHGWQRSGSFTQGGTKAAGWQPSGSSTDRSAKVDGWQRTSSSPEGNRKASGWHSSGRESSKITYGASENRKSFSSHQATTPTGRHSLARRQGSSDKGAAGWEESLGNTWEASKRQQRNSDKNAGCGEALGSNRTWHPSSGNPSRSSQGNHQHDRHSHGSDSRRGSSNYPRRSDHRHDHGSGGSSRPSSRGQPQRGVCKYYENGHCWKGSKCQYLHR

SEQ ID NO: 161865 - protein, 1236 aa, Zea Mays
MLKLLEMHYLVKQVPTLNADSERAFDSYSAQVNHGGYNELSDKLGSDKRRKAHMKIERESTINPEDYAAIDMHNINLIYLRRSVMEDLIDEVAVFSDKIAGAFVRIRISGLGNKQDMYRLVKVLGTHKVAERYTVGKKTTDYALEISNLEKKEIITMDTISNQDFTEEECKRLRQSMKFGLTARLKVRDVYDKAKIFQSLQFKDWLENEKQRLSRLRDRASETGRRKELRECVEKLQLLNTPEETERMINEAPEVHVDPQMDPSYESAEEPDYKKAVDWTMHRNGPDLLFPGRKGTKLNSVENHTQNSLDASGHISSLPTEDVDHRLGAGSNINLNNMAPEPASLGVLSNDTEPEKVWHYKDPNGNVQGPFTLLQLSNWASFFPRDLRIWLTFESEENSLLLTEVLPKQQKDFIQPSTVTTSDKSIWAGSGQDRINSNANNSSSPSLSAECYDPTKYLKPLGGTSPSRSLKDSHALHEVQNQVNDSSTILSSAGSYVPTSSHDERVSRDRVDEWNSSQDNGGIWNPTMNHSRKSNAQQHPDGFTGKDQMLTESKCSSHMVSVLTPQQSERDPATSLSTTSRPECKTMCRQEGSSWSSATNAGVHDLQLTIALTKPETCSPTNPVEDRDSSSASAVSCQSGAPACIPQPDPTSTCNSSKIEATMDLHKTCQPDTSNESFGRLPEPQSGSLFSLKTLNLESEHPSSTPKLEGKETSMNQSGSTSVAHENLATKTRVRPPTSKIDSLQPLKERSCPTERDSITQLEHLFEENVVKRNNEVVNPVSDAEGIAVSDVLESLTEQDCEKYSTHGADCEKYSTHGAAPLQNLVPASAEEEQPQCSSPIALSPWGEPSYYQGEAVDSALWGVQDGNDMWSMPSPTPGLQPSSEEARADHGDGAFVETLPRQGDEKTEHANSSVSGSGVPEQVKPKASTASGPSLDGSTKALGWQLLGSSLEGSAKASGWKPPALSIEGIANASGSQALYPTQGSTKSSGCQRSSSSPDGSRKASGWQQSSTSPVGSGKAHGWQRSGSFTQGGTKAAGWQPSGSSTDRSAKVDGWQRTSSSPEGNRKASGWHSSGRESSKITYGASENRKSFSSHQATTPTGRHSLARRQGSSDKGAAGWEESLGNTWEASKRQQRNSDKNAGCGEALGSNRTWHPSSGNPSRSSQGNHQHDRHSHGSDSRRGSSNYPRRSDHRHDHGSGGSSRPSSRGQPQRGVCKYYENGHCWKGSKCQYLHR

SEQ ID NO: 161866 - protein, 252 aa, Zea Mays
MSLAGDTKWASSELLEFIGHMRNGDSSYISQFDVQVLLLEYIKQNNLSDPRRKSQIICDARLSNLFRKPRVGHFEMLKLLEMHYLVKQVPTLNADSERAFDSYSAQVNHGGYNELSDKLGSDKRRKAHMKIERESTINPEDYAAIDMHNINLIYLRRSVMEDLIDEVAVFSDKIAGAFVRIRISGLGNKQDMYRLVKVLGTHKVAERYTVGKKTTDYALEISNLEKKEIITMDTISNQDFTELNTFRMWYIV

SEQ ID NO: 161867 - protein, 615 aa, Zea Mays
MDRGTGPGAEVLSPGEAEWPPELRLPPPPPPVPEPPGPHPPAPDSASMRMPAPHLHLQLPPAAAARKDPSPPRHGEGFDDQLFLGSLMGAAAPLQHQHHHQQQPAAAAPVKRKRGRPPKNRDGAAPVPAPVKPVSKKDEEVVCFICFDGGNLVVCDRRGCPKVYHPACIKRDESFFRCRVKWDCGWHICSSCEKAVQYMCYTCTYSVCKGCVKQGKFFGVRGSKGFCDTCYGTILLIESKDDGAKVGVDFDDKNSWEYLFKLYWLDLKGKHLLTIEELKSAKNYWTVPTTAGRREKEESSDELYDASNDQDATFDISSKKQRQNNSSGKRGQKRKKDGGITSRKRGISINSAGSLPNGSTGEGMSLAGDTKWASSELLEFIGHMRNGDSSYISQFDVQVLLLEYIKQNNLSDPRRKSQIICDARLSNLFRKPRVGHFEMLKLLEMHYLVKQVPTLNADSERAFDSYSAQVNHGGYNELSDKLGSDKRRKAHMKIERESTINPEDYAAIDMHNINLIYLRRSVMEDLIDEVAVFSDKIAGAFVRIRISGLGNKQDMYRLVKVLGTHKVAERYTVGKKTTDYALEISNLEKKEIITMDTISNQDFTELNTFRMWYIV

SEQ ID NO: 161868 - protein, 98 aa, Zea Mays
MTNLYYGGTGIAGSKIVFANGSQDPWRHASKQKSSDELPSYLIECKNCGHCSDLSGCPQAPSNIEGDSSKCSPPEALNKVRKEIVDHIDLWLSECQET

SEQ ID NO: 161869 - protein, 97 aa, Zea Mays
MAAGFLAIVVGELGRLRTMAVLLRLYTSLSSIAVAFSVTCIIRSELFLKVMKQNTEAITSYEMLDAVRVALGILLQMVVIATTTRLLQNMSPPKRAS

SEQ ID NO: 161870 - protein, 134 aa, Zea Mays
MQRHVASGRPSGTDGSDFSYRMVVESQGRRGQIPPRAPHPRAGAAPSGRRLASIAVVVQGGGGEQVRRAVHGRGIPGYSGGGIRAIADHGSAASALHKLVINCGCILCDVHYPVRVVLEGYEAKHRGHHKLRNA

SEQ ID NO: 161871 - protein, 163 aa, Zea Mays
MQRHVASGRPSGTDGSDFSYRMRVAEGRSRLARLILVQALHLVAGGLLLLLSLSKGAAVNKFAVLSMAAGFLAIVVGELGRLRTMAVLLRLYTSLSSIAVAFSVTCIIRSELFLKVMKQNTEAITSYEMLDAVRVALGILLQMVVIATTTRLLQNMSPPKRAS

SEQ ID NO: 161872 - protein, 152 aa, Zea Mays
MEKGASEASPPCARCGKPAQLQCPKCVELKLPRENAAFWKLEDGDIVNVDVTVYYKGVHGDLNETYFVGNVDEASKHLVRCTYECLEKAIAIVKPGVRFREVGEVINRHVSMSGEILLWPWHRGTVSLRPKHSSLFKKQGRWYHESWADIYN

SEQ ID NO: 161873 - protein, 306 aa, Zea Mays
MEKGASEASPPCARCGKPAQLQCPKCVELKLPRENAAFCPLRPHPISKMRVVPDEIEKPDWALDGIPKIEPDSDLQKRVEIKTPDLIERMRVTCRIAREVLDAAARVIKPGITTDEIDRVVHEETIARGGYPSPLNYYFFPKSCCTSVNEVICHGIPDARKLEDGDIVNVDVTVYYKGVHVKPGVRFREVGEVINRHVSMSGLSVVKSYCGHGIGELFHCAPNIPHYSRNKAVGIMKAGQTFTIEPMVNAGVWNDRLWPDDWTAVTADGKRSAQFEHTLLVTETGCEVLTARLPSSPDVFPWLKKP

SEQ ID NO: 161874 - protein, 358 aa, Zea Mays
MEKGASEASPPCARCGKPAQLQCPKCVELKLPRENAAFCTQDCFRAAWSSHKSVHPKPGAPASQQSPEGWKYCLRKGRERALQLPRFDWTGPLRPHPISKMRVVPDEIEKPDWALDGIPKIEPDSDLQKRVEIKTPDLIERMRVTCRIAREVLDAAARVIKPGITTDEIDRVVHEETIARGGYPSPLNYYFFPKSCCTSVNEVICHGIPDARKLEDGDIVNVDVTVYYKGVHVKPGVRFREVGEVINRHVSMSGLSVVKSYCGHGIGELFHCAPNIPHYSRNKAVGIMKAGQTFTIEPMVNAGVWNDRLWPDDWTAVTADGKRSAQFEHTLLVTETGCEVLTARLPSSPDVFPWLKKP

SEQ ID NO: 161875 - protein, 80 aa, Zea Mays
MSISMEYPHRLLFFLSQELPYSFSLIRIEIAGRRISSRISPSVLCNRPRTEALPHATSASHSRHLFPTYSAPGNFLHKMR

SEQ ID NO: 161876 - protein, 182 aa, Zea Mays
MGGHGGLNILPQKRWNVYNFDNREKVQKDEAAAAREEQLQREAERRRESDLRLAALRRNRGLVQAETPPAPPSHPAGPADPADALPSPADALPSPATDGDHINLFSGGSGVATDFDALASASGGRGAAREREPDADPNPKKRKKKEEERGQGEGTRASHPCCCREEGETGGSGAPVKMGSVM

SEQ ID NO: 161877 - protein, 117 aa, Zea Mays
MGGHGGLNILPQKRWNVYNFDNREKVQKDEAAAAREEQLQREAERRRESDLRLAALRRNRGLVQAETPPAPPSHPAGPADPADALPSPADALPSPATDGDHINLFSDGLGDVRIFMV

SEQ ID NO: 161878 - protein, 131 aa, Zea Mays
MAALSFTYTEGGYVDKKRRPRKQNNHKSVGSDHLVVPKCVFGFTDKPVCSLLGHAADVLDLSWSKSQKKLQYKSQIDLRIRKKKSGQKKITGFQFAPGSSSEVLITSADSRIRVVNGDEFVHRRRKGRKES

SEQ ID NO: 161879 - protein, 83 aa, Zea Mays
MSQTCVTFVLSVDGGASCPSSQNSAFKKSREGRIAAAGPATSRRQPTTPPNAERTQDFIPEPEEGGWMRRASTGSRSKPSASG

SEQ ID NO: 161880 - protein, 581 aa, Zea Mays
MDAPAMFARKQVPDDFGLRNIGEAEDEGAGAQAQAQLHRDEKQHKPAVLKKVKEKVKKIKNTLAGHGHGHDGEHGGGERMGDADAGSDSSEEAEEDAAEREAALEKGGYMEDVEDKPLVMEPEPNPELHGAPMYESARAPAVQDLIAEYDQPAWTPAVQEVEGDGSAPRVRLGDIGGPVVEDPAAPRSTTPTARGTTPVVRQFETMSLSDDPTHVGAGKKGAKAEEWKDKAADTVRGADGGGGGGASYTDTLKNAAAGTTEYGKKLASTVYEKVAGVTTAVGVGKRGDERTEATPASNTRTEERGAAPEATDATRGAGYTDKIKSAAAGTTGYGRQLASTVYEKVAGVGTAVAPNLRPQEGSAKAEGAHSEATPVSDTGVEEWKGAPAATDAANGASGPAGYTHKVKSAAAGTTEYGKQLASTVYEKVAGVGTAVAGKVQQATQSPSTATPGADAQQDTDAAATATPGAGGQSKGTTVTGYIAEKLRPGDEDRALSEAISGAVQRRKEDVGGTVAQRVPAPGQVVTKAREAVASLTGGKRVSETVQPTTATGKDVKEVYAAEAPVIHGEEIGGPKLNTNTM

SEQ ID NO: 161881 - protein, 528 aa, Zea Mays
MDAPAMFARKQVPDDFGLRNIGEAEDEGAGAQAQAQLHRDEKQHKPAVLKKVKEKVKKIKNTLAGHGHGHDGEHGGGERMGDADAGSDSSEEAEEDAAEREAALEKGGYMEDVEDKPLVMEPEPNPELHGAPMYESARAPAVQDLIAEYDQPAWTPAVQEVEGDGSAPRVRLGDIGGPVVEDPAAPRSTTPTAREGEDIGTTPVVRQFETMSLSDDPTHVGAGKKGAKAEEWKDKAADTVRGADGGGGGGASYTDTLKNAAAGTTEYGKKLASTVYEKVAGVTTAVGVGKRGDERTEATPASNTRTEERGAAPEATDATRGAGYTDKIKSAAAGTTGYGRQLASTVYEKVAGVGTAVAPNLRPQEGSAKAEGAHSEATPVSDTGVEEWKGAPAATDAANGASGPAGYTHKVKSAAAGTTEYGKQLASTVYEKLRPGDEDRALSEAISGAVQRRKEDVGGTVAQRVPAPGQVVTKAREAVASLTGGKRVSETVQPTTATGKDVKEVYAAEAPVIHGEEIGGPKLNTNTM

SEQ ID NO: 161882 - protein, 869 aa, Zea Mays
MSPVQDGLLITKPPGMRFPSRRNVPMSVDPVGHLHNGSSFDAVSVSGSDASSGRYTPKISATMHNSYLQDSSNALSPFANNGTVRNPLTSSGDWSGSSAPDASTDGSTSNSGEAGLRGEDDDVEKLRSEIATLTRKLDVSDMELQTLRKQIVKESRRGQDLSKEMSSLREERDALRREYEGLRGAKKMIHDSNGSGKRLSDGYDPWSQVEELKQDLNHEKNLNADLRLQLQKMQESNSELLLAVKDLDEMLEQKNRDISILQEDTQEDPQEAEYEHALSNVHNSGRKIALSETSSYQEKEDELMLDALAKKRDDISTSELEKKILELSNEIELYKKDREDIEMQMEQLALDYEILKQENHDISSRLEQTQLREQLRMQYECSAHLAIISDLEANVESLDNELQTQAKKFEADIAEIMSAKVEQEQRAIKAEDSLRKIRWNNATTAERLQEEFKVLSSQVSSAFSANEQQLVQARKEVAELQLQKSQLEELLQKAQGDLGSVQDQHRVKVQQLITLVDFKSKEIDRLLMELKSKSDEFHNQKRCDEAKLNALSEEIDLLNSKIDKLSSERNELFEKNEQKEKELAGISEKDMQLQDKTAEITSLNKELVFLKDQVKMHLDELHSLKRLKNEREETIGKLQIDIGSLKLQCDNLKTSLSKKESEKDSLASQVLKLRRSLETRDRAKANGQISDVKDNQHANNKRTKHNTGSTGSIAALPGTNRQGEDGDCNGPDMRNTTDQSAKELASMKERNRAIEEELKELHERYSEISLRFAEVEGERQQLVMTVRSLKNSLRWASDWMGFFSPKREAPDQRLGETRPGETGTPGMYQWGACGVVCPYPQELQYTACRSRHNNILSFSLFRIGVCAVI

SEQ ID NO: 161883 - protein, 1052 aa, Zea Mays
MFKSRWRGGGRAKATFKLQFHATQVPVQGWEAMMVVVTPQDAGRPTARSEPAEVTDGACRWAAPIMDATRLPAGKDKIYQFLVYETGSSKAALLGEATVNLADYADALKPSAVTLPLKGSPGTLLHVTIQRVVGGAGGYGDDASESGDASPVAKTPQRRTTLQNQLSRFEDEDGEKARAATDAMSPVQDGLLITKPPGMRFPSRRNVPMSVDPVGHLHNGSSFDAVSVSGSDASSGRYTPKISATMHNSYLQDSSNALSPFANNGTVRNPLTSSGDWSGSSAPDASTDGSTSNSGEAGLRGEDDDVEKLRSEIATLTRKLDVSDMELQTLRKQIVKESRRGQDLSKEMSSLREERDALRREYEGLRGAKKMIHDSNGSGKRLSDGYDPWSQVEELKQDLNHEKNLNADLRLQLQKMQESNSELLLAVKDLDEMLEQKNRDISILQEDTQEDPQEAEYEHALSNVHNSGRKIALSETSSYQEKEDELMLDALAKKRDDISTSELEKKILELSNEIELYKKDREDIEMQMEQLALDYEILKQENHDISSRLEQTQLREQLRMQYECSAHLAIISDLEANVESLDNELQTQAKKFEADIAEIMSAKVEQEQRAIKAEDSLRKIRWNNATTAERLQEEFKVLSSQVSSAFSANEQQLVQARKEVAELQLQKSQLEELLQKAQGDLGSVQDQHRVKVQQLITLVDFKSKEIDRLLMELKSKSDEFHNQKRCDEAKLNALSEEIDLLNSKIDKLSSERNELFEKNEQKEKELAGISEKDMQLQDKTAEITSLNKELVFLKDQVKMHLDELHSLKRLKNEREETIGKLQIDIGSLKLQCDNLKTSLSKKESEKDSLASQVLKLRRSLETRDRAKANGQISDVKDNQHANNKRTKHNTGSTGSIAALPGTNRQGEDGDCNGPDMRNTTDQSAKELASMKERNRAIEEELKELHERYSEISLRFAEVEGERQQLVMTVRSLKNSLRWASDWMGFFSPKREAPDQRLGETRPGETGTPGMYQWGACGVVCPYPQELQYTACRSRHNNILSFSLFRIGVCAVI

SEQ ID NO: 161884 - protein, 309 aa, Zea Mays
MTPASVVAAPRSVGALPLAAFPAPARAGVRRNGRSSRPAACGGDDQQPPSMAAMPASLRAIQARRKQEAAQRGVPRATATSAAGCAVAALVKAVEAVQGAAAGGAAEAARGAGDAVAWVFSKVHLQSPDLAVGLLGMVACCLGTIVEKALWAQIGILHGGGGLFGDSSYGAQEELDEEEVKEIDSARARRRKAAYEMAIASGGASSLILSNYAQLLYEIDKDIERAEMYFKQAVAAEPADGEAMRRYGMFLWHARGDTGGAEDMFTGAIDAEPESSHHRSSYAWFLWMTGGVETCLMDTGRQSDGNDAD

SEQ ID NO: 161885 - protein, 255 aa, Zea Mays
MDLLWKKKSSQVNRGNVFLLLSCVRWQHPGREGNRERDPRAARRRRRRRGDRPREGGGAEGHGGGEGGDRPRGGGAGAAGAVVRADVPGDPDGRVHAAHLLGAVVGRDGAHLLLRHVHVLHGRLRLLPPHQEGAVVRRLLREPVRGQAEARDARPGLRPPQVRGAPESLRRGGAAAPGPDPLRERGRGAGERPLPLLLPLPLILASLGSFLSFFLCCSCPFGGDDDSCIHLMRARMQKKKKHTELRFKLGTRASK

SEQ ID NO: 161886 - protein, 457 aa, Zea Mays
MGTLRRSRPLRLLASQTSPRARNTPRRELQASPQRPHHRRRTLSWIRPPPRFICLAPGGDQQTPSSTRIHWAASRSGDPVDPCKDAAVGRLFPPVRRLRDSRQREIIESATDRRSPDLLLSSYDVEEWLTTTQTILIDHLLPAPIQMWQPQGFDPTQASTFTNPSNSHMTNPTWSQGPNDPSGYTFRTPWNPYFGMTTPGGPPTQTCFGQPQLVPPIPCPPVPTHVPNQTDPIPFESEAEHSVQEVNSPSKPSDTPGTFRRTKEQNFKPDEDLLLCKTWLEISSDPVISTGQRKEGLWARIEKRYNELRGEFPLRLNRALSSRWDKIRAETEKFAGFYARVLRENQSGLTDNDKTSKAATLYATSQKKPFHFMHCWTRLKNEPKWDAMVHGSPWRGNAGTEPVRSLTPTGSVNEVHTDEGGSKGKRPLGRDSTKASRKKSMSSSSQSTDYLSRIHDI

SEQ ID NO: 161887 - protein, 336 aa, Zea Mays
MYFIPEWLTTTQTILIDHLLPAPIQMWQPQGFDPTQASTFTNPSNSHMTNPTWSQGPNDPSGYTFRTPWNPYFGMTTPGGPPTQTCFGQPQLVPPIPCPPVPTHVPNQTDPIPFESEAEHSVQEVNSPSKPSDTPGTFRRTKEQNFKPDEDLLLCKTWLEISSDPVISTGQRKEGLWARIEKRYNELRGEFPLRLNRALSSRWDKIRAETEKFAGFYARVLRENQSGLTDNDKTSKAATLYATSQKKPFHFMHCWTRLKNEPKWDAMVHGSPWRGNAGTEPVRSLTPTGSVNEVHTDEGGSKGKRPLGRDSTKASRKKSMSSSSQSTDYLSRIHDI

SEQ ID NO: 161888 - protein, 103 aa, Zea Mays
MTKWARVFVLPSEGIIADSSLSNHHEDSLGSGLPSISTGKPFDSDEMDIKLDIFSLGDTSKPANGEAASPKKQSPSGSRSPDLLMANTAELTTIDQNLQAKPE

SEQ ID NO: 161889 - protein, 113 aa, Zea Mays
MQRPSRPCRLPPRSPASPPLASRQPRSAAPRPPLATACQLPPVASSVPAVCHRIRDPALVLHPSPICSPPPPREPQPAPLASPSPIPCRPTAHASATRRPEPNPRAPVESRWP

SEQ ID NO: 161890 - protein, 363 aa, Zea Mays
MAQRNGSSAVESISSGSTEDALNKRLEQLVNSHPVFLFMKGTPEQPRCGFSRKVIDILKQEGVKFGSFDILTDNDVREGMKKFSNWPTFPQLYCKGELLGGCDIVVAMHESGELKDVFEEHNITLKPQGSKNEEAGEPESATEKGSAVSESIKLTDAQKTRLESLINSSPVMVFIKGTPEEPKCGFSGKLVHILKQENIPFSSFDILSDDEVRQGLKVFSNWPSYPQLYIKGELVGGSDIVMEMHKSGELKKILSEKGVRQKGNLEDRLKSLISSAPVMLFMKGTPDAPRCGFSSKVVNALKKEGVSFGSFDILSDEEVRQGLKTYSNWPTFPQLYYKSELIGGCDIILEMEKSGELKSTLSM

SEQ ID NO: 161891 - protein, 102 aa, Zea Mays
MSPHSRQRTRLLRLGIDRWLDQTASSTCWGSGRQPSSKGMAARLRFQSPRAARLLGICATSACHLPDHIRTTSGRAQQSECHSRVSADVQWTILIFSSTPVK

SEQ ID NO: 161892 - protein, 104 aa, Zea Mays
MSPHSRQRTRLLRLGIDRWLDQTASSTCWGSGRQPSSKGMAARLRFQSPRAARLLGICATSACHLPQDHIRTTSGRAQQSECHSRVSGTSRLLCEFQRTYSGPS

SEQ ID NO: 161893 - protein, 102 aa, Zea Mays
MSPHSRQRTRLLRLGIDRWLDQTASSTCWGSGRQPSSKGMAARLRFQSPRAARLLGICATSACHLPDHIRTTSGRAQQSECHSRVSVDHPDLLKYSCQVECR

SEQ ID NO: 161894 - protein, 153 aa, Zea Mays
MSKVMGQDAKPETVPEALAACIEETCSPAYRHTGGFRFAIGLVDDIIAILSLGQNALICALCDFHRLIEVGKSMLKVEKVGKTERAQNSPKLRSAARKLFFMTCWVHEQPDEAWPSLAHIVQVQKASMEELETGNWKADRKSKPQSAVLIEEL

SEQ ID NO: 161895 - protein, 115 aa, Zea Mays
MAVSFLANEVSDLCIGKPAVRSLPLSAAAGDLAAALRRVARSGAPSCVAVTGPARAVVGRVGLADVLCFLCTDPEALARPAVVFSKPVSALLPKDGAGEVRRVDPRSSTHVAVSR

SEQ ID NO: 161896 - protein, 191 aa, Zea Mays
MTVAPNPRCRLLHRKRLFHRHRRLRLVLTRAWMAHAPLSSKCAVDTKLPCLTARSPAPPRSQVLRSSRSTILRPRPITHSSSPAPAPHPTRRSSVVAAIPAHATACAPPVPSANPSVIPTLPPSSSHHRLPRHPYPSGHLWRREDDVVRGGGRPDNPLLARPSLLRPLSLLSDGGMLPWKELKYRSRNSRL

SEQ ID NO: 161897 - protein, 55 aa, Zea Mays
MSGEDRAVLVNGPQKLSMVTTQLGVQKISGITMYAVQEKKYYEPLPDIEIFVDAE

SEQ ID NO: 161898 - protein, 237 aa, Zea Mays
MASPYAGGVQPPSPAGAVQQQQQNHSLAFRVMRLSRPSLQPDLAALLRFDPRDVFLPEDALTGSDPSAAAKFLHGLLHPADSATAVPGDFTFRDRFLLRDPADALALPGLLVLPQSAIYLGETFCSYISINNSSSFEARDVVIKAEIQTERQRILLLDTSKSPVESIRSGGRYDFIVEHDVKELGAHTLVCTALYNDGDGERKYLPQFFKFSVSNPLSVRTKVRTIKVGHLLLCKGK

SEQ ID NO: 161899 - protein, 847 aa, Zea Mays
MTSSASPNPSPVPVPTPITTANGTTSSPKDQPPPPPPLPQQQQQQGGGQEEAEAADGGGAEAAEAGVLAGVAAEAMEVDGGSGAGDAEAGGSVGGGVGAGAGGGAQQASPATVFRIRLKQSPASLRHKMRVPELCRNFSAVAWCGKLNAIACASETCARIPSSNSSPPFWIPIHILNPERPTECSVFNVKADSPRDFVQFIEWSPRSCPRALLVANFHGRITIWTQPTKGPVNLVRDASLWQCEHEWRQDLSVVTKWLSGISPYRWLPTNSTSSNLKTFEEKFLTQQPQSAVGWPSILCVCSVFSSGSVQLHWSQWPSQNSAHSRWFSTSKGLLGAGPSGIMAADAIVTESGALHVAGVPLVNPSTVVVWEVMPGLGNGIQATAKINAASSVPPSLNPPSWPGFAPLAAYLFSLQDYLVSEGAQTKKLTDNNETTEAASIHCCPVSNFSAYVSPEAAAQSATTTTWGSGVTSVAFDPTRGGSVITVVIVEGQYMSPYDPDEGPSITGWRVQCWESSCQPVVLHPIFGSPTSLGGQPPMQTVWSTRVNKSIPPTEDLKNPQTYVPMPTTSDERSSSECSVDRANRLSFDPYDLPNDVRQLAQIVYSAHGGEVAVAFLRGGVHIFSGPNFDQVDSYHVNVGSAIAPPAFSSSSCCLASVWHDTLKDRTILKIIRVLPPAILSTQTKISSAAWERAIADRFWWSLLARVDWWDAVGCTQSAAEDGIVSLNSVIAFLDADFHSLPTMQQRQQHCPNLDRIKCRLLEGTNAQDVRALVLDMQARLLLDMLGKGIESALTNPSTLLPEPWQASSDMLSSIDADKMTVEPALLPNIQVKLSPLCKLFLFHSHGT

SEQ ID NO: 161900 - protein, 366 aa, Zea Mays
MAADAIVTESGALHVAGVPLVNPSTVVVWEVMPGLGNGIQATAKINAASSVPPSLNPPSWPGFAPLAAYLFSLQDYLVSEGAQTKKLTDNNETTEAASIHCCPVSNFSAYVSPEAAAQSATTTTWGSGVTSVAFDPTRGGSVITVVIVEGQYMSPYDPDEGPSITGWRVQCWESSCQPVVLHPIFGSPTSLGGQPPMQTVWSTRVNKSIPPTEDLKNPQTYVPMPTTSDERSSSECSVDRANRLSFDPYDLPNDVRQLAQIVYSAHGGEVAVAFLRGGVHIFSGPNFDQVDSYHVNVGSAIAPPAFSSSSCCLASVWHDTLKDRTILKIIRVLPPAILSTQTKISSAAWERAIADRYVTKFIDADS

SEQ ID NO: 161901 - protein, 104 aa, Zea Mays
MLFLSKEECDHLISLAKPHMKKSTVVDSATGGSKDSRVRTSSGMFLRRGQDKIIRTIEKRIADYTFIPSRVRVFKFSTMKLGRSMNLTLITSMMITTPRMEASV

SEQ ID NO: 161902 - protein, 89 aa, Zea Mays
MYLSDVEDGGETVFPSSTTNSSSSPFYNELSECAKGGLSVKPKMGDALLFWSMKPDGSLDPTSLHGGCPVIKGNKWSSTKWMRVHEYKV

SEQ ID NO: 161903 - protein, 411 aa, Zea Mays
MGNGGGTGDKTKTKATGGLTGRESSSSSHASKRRRGLRGESMADRFIPNDFPDFVAEAEASDGEGHRPAGHRGLLSLPYTRLSDHFVRAARRLKDKVVEETWVKAGRKVTDYTLYTGSLGTALLLFKSFQVTGDRGDLALAADIVRACDDASRGLPRRFLTFICGRAGVCALGAVIAKHCDDQLRVTQYLSSFDEITITEKVPNELLYGRAGYLWACLFLNKHLSEKTIPLDHINSVAKDIINEGRGFASKGSSPLMYEWHGKKYWGAAHGLAGIMHVLMHTELKPDEQDDVKNTLRYMIKNKFPSGNYPSSEGNESDHLVHWCHGAPGVALTLAKAYEVFHDDYFEQSAAEAAEVVWNRGLLKRVGICHGVSGNAYAFLSLYRLTGKAGMSYLLLDMVDPSESRFPAYEL

SEQ ID NO: 161904 - protein, 410 aa, Zea Mays
MGNGGGTGDKTKTKATGGLTGRESSSSSHASKRRRGLRGESMADRFIPNDFPDFVAEAEASDGEGHRPAGHRGLLSLPYTRLSDHFVRAARRLKDKVVEETWVKAGRKVTDYTLYTGSLGTALLLFKSFQVTGDRGDLALAADIVRACDDASRGLPFLTFICGRAGVCALGAVIAKHCDDQLRVTQYLSSFDENSVAKDIINEGRGFASKGSSPLMYEWHGKKYWGAAHGLAGIMHVLMHTELKPDEQDDVKNTLRYMIKNKFPSGNYPSSEGNESDHLVHWCHGAPGVALTLAKAYEVFHDDYFEQSAAEAAEVVWNRGLLKRVGICHGVSGNAYAFLSLYRLTGNVEYLYRAKAFACFLLEKADQLIAEGAMHGGDRPFSLFEGKAGMSYLLLDMVDPSESRFPAYEL

SEQ ID NO: 161905 - protein, 657 aa, Zea Mays
MLNGSNKDVDSCSEDILLKVEEILLSCKEIKPADRDYKRTTRPELCSKWLALLTMEKACLSAVALEDTSDMVLELGGNFKETLRQLGGLDDIFNVMVNCHSELEKLVKDASTTVVEGKEGAPLQSTTLLLKCLKILENATFLSDNNKTHLLSMSRKLSPKCRSLSFVGVILNIVELLSAALSLLQKPSTVSRKADPKNTKVCNGACSDSRGLSLLNHHCKCNNSKKKSILLNRRCQYCSSTKSEASHVTLSSSSDVSQSERILNCSSFSSNGTSSGSFGVKHINGASLKLNVRMDRSKAYPVRGSTGWISMKAQTSDWNSREMAKKRRLSENVRTDLSNGGDDPFAFDDIDQEPSNWDLFGPKRKSPQKRAKRTNGEVLDDCGTALMGSPKLCQPEDIYQSVATSGSKVVDESNLLEDCLLASVKVLMNLANDNPSGCEQIASCGGLNNMASLIIKHFPSFDFSMNSNNQMNESVSSGDPLSSQNSKSPQIKTKQLRDYELDFLVAILGLLVNLVEKDSLNRVRLANARVSVNLSQNPDSKEVQRDVIPLLCSIFLASQGTGETAEAISPDDEESLLQGEREAEMMIVEAYAALVLAFLSTESMKVRGAISSCLPDNNLKVLVPVLEKFVSFHLQLNMMTRETHSAVTEVIERCRLS

SEQ ID NO: 161906 - protein, 629 aa, Zea Mays
MLNGSNKDVDSCSEDILLKVEEILLSCKEIKPADRDYKRTTRPELCSKWLALLTMEKACLSAVALEDTSDMVLELGGNFKETLRQLGGLDDIFNVMVNCHSELEKLVKDASTTVVEGKEGAPLQSTTLLLKCLKILENATFLSDNNKTHLLSMSRKLSPKCRSLSFVGVILNIVELLSADSRGLSLLNHHCKCNNSKKKSILLNRRCQYCSSTKSEASHVTLSSSSDVSQSERILNCSSFSSNGTSSGSFGVKHINGASLKLNVRMDRSKAYPVRGSTGWISMKAQTSDWNSREMAKKRRLSENVRTDLSNGGDDPFAFDDIDQEPSNWDLFGPKRKSPQKRAKRTNGEVLDDCGTALMGSPKLCQPEDIYQSVATSGSKVVDESNLLEDCLLASVKVLMNLANDNPSGCEQIASCGGLNNMASLIIKHFPSFDFSMNSNNQMNESVSSGDPLSSQNSKSPQIKTKQLRDYELDFLVAILGLLVNLVEKDSLNRVRLANARVSVNLSQNPDSKEVQRDVIPLLCSIFLASQGTGETAEAISPDDEESLLQGEREAEMMIVEAYAALVLAFLSTESMKVRGAISSCLPDNNLKVLVPVLEKFVSFHLQLNMMTRETHSAVTEVIERCRLS

SEQ ID NO: 161907 - protein, 633 aa, Zea Mays
MIVRTYRRRSRSISEGGGGVSSSQEAFDFDADVDVLGSSASQPLPPSQESSSMWDFDEDPPPSPPRPGKEGRRSGRGGARRGGGLELAEAPAMAPTVTLMEAEEYGEMMESVDDVTFALDGLRPAAQKRTRRASLLALLGICDSAERRRVLRSQGLVQQIIDAILVLDIDDPPCAIAAGALLFVLASDVQDNNLLSSETCVHFLLKLLNPPVNVVDAKAPSIGSKLLGISKFQMLNGSNKDVDSCSEDILLKVEEILLSCKEIKPADRDYKRTTRPELCSKWLALLTMEKACLSAVALEDTSDMVLELGGNFKETLRQLGGLDDIFNVMVNCHSELEKLVKDASTTVVEGKEGAPLQSTTLLLKCLKILENATFLSDNNKTHLLSMSRKLSPKCRSLSFVGVILNIVELLSADSRGLSLLNHHCKCNNSKKKSILLNRRCQYCSSTKSEASHVTLSSSSDVSQSERILNCSSFSSNGTSSGSFGVKHINGASLKLNVRMDRSKAYPVRGSTGWISMKAQTSDWNSREMAKKRRLSENVRTDLSNGGDDPFAFDDIDQEPSNWDLFGPKRKSPQKRAKRTNGEVLDDCGTALMGSPKLCQPEDIYQSVATSGSKVVDESNLLEDCLLASVKDYA

SEQ ID NO: 161908 - protein, 846 aa, Zea Mays
MIVRTYRRRSRSISEGGGGVSSSQEAFDFDADVDVLGSSASQPLPPSQESSSMWDFDEDPPPSPPRPGKEGRRSGRGGARRGGGLELAEAPAMAPTVTLMEAEEYGEMMESVDDVTFALDGLRPAAQKRTRRASLLALLGICDSAERRRVLRSQGLVQQIIDAILVLDIDDPPCAIAAGALLFVLASDVQDNNLLSSETCVHFLLKLLNPPVNVVDAKAPSIGSKLLGISKFQMLNGSNKDVDSCSEDILLKVEEILLSCKEIKPADRDYKRTTRPELCSKWLALLTMEKACLSAVALEDTSDMVLELGGNFKETLRQLGGLDDIFNVMVNCHSELETHLLSMSRKLSPKCRSLSFVGVILNIVELLSALSLLQKPSTVSRKADPKNTKVCNGACSDSRGLSLLNHHCKCNNSKKKSILLNRRCQYCSSTKSEASHVTLSSSSDVSQSERILNCSSFSSNGTSSGSFGVKHINGASLKLNVRMDRSKAYPVRGSTGWISMKAQTSDWNSREMAKKRRLSENVRTDLSNGGDDPFAFDDIDQEPSNWDLFGPKRKSPQKRAKRTNGEVLDDCGTALMGSPKLCQPEDIYQSVATSGSKVVDESNLLEDCLLASVKVLMNLANDNPSGCEQIASCGGLNNMASLIIKHFPSFDFSMNSNNQMNESVSSGDPLSSQNSKSPQIKTKQLRDYELDFLVAILGLLVNLVEKDSLNRVRLANARVSVNLSQNPDSKEVQRDVIPLLCSIFLASQGTGETAEAISPDDEESLLQGEREAEMMIVEAYAALVLAFLSTESMKVRGAISSCLPDNNLKVLVPVLEKFVSFHLQLNMMTRETHSAVTEVIERCRLS

SEQ ID NO: 161909 - protein, 862 aa, Zea Mays
MIVRTYRRRSRSISEGGGGVSSSQEAFDFDADVDVLGSSASQPLPPSQESSSMWDFDEDPPPSPPRPGKEGRRSGRGGARRGGGLELAEAPAMAPTVTLMEAEEYGEMMESVDDVTFALDGLRPAAQKRTRRASLLALLGICDSAERRRVLRSQGLVQQIIDAILVLDIDDPPCAIAAGALLFVLASDVQDNNLLSSETCVHFLLKLLNPPVNVVDAKAPSIGSKLLGISKFQMLNGSNKDVDSCSEDILLKVEEILLSCKEIKPADRDYKRTTRPELCSKWLALLTMEKACLSAVALEDTSDMVLELGGNFKETLRQLGGLDDIFNVMVNCHSELEKLVKDASTTVVEGKEGAPLQSTTLLLKCLKILENATFLSDNNKTHLLSMSRKLSPKCRSLSFVGVILNIVELLSALSLLQKPSTVSRKADPKNTKVCNGACSADSRGLSLLNHHCKCNNSKKKSILLNRRCQYCSSTKSEASHVTLSSSSDVSQSERILNCSSFSSNGTSSGSFGVKHINGASLKLNVRMDRSKAYPVRGSTGWISMKAQTSDWNSREMAKKRRLSENVRTDLSNGGDDPFAFDDIDQEPSNWDLFGPKRKSPQKRAKRTNGEVLDDCGTALMGSPKLCQPEDIYQSVATSGSKVVDESNLLEDCLLASVKVLMNLANDNPSGCEQIASCGGLNNMASLIIKHFPSFDFSMNSNNQMNESVSSGDPLSSQNSKSPQIKTKQLRDYELDFLVAILGLLVNLVEKDSLNRVRLANARVSVNLSQNPDSKEDDEESLLQGEREAEMMIVEAYAALVLAFLSTESMKVRGAISSCLPDNNLKVLVPVLEKFVSFHLQLNMMTRETHSAVTEVIERCRLS

SEQ ID NO: 161910 - protein, 869 aa, Zea Mays
MIVRTYRRRSRSISEGGGGVSSSQEAFDFDADVDVLGSSASQPLPPSQESSSMWDFDEDPPPSPPRPGKEGRRSGRGGARRGGGLELAEAPAMAPTVTLMEAEEYGEMMESVDDVTFALDGLRPAAQKRTRRASLLALLGICDSAERRRVLRSQGLVQQIIDAILVLDIDDPPCAIAAGALLFVLASDVQDNNLLSSETCVHFLLKLLNPPVNVVDAKAPSIGSKLLGISKFQMLNGSNKDVDSCSEDILLKVEEILLSCKEIKPADRDYKRTTRPELCSKWLALLTMEKACLSAVALEDTSDMVLELGGNFKETLRQLGGLDDIFNVMVNCHSELEKLVKDASTTVVEGKEGAPLQSTTLLLKCLKILENATFLSDNNKTHLLSMSRKLSPKCRSLSFVGVILNIVELLSALSLLQKPSTVSRKADPKNTKVCNGACSADSRGLSLLNHHCKCNNSKKKSILLNRRCQYCSSTKSEASHVTLSSSSDVSQSERILNCSSFSSNGTSSGSFGVKHINGASLKLNVRMDRSKAYPVRGSTGWISMKAQTSDWNSREMAKKRRLSENVRTDLSNGGDDPFAFDDIDQEPSNWDLFGPKRKSPQKRAKRTNGEVLDDCGTALMGSPKLCQPEDIYQSVATSGSKVVDESNLLEDCLLASVKVLMNLANDNPSGCEQIASCGGLNNMASLIIKHFPSFDFSMNSNNQMNESVSSGDPLSSQNSKSPQIKTKQLRDYELDFLVAILGLLVNLVEKDSLNRVRLANARVSVNLSQNPDSKEVQRDVIPLLCSIFLASQGTGETAEAISPDDEESLLQGEREAEMMIVEAYAALVLAFLSTESMKVRGAISSCLPDNNLKVLVPVLEKFVVCFHNF

SEQ ID NO: 161911 - protein, 847 aa, Zea Mays
MIVRTYRRRSRSISEGGGGVSSSQEAFDFDADVDVLGSSASQPLPPSQESSSMWDFDEDPPPSPPRPGKEGRRSGRGGARRGGGLELAEAPAMAPTVTLMEAEEYGEMMESVDDVTFALDGLRPAAQKRTRRASLLALLGICDSAERRRVLRSQGLVQQIIDAILVLDIDDPPCAIAAGALLFVLASDVQDNNLLSSETCVHFLLKLLNPPVNVVDAKAPSIGSKLLGISKFQMLNGSNKDVDSCSEDILLKVEEILLSCKEIKPADRDYKRTTRPELCSKWLALLTMEKACLSAVALEDTSDMVLELGGNFKETLRQLGGLDDIFNVMVNCHSELETHLLSMSRKLSPKCRSLSFVGVILNIVELLSALSLLQKPSTVSRKADPKNTKVCNGACSADSRGLSLLNHHCKCNNSKKKSILLNRRCQYCSSTKSEASHVTLSSSSDVSQSERILNCSSFSSNGTSSGSFGVKHINGASLKLNVRMDRSKAYPVRGSTGWISMKAQTSDWNSREMAKKRRLSENVRTDLSNGGDDPFAFDDIDQEPSNWDLFGPKRKSPQKRAKRTNGEVLDDCGTALMGSPKLCQPEDIYQSVATSGSKVVDESNLLEDCLLASVKVLMNLANDNPSGCEQIASCGGLNNMASLIIKHFPSFDFSMNSNNQMNESVSSGDPLSSQNSKSPQIKTKQLRDYELDFLVAILGLLVNLVEKDSLNRVRLANARVSVNLSQNPDSKEVQRDVIPLLCSIFLASQGTGETAEAISPDDEESLLQGEREAEMMIVEAYAALVLAFLSTESMKVRGAISSCLPDNNLKVLVPVLEKFVSFHLQLNMMTRETHSAVTEVIERCRLS

SEQ ID NO: 161912 - protein, 890 aa, Zea Mays
MIVRTYRRRSRSISEGGGGVSSSQEAFDFDADVDVLGSSASQPLPPSQESSSMWDFDEDPPPSPPRPGKEGRRSGRGGARRGGGLELAEAPAMAPTVTLMEAEEYGEMMESVDDVTFALDGLRPAAQKRTRRASLLALLGICDSAERRRVLRSQGLVQQIIDAILVLDIDDPPCAIAAGALLFVLASDVQDNNLLSSETCVHFLLKLLNPPVNVVDAKAPSIGSKLLGISKFQMLNGSNKDVDSCSEDILLKVEEILLSCKEIKPADRDYKRTTRPELCSKWLALLTMEKACLSAVALEDTSDMVLELGGNFKETLRQLGGLDDIFNVMVNCHSELEKLVKDASTTVVEGKEGAPLQSTTLLLKCLKILENATFLSDNNKTHLLSMSRKLSPKCRSLSFVGVILNIVELLSALSLLQKPSTVSRKADPKNTKVCNGACSADSRGLSLLNHHCKCNNSKKKSILLNRRCQYCSSTKSEASHVTLSSSSDVSQSERILNCSSFSSNGTSSGSFGVKHINGASLKLNVRMDRSKAYPVRGSTGWISMKAQTSDWNSREMAKKRRLSENVRTDLSNGGDDPFAFDDIDQEPSNWDLFGPKRKSPQKRAKRTNGEVLDDCGTALMGSPKLCQPEDIYQSVATSGSKVVDESNLLEDCLLASVKVLMNLANDNPSGCEQIASCGGLNNMASLIIKHFPSFDFSMNSNNQMNESVSSGDPLSSQNSKSPQIKTKQLRDYELDFLVAILGLLVNLVEKDSLNRVRLANARVSVNLSQNPDSKEVQRDVIPLLCSIFLASQGTGETAEAISPDDEESLLQGEREAEMMIVEAYAALVLAFLSTESMKVRGAISSCLPDNNLKVLVPVLEKFVSFHLQLNMMTRETHSAVTEVIERCRLS

SEQ ID NO: 161913 - protein, 830 aa, Zea Mays
MIVRTYRRRSRSISEGGGGVSSSQEAFDFDADVDVLGSSASQPLPPSQESSSMWDFDEDPPPSPPRPGKEGRRSGRGGARRGGGLELAEAPAMAPTVTLMEAEEYGEMMESVDDVTFALDGLRPAAQKRTRRASLLALLGICDSAERRRVLRSQGLVQQIIDAILVLDIDDPPCAIAAGALLFVLASDVQDNNLLSSETCVHFLLKLLNPPVNVVDAKAPSIGSKLLGISKFQMLNGSNKDVDSCSEDILLKVEEILLSCKEIKPADRDYKRTTRPELCSKWLALLTMEKACLSAVALEDTSDMVLELGGNFKETLRQLGGLDDIFNVMVNCHSELEKLVKDASTTVVEGKEGAPLQSTTLLLKCLKILENATFLSDNNKTHLLSMSRKLSPKCRSLSFVGVILNIVELLSALSLLQKPSTVSRKADPKNTKVCNGACSADSRGLSLLNHHCKCNNSKKKSILLNRRCQYCSSTKSEASHVTLSSSSDVSQSERILNCSSFSSNGTSSGSFGVKHINGASLKLNVRMDRSKAYPVRGSTGWISMKAQTSDWNSREMAKKRRLSENVRTDLSNGGDDPFAFDDIDQEPSNWDLFGPKRKSPQKRAKRTNGEVLDDCGTALMGSPKLCQPEDIYQSVATSGSKVVDESNLLEDCLLASVKVLMNLANDNPSGCEQIASCGGLNNMASLIIKHFPSFDFSMNSNNQMNESVSSGDPLSSQNSKSPQIKTKQLRDYELDFLVAILGLLVNLVEKDSLNRVRLANARVSVNLSQNPDSKEVQRDVIPLLCSIFLASQGTGETAEAISPGRLMRTDFYLWSYDLYIHYQALKYPTR

SEQ ID NO: 161914 - protein, 829 aa, Zea Mays
MIVRTYRRRSRSISEGGGGVSSSQEAFDFDADVDVLGSSASQPLPPSQESSSMWDFDEDPPPSPPRPGKEGRRSGRGGARRGGGLELAEAPAMAPTVTLMEAEEYGEMMESVDDVTFALDGLRPAAQKRTRRASLLALLGICDSAERRRVLRSQGLVQQIIDAILVLDIDDPPCAIAAGALLFVLASDVQDNNLLSSETCVHFLLKLLNPPVNVVDAKAPSIGSKLLGISKFQMLNGSNKDVDSCSEDILLKVEEILLSCKEIKPADRDYKRTTRPELCSKWLALLTMEKACLSAVALEDTSDMVLELGGNFKETLRQLGGLDDIFNVMVNCHSELEKLVKDASTTVVEGKEGAPLQSTTLLLKCLKILENATFLSDNNKTHLLSMSRKLSPKCRSLSFVGVILNIVELLSALSLLQKPSTVSRKADPKNTKVCNGACSDSRGLSLLNHHCKCNNSKKKSILLNRRCQYCSSTKSEASHVTLSSSSDVSQSERILNCSSFSSNGTSSGSFGVKHINGASLKLNVRMDRSKAYPVRGSTGWISMKAQTSDWNSREMAKKRRLSENVRTDLSNGGDDPFAFDDIDQEPSNWDLFGPKRKSPQKRAKRTNGEVLDDCGTALMGSPKLCQPEDIYQSVATSGSKVVDESNLLEDCLLASVKVLMNLANDNPSGCEQIASCGGLNNMASLIIKHFPSFDFSMNSNNQMNESVSSGDPLSSQNSKSPQIKTKQLRDYELDFLVAILGLLVNLVEKDSLNRVRLANARVSVNLSQNPDSKEVQRDVIPLLCSIFLASQGTGETAEAISPGRLMRTDFYLWSYDLYIHYQALKYPTR

SEQ ID NO: 161915 - protein, 816 aa, Zea Mays
MIVRTYRRRSRSISEGGGGVSSSQEAFDFDADVDVLGSSASQPLPPSQESSSMWDFDEDPPPSPPRPGKEGRRSGRGGARRGGGLELAEAPAMAPTVTLMEAEEYGEMMESVDDVTFALDGLRPAAQKRTRRASLLALLGICDSAERRRVLRSQGLVQQIIDAILVLDIDDPPCAIAAGALLFVLASDVQDNNLLSSETCVHFLLKLLNPPVNVVDAKAPSIGSKLLGISKFQMLNGSNKDVDSCSEDILLKVEEILLSCKEIKPADRDYKRTTRPELCSKWLALLTMEKACLSAVALEDTSDMVLELGGNFKETLRQLGGLDDIFNVMVNCHSELEKLVKDASTTVVEGKEGAPLQSTTLLLKCLKILENATFLSDNNKTHLLSMSRKLSPKCRSLSFVGVILNIVELLSALSLLQKPSTVSRKADPKNTKVCNGACSADSRGLSLLNHHCKCNNSKKKSILLNRRCQYCSSTKSEASHVTLSSSSDVSQSERILNCSSFSSNGTSSGSFGVKHINGASLKLNVRMDRSKAYPVRGSTGWISMKAQTSDWNSREMAKKRRLSENVRTDLSNGGDDPFAFDDIDQEPSNWDLFGPKRKSPQKRAKRTNGEVLDDCGTALMGSPKLCQPEDIYQSVATSGSKVVDESNLLEDCLLASVKVLMNLANDNPSGCEQIASCGGLNNMASLIIKHFPSFDFSMNSNNQMNESVSSGDPLSSQNSKSPQIKTKQLRDYELDFLVAILGLLVNLVEKDSLNRVRLANARVSVNLSQNPDSKEVQRDVIPLLCSIFLASQGTGETAEAISPAMVTDWTVHLSSL

SEQ ID NO: 161916 - protein, 788 aa, Zea Mays
MIVRTYRRRSRSISEGGGGVSSSQEAFDFDADVDVLGSSASQPLPPSQESSSMWDFDEDPPPSPPRPGKEGRRSGRGGARRGGGLELAEAPAMAPTVTLMEAEEYGEMMESVDDVTFALDGLRPAAQKRTRRASLLALLGICDSAERRRVLRSQGLVQQIIDAILVLDIDDPPCAIAAGALLFVLASDVQDNNLLSSETCVHFLLKLLNPPVNVVDAKAPSIGSKLLGISKFQMLNGSNKDVDSCSEDILLKVEEILLSCKEIKPADRDYKRTTRPELCSKWLALLTMEKACLSAVALEDTSDMVLELGGNFKETLRQLGGLDDIFNVMVNCHSELEKLVKDASTTVVEGKEGAPLQSTTLLLKCLKILENATFLSDNNKTHLLSMSRKLSPKCRSLSFVGVILNIVELLSADSRGLSLLNHHCKCNNSKKKSILLNRRCQYCSSTKSEASHVTLSSSSDVSQSERILNCSSFSSNGTSSGSFGVKHINGASLKLNVRMDRSKAYPVRGSTGWISMKAQTSDWNSREMAKKRRLSENVRTDLSNGGDDPFAFDDIDQEPSNWDLFGPKRKSPQKRAKRTNGEVLDDCGTALMGSPKLCQPEDIYQSVATSGSKVVDESNLLEDCLLASVKVLMNLANDNPSGCEQIASCGGLNNMASLIIKHFPSFDFSMNSNNQMNESVSSGDPLSSQNSKSPQIKTKQLRDYELDFLVAILGLLVNLVEKDSLNRVRLANARVSVNLSQNPDSKEVQRDVIPLLCSIFLASQGTGETAEAISPAMVTDWTVHLSSL

SEQ ID NO: 161917 - protein, 772 aa, Zea Mays
MIVRTYRRRSRSISEGGGGVSSSQEAFDFDADVDVLGSSASQPLPPSQESSSMWDFDEDPPPSPPRPGKEGRRSGRGGARRGGGLELAEAPAMAPTVTLMEAEEYGEMMESVDDVTFALDGLRPAAQKRTRRASLLALLGICDSAERRRVLRSQGLVQQIIDAILVLDIDDPPCAIAAGALLFVLASDVQDNNLLSSETCVHFLLKLLNPPVNVVDAKAPSIGSKLLGISKFQMLNGSNKDVDSCSEDILLKVEEILLSCKEIKPADRDYKRTTRPELCSKWLALLTMEKACLSAVALEDTSDMVLELGGNFKETLRQLGGLDDIFNVMVNCHSELETHLLSMSRKLSPKCRSLSFVGVILNIVELLSALSLLQKPSTVSRKADPKNTKVCNGACSDSRGLSLLNHHCKCNNSKKKSILLNRRCQYCSSTKSEASHVTLSSSSDVSQSERILNCSSFSSNGTSSGSFGVKHINGASLKLNVRMDRSKAYPVRGSTGWISMKAQTSDWNSREMAKKRRLSENVRTDLSNGGDDPFAFDDIDQEPSNWDLFGPKRKSPQKRAKRTNGEVLDDCGTALMGSPKLCQPEDIYQSVATSGSKVVDESNLLEDCLLASVKVLMNLANDNPSGCEQIASCGGLNNMASLIIKHFPSFDFSMNSNNQMNESVSSGDPLSSQNSKSPQIKTKQLRDYELDFLVAILGLLVNLVEKDSLNRVRLANARVSVNLSQNPDSKEVQRDVIPLLCSIFLASQGTGETAEAISPAMVTDWTVHLSSL

SEQ ID NO: 161918 - protein, 850 aa, Zea Mays
MQMPCPIRFMSSMHGLVPFMFYWLNINCLLNLCSSNVSLSAKCKANCSRILLLCYVHALTEVPLTTVFMQYAYGATRLVLMDYDKSRRSNSKKRTHSNSDDGKRKRLNTRHDDTSMFSEPIETIYRILCPVKKIGSVLGRGGDIVKALREETKAKIRVADSIPGADERVIIIFNYQNEPEPTDEAAEEKNSDGLGNFKSHCFAQDALLKIHDKIVSDEIHDEVANDEKSESADDVTARILVQGNQVGCLLGKGGSIIQQLRSNTGAGIRVLPSENLPQCALKSDELVQISGAPSLVRKALYEISTRLHQHPRKENRPLEEIIDASTQRKRESPTLQHEYSMLPHLHSDHTPPIPLLDPYRSGPQYPVTETEEFSIRILCASELIGSVIGKSGANVRRVEQQTGARIKVQEIDKDASGERLIIISSNEIPAEPISPAIEALILLHDKVSAPSEKHHSSTRLVVPSSKVGCIIGEGGKVITDMRRRTGAEIRVYSKADKPKYLSFDDELVQVAGPPTIARGALTEIASRLRTRTLRDTSTANNPPPFAPFDDPPVDMPSRKLSLYGGPATDPPYGRPANDPLYGRPAIDPPFGRPTNDRPYGRTAVAPPFGRPANDPPYGRPTNDPPYGRPSGSIPYGRPNGSAPREPSDAYPVDYFSKREYPSGSPMFTSNAPSAAYERYAAPTRFPTREFPSAFSPGVDHMPHHSYRDHVPTDSYSSRGTQQLGITRGGNSDAYDYTEAAGQIHGREDYREPTSATGRFLSTIELRIPNSSLGSIVGAGGVNLAEIRQVSGARLRLHEAHAGSSESVVEIQGTLDQAKAAQSLLQGFISANSRQQQQPYSSRMPLYPSWG

SEQ ID NO: 161919 - protein, 766 aa, Zea Mays
MLLALFLVLGLYVGCRDPIWGSVNGSRFPQRSGGPHASSPNRTGVATDSDTPFNPPAFLLSCSPLVPALSRGDDLRDRRQRQAPRSSSVLSSETSTQQGATRLVLMDYDKSRRSNSKKRTHSNSDDGKRKRLNTRHDDTSMFSEPIETIYRILCPVKKIGSVLGRGGDIVKALREETKAKIRVADSIPGADERVIIIFNYQNEPEPTDEAAEEKNSDGLGNFKSHCFAQDALLKIHDKIVSDEIHDEVANDEKSESADDVTARILVQGNQVGCLLGKGGSIIQQLRSNTGAGIRVLPSENLPQCALKSDELVQISGAPSLVRKALYEISTRLHQHPRKENRPLEEIIDASTQRKRESPTLQHEYSMLPHLHSDHTPPIPLLDPYRSGPQYPVTETEEFSIRILCASELIGSVIGKSGANVRRVEQQTGARIKVQEIDKDASGERLIIISSNEIPAEPISPAIEALILLHDKVSAPSEKHHSSTRLVVPSSKVGCIIGEGGKVITDMRRRTGAEIRVYSKADKPKYLSFDDELVQVAGPPTIARGALTEIASRLRTRTLRDTSTANNPPPFAPFDDPPVDMPSRKLSLYGGPATDPPYGRPANDPLYGRPAIDPPFGRPTNDRPYGRTAVAPPFGRPANDPPYGRPTNDPPYGRPSGSIPYGRPNGSAPREPSDAYPVDYFSKREYPSGSPMFTSNAPSAAYERYAAPTRFPTREFPSAFSPGVDHMPHHSYRDHVPTDSYSSRGTQQLGITRGGNSDAYDYTEVHP

SEQ ID NO: 161920 - protein, 349 aa, Zea Mays
MLQIRLSKIGSSDSGGAAASTAAGAGAPAAVGAAAALGGSILESVTVACPDHLVIADLPVAKSLGAVTTSAAAATRAIGRRSRRPLGERVHICSRCEFPIAIYGRLIPCEHAFCLSCARSDSSCYLCDERIQKIQSVKMMEGIFICAAPMCLKSFLKKADFEFHVPDVHANLLQTNLEKEEERNESDAPNIPCASAGDTQRQSQMPEMSTARAPPPRPGVSQDREERSRYHQSREQTPLRPPPLSKPPFHGRHSYPPGDTQAENNPPQGFDRPYNWASQSRQESPGKLYDAYEYESAFDLQRTIQLPSPARWKPSVLFCPFPDAAATRYWIRPRFHVKCPASSWPYELP

SEQ ID NO: 161921 - protein, 546 aa, Zea Mays
MPREEKQALVEGTIAEMGLQDCADTVVGNWHLRGISGGEKRRVSIALEILMRPRLLFLDEPTSGLDSASAFFVTQTLRGLARDGGRTVVASVHQPSSDVFLLFDCLYLLSGGRTVYFGKASEACEFFAQAGFPCPPMRNPSDHFLRCINSDFDRVKATLKGSMKTRFERSYDDPLEKITTSEAMSRLVSHYQHSQHYVSAQQKVDEMARLKGTVLDSGGSQASFLMQASTLTKRSFVNMSRDFGYYWLRLIIYVVVTICIGTIYFNVGTGYSSILARGACASFIFGFVTFMSIGGFPSFVEDMKVFQRERLNGHYGVVAFVISNTVSAMPFLVLITLVSGTLCYFMVRLHPGFTHYLFFVLDLYASVTVVESLMMAIASVIPNFLMGIIVGAGIQGIFMLVSGYFRLPHDIPKPFWRYPMSYISFHYWALRGQYQNDLKGLLFDGQQDDVLPSKIPGEFILENVFQMDAGRSKWLDLAVLLCMVVVYRLLFFAMIKAAEDVTPRVRRHVARRRVRSRRRQQPLPARTPSLRGYVVHAAASLPADHP

SEQ ID NO: 161922 - protein, 190 aa, Zea Mays
MFHTCQGCSYTPTRSFGEDNGMDLWSDDEDNEKMSRSWSSTSDESLFNCDVLWSNRKRPGHLYFEFFEVGSPYGRVPLIDKVYELSQGFPGLTSLKSAELSPVSWMSVAWYPIYHIPYQRSVKDLSACFLTYHTISSSFQGMFSSFCLKACLFIRVSVTKLYHFLKFLRHNNLIILICFCTSAKQTLYNR

SEQ ID NO: 161923 - protein, 319 aa, Zea Mays
MGGQWLGEGMPSSNLQCFLDCTTPTVETHILPKTNGRLPTDAWHHAEMDSVEYFNLADLWEQYYEWSAYGAGATVQLPGGDRVVQYYVPYLSGMQLYTNKVLTASSFGEDNGMDLWSDDEDNEKMSRSWSSTSDESLFNCDVLWSNRKRPGHLYFEFFEVGSPYGRVPLIDKVYELSQGFPGLTSLKSAELSPVSWMSVAWYPIYHIPYQRSVKDLSACFLTYHTISSSFQDHGLETMTTDCCHPVANGKQNGHMDKKSNTVSLPPFGLAAHKIQGSLWTNPMTGDRRKMDFLFSAADSWLKQLGVQHHDFNFFITHPM

SEQ ID NO: 161924 - protein, 307 aa, Zea Mays
MAAAARPASAHLLLLAPLPSPPRLSHLIHTRRLYALAPARRPAAARARRESSPPSAPSPPAPADSLDCVGTGSDVECFVDAGAEDAAPLLPALSAGASKDDGKSEGDAAVSASPTGRELLEWASLVSPFFFWGTAMVAMKGVIPRTGPFFVAAIRLLPAGALLVAFAAARGRKQPSGWEAWLAIAAFGLIDAACFQGFLAEGLQKTSAGLGSVIIDSQPLTVAILASLLFGESIGAIGVGGLVLGVVGLLLLEVPALSVEGNDTTIWGSGESLMFLSAQSMAVGTIMVRWVSKYSDPIMATGWVYYP

SEQ ID NO: 161925 - protein, 234 aa, Zea Mays
MAAAARPASAHLLLLAPLPSPPRLSHLIHTRRLYALAPARRPAAARARRESSPPSAPSPPAPADSLDCVGTGSDVECFVDAGAEDAAPLLPALSAGASKDDGKSEGDAAVSASPTGRELLEWASLVSPFFFWGTAMVAMKGVIPRTGPFFVAAIRLLPAGALLVAFAAARGRKQPSGWEAWLAIAAFGLIDAACFQGFLAEGLQKTSAGLGSVRRNPNSGPVLYLIRSSLTRSH

SEQ ID NO: 161926 - protein, 258 aa, Zea Mays
MPGSLDHEEQDVKTFSSWGIDYLKYDNCNDAGRSVMERYTKMSNAMKTYGKGIFFSLCEWGRQNPATWAGGMGNSWRTTDDIADNWGSMTSRADQNDRWASYAGPGGWNDPDMLEVGNGGMSEAEYRSHFSIWALAKAPLLIGCDVRAMSQQTMGILSNSEVIAVNQDSQGAQGKKVQSSNGLEVWAGPLSNNRKAVVLWNRQGYQATITAQWSSIGLASSTAVTARDLWAHSSFSAQGQLSASVPPHDCKMYVLTPN

SEQ ID NO: 161927 - protein, 372 aa, Zea Mays
MRRVVLLEDLKGNMIELSLSGKRALEFDGDQVLDVGQQHHVIAIFVGTLVKLYKGEYTFLSGTSACRWYINENDIAEIKAFQKSLPSEPVPIKKTYLQNDDATHKFEEKSLEQLKHVDPFLDMGQRYQCTATIIGITENQTWCYKACKICNSAIIQKENGYKCTKEGCPSTQFEWKYKIPFIASDHTYNLEFMFFEKKGMELIGKSASTLRKQYEPKEIPPDITSWIGYKFTFVVRVLSKKSVKTIDPSFEVLMIKEKYQKEPIISFISSSGVVPAESSSSTMAEYKELPLLVPITSKDIEKKERSTSQPEHTEETQDMDIEPSGIWEESQISNKRSFGDPNYDKQETTDDKDDLPQFKKIRSTHSQGKSKK

SEQ ID NO: 161928 - protein, 365 aa, Zea Mays
MRRVVLLEDLKGNMIELSLSGKRALEFDGDQVLDVGQQHHVIAIFVGTLVKLYKGEYTFLSGTSACRWYINENDIAEIKAFQKSLPSEPVPIKKTYLQNDDATHKFEEKSLEQLKHGQRYQCTATIIGITENQTWCYKACKICNSAIIQKENGYKCTKEGCPSTQFEWKYKIPFIASDHTYNLEFMFFEKKGMELIGKSASTLRKQYEPKEIPPDITSWIGYKFTFVVRVLSKKSVKTIDPSFEVLMIKEKYQKEPIISFISSSGVVPAESSSSTMAEYKELPLLVPITSKDIEKKERSTSQPEHTEETQDMDIEPSGIWEESQISNKRSFGDPNYDKQETTDDKDDLPQFKKIRSTHSQGKSKK

SEQ ID NO: 161929 - protein, 394 aa, Zea Mays
MVKLNKRTIVLEDKDQIQGFPKYTFSLTPLDKLDQYKNKTDRFIDVIAKISGVSNVAKVPTTSGDQQMRRVVLLEDLKGNMIELSLSGKRALEFDGDQVLDVGQQHHVIAIFVGTLVKLYKGEYTFLSGTSACRWYINENDIAEIKAFQKSLPSEPVPIKKTYLQNDDATHKFEEKSLEQLKHVDPFLDMGQRYQCTATIIGITENQTWCYKACKICNSAIIQKENGYKCTKEGCPSTQFEWKYKIPFIASDHTYNLEFMFFEKKGMELIGKSASTLRKQYEPKEIPPDITSWIGYKFTFVVRVLSKKSVKTIDPSFEVLMIKEKYQKEPIISFISSSGVVPAESSSSTMAEYKELPLLVPITSKDIEKKERSTSQPEHTEETQDMDIEPSGYD

SEQ ID NO: 161930 - protein, 314 aa, Zea Mays
MIELSLSGKRALEFDGDQVLDVGQQHHVIAIFVGTLVKLYKGEYTFLSGTSACRWYINENDIAEIKAFQKSLPSEPVPIKKTYLQNDDATHKFEEKSLEQLKHVDPFLDMGQRYQCTATIIGITENQTWCYKACKICNSAIIQKENGYKCTKEGCPSTQFEWKYKIPFIASDHTYNLEFMFFEKKGMELIGKSASTLRKQYEPKEIPPDITSWIGYKFTFVVRVLSKKSVKTIDPSFEVLMIKEKYQKEPIISFISSSGVVPAESSSSTMAEYKELPLLVPITSKDIEKKERSTSQPEHTEETQDMDIEPSGYD

SEQ ID NO: 161931 - protein, 353 aa, Zea Mays
MRRVVLLEDLKGNMIELSLSGKRALEFDGDQVLDVGQQHHVIAIFVGTLVKLYKGEYTFLSGTSACRWYINENDIAEIKAFQKSLPSEPVPIKKTYLQNDDATHKFEEKSLEQLKHVDPFLDMGQRYQCTATIIGITENQTWCYKACKICNSAIIQKENGYKCTKEGCPSTQFEWKYKIPFIASDHTYNLEFMFFEKKGMELIGKSASTLRKQYEPKEIPPDITSWIGYKFTFVVRVLSKKSVKTIDPSFEVLMIKEKYQKEPIISFISSSGVVPAESSSSTMAEYKELPLLVPITSKDIEKKERSTSQPEHTEETQDMDIEPSGKQLMTKMTFHNSRKSGVPTLKEKAKNDA

SEQ ID NO: 161932 - protein, 420 aa, Zea Mays
MVKLNKRTIVLEDKDQIQGFPKYTFSLTPLDKLDQYKNKTDRFIDVIAKISGVSNVAKVPTTSGDQQMRRVVLLEDLKGNMIELSLSGKRALEFDGDQVLDVGQQHHVIAIFVGTLVKLYKGEYTFLSGTSACRWYINENDIAEIKAFQKSLPSEPVPIKKTYLQNDDATHKFEEKSLEQLKHVDPFLDMGQRYQCTATIIGITENQTWCYKACKICNSAIIQKENGYKCTKEGCPSTQFEWKYKIPFIASDHTYNLEFMFFEKKGMELIGKSASTLRKQYEPKEIPPDITSWIGYKFTFVVRVLSKKSVKTIDPSFEVLMIKEKYQKEPIISFISSSGVVPAESSSSTMAEYKELPLLVPITSKDIEKKERSTSQPEHTEETQDMDIEPSGKQLMTKMTFHNSRKSGVPTLKEKAKNDA

SEQ ID NO: 161933 - protein, 338 aa, Zea Mays
MVKLNKRTIVLEDKDQIQGFPKYTFLSGTSACRWYINENDIAEIKAFQKSLPSEPVPIKKTYLQNDDATHKFEEKSLEQLKHVDPFLDMGQRYQCTATIIGITENQTWCYKACKICNSAIIQKENGYKCTKEGCPSTQFEWKYKIPFIASDHTYNLEFMFFEKKGMELIGKSASTLRKQYEPKEIPPDITSWIGYKFTFVVRVLSKKSVKTIDPSFEVLMIKEKYQKEPIISFISSSGVVPAESSSSTMAEYKELPLLVPITSKDIEKKERSTSQPEHTEETQDMDIEPSGIWEESQISNKRSFGDPNYDKQETTDDKDDLPQFKKIRSTHSQGKSKK

SEQ ID NO: 161934 - protein, 209 aa, Zea Mays
MHHKDLISGKVVLDVGCGTGVLSIFCAFAGATRVYAVDASDIAFQAMEIVRENELSDKVVVLHGRIEDVDIEEKVDVIISEWMGYMLLYESMLGSVIFARDKWLKPGGLILPSHASLYMAPVTNSQRYHDSIYFWRDVYGIKMSSMMPLAKLCAFMEPSVETISGENVLTWPAVVAQVDCYTIQAQKLETITAAFKFTSMLQVTGLIRV

SEQ ID NO: 161935 - protein, 395 aa, Zea Mays
MADLGRRAACADNVAHIVHSLFECLLSRPVGPTETLVRLLPRDPRESPRCRRHTNASTLMFTGAAGGIGNLPRPRRPRLGGIGHGGVMVSPQGQVALGAHPHLAAPPCTDYDVAYFKAYSHIGVHEEMLKDHVRTSTYRNAIMHHKDLISGKVYAVDASDIAFQAMEIVRENELSDKVVVLHGRIEDVDIEEKVDVIISEWMGYMLLYESMLGSVIFARDKWLKPGGLILPSHASLYMAPVTNSQRYHDSIYFWRDVYGIKMSSMMPLAKLCAFMEPSVETISGENVLTWPAVVAQVDCYTIQAQKLETITAAFKFTSMLQGQTWCSSESCFTKSPSHGFEVTSPHFRGKSLPWFIPFRDPTHVGASDIVSTLFISLHSFQSMHILLSSCFALGC

SEQ ID NO: 161936 - protein, 276 aa, Zea Mays
MHHKDLISGKVVLDVGCGTGVLSIFCAFAGATRVYAVDASDIAFQAMEIVRENELSDKVVVLHGRIEDVDIEEKVDVIISEWMGYMLLYESMLGSVIFARDKWLKPGGLILPSHASLYMAPVTNSQRYHDSIYFWRDVYGIKMSSMMPLAKLCAFMEPSVETISGENVLTWPAVVAQVDCYTIQAQKLETITAAFKFTSMLQGQTWCSSESCFTKSPSHGFEVTSPHFRGKSLPWFIPFRDPTHVGASDIVSTLFISLHSFQSMHILLSSCFALGC

SEQ ID NO: 161937 - protein, 328 aa, Zea Mays
MADLGRRAACADNVAHIVHSLFECLLSRPVGPTETLVRLLPRDPRESPRCRRHTNASTLMFTGAAGGIGNLPRPRRPRLGGIGHGGVMVSPQGQVALGAHPHLAAPPCTDYDVAYFKAYSHIGVHEEMLKDHVRTSTYRNAIMHHKDLISGKVYAVDASDIAFQAMEIVRENELSDKVVVLHGRIEDVDIEEKVDVIISEWMGYMLLYESMLGSVIFARDKWLKPGGLILPSHASLYMAPVTNSQRYHDSIYFWRDVYGIKMSSMMPLAKLCAFMEPSVETISGENVLTWPAVVAQVDCYTIQAQKLETITAAFKFTSMLQVTGLIRV

SEQ ID NO: 161938 - protein, 348 aa, Zea Mays
MADLGRRAACADNVAHIVHSLFECLLSRPVGPTETLVRLLPRDPRESPRCRRHTNASTLMFTGAAGGIGNLPRPRRPRLGGIGHGGVMVSPQGQVALGAHPHLAAPPCTDYDVAYFKAYSHIGVHEEMLKDHVRTSTYRNAIMHHKDLISGKVVLDVGCGTGVLSIFCAFAGATRVYAVDASDIAFQAMEIVRENELSDKVVVLHGRIEDVDIEEKVDVIISEWMGYMLLYESMLGSVIFARDKWLKPGGLILPSHASLYMAPVTNSQRYHDSIYFWRDVYGIKMSSMMPLAKLCAFMEPSVETISGENVLTWPAVVAQVDCYTIQAQKLETITAAFKFTSMLQDLVQ

SEQ ID NO: 161939 - protein, 349 aa, Zea Mays
MADLGRRAACADNVAHIVHSLFECLLSRPVGPTETLVRLLPRDPRESPRCRRHTNASTLMFTGAAGGIGNLPRPRRPRLGGIGHGGVMVSPQGQVALGAHPHLAAPPCTDYDVAYFKAYSHIGVHEEMLKDHVRTSTYRNAIMHHKDLISGKVVLDVGCGTGVLSIFCAFAGATRVYAVDASDIAFQAMEIVRENELSDKVVVLHGRIEDVDIEEKVDVIISEWMGYMLLYESMLGSVIFARDKWLKPGGLILPSHASLYMAPVTNSQRYHDSIYFWRDVYGIKMSSMMPLAKLCAFMEPSVETISGENVLTWPAVVAQVDCYTIQAQKLETITAAFKFTSMLQGLIRV

SEQ ID NO: 161940 - protein, 939 aa, Zea Mays
MDSPHVYAIADAALCEMKRDEVNQSIIISGESGAGKTETAKIAMQYLASLGGGSGIEYEILQTNPILEAFGNAKTLRNDNSSRFGKLIEIHFSTTGRICGAMIQTFLLEKSRVVQCAVGERSYHIFYQLCAGAPASLKEKLNLKKVDGYKYLKQSCCYSIAGVDDAQMFRTVTQAMNIVHISKEDQESVFAMVSAVLWLGDVSFTVIDNENHVEIIVDEASKTVSELLGCSIEDLNLALSKRHMKVNNENIVQKLTLAQATDTRDALAKSVYASLFEWLVEQINKSLSVGKRRTGRSISILDIYGFESFDKNSFEQFCINYANERLQQHFNRHLFKLEQEEYVEDGIDWAKVDFEDNQDCLSLFEKKPLGLLSLLDEESTFPNATDLTFANKLKQHLDSNSCFRGERGKAFAVRHYAGEVAYDTSGFLEKNRDLLHMDSIQLLAKCKTSLPKMFASKMLVQSDNSMSVPYRSSAADSQKLSVAMKFKGQLFQLMQRLESTTPHFIRCIKPNNLQLPAIYEQGLVLQQLKCCGVLEVVRISRSGYPTRMTHQKFARRYGFLLEDVASQDPLSVSVAILHQFNILPEMYQVGYTKLFFRTGQIGNLEDTRNRTLHGILRVQSCFRGHQARHHARERTRGVLTLQSFIRGENARQIYSSLLRKHRAAVVLQRNVRCWLARRYFINVRKASVIIQSGIRGSLVRRCNGNIDLINVLREFESKQEAHGDQILIKASVLAELQRRILKAEATVREKDEENEMLHQRLQQYENRWLEYEQKMKAMEEMWQKQMRSLQSSLSVAKKSLVLDETPRMSDSSVDQSWESNGNHHVSSGSQLVPHTGGREMNAGLSVISRLAEEFEQRSQVFADDAKFLVEVKSGQADASLNPDMELRRLKQNFDSWKKDFSGRMRETKVILNKLGNGNESSPNSVKRKWWGRLNTSKFS

SEQ ID NO: 161941 - protein, 1166 aa, Zea Mays
MASVEVRKSRALRARSGPSKLQPARSMPLDYRYSAGASPANGAGGGPDANGVGRRAAAAEAENGGEVVVRLEGGDADSPYSSTAVTAAEEEEVGERGGGGDEVDSAATATPRRLSPRAAASPTEGDARWGDTSSYGAKKKHRVFCQLPNGDWALCTVITTSGDESVVKVSEGKLSYLSEPSVLYNLQYRYSKDMIYTKAGPVLVAVNPFKKVSLYGNEYIDAYRNKSMDSPHVYAIADAALCEMKRDEVNQSIIISGESGAGKTETAKIAMQYLASLGGGSGIEYEILQTNPILEAFGNAKTLRNDNSSRFGKLIEIHFSTTGRICGAMIQTFLLEKSRVVQCAVGERSYHIFYQLCAGAPASLKEKLNLKKVDGYKYLKQSCCYSIAGVDDAQMFRTVTQAMNIVHISKEDQESVFAMVSAVLWLGDVSFTVIDNENHVEIIVDEASKTVSELLGCSIEDLNLALSKRHMKVNNENIVQKLTLAQATDTRDALAKSVYASLFEWLVEQINKSLSVGKRRTGRSISILDIYGFESFDKNSFEQFCINYANERLQQHFNRHLFKLEQEEYVEDGIDWAKVDFEDNQDCLSLFEKKPLGLLSLLDEESTFPNATDLTFANKLKQHLDSNSCFRGERGKAFAVRHYAGEVAYDTSGFLEKNRDLLHMDSIQLLAKCKTSLPKMFASKMLVQSDNSMSVPYRSSAADSQKLSVAMKFKGQLFQLMQRLESTTPHFIRCIKPNNLQLPAIYEQGLVLQQLKCCGVLEVVRISRSGYPTRMTHQKFARRYGFLLEDVASQDPLSVSVAILHQFNILPEMYQVGYTKLFFRTGQIGNLEDTRNRTLHGILRVQSCFRGHQARHHARERTRGVLTLQSFIRGENARQIYSSLLRKHRAAVVLQRNVRCWLARRYFINVRKASVIIQSGIRGSLVRRCNGNIDLINVLREFESKQEAHGDQILIKASVLAELQRRILKAEATVREKDEENEMLHQRLQQYENRWLEYEQKMKAMEEMWQKQMRSLQSSLSVAKKSLVLDETPRMSDSSVDQSWESNGNHHVSSGSQLVPHTGGREMNAGLSVISRLAEEFEQRSQVFADDAKFLVEVKSGQADASLNPDMELRRLKQNFDSWKKDFSGRMRETKVILNKLGNGNESSPNSVKRKWWGRLNTSKFS

SEQ ID NO: 161942 - protein, 566 aa, Zea Mays
MDSPHVYAIADAALCEMKRDEVNQSIIISGESGAGKTETAKIAMQYLASLGGGSGIEYEILQTNPILEAFGNAKTLRNDNSSRFGKLIEIHFSTTGRICGAMIQTFLLEKSRVVQCAVGERSYHIFYQLCAGAPASLKEKLNLKKVDGYKYLKQSCCYSIAGVDDAQMFRTVTQAMNIVHISKEDQESVFAMVSAVLWLGDVSFTVIDNENHVEIIVDEASKTVSELLGCSIEDLNLALSKRHMKVNNENIVQKLTLAQATDTRDALAKSVYASLFEWLVEQINKSLSVGKRRTGRSISILDIYGFESFDKNSFEQFCINYANERLQQHFNRHLFKLEQEEYVEDGIDWAKVDFEDNQDCLSLFEKKPLGLLSLLDEESTFPNATDLTFANKLKQHLDSNSCFRGERGKAFAVRHYAGEVAYDTSGFLEKNRDLLHMDSIQLLAKCKTSLPKMFASKMLVQSDNSMSVPYRSSAADSQKLSVAMKFKGQLFQLMQRLESTTPHFIRCIKPNNLQLPAIYEQGLVLQQLKCCGVLEVVRISRSGYPTRMTHQKFARRCNSSSVQHFT

SEQ ID NO: 161943 - protein, 119 aa, Zea Mays
MPPPPSTLAVSRPRPASSPAQYAVRSSLGDYPGSFFLSSRTDGGAACDLHRRGPSTDRLPRDIITSNLRWGVRCYEHVTLNLLVLEWITVVRNFCWDCDIKKLKLSYLPAENALLKLQR

SEQ ID NO: 161944 - protein, 620 aa, Zea Mays
MLFGICFYVLVTILTNGEKQRGMATLVEGDLGHTEEALIQTHICSISSEIRSLQEKSWDISLKLKNRKLVETKLAGFVEEIVAPPGLVNILVNGEVNEGYARSLEILSRKLKFVQVDPLINASKALNDIKQELERLRQKALSKISSHIMEIFFAMRNPGTNIQILQQNLLQKHRYLVLFLKEHGSETYGDLCASYVDTMNKVLSTYFHVYVEALEKLKLEIGVPSDFNGHDTSIIDIIIRGREHLRNHGFMFSLGERANILKEIHQPGLVPHISQGNSRTYPYEVIFRSLQKLLMDTASSEYLFMESFFGEESLFYQVFEGPFAVIDQHLDITLPNCHDAVCLMLIICITRKHQLVMCNRQLSCLDNYFDKALMYLWPRFKVVFDMYIQSLYQCDAKTLWIDGTHPHHIARCYVEFTASLVQLNAECGDGQLDMNLERLQSAIEFLLVRLAQTFTTTKLQHLFLLNNYDMAISVLKETGDEAKKLQKYFEEKLESNMMAFVDDLLMEHFSDLLRFVRSHVSEDLVSYTENTNIADVEPVVKNFAMKWRIALELMHNEVITSCTNLLSGMAILKAAMTQLLNDYNRLSECVKKITGGSTLNRHMVSITSISYEIRKYSRTL

SEQ ID NO: 161945 - protein, 472 aa, Zea Mays
MEIFFAMRNPGTNIQILQQNLLQKHRYLVLFLKEHGSETYGDLCASYVDTMNKVLSTYFHVYVEALEKLKLEIGVPSDFNGHDTSIIDIIIRGREHLRNHGFMFSLGERANILKEIHQPGLVPHISQGNSRTYPYEVIFRSLQKLLMDTASSEYLFMESFFGEESLFYQVFEGPFAVIDQHLDITLPNCHDAVCLMLIICITRKHQLVMCNRQLSCLDNYFDKALMYLWPRFKVVFDMYIQSLYQCDAKTLWIDGTHPHHIARCYVEFTASLVQLNAECGDGQLDMNLERLQSAIEFLLVRLAQTFTTTKLQHLFLLNNYDMAISVLKETGDEAKKLQKYFEEKLESNMMAFVDDLLMEHFSDLLRFVRSHVSEDLVSYTENTNIADVEPVVKNFAMKWRIALELMHNEVITSCTNLLSGMAILKAAMTQLLNDYNRLSECVKKITGGSTLNRHMVSITSISYEIRKYSRTL

SEQ ID NO: 161946 - protein, 679 aa, Zea Mays
MVLAFPKESNKIAPFTYVLLEVNMTLSYLPLCLHPTPTYLTQLLRSLSYLWSYQSYRSLHVSLCCSQVLVTILTNGEKQRGMATLVEGDLGHTEEALIQTHICSISSEIRSLQEKSWDISLKLKNRKLVETKLAGFVEEIVAPPGLVNILVNGEVNEGYARSLEILSRKLKFVQVDPLINASKALNDIKQELERLRQKALSKISSHIMEIFFAMRNPGTNIQILQQNLLQKHRYLVLFLKEHGSETYGDLCASYVDTMNKVLSTYFHVYVEALEKLKLEIGVPSDFNGHDTSIIDIIIRGREHLRNHGFMFSLGERANILKEIHQPGLVPHISQGNSRTYPYEVIFRSLQKLLMDTASSEYLFMESFFGEESLFYQVFEGPFAVIDQHLDITLPNCHDAVCLMLIICITRKHQLVMCNRQLSCLDNYFDKALMYLWPRFKVVFDMYIQSLYQCDAKTLWIDGTHPHHIARCYVEFTASLVQLNAECGDGQLDMNLERLQSAIEFLLVRLAQTFTTTKLQHLFLLNNYDMAISVLKETGDEAKKLQKYFEEKLESNMMAFVDDLLMEHFSDLLRFVRSHVSEDLVSYTENTNIADVEPVVKNFAMKWRIALELMHNEVITSCTNLLSGMAILKAAMTQLLNDYNRLSECVKKITGGSTLNRHMVSITSISYEIRKYSRTL

SEQ ID NO: 161947 - protein, 656 aa, Zea Mays
MAGTHKKRMEDRFGSFFSFDEDSESEDISLDELEEELKEHKNCDVLVTILTNGEKQRGMATLVEGDLGHTEEALIQTHICSISSEIRSLQEKSWDISLKLKNRKLVETKLAGFVEEIVAPPGLVNILVNGEVNEGYARSLEILSRKLKFVQVDPLINASKALNDIKQELERLRQKALSKISSHIMEIFFAMRNPGTNIQILQQNLLQKHRYLVLFLKEHGSETYGDLCASYVDTMNKVLSTYFHVYVEALEKLKLEIGVPSDFNGHDTSIIDIIIRGREHLRNHGFMFSLGERANILKEIHQPGLVPHISQGNSRTYPYEVIFRSLQKLLMDTASSEYLFMESFFGEESLFYQVFEGPFAVIDQHLDITLPNCHDAVCLMLIICITRKHQLVMCNRQLSCLDNYFDKALMYLWPRFKVVFDMYIQSLYQCDAKTLWIDGTHPHHIARCYVEFTASLVQLNAECGDGQLDMNLERLQSAIEFLLVRLAQTFTTTKLQHLFLLNNYDMAISVLKETGDEAKKLQKYFEEKLESNMMAFVDDLLMEHFSDLLRFVRSHVSEDLVSYTENTNIADVEPVVKNFAMKWRIALELMHNEVITSCTNLLSGMAILKAAMTQLLNDYNRLSECVKKITGGSTLNRHMVSITSISYEIRKYSRTL

SEQ ID NO: 161948 - protein, 1515 aa, Zea Mays
MADAATSEDADLPPPPPPAQLPPPRRPHKRLQPRGYQVEVFAAALRGNTIAVLDTGSGKTMVAIMLAREHVLRARAGEALRRIVVFLAPTVHLVHQQFEVIREYTDLDAVECHGASGVGHWNAKRWKEAIGTKEIVVMTPQILLDALRHAFLTMRVMSLLIFDECHRACGNHPYSLIMKEFYIDSEWRPAIFGMTASPVSKKGASTIEDCEAQIAQLELVLDAKVYIVEDRNELESFSTGAKVVNKYYDPYLFDLDNLESKLQMLFEEFDGLLVRLQESSPNKFEDTDSILEMSRKSLSRCHGKILYELNTLGPIVTLEVVKIYNESINTIDDSEDCVFSKESLNLQVSYFKEALFLIEDFLPQGYGELMKSESGSAELTKKGYISSKVESLINIFKSFGSSEEVLCMIFVERITTAKAVERFMRGNVNFSRFSISYLTGGSTSKDALSPAVQRFTLDLFRAGKVNLLFTTDVTEEGIDVPNCSCVIRFDLPRTVCSYVQSRGRARKSSSSYVLMIERGNLAQQEHIFRIIRTEYYVKTFALHKQPNTPSLDLPLQEKYIYHVESTGATITAECCVNLIYKYCEKLPKDRYYLPKPCFEVGLKDGSYQCTLTMPHNAAFRSIVGPPSSSCNLAKQLVCLEACKKLHELGELDDHLVPLTEEPMDIDTDTTDKKCVSGPGTTKRKELHGTINVHGLSGNWIHESETVILNAYTFDFRCDQEGELYAGFVLLMESVLDDDVARSEIDLFLIPNKMVYTTMTPCGKIQLNKEQLCKGKLFQEFFFNGIFGRLFHGSRTDELQREFIFTKGHEIQWGSDNMYLLLPLRNSSQIQHDPNIYWEAVESCSGTVEQLRNLYLEDGNLNHENLCSHKRSNKGEDIIHLANKSLHFSTVKDSVVLSLHTGRIYSVLDLILDKTADDSFDEMYNGKASPFASFVDYYHQKYGIVIQHPGQPLLLLKQSHNAHNLLFSKMKYQDGSTGNPLLVEKEQIHARVPPELLIHIDVATDILKSFYLLPSVMHRVQSLMLASQLRSNISYIQRIPSSLILEAITTLRCCESFSLERLELLGDSVLKYVIGCDLFLRYPMKHEGHLSDMRSKAVCNATLHKHGIWQSLQGYIRDAAFDPRRWVAPGQISLRPFPCNCGIETAFVPFNGGYISDDPSFVVGKPCDRGHRWMCSKTVSDCVEALVGAYYVGGGIAAAIWVMRWFGIDVRCDMELVQKAKYNSNASRMCYLSKIKDIEELEAKLKYNFSVKGLLLEAISHPSVQELGVDYCYQRLEFLGDSVLDLLITQHLYATHTDVDPGELTDLRSASVSNENFAQAVVRNNIHNHLQHGSGILLEQVTEYVRSNLEYHGKENQFLQQATCKAPKVLGDIMESITGAIFIDVNFDVDLVWKIVEPLLSPMITPDKLALPPYRELLELCSHLGCFIESKCTSEGEELIIEMKVQLRDEQLIAQGHDRNGKTAKANAAARILVDMKKRGLSLKQCISKANQLDIVSSKLQSELTNYRISVVGIAT

SEQ ID NO: 161949 - protein, 1644 aa, Zea Mays
MADAATSEDADLPPPPPPAQLPPPRRPHKRLQPRGYQVEVFAAALRGNTIAVLDTGSGKTMVAIMLAREHVLRARAGEALRRIVVFLAPTVHLVHQQFEVIREYTDLDAVECHGASGVGHWNAKRWKEAIGTKEIVVMTPQILLDALRHAFLTMRVMSLLIFDECHRACGNHPYSLIMKEFYIDSEWRPAIFGMTASPVSKKGASTIEDCEAQIAQLELVLDAKVYIVEDRNELESFSTGAKVVNKYYDPYLFDLDNLESKLQMLFEEFDGLLVRLQESSPNKFEDTDSILEMSRKSLSRCHGKILYELNTLGPIVTLEVVKIYNESINTIDDSEDCVFSKESLNLQVSYFKEALFLIEDFLPQGYGELMKSESGSAELTKKGYISSKVESLINIFKSFGSSEEVLCMIFVERITTAKAVERFMRGNVNFSRFSISYLTGGSTSKDALSPAVQRFTLDLFRAGKVNLLFTTDVTEEGIDVPNCSCVIRFDLPRTVCSYVQSRGRARKSSSSYVLMIERGNLAQQEHIFRIIRTEYYVKTFALHKQPNTPSLDLPLQEKYIYHVESTGATITAECCVNLIYKYCEKLPKDRYYLPKPCFEVGLKDGSYQCTLTMPHNAAFRSIVGPPSSSCNLAKQLVCLEACKKLHELGELDDHLVPLTEEPMDIDTDTTDKKCVSGPGTTKRKELHGTINVHGLSGNWIHESETVILNAYTFDFRCDQEGELYAGFVLLMESVLDDDVARSEIDLFLIPNKMVYTTMTPCGKIQLNKEQLCKGKLFQEFFFNGIFGRLFHGSRTDELQREFIFTKGHEIQWGSDNMYLLLPLRNSSQIQHDPNIYWEAVESCSGTVEQLRNLYLEDGNLNHENLCSHKRSNKGEDIIHLANKSLHFSTVKDSVVLSLHTGRIYSVLDLILDKTADDSFDEMYNGKASPFASFVDYYHQKYGIVIQHPGQPLLLLKQSHNAHNLLFSKMKYQDGSTGNPLLVEKEQIHARVPPELLIHIDVATDILKSFYLLPSVMHRVQSLMLASQLRSNISYIQRIPSSLILEAITTLRCCESFSLERLELLGDSVLKYVIGCDLFLRYPMKHEGHLSDMRSKAVCNATLHKHGIWQSLQGYIRDAAFDPRRWVAPGQISLRPFPCNCGIETAFVPFNGGYISDDPSFVVGKPCDRGHRWMCSKTVSDCVEALVGAYYVGGGIAAAIWVMRWFGIDVRCDMELVQKAKYNSNASRMCYLSKIKDIEELEAKLKYNFSVKGLLLEAISHPSVQELGVDYCYQRLEFLGDSVLDLLITQHLYATHTDVDPGELTDLRSASVSNENFAQAVVRNNIHNHLQHGSGILLEQVTEYVRSNLEYHGKENQFLQQATCKAPKVLGDIMESITGAIFIDVNFDVDLVWKIVEPLLSPMITPDKLALPPYRELLELCSHLGCFIESKCTSEGEELIIEMKVQLRDEQLIAQGHDRNGKTAKANAAARILVDMKKRGLSLKQCISKANQLDIVSSKLQSELTNLESRHDCPHMNGTLSLGLSSARAAVVLPLKMDKGGPRTALFRLCKSLQWPIPEFEFVEQRFRTPIVLDGVTTTNFNSFVSTITLHIPDVTVITLQGEPRTDKKRSQDSASLLMLKKFEELGVCICETQPSNMDNNNNAS

SEQ ID NO: 161950 - protein, 398 aa, Zea Mays
MLREKLGIDSINISSSPLGSKHEEFDGSVNMDDKDSDDSNIAAGPGSKNLSSDLTAVPRIKILKVVPMQNVDHDYIINIFDQISEEDDDNDDHEVENESSEDVDNDDNSGVAETVSAEENGDESGDESDIETLVSFDFVSENNVYASRPSAEAFERMPARLEKRDRFSFSFYTEEYSKKLDAGKARQTSKETVGLHADQQDYDGFVQLDRVKLSGSNKKLSILQLGIKQNNKVQQKLHGVTHFSRIQMPIFSDPLTGLYVTTSGFDSEILSLQRKFGQWRDDGSSEEHSDLLFYEHVEAVKLTGDNLMPAGQVVFRAKVGERYQLPHKGIIPRELGVIARYKGQRKIADPGFQNPRWVDGELLIIDGKFIRDGPVIAFFYWTSNFHRFEFFRRLRLPE

SEQ ID NO: 161951 - protein, 550 aa, Zea Mays
MPVRIAKCYMSSLLQLQAAVYREDYRTAHKLRLAIAATSKNDAVGRAISDLNMAIDEERYKDAAYIRDHAGAGLLGWWSGISGNLSDPYGLIIRISAEHGRYVARSYDTRQLASDSPGLPIFEIYFAEANGGYNLQAVHLKPDGSDSDQVPNMLREKLGIDSINISSSPLGSKHEEFDGSVNMDDKDSDDSNIAAGPGSKNLSSDLTAVPRIKILKVVPMQNVDHDYIINIFDQISEEDDDNDDHEVENESSEDVDNDDNSGVAETVSAEENGDESGDESDIETLVSFDFVSENNVYASRPSAEAFERMPARLEKRDRFSFSFYTEEYSKKLDAGKARQTSKETVGLHADQQDYDGFVQLDRVKLSGSNKKLSILQLGIKQNNKVQQKLHGVTHFSRIQMPIFSDPLTGLYVTTSGFDSEILSLQRKFGQWRDDGSSEEHSDLLFYEHVEAVKLTGDNLMPAGQVVFRAKVGERYQLPHKGIIPRELGVIARYKGQRKIADPGFQNPRWVDGELLIIDGKFIRDGPVIAFFYWTSNFHRFEFFRRLRLPE

SEQ ID NO: 161952 - protein, 601 aa, Zea Mays
MASVSTAPRAPLPAAASSSLSARQVDPNPSGSHFLDGRRLRVVRRLAGAAPSRRAPLVCCSARSPDADAGDERRRRGWDAMLHDAFKGAVRRWSEYVSNYWPPPTSVKEAGTGKRVGRSHEEEVMNGDEEERKVGEEEGKWSWARWKRHFALIEESGRLVDELQLQLQAAVYREDYRTAHKLRLAIAATSKNDAVGRAISDLNMAIDEERYKDAAYIRDHAGAGLLGWWSGISGNLSDPYGLIIRISAEHGRYVARSYDTRQLASDSPGLPIFEIYFAEANGGYNLQAVHLKPDGSDSDQVPNMLREKLGIDSINISSSPLGSKHEEFDGSVNMDDKDSDDSNIAAGPGSKNLSSDLTAVPRIKILKVVPMQNVDHDYIINIFDQISEEDDDNDDHEVENESSEDVDNDDNSGVAETVSAEENGDESGDESDIETLVSFDFVSENNVYASRPSAEAFERMPARLEKRDRFSFSFYTEEYSKKLDAGKARQTSKETVGLHADQQDYDGFVQLDRVKLSGSNKKLSILQLGIKQNNKVQQKLHGVTHFSRIQMPIFSDPLTGLFQIVYLPLELFVMCILSSFFFLVLTEIYSLGRFICDHIRI

SEQ ID NO: 161953 - protein, 115 aa, Zea Mays
MRSWDLGALGVCPPCEYDREACLSYQMCLFLTNLSINVMHHCETVHLICYLMYYGLASRSELYNVMGGWDLGTLELVWEPQTRLILAPPIPSGFVAPKLALRVFLFAFSSFVFQL

SEQ ID NO: 161954 - protein, 444 aa, Zea Mays
MEVAMVVSARASLLILVISLCSPYKFIQSPMDLGPLNLLPTTSTAAASSDFGRILFRAPAAVLRPQSPRDISMLLSFLSGSPSLSRVTVAARGAGHSIHGQAQAPDGIVVETRSLPGEMEFHHVRGGGEGRASYADVGGGVLWIELLERSLKLGLAPRSWTDYLYLTVGGTLSNAGISGQTFKHGPQISNVLQLEVVTGRGEIVECSPSKEADLFNAVLGGLGQFGIITRARILLQEAPEKVTWVRAFYDDLGAFTRDQELLVSIPDSVDYVEGFMVLNERSLHSSSIAFPASVDFSPDFGTRSSPRIYYCVEFAVHHHHGYQKQSQAAVEAISRRMSHMASQLYSVEVSYLDFLNRVRMEEVSLRSAGMWEEVHHPWLNMFVPKPGVAGFRDLLMDNVSPDSFQGLILIYPLLRDNFQEVQVGQASISLHYPQQVASLRCLQW

SEQ ID NO: 161955 - protein, 282 aa, Zea Mays
MADFGVLHRNELSGALTGLTRVRRFQQDDAHIFCREDQIKDEVKAVLEFINYVYEIFGFKYELELSTRPEKYLGEIETWNKAEQQLTEALNEFGKPWKINEGDGAFYGPKIDIGVFDALKRKFQCATLQLDFQLPIRFKLTYSAEDEAKIERPVMIHRAILGSVERMFAILLEHYNGKWPLWLSPRQAIVCSVSSGSVEYAKQVLAMLHEADFHVDIDVSDRTIQKKVREAQVAQFNYILVVGAQEAETGNVCVRVRDNADLATMSVDGLITRLREEIVAFK

SEQ ID NO: 161956 - protein, 380 aa, Zea Mays
MNLGPGSCFFLPHGARIYNKLMNFMRKQYRDRGYQEVLSPNIYNMQLWETSGHAANYKENMFVFEIEKQEFGLKPMNCPGHCLMFANRVRSYRELPLRMADFGVLHRNELSGALTGLTRVRRFQQDDAHIFCREDQIKDEVKAVLEFINYVYEIFGFKYELELSTRPEKYLGEIETWNKAEQQLTEALNEFGKPWKINEGDGAFYGPKIDIGVFDALKRKFQCATLQLDFQLPIRFKLTYSAEDEAKIERPVMIHRAILGSVERMFAILLEHYNGKWPLWLSPRQAIVCSVSSGSVEYAKQVLAMLHEADFHVDIDVSDRTIQKKVREAQVAQFNYILVVGAQEAETGNVCVRVRDNADLATMSVDGLITRLREEIVAFK

SEQ ID NO: 161957 - protein, 541 aa, Zea Mays
MAAAVAMRSGSSDGGGGYEKSGMDTGKYVRYTPEQVEALERVYAECPKPSSARRQQLLRECPILSNIEAKQIKVWFQNRRCRDKQRNESSRLQSVNRKLTAMNKLLMEENERLQKQVSQLVHENAYMKQQLQNPSLATDASCESNATTPANLRDASNPSGLLAIAEETLTEFLSKATGTAIDWVQMPGMKPGPDSFGIVTISHGGRGVAARACGLVNLEPTKIVEILKDRPSWFRDCRSLEVYTMLPAGNGGTIELVYMQMYAPTTLVPARDFWTLRYTTTMEDGSLVVCERSLSGSGDGQSAATTQQFVRAEMLPSGYLVRQCEGGGSIVRIVDHLDLDAWSVPEVLRPLYESSRVVAQKMTTTALRHLRQIAQETSGEVVYALGRQPAVLRTFSQRLSRGFNDAISGFNDDGWSVMCGDGMEDVIIACNSKKIRSSSNPATGFGAPGPGGIICAKASMLLQSVPPAVLVRFLREHRSEWADYNFDAYSASALKTSPCSLPGLRPMRFSGSQIIMPLAHTVENEEVVPYHQYADLRSCSS

SEQ ID NO: 161958 - protein, 810 aa, Zea Mays
MAAAVAMRSGSSDGGGGYEKSGMDTGKYVRYTPEQVEALERVYAECPKPSSARRQQLLRECPILSNIEAKQIKVWFQNRRCRDKQRNESSRLQSVNRKLTAMNKLLMEENERLQKQVSQLVHENAYMKQQLQNPSLATDASCESNATTPANLRDASNPSGLLAIAEETLTEFLSKATGTAIDWVQMPGMKPGPDSFGIVTISHGGRGVAARACGLVNLEPTKIVEILKDRPSWFRDCRSLEVYTMLPAGNGGTIELVYMQMYAPTTLVPARDFWTLRYTTTMEDGSLVVCERSLSGSGDGQSAATTQQFAWSVPEVLRPLYESSRVVAQKMTTTALRHLRQIAQETSGEVVYALGRQPAVLRTFSQRLSRGFNDAISGFNDDGWSVMCGDGMEDVIIACNSKKIRSSSNPATGFGAPGPGGIICAKASMLLQSVPPAVLVRFLREHRSEWADYNFDAYSASALKTSPCSLPGLRPMRFSGSQIIMPLAHTVENEEILEVVRLEGQTLTHDEGLLSRDIHLLQLCTGMDEKSMGSCFQLVFAPIDELFPDDAPLVSSGFRVIPLDIKTDGPPSGRTLDLASSLEVGATTQQVAGNGSQDVCNLRSVLTIAFQFPYETHLQDTVAAMARQYVRSIVSAVQRVSMAISPSHSGLNTAGQKLISGSPEAATLVRWICQSYRYHLGVDLVSHSDQAGESLLRMFWDHQDAVLCCSFKEKPVFTFGNQMGVDMLETTLVALQDLTLDKIFDEPGRKALHAEVPKLMEQGYAYLPAGVCLSGMGRHVSYEQAVAWKVLGEDGNVHCLAFCFVNWSFI

SEQ ID NO: 161959 - protein, 419 aa, Zea Mays
MEDVIIACNSKKIRSSSNPATGFGAPGPGGIICAKASMLLQSVPPAVLVRFLREHRSEWADYNFDAYSASALKTSPCSLPGLRPMRFSGSQIIMPLAHTVENEEILEVVRLEGQTLTHDEGLLSRDIHLLQLCTGMDEKSMGSCFQLVFAPIDELFPDDAPLVSSGFRVIPLDIKTDGPPSGRTLDLASSLEVGATTQQVAGNGSQDVCNLRSVLTIAFQFPYETHLQDTVAAMARQYVRSIVSAVQRVSMAISPSHSGLNTAGQKLISGSPEAATLVRWICQSYRYHLGVDLVSHSDQAGESLLRMFWDHQDAVLCCSFKEKPVFTFGNQMGVDMLETTLVALQDLTLDKIFDEPGRKALHAEVPKLMEQGYAYLPAGVCLSGMGRHVSYEQAVAWKVLGEDGNVHCLAFCFVNWSFI

SEQ ID NO: 161960 - protein, 460 aa, Zea Mays
MRSGSSDGGGGYEKSGMDTGKYVRYTPEQVEALERVYAECPKPSSARRQQLLRECPILSNIEAKQIKVWFQNRRCRDKQRNESSRLQSVNRKLTAMNKLLMEENERLQKQVSQLVHENAYMKQQLQNPSLATDASCESNATTPANLRDASNPSGLLAIAEETLTEFLSKATGTAIDWVQMPGMKPGPDSFGIVTISHGGRGVAARACGLVNLEPTKIVEILKDRPSWFRDCRSLEVYTMLPAGNGGTIELVYMQMYAPTTLVPARDFWTLRYTTTMEDGSLVVCERSLSGSGDGQSAATTQQFVRAEMLPSGYLVRQCEGGGSIVRIVDHLDLDAWSVPEVLRPLYESSRVVAQKMTTTALRHLRQIAQETSGEVVYALGRQPAVLRTFSQRLSRGFNDAISGFNDDGWSVMCGDGMEDVIIACNSKKIRSSSNPATGFGAPGPGGIICAKASMLLQLQH

SEQ ID NO: 161961 - protein, 535 aa, Zea Mays
MRSGSSDGGGGYEKSGMDTGKYVRYTPEQVEALERVYAECPKPSSARRQQLLRECPILSNIEAKQIKVWFQNRRCRDKQRNESSRLQSVNRKLTAMNKLLMEENERLQKQVSQLVHENAYMKQQLQNPSLATDASCESNATTPANLRDASNPSGLLAIAEETLTEFLSKATGTAIDWVQMPGMKPGPDSFGIVTISHGGRGVAARACGLVNLEPTKIVEILKDRPSWFRDCRSLEVYTMLPAGNGGTIELVYMQMYAPTTLVPARDFWTLRYTTTMEDGSLVVCERSLSGSGDGQSAATTQQFVRAEMLPSGYLVRQCEGGGSIVRIVDHLDLDAWSVPEVLRPLYESSRVVAQKMTTTALRHLRQIAQETSGEVVYALGRQPAVLRTFSQRLSRGFNDAISGFNDDGWSVMCGDGMEDVIIACNSKKIRSSSNPATGFGAPGPGGIICAKASMLLQSVPPAVLVRFLREHRSEWADYNFDAYSASALKTSPCSLPGLRPMRFSGSQIIMPLAHTVENEEVVPYHQYADLRSCSS

SEQ ID NO: 161962 - protein, 475 aa, Zea Mays
MRKRDLLLRRYWRREDDGTYVILYHSVFHYKCRPEKGYIRACLKSGGYVISPVNQGRQSVVKHMLAIDWKFWKSYLFTSSAKYITIRMLGRVAALREFFRAKNGNCSCMEFSSGELTRDTGLPQGENQRINLEMQQENENGRLEGPTEGSLGGSNRHLSSTGSFVQLNDAADEFFDVPDESEYDQREVMFPSDESLHAADQRHAKLSTAAVFVKRLHDLAVQKRGYIDLQGAADADNGPCCYGYTLPKDSSYTVPSTWAMTDPTTFLIRGETYLHDRIKIKANSTLMQMVGADWIKSDKREDDLAGRPGGLVQKCAAQGGTRFFFIVNIQVPGSTTYSLALYYMMDTPLEKVPLLERFVNGDDAFRNSRFKLIPYISKGSWIVKQSVGKKACLVGQALEINYFRGRNYLELGVDIGSSTVARGVVSLVLGYLNNLVIEMAFLVQGNTNEELPEFLLGTCRLNYLDASKAVSIDEC

SEQ ID NO: 161963 - protein, 412 aa, Zea Mays
MLAIDWKFWKSYLFTSSAKYITIRMLGRVAALREFFRAKNGNCSCMEFSSGELTRDTGLPQGENQRINLEMQQENENGRLEGPTEGSLGGSNRHLSSTGSFVQLNDAADEFFDVPDESEYDQREVMFPSDESLHAADQRHAKLSTAAVFVKRLHDLAVQKRGYIDLQGAADADNGPCCYGYTLPKDSSYTVPSTWAMTDPTTFLIRGETYLHDRIKIKANSTLMQMVGADWIKSDKREDDLAGRPGGLVQKCAAQGGTRFFFIVNIQVPGSTTYSLALYYMMDTPLEKVPLLERFVNGDDAFRNSRFKLIPYISKGSWIVKQSVGKKACLVGQALEINYFRGRNYLELGVDIGSSTVARGVVSLVLGYLNNLVIEMAFLVQGNTNEELPEFLLGTCRLNYLDASKAVSIDEC

SEQ ID NO: 161964 - protein, 369 aa, Zea Mays
MSGGKSPAVGGEEMSDGAGSRTGVAGALGLSVTSSVAIVICNKYLISTLGFFFGHDDADELAPHGDLLHAVRCAAAALLRAKADRRAHRHLLRPAQRHLHWPPQPLPRVQLCWLLPDDQAGHHTLHHSLGNPLSEQEVQSIKASLMVLLLGVGIASVTDLQLNLLGSIIAVLTIAATCVGQILTNQIQRRLKVSSTQLLYQSSPYQSAVLLVTGPFVDKLLTKRDVFAFSYTTQVVVFILLSCSIAVCVNFSTFLVIGTTSPVTYQVLGHLKTCLVLSFGYIILKDPFSARNVVGILIAIFGMGLYSYYSVVESRKKTEDASSLPVAAQMSEKDSAPLLGAKSSPRTENKAEETFDYMPRTAKSAFTGR

SEQ ID NO: 161965 - protein, 384 aa, Zea Mays
MQCGTNKLCVQRLKLLHVRREVTGRRRGGDVGRRGLPDGRRWRAGPLGHLVGGHRHLQQVPHQHSRLLLRDDADELAPHGDLLHAVRCAAAALLRAKADRRAHRHLLRPAQRHLHWPPQPLPRVQLCWLLPDDQAGHHTLHHSLGNPLSEQEVQSIKASLMVLLLGVGIASVTDLQLNLLGSIIAVLTIAATCVGQILTNQIQRRLKVSSTQLLYQSSPYQSAVLLVTGPFVDKLLTKRDVFAFSYTTQVVVFILLSCSIAVCVNFSTFLVIGTTSPVTYQVLGHLKTCLVLSFGYIILKDPFSARNVVGILIAIFGMGLYSYYSVVESRKKTEDASSLPVAAQMSEKDSAPLLGAKSSPRTENKAEETFDYMPRTAKSAFTGR

SEQ ID NO: 161966 - protein, 149 aa, Zea Mays
MKNKSAVRTDGRDSGDQSRPISGETVGEVRAVADMHQRKAEMARQSDAFVALPGGYGTLEELLEVITWAQLGIHHKPVGLLNVDGYYNSLLTFIDKAVEEGFINPSARRIIVLAPTAQELMDKLEEYEPYHDRVASTLNWETTMDHLAY

SEQ ID NO: 161967 - protein, 166 aa, Zea Mays
MTPPLSSATSWRVWHAGGAAGGHHVGAAGHPPQAGRAAERGRLLQLAADLHRQGRGGGLHQPQRPPHHRARAHRAGAHGQARGVRALPRQGGVHAQLGDHDGPPGLLTPTLPEPPAGDWDDISDPSMPFRKQAFSLPSDWGFCFVFNCMQIGFIWSAGGREKKKTG

SEQ ID NO: 161968 - protein, 151 aa, Zea Mays
MTMKQSRFKRICVFCGSSQGKKASYHDAAVELGNQLVARSIDLVYGGGSIGLMGLVSQAVYGGGRHVIGVIPKTLMTPEVGLLNVDGYYNSLLTFIDKAVEEGFINPSARRIIVLAPTAQELMDKLEEYEPYHDRVASTLNWETTMDHLAY

SEQ ID NO: 161969 - protein, 213 aa, Zea Mays
MGGVPLPPELGNIPRLQELRLANSGYSGPIPDTFGLLSSLTTLSLENNNLTGRIPPGLSRLKRMYHLNLSKNGLGRRRPFRRRVPQAARPEPGPERQPGAVRHRPGRHAGRGRRSLRRRRRRLRTVRRRGELGRRESGQGRGDDGSLAGRAAQARRGCAVQLPFAMSSSDHPGSVHCMQLFALVDLSVRRCVAVTRDVDCLRCVVGIRDKKSK

SEQ ID NO: 161970 - protein, 90 aa, Zea Mays
MAKMLLNMSMITCHGSSWKMMIYLLSLKRVLHVWKSSPQKIVKCYATIRSLILLLSRPMLMRKSKIRYVLMWINFLQLCEPKILPCTYVA

SEQ ID NO: 161971 - protein, 694 aa, Zea Mays
MHRCSFTCLENGSDSAPTLCDILWCGFREWDSSSIVWDALANSYARAQMNHDALYVLSKMNSLNMQISITTYDSLLYSLRKADVALAIFKEMESCGIPPSDYSHGILIDGLCKQGKIGEALSFLQETRKEGKFKPLGMTFNTLMSALCNWGFIQDAKSVFCLMLKYGLNPSRHTYSTIIHGLCKVGSVNEAFDIFQSVTEEGMELDIVTCNSLINGFRLHGHTREIPKMIEMMRGLGVEPDVVTYTILITGHCEGGDVEEGMRIRKDILGQGIELNIVTYSVLINALFKKGLFYEVENLFGEICSIGLELDVIAYSILIHGFCKLGEIGRALQVWNLMCCSQRVIPTSVNHVSILLGLCKKGFLDEARSYLETVASKYQPSDVVLYNVVIDGYAKVGDIGNAVQLYDAIIMAGMCPTIVTCNSLLYGYCKFGDLHMAESYFMAIQLSDLLPTTVTYTTLMDALSEAGKVHSMLSIFKEMTGKGIRPNAITYSVVIKGLCKQLMFHDAKNVLDDMYREGFDADPIPYNTLIQGFCETQDAKNAFYVYELMVCRGVMPSPVTYNLLVNVLCLKGLVIHAEMKLESFRKQGAELRKFAYTTLIKAQCAKGMPYKAIMWVGKLLDAGFEASIEDFSAAINRLCKRQFTREALMLISIMLSVGVYPDIQLYRVLGTAVQKKNESFYLPILQALAIKTGI

SEQ ID NO: 161972 - protein, 813 aa, Zea Mays
MPFRPHIPLRFLLPHLQHRIARPPRPPRRSLSYSLAAALSAAGTESEEEAVVGRDAPLAPPRPGGAGSGAPGRGWAQQGALDEESAELERKASIVARFRHCHELLWQTRWREMRHGLAQMVDEQGSDSAPTLCDILWCGFREWDSSSIVWDALANSYARAQMNHDALYVLSKMNSLNMQISITTYDSLLYSLRKADVALAIFKEMESCGIPPSDYSHGILIDGLCKQGKIGEALSFLQETRKEGKFKPLGMTFNTLMSALCNWGFIQDAKSVFCLMLKYGLNPSRHTYSTIIHGLCKVGSVNEAFDIFQSVTEEGMELDIVTCNSLINGFRLHGHTREIPKMIEMMRGLGVEPDVVTYTILITGHCEGGDVEEGMRIRKDILGQGIELNIVTYSVLINALFKKGLFYEVENLFGEICSIGLELDVIAYSILIHGFCKLGEIGRALQVWNLMCCSQRVIPTSVNHVSILLGLCKKGFLDEARSYLETVASKYQPSDVVLYNVVIDGYAKVGDIGNAVQLYDAIIMAGMCPTIVTCNSLLYGYCKFGDLHMAESYFMAIQLSDLLPTTVTYTTLMDALSEAGKVHSMLSIFKEMTGKGIRPNAITYSVVIKGLCKQLMFHDAKNVLDDMYREGFDADPIPYNTLIQGFCETQDAKNAFYVYELMVCRGVMPSPVTYNLLVNVLCLKGLVIHAEMKLESFRKQGAELRKFAYTTLIKAQCAKGMPYKAIMWVGKLLDAGFEASIEDFSAAINRLCKRQFTREALMLISIMLSVGVYPDIQLYRVLGTAVQKKNESFYLPILQALAIKTGRAGLVQW

SEQ ID NO: 161973 - protein, 646 aa, Zea Mays
MNHDALYVLSKMNSLNMQISITTYDSLLYSLRKADVALAIFKEMESCGIPPSDYSHGILIDGLCKQGKIGEALSFLQETRKEGKFKPLGMTFNTLMSALCNWGFIQDAKSVFCLMLKYGLNPSRHTYSTIIHGLCKVGSVNEAFDIFQSVTEEGMELDIVTCNSLINGFRLHGHTREIPKMIEMMRGLGVEPDVVTYTILITGHCEGGDVEEGMRIRKDILGQGIELNIVTYSVLINALFKKGLFYEVENLFGEICSIGLELDVIAYSILIHGFCKLGEIGRALQVWNLMCCSQRVIPTSVNHVSILLGLCKKGFLDEARSYLETVASKYQPSDVVLYNVVIDGYAKVGDIGNAVQLYDAIIMAGMCPTIVTCNSLLYGYCKFGDLHMAESYFMAIQLSDLLPTTVTYTTLMDALSEAGKVHSMLSIFKEMTGKGIRPNAITYSVVIKGLCKQLMFHDAKNVLDDMYREGFDADPIPYNTLIQGFCETQDAKNAFYVYELMVCRGVMPSPVTYNLLVNVLCLKGLVIHAEMKLESFRKQGAELRKFAYTTLIKAQCAKGMPYKAIMWVGKLLDAGFEASIEDFSAAINRLCKRQFTREALMLISIMLSVGVYPDIQLYRVLGTAVQKKNESFYLPILQALAIKTGI

SEQ ID NO: 161974 - protein, 601 aa, Zea Mays
MPFRPHIPLRFLLPHLQHRIARPPRPPRRSLSYSLAAALSAAGTESEEEAVVGRDAPLAPPRPGGAGSGAPGRGWAQQGALDEESAELERKASIVARFRHCHELLWQTRWREMRHGLAQMVDEQGSDSAPTLCDILWCGFREWDSSSIVWDALANSYARAQMNHDALYVLSKMNSLNMQISITTYDSLLYSLRKADVALAIFKEMESCGIPPSDYSHGILIDGLCKQGKIGEALSFLQETRKEGKFKPLGMTFNTLMSALCNWGFIQDAKSVFCLMLKYGLNPSRHTYSTIIHGLCKVGSVNEAFDIFQSVTEEGMELDIVTCNSLINGFRLHGHTREIPKMIEMMRGLGVEPDVVTYTILITGHCEGGDVEEGMRIRKDILGQGIELNIVTYSVLINALFKKGLFYEVENLFGEICSIGLELDVIAYSILIHGFCKLGEIGRALQVWNLMCCSQRVIPTSVNHVSILLGLCKKGFLDEARSYLETVASKYQPSDVVLYNVVIDGYAKVGDIGNAVQLYDAIIMAGMCPTIVTCNSLLYGYCKFGDLHMAESYFMAIQLSDLLPTTVTYTTLMDALSEAGKVHSMLSIFKEMTGKGTSYSR

SEQ ID NO: 161975 - protein, 559 aa, Zea Mays
MPFRPHIPLRFLLPHLQHRIARPPRPPRRSLSYSLAAALSAAGTESEEEAVVGRDAPLAPPRPGGAGSGAPGRGWAQQGALDEESAELERKASIVARFRHCHELLWQTRWREMRHGLAQMVDEQGSDSAPTLCDILWCGFREWDSSSIVWDALANSYARAQMNHDALYVLSKMNSLNMQISITTYDSLLYSLRKADVALAIFKEMESCGIPPSDYSHGILIDGLCKQGKIGEALSFLQETRKEGKFKPLGMTFNTLMSALCNWGFIQDAKSVFCLMLKYGLNPSRHTYSTIIHGLCKVGSVNEAFDIFQSVTEEGMELDIVTCNSLINGFRLHGHTREIPKMIEMMRGLGVEPDVVTYTILITGHCEGGDVEEGMRIRKDILGQGIELNIVTYSVLINALFKKGLFYEVENLFGEICSIGLELDVIAYSILIHGFCKLGEIGRALQVWNLMCCSQRVIPTSVNHVSILLGLCKKGFLDEARSYLETVASKYQPSDVVLYNVVIDGYAKVGDIGNAVQLYDAIIMAGMCPTIVTCNSLLYGYCKFGDLHMAESYFMAIQD

SEQ ID NO: 161976 - protein, 256 aa, Zea Mays
MAKEPMRVLVTGAAGQIGYALVPMIARGVMLGADQPVILHMLDIPPAAEALNGVKMELVDAAFPLLKGVVATTDVVEACTGVNVAVMVGGFPRKEGMERKDVMSKNVSIYKSQASALEAHAAPNCKVLVVANPANTNALILKEFAPSIPEKNVTCLTRLDHNRALGQISERLNVQVSDVKNVIIWGLMVNSSQLSNSVVLQSLKRESSPVLSRLLALLVTTFVIGFLEHLRVHLFPWVCTLMVHTVFLLDSFIHSQ

SEQ ID NO: 161977 - protein, 484 aa, Zea Mays
MSLLPCLPHHEQLLQTVCSTIGAFSKWIDAAPAELSILPPLVDILNKGMSTSEDTAAAASMAFKYICEDCRRKFSGSLDGLFQIYHIAISGVGGYKVSSEDSLHLVEALSAVITTLPPESASRALELICQPVINPLQELIQQGDQVLQQVPARHLTVHIDRLSSIFSNVKQPEVVAEAVYRYWPTLKSIFDQRAWDTRTMESICRSCKFAVRTCGRVMGMTIGAMLEEIQTLYQQHKQSCFLYLSSEVIKIFGSDPSCAGYLTNLIQILFSHTVQLLRTIQDFTARPDIADDCYLLASRCIRYCPDLFIPTEMFQRLVDCAMAGITIQHREACKSILSFLSDVIDLPNSSDGGQYRKVINTIILHRGATLTRIMIAALTGALPSGRLEEVSYVLLSLSRVFGENMLNWARESINLIPPQALTDAERLRFFNTISDAASGSSLHTITDRFGEISDVCRRNKTVQDLVQSALRPHDLTFTVVPQQM

SEQ ID NO: 161978 - protein, 759 aa, Zea Mays
MLVGCCQDWIPKAAISFTCHCLPPKSTLFPPAAELLHFTSELIHATVSHGSGAIAERMPLIQILVPHIMGLKEQLKDPSKDEEDVKAIARLYADMGESYVDLIATGSDDSIQIVNALLEVTSLLEFDISSMTFNFWHRLKRNLIKRDSYVSYGSEVAIEAEKNRRLQVFRPKFETLVSLVSFRVEYPEDYHTFSEEDRRDFRHVRYAVSDVLLDATEVLGGDSTLKLLSTKLAQAYGSCNNEQNPKWQPVEAALFCIQAIARSVSIEEREILPQVMSLLPCLPHHEQLLQTVCSTIGAFSKWIDAAPAELSILPPLVDILNKGMSTSEDTAAAASMAFKYICEDCRRKFSGSLDGLFQIYHIAISGVGGYKVSSEDSLHLVEALSAVITTLPPESASRALELICQPVINPLQELIQQGDQVLQQVPARHLTVHIDRLSSIFSNVKQPEVVAEAVYRYWPTLKSIFDQRAWDTRTMESICRSCKFAVRTCGRVMGMTIGAMLEEIQTLYQQHKQSCFLYLSSEVIKIFGSDPSCAGYLTNLIQILFSHTVQLLRTIQDFTARPDIADDCYLLASRCIRYCPDLFIPTEMFQRLVDCAMAGITIQHREACKSILSFLSDVIDLPNSSDGGQYRKVINTIILHRGATLTRIMIAALTGALPSGRLEEVSYVLLSLSRVFGENMLNWARESINLIPPQALTDAERLRFFNTISDAASGSSLHTITDRFGEISDVCRRNKTVQDLVQSALRPHDLTFTVVPQQM

SEQ ID NO: 161979 - protein, 777 aa, Zea Mays
MEAQATATATVKEALAALYHHPDDAIRTAADRWLQEFQHTLDAWQVADSLLHDESSNLETLIFCSQTLRSKVQRDFEELPSEAFRSLQDSLYVLLKKFNKGPQKVRTQICIAIAALAVHVPVEDWGAGGIVNWLSDEMKAHPEFIPGFLELLIVLPQETSSYKIAARPERRRQFEIDLCSSANVAIDLLTACMAIDQLKEQVLEGFSSWLRFCHGISASELASHPLVHLALSSLNSDQFLEPAVNVTSELIHATVSHGSGAIAERMPLIQILVPHIMGLKEQLKDPSKDEEDVKAIARLYADMGESYVDLIATGSDDSIQIVNALLEVTSLLEFDISSMTFNFWHRLKRNLIKRDSYVSYGSEVAIEAEKNRRLQVFRPKFETLVSLVSFRVEYPEDYHTFSEEDRRDFRHVRYAVSDVLLDATEVLGGDSTLKLLSTKLAQAYGSCNNEQNPKWQPVEAALFCIQAIARSVSIEEREILPQVMSLLPCLPHHEQLLQTVCSTIGAFSKWIDAAPAELSILPPLVDILNKGMSTSEDTAAAASMAFKYICEDCRRKFSGSLDGLFQIYHIAISGVGGYKVSSEDSLHLVEALSAVITTLPPESASRALELICQPVINPLQELIQQGDQVLQQVPARHLTVHIDRLSSIFSNVKQPEVVAEAVYRYWPTLKSIFDQRAWDTRTMESICRSCKFAVRTCGRVMGMTIGAMLEEIQTLYQQHKQSCFLYLSSEVIKIFGSDPSCAGYLTNLIQILFSHTVQLLRTIQKCFKDWLTVQWLV

SEQ ID NO: 161980 - protein, 749 aa, Zea Mays
MEAQATATATVKEALAALYHHPDDAIRTAADRWLQEFQHTLDAWQVADSLLHDESSNLETLIFCSQTLRSKVQRDFEELPSEAFRSLQDSLYVLLKKFNKGPQKVRTQICIAIAALAVHVPVEDWGAGGIVNWLSDEMKAHPEFIPGFLELLIVLPQETSSYKIAARPERRRQFEIDLCSSANVAIDLLTACMAIDQLKEQVLEGFSSWLRFCHGISASELASHPLVHLALSSLNSDQFLEPAVNVTSELIHATVSHGSGAIAERMPLIQILVPHIMGLKEQLKDPSKDEEDVKAIARLYADMGESYVDLIATGSDDSIQIVNALLEVTSLLEFDISSMTFNFWHRLKRNLIKRDSYVSYGSEVAIEAEKNRRLQVFRPKFETLVSLVSFRVEYPEDYHTFSEEDRRDFRHVRYAVSDVLLDATEVLGGDSTLKLLSTKLAQAYGSCNNEQNPKWQPVEAALFCIQAIARSVSIEEREILPQVMSLLPCLPHHEQLLQTVCSTIGAFSKWIDAAPAELSILPPLVDILNKGMSTSEDTAAAASMAFKYICEDCRRKFSGSLDGLFQIYHIAISGVGGYKVSSEDSLHLVEALSAVITTLPPESASRALELICQPVINPLQELIQQGDQVLQQVPARHLTVHIDRLSSIFSNVKQPEVVAEAVYRYWPTLKSIFDQRAWDTRTMESICRSCKFAVRTCGRVMGMTIGAMLEEIQTLYQQHKQSCFLYLSSEVIKIFGSDPSCDNCTLAAQ

SEQ ID NO: 161981 - protein, 117 aa, Zea Mays
MESEGSNGKLQESISSHFLRLLLQILLFEDFRSELAGYAADALLPLLFCEQELYQRLVHELLDKQQNPTVKSRLATAFHNLTSSNNLSSSLDRPNRQRFRKNLLSFMADVSGFMQIK

SEQ ID NO: 161982 - protein, 476 aa, Zea Mays
MSLICCFDSCSQTLTCQKLLATVVRRKHTCTYLVQLDSWRDLTRAFASGRSLLSLSGRLQRSLAETLASAASCIKDPEASAQYLRDLMGPVAGCLVENASRSDLKSVAQQADVIYMVCCLLERLRGAARATQPRTQKVLFEMAHTVMNPLLTLLEVYKNHSTVVYMILKFVVDFVDGQAVFLDAKETSALVSFCLQLLQIYSSHNIGKVMLSLSSSLRNESQAEKYKDLRALLRLLTNICSKDLVGFLSDCGGEGSPDIAEVIYIGLDIVTPLISLDLLKYPKLSRDYFVLISHLLELYPEKVAHLNSDAFTRIIGSLDFGLRNQDSDVVERCLAAVNALASYNFKERLGGRGRLNSQLMESEGSNGKLQESISSHFLRLLLQILLFEDFRSELAGYAADALLPLLFCEQELYQRLVHELLDKQQNPTVKSRLATAFHNLTSSNNLSSSLDRPNRQRFRKNLLSFMADVSGFMQIK

SEQ ID NO: 161983 - protein, 1126 aa, Zea Mays
MQGFPGGAPDPQQLQATMLAIEQACSLIQLHMNPSEAEKVITSLHSSLMPYQVCRFILETSQKPNARFQAAGAIGDAAVREWGVLTDDNKRSLIIYCLNYVMEHASSPDGYVQSKVSAVAARLLKRGWVEFSDQEKAAIFFEVEQSIRGIHGPNRQFAAINFLETLVSEFSPSTASAMSLPKEFHEQCEYSLEVQFLKILSWNFKHTVEHESSDAKINFGLRIDTINLKKFERSLVKPGSMWREILISSGHPTWVLNFYTTLRQKYSYDTLWGDSPIAVSCRQLIVQLCSLAGSVFPNDNGDAQIKHLMLILSAVVLWIEPPDVITASIRNGGSESEFIDGCHALLSIASLTTGSLFDNLLKSIRPYGTVNLLSALTSEAVKSVLNNQSEEETWGIDSLDILLETWNVLLGDVDADKNPISTDGALASSSLFKMIVESHLKAAADSAFEDTDDTEYFHVSVSKRDEQLALYALIARASANTTIPFLAQLFSERFARLNQRNGESDPTQTLEELYWLLLVTSHVLTDSGEGETLLIPEALQAGFPNVIEAAHHPVVTLSWSIINFSRQCLDPGIRAKYFSPRLMEAVIWFLARWVATYLVPLDVSRGKVSREIDNVGTNGSQHSRKLLNSFAWENNQGELVLDFVVLISMLALTTYQGENELQTLTCQKLLATVVRRKHTCTYLVQLDSWRDLTRAFASGRSLLSLSGRLQRSLAETLASAASCIKDPEASAQYLRDLMGPVAGCLVENASRSDLKSVAQQADVIYMVCCLLERLRGAARATQPRTQKVLFEMAHTVMNPLLTLLEVYKNHSTVVYMILKFVVDFVDGQAVFLDAKETSALVSFCLQLLQIYSSHNIGKVMLSLSSSLRNESQAEKYKDLRALLRLLTNICSKDLVGFLSDCGGEGSPDIAEVIYIGLDIVTPLISLDLLKYPKLSRDYFVLISHLLELYPEKVAHLNSDAFTRIIGSLDFGLRNQDSDVVERCLAAVNALASYNFKERLGGRGRLNSQLMESEGSNGKLQESISSHFLRLLLQILLFEDFRSELAGYAADALLPLLFCEQELYQRLVHELLDKQQNPTVKSRLATAFHNLTSSNNLSSSLDRPNRQRFRKNLLSFMADVSGFMQIK

SEQ ID NO: 161984 - protein, 789 aa, Zea Mays
MLILSAVVLWIEPPDVITASIRNGGSERPYGTVNLLSALTSEAVKSVLNNQSEEETWGIDSLDILLETWNVLLGDVDADKNPISTDGALASSSLFKMIVESHLKAAADSAFEDTDDTEYFHVSVSKRDEQLALYALIARASANTTIPFLAQLFSERFARLNQRNGESDPTQTLEELYWLLLVTSHVLTDSGEGETLLIPEALQAGFPNVIEAAHHPVVTLSWSIINFSRQCLDPGIRAKYFSPRLMEAVIWFLARWVATYLVPLDVSRGKVSREIDNVGTNGSQHSRKLLNSFAWENNQGELVLDFVVLISMLALTTYQGENELQTLTCQKLLATVVRRKHTCTYLVQLDSWRDLTRAFASGRSLLSLSGRLQRSLAETLASAASCIKDPEASAQYLRDLMGPVAGCLVENASRSDLKSVAQQADVIYMVCCLLERLRGAARATQPRTQKVLFEMAHTVMNPLLTLLEVYKNHSTVVYMILKFVVDFVDGQAVFLDAKETSALVSFCLQLLQIYSSHNIGKVMLSLSSSLRNESQAEKYKDLRALLRLLTNICSKDLVGFLSDCGGEGSPDIAEVIYIGLDIVTPLISLDLLKYPKLSRDYFVLISHLLELYPEKVAHLNSDAFTRIIGSLDFGLRNQDSDVVERCLAAVNALASYNFKERLGGRGRLNSQLMESEGSNGKLQESISSHFLRLLLQILLFEDFRSELAGYAADALLPLLFCEQELYQRLVHELLDKQQNPTVKSRLATAFHNLTSSNNLSSSLDRPNRQRFRKNLLSFMADVSGFMQIK

SEQ ID NO: 161985 - protein, 818 aa, Zea Mays
MLILSAVVLWIEPPDVITASIRNGGSESEFIDGCHALLSIASLTTGSLFDNLLKSIRPYGTVNLLSALTSEAVKSVLNNQSEEETWGIDSLDILLETWNVLLGDVDADKNPISTDGALASSSLFKMIVESHLKAAADSAFEDTDDTEYFHVSVSKRDEQLALYALIARASANTTIPFLAQLFSERFARLNQRNGESDPTQTLEELYWLLLVTSHVLTDSGEGETLLIPEALQAGFPNVIEAAHHPVVTLSWSIINFSRQCLDPGIRAKYFSPRLMEAVIWFLARWVATYLVPLDVSRGKVSREIDNVGTNGSQHSRKLLNSFAWENNQGELVLDFVVLISMLALTTYQGENELQTLTCQKLLATVVRRKHTCTYLVQLDSWRDLTRAFASGRSLLSLSGRLQRSLAETLASAASCIKDPEASAQYLRDLMGPVAGCLVENASRSDLKSVAQQADVIYMVCCLLERLRGAARATQPRTQKVLFEMAHTVMNPLLTLLEVYKNHSTVVYMILKFVVDFVDGQAVFLDAKETSALVSFCLQLLQIYSSHNIGKVMLSLSSSLRNESQAEKYKDLRALLRLLTNICSKDLVGFLSDCGGEGSPDIAEVIYIGLDIVTPLISLDLLKYPKLSRDYFVLISHLLELYPEKVAHLNSDAFTRIIGSLDFGLRNQDSDVVERCLAAVNALASYNFKERLGGRGRLNSQLMESEGSNGKLQESISSHFLRLLLQILLFEDFRSELAGYAADALLPLLFCEQELYQRLVHELLDKQQNPTVKSRLATAFHNLTSSNNLSSSLDRPNRQRFRKNLLSFMADVSGFMQIK

SEQ ID NO: 161986 - protein, 739 aa, Zea Mays
MIVESHLKGINLFIFPFKCNLSLEECYRWCKRFSMLFTFCILITLIFFDIAAADSAFEDTDDTEYFHVSVSKRDEQLALYALIARASANTTIPFLAQLFSERFARLNQRNGESDPTQTLEELYWLLLVTSHVLTDSGEGETLLIPEALQAGFPNVIEAAHHPVVTLSWSIINFSRQCLDPGIRAKYFSPRLMEAVIWFLARWVATYLVPLDVSRGKVSREIDNVGTNGSQHSRKLLNSFAWENNQGELVLDFVVLISMLALTTYQGENELQTLTCQKLLATVVRRKHTCTYLVQLDSWRDLTRAFASGRSLLSLSGRLQRSLAETLASAASCIKDPEASAQYLRDLMGPVAGCLVENASRSDLKSVAQQADVIYMVCCLLERLRGAARATQPRTQKVLFEMAHTVMNPLLTLLEVYKNHSTVVYMILKFVVDFVDGQAVFLDAKETSALVSFCLQLLQIYSSHNIGKVMLSLSSSLRNESQAEKYKDLRALLRLLTNICSKDLLSMQVGFLSDCGGEGSPDIAEVIYIGLDIVTPLISLDLLKYPKLSRDYFVLISHLLELYPEKVAHLNSDAFTRIIGSLDFGLRNQDSDVVERCLAAVNALASYNFKERLGGRGRLNSQLMESEGSNGKLQESISSHFLRLLLQILLFEDFRSELAGYAADALLPLLFCEQELYQRLVHELLDKQQNPTVKSRLATAFHNLTSSNNLSSSLDRPNRQRFRKNLLSFMADVSGFMQIK

SEQ ID NO: 161987 - protein, 361 aa, Zea Mays
MLILSAVVLWIEPPDVITASIRNGGSESEFIDGCHALLSIASLTTGSLFDNLLKSIRPYGTVNLLSALTSEAVKSVLNNQSEEETWGIDSLDILLETWNVLLGDVDADKNPISTDGALASSSLFKMIVESHLKAAADSAFEDTDDTEYFHVSVSKRDEQLALYALIARASANTTIPFLAQLFSERFARLNQRNGESDPTQTLEELYWLLLVTSHVLTDSGEGETLLIPEALQAGFPNVIEAAHHPVVTLSWSIINFSRQCLDPGIRAKYFSPRLMEAVIWFLARWVATYLVPLDVSRGKVSREIDNVGTNGSQHSRKLLNSFAWENNQGELVLDFVVLISMLALTTYQGENELQVSFIFTF

SEQ ID NO: 161988 - protein, 708 aa, Zea Mays
MQGFPGGAPDPQQLQATMLAIEQACSLIQLHMNPSEAEKVITSLHSSLMPYQVCRFILETSQKPNARFQAAGAIGDAAVREWGVLTDDNKRSLIIYCLNYVMEHASSPDGYVQSKVSAVAARLLKRGWVEFSDQEKAAIFFEVEQSIRGIHGPNRQFAAINFLETLVSEFSPSTASAMSLPKEFHEQCEYSLEVQFLKDFYCWAQAAVFNTADKILNSTVTIPDERACSAALRLMFQILSWNFKHTVEHESSDAKINFGLRIDTINLKKFERSLVKPGSMWREILISSGHPTWVLNFYTTLRQKYSYDTLWGDSPIAVSCRQLIVQLCSLAGSVFPNDNGDAQIKHLMLILSAVVLWIEPPDVITASIRNGGSESEFIDGCHALLSIASLTTGSLFDNLLKSIRPYGTVNLLSALTSEAVKSVLNNQSEEETWGIDSLDILLETWNVLLGDVDADKNPISTDGALASSSLFKMIVESHLKAAADSAFEDTDDTEYFHVSVSKRDEQLALYALIARASANTTIPFLAQLFSERFARLNQRNGESDPTQTLEELYWLLLVTSHVLTDSGEGETLLIPEALQAGFPNVIEAAHHPVVTLSWSIINFSRQCLDPGIRAKYFSPRLMEAVIWFLARWVATYLVPLDVSRGKVSREIDNVGTNGSQHSRKLLNSFAWENNQGELVLDFVVLISMLALTTYQGENELQVSFIFTF

SEQ ID NO: 161989 - protein, 615 aa, Zea Mays
MQGFPGGAPDPQQLQATMLAIEQACSLIQLHMNPSEAEKVITSLHSSLMPYQVCRFILETSQKPNARFQAAGAIGDAAVREWGVLTDDNKRSLIIYCLNYVMEHASSPDGYVQSKVSAVAARLLKRGWVEFSDQEKAAIFFEVEQSIRGIHGPNRQFAAINFLETLVSEFSPSTASAMSLPKEFHEQCEYSLEVQFLKDFYCWAQAAVFNTADKILNSTVTIPDERACSAALRLMFQILSWNFKHTVEHESSDAKINFGLRIDTINLKKFERSLVKPGSMWREILISSGHPTWVLNFYTTLRQKYSYDTLWGDSPIAVSCRQLIVQLCSLAGSVFPNDNGDAQIKHLMLILSAVVLWIEPPDVITASIRNGGSESEFIDGCHALLSIASLTTGSLFDNLLKSIRPYGTVNLLSALTSEAVKSVLNNQSEEETWGIDSLDILLETWNVLLGDVDADKNPISTDGALASSSLFKMIVESHLKAAADSAFEDTDDTEYFHVSVSKRDEQLALYALIARASANTTIPFLAQLFSERFARLNQRNGESDPTQTLEELYWLLLVTSHVLTDSGEGETLLVEREIHDEIPEPRYSTKAQIDEAPGVSQILRSLKHYRLDSLM

SEQ ID NO: 161990 - protein, 1139 aa, Zea Mays
MQGFPGGAPDPQQLQATMLAIEQACSLIQLHMNPSEAEKVITSLHSSLMPYQVCRFILETSQKPNARFQAAGAIGDAAVREWGVLTDDNKRSLIIYCLNYVMEHASSPDGYVQSKVSAVAARLLKRGWVEFSDQEKAAIFFEVEQSIRGIHGPNRQFAAINFLETLVSEFSPSTASAMSLPKEFHEQCEYSLEVQFLKDFYCWAQAAVFNTADKILNSTVTIPDERACSAALRLMFQILSWNFKHTVEHESSDAKINFGLRIDTINLKKFERSLVKPGSMWREILISSGHPTWVLNFYTTLRQKYSYDTLWGDSPIAVSCRQLIVQLCSLAGSVFPNDNGDAQIKHLMLILSAVVLWIEPPDVITASIRNGGSESEFIDGCHALLSIASLTTGSLFDNLLKSIRPYGTVNLLSALTSEAVKSVLNNQSEEETWGIDSLDILLETWNVLLGDVDADKNPISTDGALASSSLFKMIVESHLKAAADSAFEDTDDTEYFHVSVSKRDEQLALYALIARASANTTIPFLAQLFSERFARLNQRNGESDPTQTLEELYWLLLVTSHVLTDSGEGETLLIPEALQAGFPNVIEAAHHPVVTLSWSIINFSRQCLDPGIRAKYFSPRLMEAVIWFLARWVATYLVPLDVSRGKVSREIDNVGTNGSQHSRKLLNSFAWENNQGELVLDFVVLISMLALTTYQGENELQTLTCQKLLATVVRRKHTCTYLVQLDSWRDLTRAFASGRSLLSLSGRLQRSLAETLASAASCIKDPEASAQYLRDLMGPVAGCLVENASRSDLKSVAQQADVIYMVCCLLERLRGAARATQPRTQKVLFEMAHTVMNPLLTLLEVYKNHSTVVYMILKFVVDFVDGQAVFLDAKETSALVSFCLQLLQIYSSHNIGKVMLSLSSSLRNESQAEKYKDLRALLRLLTNICSKDLVGFLSDCGGEGSPDIAEYFVLISHLLELYPEKVAHLNSDAFTRIIGSLDFGLRNQDSDVVERCLAAVNALASYNFKERLGGRGRLNSQLMESEGSNGKLQESISSHFLRLLLQILLFEDFRSELAGYAADALLPLLFCEQELYQRLVHELLDKQQNPTVKSRLATAFHNLTSSNNLSSSLDRPNRQRFRKNLLSFMADVSGFMQIK

SEQ ID NO: 161991 - protein, 507 aa, Zea Mays
MQGFPGGAPDPQQLQATMLAIEQACSLIQLHMNPSEAEKVITSLHSSLMPYQVCRFILETSQKPNARFQAAGAIGDAAVREWGVLTDDNKRSLIIYCLNYVMEHASSPDGYVQSKVSAVAARLLKRGWVEFSDQEKAAIFFEVEQSIRGIHGPNRQFAAINFLETLVSEFSPSTASAMSLPKEFHEQCEYSLEVQFLKDFYCWAQAAVFNTADKILNSTVTIPDERACSAALRLMFQILSWNFKHTVEHESSDAKINFGLRIDTINLKKFERSLVKPGSMWREILISSGHPTWVLNFYTTLRQKYSYDTLWGDSPIAVSCRQLIVQLCSLAGSVFPNDNGDAQIKHLMLILSAVVLWIEPPDVITASIRNGGSESEFIDGCHALLSIASLTTGSLFDNLLKSIRPYGTVNLLSALTSEAVKSVLNNQSEEETWGIDSLDILLETWNVLLGDVDADKNPISTDGALASSSLFKMIVESHLKAAADSAFEDTDDTEYFHVSVSSNVMNS

SEQ ID NO: 161992 - protein, 359 aa, Zea Mays
MSHFVDIRCCGCGIWPAPVIINASARSFRIRARSVSLDYPSRTEQKNETNLVVVRPERRLRDDFVDAGADHGSGRATADFKKAVPSFDANLRNLLDEQLKPGRPLDHNSGKVANRACFSKHKTGCYAYSLRRHCNNGKLIQACRIIDEMVLHGQVPDSKCCVRLIRGLVRTGNTNKARHVLEVMVLSGGVPDTITCNMLIGQLCCEGQLSSAMKVLEDMRFTGCSPSGITFNTLIRCMCSHHLYDRAVSFWKEQLKIGWPPYEMTSTLLVDLICKQCGPMRALEVLDELDLEGCQPHVVSYNTLISASCKAGCLKDAKLILTRLSAEGLEPNGTTYCILLHSLCDKRRWSEVWTSGSGN

SEQ ID NO: 161993 - protein, 269 aa, Zea Mays
MEVEPARRDAAALDPELLQLAELAPGALRENSIADALYSQWLVLPETTKLVKSLIDDAKTGAVLNVAGSSASTNAASSSSLPSMFPAGSAPPLSPRSTSGSPRVMRRGSGAGPSSLGSPLKLVSEPVREVIPQFYFKNGRPPTKDLKEQCLSRTDHLFFGGGGLQVQEFRSVTKDICKLPSFLSSVLFKKIDVECTRTVSRDAFVEYWINDNKVTMDMASQIFEILRKPGYTYLTQDDFKPVLKELLATHPGLEFLQGTPEFQERYRRL

SEQ ID NO: 161994 - protein, 427 aa, Zea Mays
MEVEPARRDAAALDPELLQLAELAPGALRENSIADALYSQWLVLPETTKLVKSLIDDAKTGAVLNVAGSSASTNAASSSSLPSMFPAGSAPPLSPRSTSGSPRVMRRGSGAGPSSLGSPLKLVSEPVREVIPQFYFKNGRPPTKDLKEQCLSRTDHLFFGGGGLQVQEFRSVTKDICKLPSFLSSVLFKKIDVECTRTVSRDAFVEYWINDNKVTMDMASQIFEILRKPGYTYLTQDDFKPVLKELLATHPGLEFLQGTPEFQERYAETVIYRIFYSINRSGNGHLTLRELKRGNLIAALQQLDEEEDINKVLRYFSYEHFYVIYCKFWELDADHDFLIDKENLIKYGNHSLTYRIVDRIFAQIPRKFTSMTEGKMGYEDFVYFILSEEDKSSEPSLEYWCSANEDWLSRIASMLPVQRDQITLDVE

SEQ ID NO: 161995 - protein, 484 aa, Zea Mays
MEVEPARRDAAALDPELLQLAELAPGALRENSIADALYSQWLVLPETTKLVKSLIDDAKTGAVLNVAGSSASTNAASSSSLPSMFPAGSAPPLSPRSTSGSPRVMRRGSGAGPSSLGSPLKLVSEPVREVIPQFYFKNGRPPTKDLKEQCLSRTDHLFFGGGGLQVQEFRSVTKDICKLPSFLSSVLFKKIDVECTRTVSRDAFVEYWINDNKVTMDMASQIFEILRKPGYTYLTQDDFKPVLKELLATHPGLEFLQGTPEFQERYAETVIYRIFYSINRSGNGHLTLRELKRGNLIAALQQLDEEEDINKVLRYFSYEHFYVIYCKFWELDADHDFLIDKENLIKYGNHSLTYRIVDRIFAQIPRKFTSMTEGKMGYEDFVYFILSEEDKSSEPSLEYWFKCIDLDGNGILTFNEMQFFYEEQLHRMECMAQEPVLFLDILCQMIDMIGPEETYSIFFSISTSSWHLKLVIHSSFARNVKIQL

SEQ ID NO: 161996 - protein, 325 aa, Zea Mays
MDMASQIFEILRKPGYTYLTQDDFKPVLKELLATHPGLEFLQGTPEFQERYAETVIYRIFYSINRSGNGHLTLRELKRGNLIAALQQLDEEEDINKVLRYFSYEHFYVIYCKFWELDADHDFLIDKENLIKYGNHSLTYRIVDRIFAQIPRKFTSMTEGKMGYEDFVYFILSEEDKSSEPSLEYWFKCIDLDGNGILTFNEMQFFYEEQLHRMECMAQEPVLFLDILCQMIDMIGPENESYLTLRDLKRCKLSGNIFNILFNLNKFMAFETRDPFLIRQERENPTLTEWDRFAHREYIRLSMEEDGEDASNGSGDVWDESLEAPF

SEQ ID NO: 161997 - protein, 363 aa, Zea Mays
MHSKGFIHRDIKPDNFLIGLGRKANQVYIIDYGLAKKYKDLQTHKHIPYRENKNLTGTARYASVNTHLGIEQSRRDDLESVGYLLLYFLRGSLPWQGLKAGTKKQKYDKISEKKMLTSAEILCKSYPPEFVSYFHYCRSLRFEDRPDYSSMKKLFRDVFIREGYQFDYVFDWTALKYPQMGSNNKLVQQPSARMAGVGPSVERTDKASMGQEIRDRFTGAVEAFARRNPGSGRPADHSSHSRHKSFADSFGTSNEAVADSSEKTRILSRGGSSSKMPAAPSTRPTSSGDCSDQNRRWVSGSSGGSGRPSPAQRLHHSGGAENSRSSPRSPVARNAAGRGGSASRDNTTFRSLERLTITTSRRK

SEQ ID NO: 161998 - protein, 253 aa, Zea Mays
MYLYGKDTNLITYLTGLHSSTLKWAPTTSLFNNQVQEWLELDHQLREQTKLPWDKRSGIGSLVLLRHSPEEIQALGALQIIPVIPGTKALQIPLERPTKQLPTHQRKRASCPGEGARRKCPQLRPPGRPLRGTAVTRTAGGSPAAVAAAGARPPRRGSTTREAPRTAGRPRAPPWPGTRPGGEAPPRGTTRRSAASSASPSPPAGGSELPRTTPTNSESGRRLLGRGTFAGSLLSAAKANRQIDDGWMVTRLP

SEQ ID NO: 161999 - protein, 402 aa, Zea Mays
MVIDLLGPSLEDLFNSCNRKFSMKTVLMLADQLINRVEYMHSKGFIHRDIKPDNFLIGLGRKANQVYIIDYGLAKKYKDLQTHKHIPYRENKNLTGTARYASVNTHLGIEQSRRDDLESVGYLLLYFLRGSLPWQGLKAGTKKQKYDKISEKKMLTSAEILCKSYPPEFVSYFHYCRSLRFEDRPDYSSMKKLFRDVFIREGYQFDYVFDWTALKYPQMGSNNKLVQQPSARMAGVGPSVERTDKASMGQEIRDRFTGAVEAFARRNPGSGRPADHSSHSRHKSFADSFGTSNEAVADSSEKTRILSRGGSSSKMPAAPSTRPTSSGDCSDQNRRWVSGSSGGSGRPSPAQRLHHSGGAENSRSSPRSPVARNAAGRGGSASRDNTTFRSLERLTITTSRRK

SEQ ID NO: 162000 - protein, 407 aa, Zea Mays
MVIDLLGPSLEDLFNSCNRKFSMKTVLMLADQLINRVEYMHSKGFIHRDIKPDNFLIGLGRKANQVYIIDYGLAKKYKDLQTHKHIPYRENKNLTGTARYASVNTHLGIEQSRRDDLESVGYLLLYFLRGSLPWQGLKAGTKKQKYDKISEKKMLTSAEVLLFANTNIVIPPEFVSYFHYCRSLRFEDRPDYSSMKKLFRDVFIREGYQFDYVFDWTALKYPQMGSNNKLVQQPSARMAGVGPSVERTDKASMGQEIRDRFTGAVEAFARRNPGSGRPADHSSHSRHKSFADSFGTSNEAVADSSEKTRILSRGGSSSKMPAAPSTRPTSSGDCSDQNRRWVSGSSGGSGRPSPAQRLHHSGGAENSRSSPRSPVARNAAGRGGSASRDNTTFRSLERLTITTSRRK

SEQ ID NO: 162001 - protein, 261 aa, Zea Mays
MEHVIGGKYKLGRKIGSGSFGELYLGVNIQNGEEVGIKLEPVKTKHPQLHYESKVYMLLQGGNGIPHLKWYGVEGEYNVMVIDLLGPSLEDLFNSCNRKFSMKTVLMLADQLINRVEYMHSKGFIHRDIKPDNFLIGLGRKANQVYIIDYGLAKKYKDLQTHKHIPYRENKNLTGTARYASVNTHLGIEQSRRDDLESVGYLLLYFLRGSLPWQGLKAGTKKQKYDKISEKKMLTSAEILCKSYPPEFVSYFHYCRSLSSE

SEQ ID NO: 162002 - protein, 167 aa, Zea Mays
MLAVGAVCCPNAVPRPLHSGHELLPVNPSSPLLISHGGRRELWIHGRRPLGVSSPWLSPLRQTSSTVSLSPTMVAGSLRLHSVPLVQGRSTSGDLLPMAQQADAPASTPSSPLDSTSSSSPIRQQPCSSATRSPLYVNNSNPDPIHVVCVDPICAVPTHDVATPLVC

SEQ ID NO: 162003 - protein, 1314 aa, Zea Mays
MAAVLSAFVPDTAVRWRGLVTGEVARRMGVATEAKALLARLERVGAAVRDAEARAACGDDGAARWLANVRAAAYEADGAVDRCRVAARRRRAHDQQKQAPLPRLLSSCCDTDTDTDVSSCVDIAAHINSLNRKLQVILKEKRRLQLRSSLGGDHHPAPDRAAHRLRKPQRTRAAGAGIVGSRIEDDAAALVGLLTEMDGEETGCTIVAIVGPDGIGKTTLARKVYGSERIRLGFGAARSWLRVPREYSEAGLLSQVVDSFGGGDTTGGESFADLEKALARLVEGKRCLLVLDDARYGGVWEGVLRRPLQRAGRGSKVVVTARHGSIAREMGARHVHRIKRLDSDGAWLLLRAAASVADEATAAELKGVGHGIADKCGGVPLAIKAVAGVLTTRDASAQEWGEVLASPAWLVKGLAEDAMKPLYLCYDDLPCHLKQCFLYCSLFPSDLAMDRRVLVQLWIAEGFVQIGADASVEDVAEEYYDELIRRHLLQPGEEDEGGGATWCTMHDMLRALAQLLSHGEELTGDSYRLLVDSDAPFAPRRVSLARRNLASIPEKILKLERAIPESIGNLWNLKFLLLRGCRALHALPKGIEHLRGLRDLDLAGTVIDDAAFRVGHLRSITSLCCFTVTSKEARAAQDRSGWPLDELKNLSQLRTLHIQKLENAANRSEATEMLLGAKKCLRELELSCSSTVGPLQTTELTRKIEDVFEEMNPPLCLESLKLVNYFGTRFPRWLSVTFLPNLRDLDIVGCNFCQSFPPLGRLPELRSLYVADSSALKDIGAELTVTGTEHPHQVPFPKLENLHFQGLRKLQTWADIEPGAFPSLQKLQLESCPKLQNLPVGLRHVTSLTKLHVADMASLEAVDDIATLRELSVWNTPNLKRISNLPSLEGINMCHCPMLESVENVDGLRTVRIFDHDLRDMPRWIEAHASKLRSLNFTSTAELLKRCLVDGPDWSVIKGIKEVRGYSTGCSYIYYNRSPYIFESNVSDEDNLGVREDEADPDNVDDISVSSSGASYLEIRGFFDSQVLKEGTNRAEEIVPRGSFGRTMLGLTHRRLHKLAEVAPEDDEVEDGADSAILLPSNPTRAMTSAEKVGCVVTNYRNDLGSLANAASHEAITNDEIGHNLVRQGSRAIISTEIGQGSNFSSIRRKEHTSKKEGVTADVTVAKGISLVHSRQVVASNKGKHDFADNAAASICSSDVMPENPLDKEVPEKSAGANGSSSIHEACHTVIVTETTRDLASKAIGNISSIHGRKQQMSDKERELSDGLAPANYVDNNANQMEDGNISSSVKLNHEESKAIGASTTNCDSGLLAT

SEQ ID NO: 162004 - protein, 82 aa, Zea Mays
MNSRYVNMIRTDCPHHPKSMSLCNKQPWKGVYKGKKNNKQCFAFIFPTYANRHKIELPLTIHTITIYHARIGARNTLVYIDI

SEQ ID NO: 162005 - protein, 291 aa, Zea Mays
MDAGLRVVGCLQDARRAGGSGDDVGVDRAQLVRGQQAHLHAGQLPVPLRRLRLLPDQRPAAPAARQAPSPPRGAHPHGRLRRGLQLRAPDGGRGRPPGVPPGQGAAARRGARLRAQPPRAGAPRAAAPGAAPPRLRHPLGAPGAQEAAARRGPWPRPPHHPHEGRRRPLLRAHGRRRRHRRRRQGTHAHGARPGALPHDAAPLRQHLRQQRLVRARLHGGQGPPAPGRPRPHAHLRRRIQVQQLRLDRREARHRRRRLEGPHPPLPAQGRLQPIHGQVRIRQGPHRLVIAP

SEQ ID NO: 162006 - protein, 354 aa, Zea Mays
MLPSILLPTSTTTPPLPPRRLPRPRHVLPGRNDRSPTVVPASKPKLVGEKSKGGAEACLPSSSGPYGDPAPPGLGNSKVVKVQSEEAWDLFTDRASNEGWARYRRCPRRHRNLLRGHRRARPVQRPVGLGRELESCLDDWSSHSSSAGNPNIPYVVVSKSSIVTAVCKEILGCYRKLLGIPDLLNQPNMSILKQLLQTLQPTENFDDVLSEFQSSLGPCNVDYLYCGECKMLEDIMDSVSSFSYLLSSDVLITIQSIVNSVVVLLDKSGEPNGKNIHMGCSKAIISFLRKRLGYSAHKLLSADFPSEDVGKGWQSKGDLIQKILQIYLRNSDSTSDLLAEIGRELPKQSFSMKR

SEQ ID NO: 162007 - protein, 355 aa, Zea Mays
MLPSILLPTSTTTPPLPPRRLPRPRHVLPGRNDRSPTVVPASKPKLVGEKSKGGAEACLPSSSGPYGDPAPPGLGNSKVVKVQSEEAWDLFTDRASNEGWARYRRCPRRHRNLLRGHRRARPVQRPVGLGRELESCLDDWSSHSSSAGNPNIPYVVVSKSSIVTAVCKEILGCYRKLLGIPDLLNQPNMSILKQLLQTLQPTENFDDVLSEFQSSLGPCNVDYLYCGECKMLEDIMDSVSSFSYLLSSDVLITIQSIVNSVVVLLDKSGEPNGKNIHMGCSKAIISFLRKRLGYSAHKLLSADFPSEDVGKGWQSKGDLIQKILQIYLRNSDSTSDLLAEIGRELPKLFILGGLE

SEQ ID NO: 162008 - protein, 231 aa, Zea Mays
MAAAMAPWAHGQQIGRPCIMKDMVRRLKSHVTGPSVPSHWAPRTTSYPASGMTKRSVLNTSPWTENVTWCKTPGQVIRSPLATVAVMRGRAEIGSPVRRAADSEMKLCEEPESRSAENRTLPMVTPIWRVSMKRTPARAEREKHGDSSVDAPGAAHTANTGASLSPGSSAAALPSRATSSISTPLKKKRRRQNLLWPQVNFSLQLKHNPWRRRSAISSGVRRLWLLSPRPC

SEQ ID NO: 162009 - protein, 235 aa, Zea Mays
MPRFGTPPARNELESCLDDWSSHSSSAGNPNIPYVVVSKSSIVTAVCKEILGCYRKLLGIPDLLNQPNMSILKQLLQTLQPTENFDDVLSEFQSSLGPCNVDYLYCGECKMLEDIMDSVSSFSYLLSSDVLITIQSIVNSVVVLLDKSGEPNGKNIHMGCSKAIISFLRKRLGYSAHKLLSADFPSEDVGKGWQSKGDLIQKILQIYLRNSDSTSDLLAEIGRELPKAPNTQLFF

SEQ ID NO: 162010 - protein, 261 aa, Zea Mays
MPRFGTPPARNELESCLDDWSSHSSSAGNPNIPYVVVSKSSIVTAVCKEILGCYRKLLGIPDLLNQPNMSILKQLLQTLQPTENFDDVLSEFQSSLGPCNVDYLYCGECKMLEDIMDSVSSFSYLLSSDVLITIQSIVNSVVVLLDKSGEPNGKNIHMGCSKAIISFLRKRLGYSAHKLLSADFPSEDVGKGWQSKGDLIQKILQIYLRNSDSTSDLLAEIGRELPKVGHLFFSSDALELCICHHSALKRTSGIILNPAEE

SEQ ID NO: 162011 - protein, 116 aa, Zea Mays
MYNIKFCVVKRAVWFPAIGSVLDCIIPPCSVLCSSQAAVAERLNEAVMHFGESIKEIINEEFGDGIMSAIDFYCSVDKVEGADGKDRVVVTFDGKYLPYTEQKSEHMMSRPTRKTS

SEQ ID NO: 162012 - protein, 566 aa, Zea Mays
MMYEVFERMAYYGISSNLVLYLTKKMHQGVVPSANNVTNWVGTIWMTPIIGAYVADAHLGRYRTFMVASVIYLSGMILLTLAVSLPALRPPKCGAGTADPDCVHKATSEQLGVFFLALYILAVGTGGTKPNISTIGADQFDDAHPRERAHKLSFFNWWMFSIFFGTLFANTVLVYIQDTVGWAVGYALPTLGLAVSIAVFTAGTPFYRHKPTSAESPFAKMARVIVAAARKLDVPVPVDPRDLHELDAEHYAKRNVAPLPHTPNLSVLSKAAVKTGAATSRWSLSTVTQVEETKQMLKMLPVLAITFVPSAMMAQINTLFVKQGTTLDRHVGRHFEIPPASLQGFVTISMLLAVVLYDRAFMPFARRVTANPRGISLLQRMSVGLVIHILIMAIASLTERHRLAVARDHGLYDSKGTTVPLTIFVLLPQFVLMGVADAFLEVAKIEFFYDQAPEGMKSLGTSYAMTSLGIGNFLSSALLSAVSHITRRHGRTGWILNNLNASRLDKYYAFFAILNCANLVAFFFVCRFYVYNAEVSHVVDAGSSKQKREVPMAMQPPAVGAVDATL

SEQ ID NO: 162013 - protein, 565 aa, Zea Mays
MYEVFERMAYYGISSNLVLYLTKKMHQGVVPSANNVTNWVGTIWMTPIIGAYVADAHLGRYRTFMVASVIYLSGMILLTLAVSLPALRPPKCGAGTADPDCVHKATSEQLGVFFLALYILAVGTGGTKPNISTIGADQFDDAHPRERAHKLSFFNWWMFSIFFGTLFANTVLVYIQDTVGWAVGYALPTLGLAVSIAVFTAGTPFYRHKPTSAESPFAKMARVIVAAARKLDVPVPVDPRDLHELDAEHYAKRNVAPLPHTPNLSVLSKAAVKTGAATSRWSLSTVTQVEETKQMLKMLPVLAITFVPSAMMAQINTLFVKQGTTLDRHVGRHFEIPPASLQGFVTISMLLAVVLYDRAFMPFARRVTANPRGISLLQRMSVGLVIHILIMAIASLTERHRLAVARDHGLYDSKGTTVPLTIFVLLPQFVLMGVADAFLEVAKIEFFYDQAPEGMKSLGTSYAMTSLGIGNFLSSALLSAVSHITRRHGRTGWILNNLNASRLDKYYAFFAILNCANLVAFFFVCRFYVYNAEVSHVVDAGSSKQKREVPMAMQPPAVGAVDATL

SEQ ID NO: 162014 - protein, 150 aa, Zea Mays
MGRPLRIDMATERGAYTPSSGKDNGSFKKFAPRSGNTVFIKGFDTSGGEDQIRTALEEHFGSCGDITRISIPKDYDTGVSKGMAYMDFKDPDSLNKAYELNGTDLGGYSLYVDEAKPRPDNSGRGGRGTPFRQTAGTASTGKKTTFGDDD

SEQ ID NO: 162015 - protein, 51 aa, Zea Mays
MATKKLDPHSGNEDDGHDAPRPPGRKAKKEKLRARKREDNDNDAFMEELKK

SEQ ID NO: 162016 - protein, 459 aa, Zea Mays
MSGHKLALLKRAMRFVIENLDPSDRLSVVAFSSSAWRLFPLQRMTASGQQQSLQAVNSLAADGGTNIAEGLRKAARVVEDRQARNPVCSIMLLSDGVDSHNLPPRDGSAPDYGPLVPRSILPGSEHHVPIHAFGFGMDHDSRAMHAVAQMSSGTFSFIDMAGSIQDAFAQCIGGLLSVVAQETRLGVDCADDGVLLTSIKSGGYASGVDGDGRGGFVDVGRLYADEGRDFLVTVRVPQSRGDIALIRPSCTYRDAVTMEMVRVGGDPVTLLRAANPANAGMSLRVEREWHRVHATEDIAAAQTAAEEYDYARAASILEARRLLLESCASLSSDQQTQALVAELREMQERVLNAELYEGSGRAYLLSGLSSHSWQRATARGDSTELTGLVHSYQTPFMIDMLNRSQALQPEVAEALSRSPTIASSRSSAPTPAPASSGSPWTRRGLRSFRPAKSFTGLSL

SEQ ID NO: 162017 - protein, 144 aa, Zea Mays
MSSEKSDDSSDESSDESDEEPPQKKTKNSAPSGAAKAATNVSKKKSSSDEDDESSEESSDDEDTEQVETKETSVVTTQKPAHNEPKTPAKSQSQATGSKTIFVGNLAYSIEREQVKEFFEEAGEVVDVRLATFDDGSFKGFGHV

SEQ ID NO: 162018 - protein, 98 aa, Zea Mays
MTAALRAPQTMNLPKNQLPVQKSLLPVVAAVMIAVTVMIAALMRNQQRSPRSFQRSPLSFQRSPLSFQKNLSQQSVMVQNRLNLIAAALTVAQMRMKN

SEQ ID NO: 162019 - protein, 102 aa, Zea Mays
MTAALRAPQTMNLPKNQLPVQKSLLPVVAAVMIAVTVMIAALMRNQQRSPRSFQRSPLSFQRSPLSFQKNLSQQSVMVQNRLNLIAAALTVAQMRMKNLLLT

SEQ ID NO: 162020 - protein, 102 aa, Zea Mays
MTAALRAPQTMNLPKNQLPVQKSLLPVVAAVMIAVTVMIAALMRNQQRSPRSFQRSPLSFQRSPLSFQKNLSQQSVMVQNRLNLIAAALTVAQMRMKNLLLA

SEQ ID NO: 162021 - protein, 313 aa, Zea Mays
MRSLCLKIIGAMKSISPPNVHRFSNNGSYLVSSSSDCTAIIWKVENDDTLTKKHCLQGHEKPISFASWSPNDRMLLTCGTGESLKLWNVDTGECNLKFRGSADCIISSCAWFPNSEKIVCASSEPASAPNRIFTCDLEGQNLEVWAGDRIPKVSDLAVTPDGRHLIFVSCNDIWIRELPRGREWRFREKQTISSLSLSGDGQSLIVNLNSQEIHLWKINESCTVPEKFMGHKQDKFVIRSCFGGSNSSFIASGSEDSQVYIWKRHVEMPIKVLHGHTMIVNCVSWNPARPHMLASASDDRTVRIWVGRKNATK

SEQ ID NO: 162022 - protein, 314 aa, Zea Mays
MQLGNASQSTSAILNFSCTMFAMFSNNGSYLVSSSSDCTAIIWKVENDDTLTKKHCLQGHEKPISFASWSPNDRMLLTCGTGESLKLWNVDTGECNLKFRGSADCIISSCAWFPNSEKIVCASSEPASAPNRIFTCDLEGQNLEVWAGDRIPKVSDLAVTPDGRHLIFVSCNDIWIRELPRGREWRFREKQTISSLSLSGDGQSLIVNLNSQEIHLWKINESCTVPEKFMGHKQDKFVIRSCFGGSNSSFIASGSEDSQVYIWKRHVEMPIKVLHGHTMIVNCVSWNPARPHMLASASDDRTVRIWVGRKNATK

SEQ ID NO: 162023 - protein, 246 aa, Zea Mays
MDLPESSVPRADKGPAPRRLCPVDREELVRAMAQSLYSLGYRRAAAALEAESGVPLYPPEHDRLLLEVMAGQWDASAEIVRSVAGVGEADRTVAEFLVWRGYYLELLGMRGDAGLRRAREVLRRRIAPLGVDRRCVHLLARAMVSSEGAVAPEAVVGWRIAVFLDLVEVLPPWFHVASGRLEHLVESAVTKQVESCIYHNLPDEITLFEDHRCHEEHIPSQCAQVRVKQIVDLFPSFDKCPSLSVV

SEQ ID NO: 162024 - protein, 254 aa, Zea Mays
MLLTCGTGESLKLWNVDTGECNLKFRGSADCIISSCAWFPNSEKIVCASSEPASAPNRIFTCDLEGQNLEVWAGDRIPKVSDLAVTPDGRHLIFVSCNDIWIRELPRGREWRFREKQTISSLSLSGDGQSLIVNLNSQEIHLWKINESCTVPEKFMGHKQDKFVIRSCFGGSNSSFIASGSEDSQVYIWKRHVEMPIKVLHGHTMIVNCVSWNPARPHMLASASDDRTVRIWVTLQPLAWSTNMYKICNSIIIG

SEQ ID NO: 162025 - protein, 311 aa, Zea Mays
MLGVWGCIAKLCISHIHACLQILCGHNNEVWFVRFSNNGSYLVSSSSDCTAIIWKGHEKPISFASWSPNDRMLLTCGTGESLKLWNVDTGECNLKFRGSADCIISSCAWFPNSEKIVCASSEPASAPNRIFTCDLEGQNLEVWAGDRIPKVSDLAVTPDGRHLIFVSCNDIWIRELPRGREWRFREKQTISSLSLSGDGQSLIVNLNSQEIHLWKINESCTVPEKFMGHKQDKFVIRSCFGGSNSSFIASGSEDSQVYIWKRHVEMPIKVLHGHTMIVNCVSWNPARPHMLASASDDRTVRIWVGRKNATK

SEQ ID NO: 162026 - protein, 235 aa, Zea Mays
MDLPESSVPRADKGPAPRRLCPVDREELVRAMAQSLYSLGYRRAAAALEAESGVPLYPPEHDRLLLEVMAGQWDASAEIVRSVAGVGEADRTVAEFLVWRGYYLELLGMRGDAGLRRAREVLRRRIAPLGVDRRCVHLLARAMVSSEGAVAPEAVVGWRIAVFLDLVEVLPPWFHVASGRLEHLVESAVTKQVESCIYHNLPDEITLFEDHRCHEEHIPSQCAQIDPYLYLILEA

SEQ ID NO: 162027 - protein, 563 aa, Zea Mays
MAPVGDHIVDISSDEEDLFIGTSLNILLEPLDPVKWVDEVCGVADYVAGEDIDDLMIMSEISAPPVLQKIAKPDELVVMGELSSPPAPQQKASANGGCHEDDDDCVVLDGDPDKAITVAEEGSLGDGSSDELQIVAEKGPVACRDFPHSRHSCSNLPFSTTSHCHCFVCDAPAPCKYWGNSTSADDHCHATDKDSKWTCMRQIFKQKLLPASFLEKHQNGVYSTMTPPRQQHMQCHVSVPQSPSVSHGSHPSLTIQSPLLNEGSQNQQRHPSVRVSLSVGATVSSPRAGRGTGNAHIAQSTHSHAIFKRAGAVAPVFATRNASQFCPSAPDDLLLQQALSHASQPVQVAPTTNAFTGASQNNHFQRSFSAPIAPQVQQGQPAARYQVAINGMHAVGPQLARSTSLTTQRTQCLPEPAIIDVSTTSWQDILATVASNLGVADYNTSTPESQHVTVDSLAMHPTANHGLDLQHEPIAESENLTYSLLHDSSNGAAGGSVQADGPMQTPENLDHLIGQSNPVPNEAHLDDFAGAPANQLPIEEEEAHQPEMSRLEPTNILFEFDWV

SEQ ID NO: 162028 - protein, 480 aa, Zea Mays
MDDIVPVNTNKVVKPRPLQAASIPGLLGIFQNEWDALMLSNFALEQQLHTARQELSHALYQHDAACRVIARLKKERDEARALLAQAERQIPASVAGAAPAAVVSNGKRAMEDEIGPDGKKIRPGINPVMIDELTECNTMLSAQRKKRQVPPTLAPLDALERYTQISSHPLHKTNKPGILSMDVHPSKDVVATGGIDTNAVIFDRSSGQILCTLTGHSKKITTLKFVPRDQLFVTGSADKTVRIWQENENGNYNCVHTLKDHTAEVEAVTVHATQKYFVSASKDNSWCFYDISTGSCLTQVGEASGQEGYTSASFHPDGLILGTGTTDAVVKIWDVKTQSNVAKFEGHVGPVTAMSFSENGYFLATAAHDGVKLWDLRKLRNFRTFSPYDSDTPTNTVEFDFSGNYLAIGGSDIRVYQVANVKAEWNLIKTLPDLSGTGKVTSVKFGADAKYIAVGSMDRNLRIFGLPGDDQMEESTTAAE

SEQ ID NO: 162029 - protein, 58 aa, Zea Mays
MRRCGDDEEKRLLFYTIPGDAGTMREWRRGARELAAGGVCELVGSGKREEERRAGLGI

SEQ ID NO: 162030 - protein, 107 aa, Zea Mays
MHVSLLFTAYASSYTHMHIHVITYIALIIWIKLKLKMPNSLTVIVLFVFIDHLMQLFVCCRRRAMATGEELPDPHGRSWYLMPDKRADKHSHVNHWERAAAGHRCQL

SEQ ID NO: 162031 - protein, 84 aa, Zea Mays
MILKPTKVLQRKDCAKHFKGVKSHAYGEEIEKSFTKLLVEELKQREEEATQAQQEADVKLIEAKKLASQYQKEADKCSSSMDNL

SEQ ID NO: 162032 - protein, 114 aa, Zea Mays
MSLVVAEELLFNGNRGLMGSAVMPANDFLQLDGDRPEDLGENHTIHPPLGGDSEGHRVTKNVVVQGVVLQDEEDEVAPAGMGGGSRVEDDEDQRSDVQDIRRLNVEVIANGLIR

SEQ ID NO: 162033 - protein, 353 aa, Zea Mays
MATPSTSAPSPSPSSAFPLTTTTRFPRSCSCPVRASALAERRRTRRRRAPDGGGAGGDRSAAAGAVEKGLRLVFLEQLAERARAADATGVADTIYDMVAAGLSPGPRSFHGLVAAHVLAGNAEGAMQSLRRELSSGVRPLHETFVALVRVFAKKGLSTRGMEILAAMERYKYDIRKAWLILVEELVKNHYLEDANTVFLKGAKGGLRGTDDIYDLLIEEDCKAGDHSNALTVAYQMEAYGRMATTFHFNCLLSVQATCGIPEVAFATFENMEYGGEDYMKPDTESYNWVIQAFTRATSYDRAADVAELLGMMVEDHKRIQPNARTYALLSKQKIKLVMTLKINQQKNPTIIFK

SEQ ID NO: 162034 - protein, 827 aa, Zea Mays
MVGAPVGTARRPPGRWRRACAWSSSSSSRSARGLPTPRAWPTPSTTWSPRGFRPGRAPSTASSPRMSSLATLKAPCNLLEGNSVLVCALYMKLLWLWSVFLPRRVFLPGAWRSLLPWRDIKELVKNHYLEDANTVFLKGAKGGLRGTDDIYDLLIEEDCKAGDHSNALTVAYQMEAYGRMATTFHFNCLLSVQATCGIPEVAFATFENMEYGGEDYMKPDTESYNWVIQAFTRATSYDRAADVAELLGMMVEDHKRIQPNARTYALLVECFTKYCMVNESIRHFRALQRIPGGTEVLYNEGNCGDPLSLYLRSLCLDGRPVELLEALEAMANDNQSIAPRAMILNRKYRTLVSSWIEPLQEEADVGFEIDYVARYIEEGGLTGERKRWVPRRGKTPLDPDEFGFAYSNPIETSFKQRCFEELKLYHRKLLITLRNEGPGILGDVSEEDVRRVIERLKKLVVGPKKNVVKPKAASKMVVSELKTELEAQGLPTDGTRQVLYQRVQKARRINRSRGVPLWVPPVEDEEEVDEDLDELISRIKPEDGNTEFWKRRFLGETRNYLCEEDSKEDGQDLDDELEDDDDNDDDEDDDESVKEAEEDEIDDEEVVEQTENQVGDDTKDKPAKEPNHHLQMIGVQLLKDIERTPVSSKKLKRMPEIDDDEDWFPEDPIEAFKVMREERMFDVSDMYTTADAWGWTWEREIKNKMPRKWSQEWEVELAIKIMHKVIELGGTPTIGDCAIILRAAMRAPLPSAFIPILQTTHSLGYKFGSPLYDEVVLLCLDLEEIDAAIAVVAEMETCGVKVPDETLDKVLASKRSGNSALPPPTEE

SEQ ID NO: 162035 - protein, 889 aa, Zea Mays
MATPSTSAPSPSPSSAFPLTTTTRFPRSCSCPVRASALAERRRTRRRRAPDGGGAGGDRSAAAGAVEKGLRLVFLEQLAERARAADATGVADTIYDMVAAGLSPGPRSFHGLVAAHVLAGNAEGAMQSLRRELSSGVRPLHETFVALVRVFAKKGLSTRGMEILAAMERYKYDIRKAWLILVEELVKNHYLEDANTVFLKGAKGGLRGTDDIYDLLIEEDCKAGDHSNALTVAYQMEAYGRMATTFHFNCLLSVQATCGIPEVAFATFENMEYGGEDYMKPDTESYNWVIQAFTRATSYDRAADVAELLGMMVEDHKRIQPNARTYALLVECFTKYCMVNESIRHFRALQRIPGGTEVLYNEGNCGDPLSLYLRSLCLDGRPVELLEALEAMANDNQSIAPRAMILNRKYRTLVSSWIEPLQEEADVGFEIDYVARYIEEGGLTGERKRWVPRRGKTPLDPDEFGFAYSNPIETSFKQRCFEELKLYHRKLLITLRNEGPGILGDVSEEDVRRVIERLKKLVVGPKKNVVKPKAASKMVVSELKTELEAQGLPTDGTRQVLYQRVQKARRINRSRGVPLWVPPVEDEEEVDEDLDELISRIKPEDGNTEFWKRRFLGETRNYLCEEDSKEDGQDLDDELEDDDDNDDDEDDDESVKEAEEDEIDDEEVVEQTENQVGDDTKDKPAKEPNHHLQMIGVQLLKDIERTPVSSKKLKRMPEIDDDEDWFPEDPIEAFKVMREERMFDVSDMYTTADAWGWTWEREIKNKMPRKWSQEWEVELAIKIMHKVIELGGTPTIGDCAIILRAAMRAPLPSAFIPILQTTHSLGYKFGSPLYDEVVLLCLDLEEIDAAIAVVAEMETCGVKVPDETLDKVLASKRSGNSALPPPTEE

SEQ ID NO: 162036 - protein, 181 aa, Zea Mays
MEEGNDYYVVRKGDVVAVYKTLSDCQGQICSSVSGPAASAYKGHSWSRGKEEYLSSRGLSDATYVINAAELREDILGPLVPCSFQDILGSSSNQLAPNHIGFHNVIASQTGAQYVDLNHEARSSSSRHISPANFNHTGTVDAQPISKQYMVGILHFDGASKGNPGKAGAGAVLMTEDGRVV

SEQ ID NO: 162037 - protein, 169 aa, Zea Mays
MEEGNDYYVVRKGDVVAVYKTLSDCQGQICSSVSGPAASAYKGHSWSRGKEEYLSSRGLSDATYVINAAELREDILGPLVPCSFQDILGSSSNQLAPNHIGFHNVIASQTGAQYVDLNHEARSSSSRHISPANFNHTGTVDAQPISKQYVSDFWRISSFPGVFLLFLYF

SEQ ID NO: 162038 - protein, 153 aa, Zea Mays
MEEGNDYYVVRKGDVVAVYKTLSDCQGQICSSVSGPAASAYKGHSWSRGKEEYLSSRGLSDATYVINAAELREDILGPLVPCSFQDILGSSSNQLAPNHIGFHNVIASQTGAQYVDLNHKTLRLSLRTLPDQDASSGVQGKIIHVEEDLRCAL

SEQ ID NO: 162039 - protein, 389 aa, Zea Mays
MRVQAMIMLKITCLMEESNWWEELLDENTYMKADYSGKMTLLLDILSKSSELGDKVLVFSQSLTTLDLVEFYLAKLQINGKEGKHWKRGKDWYRLDGSTPSSDRQNLVEMFNDLENTRVKCTLISTRAGSLGINLHAANRVVLLDGSWNPTHDLQAIYRVWRYGQTKPVYAYRLMAHQTMEEKIYKRQVTKEGLAARVVDRQQVSRTISKEEMLHLFEFGEEELMEQNENGSTMIEKPSTSNTIKTSVPVPVDSLMLSLLSEQTRWISGYHEHEALLQENEEEKLTKEEQDLALSEWESLRKAASDPERKSSMSAVPTYPNPVRPLKPASRSRQLQQPKANSNNQKKCTNLTHLLTLRSHGTKAGCTTTCNECGQEISWETLNRDGRSR

SEQ ID NO: 162040 - protein, 359 aa, Zea Mays
MKADYSGKMTLLLDILSKSSELGDKVLVFSQSLTTLDLVEFYLAKLQINGKEGKHWKRGKDWYRLDGSTPSSDRQNLVEMFNDLENTRVKCTLISTRAGSLGINLHAANRVVLLDGSWNPTHDLQAIYRVWRYGQTKPVYAYRLMAHQTMEEKIYKRQVTKEGLAARVVDRQQVSRTISKEEMLHLFEFGEEELMEQNENGSTMIEKPSTSNTIKTSVPVPVDSLMLSLLSEQTRWISGYHEHEALLQENEEEKLTKEEQDLALSEWESLRKAASDPERKSSMSAVPTYPNPVRPLKPASRSRQLQQPKANSNNQKKCTNLTHLLTLRSHGTKAGCTTTCNECGQEISWETLNRDGRSR

SEQ ID NO: 162041 - protein, 372 aa, Zea Mays
MKHTCEDDDNEKRLKTVIVESDDDMQIDSKQALQKDGEGSSTEFEKVVDIIDLDLFPSPKLPNKSLHKTFKCTICSEMLNASDVHRHPVLDVVVCGSCRFLVIEKNRLEDPVSGSYCTWCAQSELIQSCSSCKLLFCTNCLSRNLGEECLSEAKATGWQCCCCVPSQLELLISECDKALSGVESSDSETSNAELSGSENNGPVSKQKMKKSIRRIMDDTELGEETKRKIAMEKARQDHLKSMQEQSATKLRSKNVGNPFETPLEICLQDAGDGHVVNLAREEDEEPVRIPSSMSSKLKPHQVEGIRFMWENVIQSVKKVKSRDKGLGCILAHNMGLGKTFQVCVGLLAYSLDIYLHFLQELFVHCMLHLLYP

SEQ ID NO: 162042 - protein, 106 aa, Zea Mays
MNSMDKDGILSDENLAKMESAQPNGQREHKEPPRTTVDNNVNEETSTTDDDSEANSYEFFVRESDNEQASASEEGTEVPLTEEEVEELVVEFLEVESKAAQAQRVT

SEQ ID NO: 162043 - protein, 112 aa, Zea Mays
MEITERPEPRGSKVRMSRPFLLVRSTVTGLAISSHPIPMCNFTQGFCCLPTPAPPTATPATIFPTILLTFPTENHTSTCYNKCKHPSATTVIAEETSDSAECDLHLWSPPPA

SEQ ID NO: 162044 - protein, 330 aa, Zea Mays
MVAVKTVSEELLWELFVQAGPVVNVYVPKDRVTNLHQGYGFVEFRSEEDADYAIKILNMIKLYGKPIRVNKASQDKKSLDVGANLFIGNLDPDVDEKLLYDTFSAFGVIVTNPKIMRDPETGNSRGFGFVSYESFESSDQAIEAMNNQHLCNRPITVSYAYKKDTKGERHGTPAERLLASNNPGSQKNRPHTMFASGPPTQGLPNGGPPVPRPFGNGTIPGQIQHIRQPPPPPPVGQFPPPMQMHGQPAWPAQHSMPPHMSSQLQYRLPMRPPPPNMMPPPVGMVRPPPPPTGMSAPHMWMPPPPPPSSQQGGMPPPPMSMPPPPPPPSG

SEQ ID NO: 162045 - protein, 272 aa, Zea Mays
MIKLYGKPIRVNKASQDKKSLDVGANLFIGNLDPDVDEKLLYDTFSAFGVIVTNPKIMRDPETGNSRGFGFVSYESFESSDQAIEAMNNQHLCNRPITVSYAYKKDTKGERHGTPAERLLASNNPGSQKNRPHTMFASGPPTQGLPNGGPPVPRPFGNGTIPGQIQHIRQPPPPPPVGQFPPPMQMHGQPAWPAQHSMPPHMSSQLQYRLPMRPPPPNMMPPPVGMVRPPPPPTGMSAPHMWMPPPPPPSSQQGGMPPPPMSMPPPPPPPSG

SEQ ID NO: 162046 - protein, 113 aa, Zea Mays
MWSAHTAAGCSVPSVRFHDTLVSLAQSSSSNDRGRMSRAERTYCRGRLNKRASGKVPRVQDICGEDQGLCIYHLRVLLTNRTFITLSTNDDHHLCSNLQVQPLILLPLCIPNV

SEQ ID NO: 162047 - protein, 104 aa, Zea Mays
MHSKWMVCPHCSTLMSFVESNRYCEKKQRETFSISRDWNIQSECSVETEVSHLKADGAVVMHCSFDAVVGILQDIAVATPCRTATRTPIRARVKSLLHSMVTES

SEQ ID NO: 162048 - protein, 153 aa, Zea Mays
MKRLCCCFIEMTLTLVLQDLIDYYNSSTIIDWAGRATTFKATADILAPGNLIWAAWAPNGTDESNYAGEGFAMVSGTSMATPHFAGIAALIKQKNPKWSPSAIKSAMMTTTNTLDKGSRPLRAQQYTTSEMMTLSQATPFDCGSGAVNPKAAL

SEQ ID NO: 162049 - protein, 367 aa, Zea Mays
MGNYYSLNSKLHEEMVMADMQIRPGEGWEYCPRNTLRKVTKVLLDEFNVTMKAGFENEFFLRRKLVSNGVEMWIPYDNTNYCSTSAFDGASSILQEVYSSLKDSGIVVEQLHAEAGKGQFEIALKYILCTVAADKLIYARETIKSIARKHGLVATFLPKPDLDDFGSGSHVHLSLWENDQNVFMGSSKDNFHGMSKTGEQFLAGVYHHLPSILAFTAPHPNSYDRIQPDTWSGAYLCWGKENREAPLRTACPPGVPLDLVSNFEIKSFDGCANPHLGLAAIVAAGIDGLRRHLKLPEPIESNPSDHSSKLKRLPQNLQESVESLSADKVLHELIGDKLVTTAIAIRKAEINHFAKNPGALKDLIDRY

SEQ ID NO: 162050 - protein, 795 aa, Zea Mays
MNHECLGSLGLRSLRDIAALYNCEASLEKVEKFRSAEGLKSIGSKCFQAANISVILIDDGIAFDKMLDLESHKAFAPVVGRVLRIERLAETIINAESFSGSSWTLDSFTESYISKLNSVSNQIVALKSIAAYRSGLEINPNVSKTDAEDGLRKELTGPRPFRITNKNLIDYLFTCSLGIAVSLSLPVQIHTGFGDKDLDLRKCNPLHLRAVLEDERFAKCQIVLLHASYPFSKEASYLASVYSQVYLDFGLAIPKLSVHGMTSSLKELLELAPIKKVMFSTDGYAFPETYYLGAKRARDVVYRVLSAACEDGDLSIQEAIEAIEDIFRRNALNLYKLNVVNGSINHETAIVGKRVSLSSVEEDVLFVRIIWCDASGQHRCRVVPAGRFYEITRNKGVGLTFAAMGMTSFCDGPADGSNLTGVGEIRLVPDMPTLVRLPWHEEMVMADMQIRPGEGWEYCPRNTLRKVTKVLLDEFNVTMKAGFENEFFLRRKLVSNGVEMWIPYDNTNYCSTSAFDGASSILQEVYSSLKDSGIVVEQLHAEAGKGQFEIALKYILCTVAADKLIYARETIKSIARKHGLVATFLPKPDLDDFGSGSHVHLSLWENDQNVFMGSSKDNFHGMSKTGEQFLAGVYHHLPSILAFTAPHPNSYDRIQPDTWSGAYLCWGKENREAPLRTACPPGVPLDLVSNFEIKSFDGCANPHLGLAAIVAAGIDGLRRHLKLPEPIESNPSDHSSKLKRLPQNLQESVESLSADKVLHELIGDKLVTTAIAIRKAEINHFAKNPGALKDLIDRY

SEQ ID NO: 162051 - protein, 858 aa, Zea Mays
MEARYEVLRRATEEVAAVDAHAHNLVEHGSAFPFLRCFSEAEGDALALAPHSLSFKRSLRDIAALYNCEASLEKVEKFRSAEGLKSIGSKCFQAANISVILIDDGIAFDKMLDLESHKAFAPVVGRVLRIERLAETIINAESFSGSSWTLDSFTESYISKLNSVSNQIVALKSIAAYRSGLEINPNVSKTDAEDGLRKELTGPRPFRITNKNLIDYLFTCSLGIAVSLSLPVQIHTGFGDKDLDLRKCNPLHLRAVLEDERFAKCQIVLLHASYPFSKEASYLASVYSQVYLDFGLAIPKLSVHGMTSSLKELLELAPIKKVMFSTDGYAFPETYYLGAKRARDVVYRVLSAACEDGDLSIQEAIEAIEDIFRRNALNLYKLNVVNGSINHETAIVGKRVSLSSVEEDVLFVRIIWCDASGQHRCRVVPAGRFYEITRNKGVGLTFAAMGMTSFCDGPADGSNLTGVGEIRLVPDMPTLVRLPCSYAIFMGNYYSLNSKLSRHEEMVMADMQIRPGEGWEYCPRNTLRKVTKVLLDEFNVTMKAGFENEFFLRRKLVSNGVEMWIPYDNTNYCSTSAFDGASSILQEVYSSLKDSGIVVEQLHAEAGKGQFEIALKYILCTVAADKLIYARETIKSIARKHGLVATFLPKPDLDDFGSGSHVHLSLWENDQNVFMGSSKDNFHGMSKTGEQFLAGVYHHLPSILAFTAPHPNSYDRIQPDTWSGAYLCWGKENREAPLRTACPPGVPLDLVSNFEIKSFDGCANPHLGLAAIVAAGIDGLRRHLKLPEPIESNPSDHSSKLKRLPQNLQESVESLSADKVLHELIGDKLVTTAIAIRKAEINHFAKNPGALKDLIDRY

SEQ ID NO: 162052 - protein, 607 aa, Zea Mays
MLFGDKDLDLRKCNPLHLRAVLEDERFAKCQIVLLHASYPFSKEASYLASVYSQVYLDFGLAIPKLSVHGMTSSLKELLELAPIKKVMFSTDGYAFPETYYLGAKRARDVVYRVLSAACEDGDLSIQEAIEAIEDIFRRNALNLYKLNVVNGSINHETAIVGKRVSLSSVEEDVLFVRIIWCDASGQHRCRVVPAGRFYEITRNKGVGLTFAAMGMTSFCDGPADGSNLTGVGEIRLVPDMPTLVRLPWSRHEEMVMADMQIRPGEGWEYCPRNTLRKVTKVLLDEFNVTMKAGFENEFFLRRKLVSNGVEMWIPYDNTNYCSTSAFDGASSILQEVYSSLKDSGIVVEQLHAEAGKGQFEIALKYILCTVAADKLIYARETIKSIARKHGLVATFLPKPDLDDFGSGSHVHLSLWENDQNVFMGSSKDNFHGMSKTGEQFLAGVYHHLPSILAFTAPHPNSYDRIQPDTWSGAYLCWGKENREAPLRTACPPGVPLDLVSNFEIKSFDGCANPHLGLAAIVAAGIDGLRRHLKLPEPIESNPSDHSSKLKRLPQNLQESVESLSADKVLHELIGDKLVTTAIAIRKAEINHFAKNPGALKDLIDRY

SEQ ID NO: 162053 - protein, 808 aa, Zea Mays
MNAWGPWDWWGCLFGNWNRVLHRSLRDIAALYNCEASLEKVEKFRSAEGLKSIGSKCFQAANISVILIDDGIAFDKMLDLESHKAFAPVVGRVLRIERLAETIINAESFSGSSWTLDSFTESYISKLNSVSNQIVALKSIAAYRSGLEINPNVSKTDAEDGLRKELTGPRPFRITNKNLIDYLFTCSLGIAVSLSLPVQIHTGFGDKDLDLRKCNPLHLRAVLEDERFAKCQIVLLHASYPFSKEASYLASVYSQVYLDFGLAIPKLSVHGMTSSLKELLELAPIKKVMFSTDGYAFPETYYLGAKRARDVVYRVLSAACEDGDLSIQEAIEAIEDIFRRNALNLYKLNVVNGSINHETAIVGKRVSLSSVEEDVLFVRIIWCDASGQHRCRVVPAGRFYEITRNKGVGLTFAAMGMTSFCDGPADGSNLTGVGEIRLVPDMPTLVRLPWSRHEEMVMADMQIRPGEGWEYCPRNTLRKVTKVLLDEFNVTMKAGFENEFFLRRKLVSNGVEMWIPYDNTNYCSTSAFDGASSILQEVYSSLKDSGIVVEQLHAEAGKGQFEIALKYILCTVAADKLIYARETIKSIARKHGLVATFLPKPDLDDFGSGSHVHLSLWENDQNVFMGSSKDNFHGMSKTGEQFLAGVYHHLPSILAFTAPHPNSYDRIQPDTWSGAYLCWGKENREAPLRTACPPGVPLDLVSNFEIKSFDGCANPHLGLAAIVAAGIDGLRRHLKLPEPIESNPSDHSSKLKRLPQNLQESVESLSADKVLHELIGDKLVTTAIAIRKAEINHFAKNPGALKDLIDRY

SEQ ID NO: 162054 - protein, 840 aa, Zea Mays
MEARYEVLRRATEEVAAVDAHAHNLVEHGSAFPFLRCFSEAEGDALALAPHSLSFKRSLRDIAALYNCEASLEKVEKFRSAEGLKSIGSKCFQAANISVILIDDGIAFDKMLDLESHKAFAPVVGRVLRIERLAETIINAESFSGSSWTLDSFTESYISKLNSVSNQIVALKSIAAYRSGLEINPNVSKTDAEDGLRKELTGPRPFRITNKNLIDYLFTCSLGIAVSLSLPVQIHTGFGDKDLDLRKCNPLHLRAVLEDERFAKCQIVLLHASYPFSKEASYLASVYSQVYLDFGLAIPKLSVHGMTSSLKELLELAPIKKVMFSTDGYAFPETYYLGAKRARDVVYRVLSAACEDGDLSIQEAIEAIEDIFRRNALNLYKLNVVNGSINHETAIVGKRVSLSSVEEDVLFVRIIWCDASGQHRCRVVPAGRFYEITRNKGVGLTFAAMGMTSFCDGPADGSNLTGVGEIRLVPDMPTLVRLPWHEEMVMADMQIRPGEGWEYCPRNTLRKVTKVLLDEFNVTMKAGFENEFFLRRKLVSNGVEMWIPYDNTNYCSTSAFDGASSILQEVYSSLKDSGIVVEQLHAEAGKGQFEIALKYILCTVAADKLIYARETIKSIARKHGLVATFLPKPDLDDFGSGSHVHLSLWENDQNVFMGSSKDNFHGMSKTGEQFLAGVYHHLPSILAFTAPHPNSYDRIQPDTWSGAYLCWGKENREAPLRTACPPGVPLDLVSNFEIKSFDGCANPHLGLAAIVAAGIDGLRRHLKLPEPIESNPSDHSSKLKRLPQNLQESVESLSADKVLHELIGDKLVTTAIAIRKAEINHFAKNPGALKDLIDRY

SEQ ID NO: 162055 - protein, 380 aa, Zea Mays
MEAAPTTITVQVKFAGRTIPVEVPAAASGAELKRLLQPLTNVLPRGQRLICKGKVLQDAASLSSMQVVGGSKVMLIASQGLHQGDGPITNNSSSSATTVRRPSNVKENQTQKPEVVVTKSRSERWKLTGVVALQDCDLKVIPEEVWDCGTSIRILDISYNCIKEIPHKISALKSLNKLLLTENDIVDDSICWEGLSCLQKLLNLSLSENRLVSLPPTLGSLTSLRELCVAKNRLDNLPVEIGLLKHLQVLIANNNRITSLPSSIGDCESLTVVHLSSNLLTELPETFANLRNLKQRFSKSARSLLHWISMAQKSQMMFFDRWRGGKSSTSGGGRNIRSSSTSVLAHLVCSMKARMMIIGEGDCLKIVSIILCYDISPKEP

SEQ ID NO: 162056 - protein, 157 aa, Zea Mays
MATSTKLVALGFAVLLSIGFSDAARVVRLGSHASAGGGGGGGGGGSGSTGGGFGGGSGGGGGYGIGKGGGDWWNNFVSSIAGGGGGGQGGGGGTNGGSGSGGGSGYGSGSSSTAASGPSSGNYADAEGKGGGGGGGSQGGSGGGGGSGSGSGSGGIH

SEQ ID NO: 162057 - protein, 141 aa, Zea Mays
MFITVDGFNRTGIPNALWELVEPHSRIDSAKGTALLAVVILVLSNVASNVPTVLLLGTRVAASAGTISPESEKKAWLILAWVSTVAGNLTLLGSAANLIVCEQARRAQFFGYNLTFWSHLRFGLPSTIIITAIGLLIVASY

SEQ ID NO: 162058 - protein, 361 aa, Zea Mays
MLDLSWMMSDYKVEMVNDGMQEFFVEFKGPAESIYQGGVWKVRVELPDAYPYKSPSIGFINKIYHPNVDEMSGSVCLDVINQTWSPMFDLVNVFEVFLPQLLLYPNPSDPLNGEAAALMMRDRPVYEQKGKGEGRTTTRTHRQSLQAAQSLSPSYPQGEELRGGGGPSAAVLVSPLSKMSSPSKRREMDLMKLMMSDYKVEMVNDGMQEFFVEFKGPAESIYQGGVWKVRVELPDAYPYKSPSIGFINKIYHPNVDEMSGSVCLDVINQTWSPMFDLVNVFEVFLPQLLLYPNPSDPLNGEAAALMMRDRPVYEQKVKEYCEKYAKPEDAGITPEDKSSDEELSEEEDDSGDEAILGNPDP

SEQ ID NO: 162059 - protein, 245 aa, Zea Mays
MSSPSKRREMDLMKLMMSDYKVEMVNDGMQEFFVEFKGPAESIYQGGVWKVRVELPDAYPYKSPSIGFINKIYHPNVDEMSGSVCLDVINQTWSPMFDLVNVFEVFLPQLLLYPNPSDPLNGEAAALMMRDRPVYEQKGKGEGRTTTRTHRQSLQAAQSLSPSYPQGEELRGGGGPSAAVLVSPLSKMSSPSKRREMDLMKLMMSDYKVEMVNDGMQEFFVEFKGPAENVVGWKFSFRKTASLHC

SEQ ID NO: 162060 - protein, 490 aa, Zea Mays
MQINRHQISPPLHLQTTTRRFPQLVSSSRSTIPPRAKVLKASIRLDKKDAIGSLAREACLGGWRPKLAAELGSVLREGRTTTRTHRQSLQAAQSLSPSYPQGEELRGGPSAAVLVSPLSKMSSPSKRREMDLMKLMMSDYKVEMVNDGMQEFFVEFKGPAESIYQGGVWKVRVELPDAYPYKSPSIGFINKIYHPNVDEMSGSVCLDVINQTWSPMFDLVNVFEVFLPQLLLYPNPSDPLNGEAAALMMRDRPVYEQKGKGEGRTTTRTHRQSLQAAQSLSPSYPQGEELRGGGGPSAAVLVSPLSKMSSPSKRREMDLMKLMMSDYKVEMVNDGMQEFFVEFKGPAESIYQGGVWKVRVELPDAYPYKSPSIGFINKIYHPNVDEMSGSVCLDVINQTWSPMFDLVNVFEVFLPQLLLYPNPSDPLNGEAAALMMRDRPVYEQKVKEYCEKYAKPEDAGITPEDKSSDEELSEEEDDSGDEAILGNPDP

SEQ ID NO: 162061 - protein, 282 aa, Zea Mays
MSSPSKRREMDLMKLMMSDYKVEMVNDGMQEFFVEFKGPAESIYQGGVWKVRVELPDAYPYKSPSIGFINKIYHPNVDEMSGSVCLDVINQTWSPMFDLVNVFEVFLPQLLLYPNPSDPLNGEAAALMMRDRPVYEQKGKGIYQGGVWKVRVELPDAYPYKSPSIGFINKIYHPNVDEMSGSVCLDVINQTWSPMFDLVNVFEVFLPQLLLYPNPSDPLNGEAAALMMRDRPVYEQKVKEYCEKYAKPEDAGITPEDKSSDEELSEEEDDSGDEAILGNPDP

SEQ ID NO: 162062 - protein, 111 aa, Zea Mays
MGFHRIGEDLALTWTKDEETKFNSTVQDNMPASKNKLWDKLLAVLHAKGKEGLVSYYHNVFQVWRRAYQNRLAGNADSDDDSIEPGFLYFRQGGDRSRSRSAASSRKRRRS

SEQ ID NO: 162063 - protein, 341 aa, Zea Mays
MQPRSPPPSEAPAPSDAIMMPGVGGVEPAVTLGQVPRWSDPDQRIFLASTSEEASAEDDGSGTTSASGFISFSDPLTVDDGAVGGGHAGGASRFPVDQEINSRIYLWRGQPWNLEVDAVVNSTNESLDEAHSSPGLHAAAGSGLAEECATLGGCRTGMAKMTNAYDLPARKVIHTVGPKYAVKYHTAAENALSHCYRSCLELLIENGLESIAMGCIYTEAKNYPREPAAHVAIRTVRRFLEKQKDKIAGVVFCTTSSSDTEIYKRLLPLYFPRDKQEEYIAIVKLPADVGDENGETAIDERKIRIRPLPAGVLDRTVSANLVDLPLSNSGSALKRWLALLR

SEQ ID NO: 162064 - protein, 883 aa, Zea Mays
MTAMLCGQAEIELYIESLANASSRSNPRISPNCNQNSWALGCQPGWACMVSGTEPSDGPSAELVPQRAESCRPCCPGFFCPRGLTCMMPCPLGAYCPLGTLNDTTGLCDPYFYQITPGKSTACGAADSWADIVTTNDIFCPPGHYCPSTTQKYNCSSGHYCRKGSTDEKKCFWKNTCKDNAIKENLTFYGIILIAILGFVLLLVYNCSGLFISFQVKMSSRSRKKAAKRADKSAAARERWKLAKELILRHEVPTEGFGHAYNQADTDRAMKTNNDKLTFSGVVSLATEIRPRRPTLEVAFRGLTLSIGKKKLLQCVTGKLSPGRVTAIMGPSGAGKTTFLNAVLGKTSGYKKDGVVLINGLPGLMQSYKKIIGFVPQDDIVHGNLTVEENLWFSSCCRLSKGMSRSHKVRILERVIESLGLKEIRNSLVGTVEKRGISGGQRKRVNVGIEMVMEPSLLILDEPTTGLDSASSQLLLRALRHEALEGVNVCAVVHQPSYTLFNMFDDFVLLARGGLIAYHGPIYEVETYFAGLGIKVPDRENPPDYFIDILEGIVKTKMRGNVTPKHLPLLWMLHNGYEVPDDLQKDLENIDTIRELYTVRSISSEQSSEEQSENTDSVHRNLSQSNELLERKTPGVFAQYGYYLGRVAKQRLREATQQAVDYLILCIAGICIGTIARVRDDSFGVASYGYTIMAVSLLCQLASLRSFSPEKLQYWRERESGMSSLAYFLARDTVDHFNTAVKPIIFLSTFYFFNNPRSTLRDNYLVLLALIYCVTGIGYSFAIWFELGLAQLSSAIVPVVLVLVGTKPDLPRVIRELCYPKWALEAFIIAGAKKYSGVWLITRCGALIQGDYDINDFNLCITIIILYGVLFRLVAFLSMLKLK

SEQ ID NO: 162065 - protein, 810 aa, Zea Mays
MTAMLCGQAEIELYIESLANASSRSNPRISPNCNQNSWALGCQPGWACMVSGTEPSDGPSAELVPQRAESCRPCCPGFFCPRGLTCMMPCPLGAYCPLGTLNDTTGLCDPYFYQITPGKSTACGAADSWADIVTTNDIFCPPGHYCPSTTQKYNCSSGHYCRKGSTDEKKCFWKNTCKDNAIKENLTFYGIILIAILGFVLLLVYNCSGLFISFQVKMSSRSRKKAAKRADKSAAARERWKLAKELILRHEVPTEGFGHAYNQADTDRAMKTNNDKLTFSGVVSLATEIRPRRPTLEVAFRGLTLSIGKKKLLQCVTGKLSPGRVTAIMGPSGAGKTTFLNAVLGKTSGYKKDGVVLINGLPGLMQSYKKIIGFVPQDDIVHGNLTVEENLWFSSCCRLSKGMSRSHKVRILERVIESLGLKEIRNSLVGTVEKRGISGGQRKRVNVGIEMVMEPSLLILDEPTTGLDSASSQLLLRALRHEALEGVNVCAVVHQPSYTLFNMFDDFVLLARGGLIAYHGPIYEVETYFAGLGIKVPDRENPPDYFIDILEGIVKTKMRGNVTPKHLPLLWMLHNGYEVPDDLQKDLENIDTIRELYTVRSISSEQSSEEQSENTDSVHRNLSQSNELLERKTPGVFAQYGYYLGRVAKQRLREATQQAVDYLILCIAGICIGTIARVRDDSFGVASYGYTIMAVSLLCQLASLRSFSPEKLQYWRERESGMSSLAYFLARDTVDHFNTAVKPIIFLSTFYFFNNPRSTLRDNYLVLLALIYCVTGIGYSFAIWFELGLAQLVSRASLFCNHDINSTEGG

SEQ ID NO: 162066 - protein, 999 aa, Zea Mays
MRAAVVLLISVVALSLLRPARCQLPPGGVVGRAPPPIAQVIEGAPPLPVVQPQDGLEKDLRSVSDKLTAELQKKYGFCMADAQTDFNLTFDYTADPSFASDCMEQTRGQMTAMLCGQAEIELYIESLANASSRSNPRISPNCNQNSWALGCQPGWACMVSGTEPSDGPSAELVPQRAESCRPCCPGFFCPRGLTCMMPCPLGAYCPLGTLNDTTGLCDPYFYQITPGKSTACGAADSWADIVTTNDIFCPPGHYCPSTTQKYNCSSGHYCRKGSTDEKITAHIFAECFWKNTCKDNAIKENLTFYGIILIAILGFVLLLVYNCSGLFISFQVKMSSRSRKKAAKRADKSAAARERWKLAKELILRHEVPTEGFGHAYNQADTDRAMKTNNDKLTFSGVVSLATEIRPRRPTLEVAFRGLTLSIGKKKLLQCVTGKLSPGRVTAIMGPSGAGKTTFLNAVLGKTSGYKKDGVVLINGLPGLMQSYKKIIGFVPQDDIVHGNLTVEENLWFSSCCRLSKGMSRSHKVRILERVIESLGLKEIRNSLVGTVEKRGISGGQRKRVNVGIEMVMEPSLLILDEPTTGLDSASSQLLLRALRHEALEGVNVCAVVHQPSYTLFNMFDDFVLLARGGLIAYHGPIYEVETYFAGLGIKVPDRENPPDYFIDILEGIVKTKMRGNVTPKHLPLLWMLHNGYEVPDDLQKDLENIDTIRELYTVRSISSEQSSEEQSENTDSVHRNLSQSNELLERKTPGVFAQYGYYLGRVAKQRLREATQQAVDYLILCIAGICIGTIARVRDDSFGVASYGYTIMAVSLLCQLASLRSFSPEKLQYWRERESGMSSLAYFLARDTVDHFNTAVKPIIFLSTFYFFNNPRSTLRDNYLVLLALIYCVTGIGYSFAIWFELGLAQLSSAIVPVVLVLVGTKPDLPRVIRELCYPKWALEAFIIAGAKKYSGVWLITRCGALIQGDYDINDFNLCITIIILYGVLFRLVAFLSMLKLK

SEQ ID NO: 162067 - protein, 782 aa, Zea Mays
MASQGEPSASASDPKEKKDYSTAILERKKSPNRLVVDEATNDDNSVVALHPDTMERLQLFRGDTVLLKGKKRKDTVCIVLADETCEEPKVRMNKVVRQNLRVRLGDVVSVHQCQDVKYGKRVHILPIDDTVEGITGNLFDAFLKPYFLEAYRPVRKGDLFLVRGGMRSVEFKVIETDPSEYCIVAPDTEIFCDGEPIKREDEERLDEVGYDDVGGVRKQMAQIRELVELPLRHPQLFKSIGVKPPKGILLYGPPGSGKTLIARAVANETGAFFFLINGPEIMSKLAGESESNLRKAFEEAEKNAPSIIFIDEIDSIAPKREKTNGEVERRIVSQLLTLMDGLKSRSHVIVMGATNRPNSIDPALRRFGRFDREIDIGVPDEVGRLEVLRIHTKNMKLAEDCIREKMDIIDLEDETIDAEILNSMAVTNDHFKTALGTSNPSALRETVVEVPNVSWEDIGGLENVKRELQETVQYPVEHPEKFEKFGMSPSKGVLFYGPPGCGKTLLAKAIANECQANFISVKGPELLTMWFGESEANVREIFDKARQSAPCVLFFDELDSIATQRGSSVGDAGGAADRVLNQLLTEMDGMNAKKTVFIIGATNRPDIIDPALLRPGRLDQLIYIPLPDEQSRLQIFKACLRKSPVAKDVDLNALAKYTQGFSGADITEICQRACKYAIRENIEKDIERERRMKDNPEAMEEDEVDEIAEIKAAHFEESMKYARRSVSDADIRKYQAFAQTLQQSRGFGSEFRFSEQSATAGAAAADPFASAGAAADDDDLYS

SEQ ID NO: 162068 - protein, 62 aa, Zea Mays
MGKPEPGYSICEKTIAHWEWRDGGSGVYPPGMWLDGGVPYSRVARTGSRSGGPVGMVDICKG

SEQ ID NO: 162069 - protein, 362 aa, Zea Mays
MPLKRTSTPSGTLLLPLLNGTTNETTRKKAGRGNPLAARARAADTSTSTAATSQPVRGQQLGSSPTLAPPSAITALVRAHPPPRPAHHPPGPAAYLTPPPPGHSALSVSERPSLPPRTPRRPAPSVTAPRPATETGRRDRQRPAAMGEDKKAGNKDAAGGDKKKDAGAGAAPQPIVLKVDLHCAGCANKVRKAIKHAPGVESVTPDMAAGKVVVTGPADAVELKERIEARAKKPVQIVSAGAGPPKKEKDKEKEKDKKADGGEKKADKEKGADKPKEEKKKPKEETVTLKIRLHCDGCIERIKRRISKIKGVKDVAFDAAKDLVKVTGTMDGAALPAYLREKPFLRVRPRTMGLSWISGVFS

SEQ ID NO: 162070 - protein, 264 aa, Zea Mays
MGSGSLTMKQKKRVKHAKNKYLKPGALAQIRYSRSTSRDIGKKRILLNAKDELELPPQPEVLLESSTTILSPARLNFKPFGSNKGQILPKTPKTPDASAFDGDSNLESLPLDLLIMCCLHHDELKVVFHVSKRIRKAVELARQYHFNYTTPDRSRQELLLNRTPLPTEHWPFLRIDGKDVRVSTPRTPRAPKHASRLSRLKLVDVKPITAVLFQESPTLFPSKRLRCSMPPPRLARPACKAAPSPRVLRYEEELCEAVAQNKLL

SEQ ID NO: 162071 - protein, 172 aa, Zea Mays
MGSGSLTMKQKKRVKHAKNKYLKPGALAQIRYSRSTSRDIGKKRILLNAKDELELPPQPEVLLESSTTILSPARLNFKPFGSNKGQILPKTPKTPDASAFDGDSNLESLPLDLLVKIMCCLHHDELKVVFHVSKRIRKATVPFQLYHSRSEQTGVAPEQNPSSNRALALLKN

SEQ ID NO: 162072 - protein, 53 aa, Zea Mays
MYLQAPGLSPEYSYKGGLQTVITEKLLQIGPVTRFSVRGLLQWAESHVGLKVE

SEQ ID NO: 162073 - protein, 174 aa, Zea Mays
MLSRAFAEYVTMGWDDNLPRTLLLYHANIVSSPEFYFQTVACNSRRFRNATVNHDLHFIRWDTPPKQHPLYLTARDYRRMLLSGAAFARKFRDGDPVLDRIDRDILRRRDPAAHFAYGGWCSEAGDQNGGAALCSNPQEPGRRGAVKPGAGSRRLKAMLRKTLSPRNFRRQQCR

SEQ ID NO: 162074 - protein, 366 aa, Zea Mays
MVMRARAMGLSSIRREVAVPVPVEGCRHRRGGGAAGAVPRDVRVPDLGVDGGRVPRRAAAGGAVPPGQRVDRGQAQPGNLPWPHHADHHAARRRRAAPPPPPLGLVHQPQRLRLPARHPGRFDGGVRRAAQGPQLHPAHEPPGLEDKEAGAAGDPGHGAVRGREGGADPPGEHLHQPQEAAHGIQALHRVGVDDAVAGVRGVRDDGVGRQPAADAAAVPRQHRLLARVLLPDGGLQLAPVPQRHGQPRPALHPLGHPAQAAPALPHRQGLPPDAAQRGRLRAQVQGRRPRAGPHRQGHPPPPGPRRPLRLRRLVLRGRRPKRRRRALLQPAGAREARGRQARRRVQAAQGHAQEDAVAEEFQEAAV

SEQ ID NO: 162075 - protein, 78 aa, Zea Mays
MKYDLRLVLYLKVNEVLFEVVLFVKEVKYIDKCSMPYTLHDSLASEVLSWPMVQPYRYNLASYVAREGVRYGFIPLEV

SEQ ID NO: 162076 - protein, 900 aa, Zea Mays
MAVYYKFKSARDFDSIPIEGQFISVANLKERIFESKHLGRGTDFDLMISNAQTDEEYADEATMIPKNTSVLIRRIPGRPRKPIVTEPEETKAAEDGVQDVMPTSGAFLGDSSMKYPEESEWDDEFGNELYISDSVPYQPVCQAVDAIENKVDEDSKIKALIDTSALDYSQIPDGYGSGRGYGRGMGGRMMAGRGFGRGLERRTPPPGYVCHRCKVPGHFIQHCPTNGDARYDVKRMKPPTGIPKSMLMQTPDGSYALPSGAGAVLKPNEAAFEKEIEGLPTTRPVGDLPPELRCPLCKEVMKDAVLTSKCCFRSFCDKCIRDYIINKSMCVCGATSILADDLLPNKTLRETISRILEAPPTSSTENVGSMVQVQDMESALPVQPKHRSPAVSAASKEEAKASTLVEESPDAESLNGTKATNIDASSSDKKALTVPDIAEGTLDSKKAKEDKPVEATPVAKDSQEKFPAGEQDTDFLLEASAVKKKKKKKPRVPGNAEEQWKNFQDFGTENFSGMPLGPTGAFNPYWGGGVPLPMDYMNAPFPGPMPYMGYPPGPFDPFGGGVLPQDPFMPPGYMMPGVPRDLSELAVNAMGINMGPPVMSREEFDPRKPEHRRRREMDRFNDRERERDRSRERERERERERSLERERERERERGRSLERERERVRELERSREGDRERQRGRDRDRDSRREARASPGAINDSSSMRRNDRSRSQPDRSERGPPQPSSPDRQSRRSSSGKKRSSSDRYDDMPLPPPPPLPATRHEAEPAKAPGSSSKSKASVFSRISFPGDGANPSDAKRSRRASDKPPARSSSSSKKSAAAEGGDGRGHRHHREPAAAEEEKPRPAASGGDYYGGTDGEESEDEEQHFKRRPSSSSRREREQDAPEEQPRHSRRSRDHRRR

SEQ ID NO: 162077 - protein, 874 aa, Zea Mays
MAVYYKFKSARDFDSIPIEGQFISVANLKERIFESKHLGRGTDFDLMISNAQTDEGWFFVRSIVWVNKRLAGINCFNLASFSLRSEPAKTVLSLVGLTVEGLVVVYAGKFLIHSLAFCLANLRVLDLMTKAAEDGVQDVMPTSGAFLGDSSMKYPEESEWDDEFGNELYISDSVPYQPVCQAVDAIENKVDEDSKIKALIDTSALDYSQIPDGYGSGRGYGRGMGGRMMAGRGFGRGLERRTPPPGYVCHRCKVPGHFIQHCPTNGDARYDVKRMKPPTGIPKSMLMQTPDGSYALPSGAGAVLKPNEAAFEKEIEGLPTTRPVGDLPPELRCPLCKEVMKDAVLTSKCCFRSFCDKYMESALPVQPKHRSPAVSAASKEEAKASTLVEESPDAESLNGTKATNIDASSSDKKALTVPDIAEGTLDSKKAKEDKPVEATPVAKDSQEKFPAGEQAVKKKKKKKPRVPGNAEEQWKNFQDFGTENFSGMPLGPTGAFNPYWGGGVPLPMDYMNAPFPGPMPYMGYPPGPFDPFGGGVLPQDPFMPPGYMMPGVPRDLSELAVNAMGINMGPPVMSREEFDPRKPEHRRRREMDRFNDRERERDRSRERERERERERSLERERERERERGRSLERERERVRELERSREGDRERQRGRDRDRDSRREARASPGAINDSSSMRRNDRSRSQPDRSERGPPQPSSPDRQSRRSSSGKKRSSSDRYDDMPLPPPPPLPATRHEAEPAKAPGSSSKSKASVFSRISFPGDGANPSDAKRSRRASDKPPARSSSSSKKSAAAEGGDGRGHRHHREPAAAEEEKPRPAASGGDYYGGTDGEESEDEEQHFKRRPSSSSRREREQDAPEEQPRHSRRSRDHRRR

SEQ ID NO: 162078 - protein, 932 aa, Zea Mays
MAVYYKFKSARDFDSIPIEGQFISVANLKERIFESKHLGRGTDFDLMISNAQTDEGWFFVRSIVWVNKRLAGINCFNLASFSLRSEPAKTVLSLVGLTVEGLVVVYAGKFLIHSLAFCLANLRVLDLMTKAAEDGVQDVMPTSGAFLGDSSMKYPEESEWDDEFGNELYISDSVPYQPVCQAVDAIENKVDEDSKIKALIDTSALDYSQIPDGYGSGRGYGRGMGGRMMAGRGFGRGLERRTPPPGYVCHRCKVPGHFIQHCPTNGDARYDVKRMKPPTGIPKSMLMQTPDGSYALPSGAGAVLKPNEAAFEKEIEGLPTTRPVGDLPPELRCPLCKEVMKDAVLTSKCCFRSFCDKCIRDYIINKSMCVCGATSILADDLLPNKTLRETISRILEAPPTSSTENVGSMVQVQDMESALPVQPKHRSPAVSAASKEEAKASTLVEESPDAESLNGTKATNIDASSSDKKALTVPDIAEGTLDSKKAKEDKPVEATPVAKDSQEKFPAGEQASAVKKKKKKKPRVPGNAEEQWKNFQDFGTENFSGMPLGPTGAFNPYWGGGVPLPMDYMNAPFPGPMPYMGYPPGPFDPFGGGVLPQDPFMPPGYMMPGVPRDLSELAVNAMGINMGPPVMSREEFDPRKPEHRRRREMDRFNDRERERDRSRERERERERERSLERERERERERGRSLERERERVRELERSREGDRERQRGRDRDRDSRREARASPGAINDSSSMRRNDRSRSQPDRSERGPPQPSSPDRQSRRSSSGKKRSSSDRYDDMPLPPPPPLPATRHEAEPAKAPGSSSKSKASVFSRISFPGDGANPSDAKRSRRASDKPPARSSSSSKKSAAAEGGDGRGHRHHREPAAAEEEKPRPAASGGDYYGGTDGEESEDEEQHFKRRPSSSSRREREQDAPEEQPRHSRRSRDHRRR

SEQ ID NO: 162079 - protein, 971 aa, Zea Mays
MAVYYKFKSARDFDSIPIEGQFISVANLKERIFESKHLGRGTDFDLMISNAQTDEEYADEATMIPKNTSVLIRRIPGRPRKPIVTEPEETKAAEDGVQDVMPTSGAFLGDSSMKYPEESEWDDEFGNELYISDSVPYQPVCQAVDAIENKVDEDSKIKALIDTSALDYSQIPDGYGSGRGYGRGMGGRMMAGRGFGRGLERRTPPPGYVCHRCKVPGHFIQHCPTNGDARYDVKRMKPPTGIPKSMLMQTPDGSYALPSGAGAVLKPNEAAFEKEIEGLPTTRPVGDLPPELRCPLCKEVMKDAVLTSKCCFRSFCDKCIRDYIINKSMCVCGATSILADDLLPNKTLRETISRILEAPPTSSTENVGSMVQVQDMESALPVQPKHRSPAVSAASKEEAKASTLVEESPDAESLNGTKATNIDASSSDKKALTVPDIAEGTLDSKKAKEDKPVEATPVAKDSQEKFPAGEQAVKKKKKKKPRVPGNAEEQWKNFQDFGTENFSGMPLGPTGAFNPYWGGGVPLPMDYMNAPFPGPMPYMGYPPGPFDPFGGGVLPQDPFMPPGYMMPGVPRDLSELAVNAMGINMGPPVMSREEFDPRKPEHRRRREMDRFNDRERERDRSRERERERERERSLERERERERERGRSLERERERVRELERSREGDRERQRGRDRDRDSRREARASPGAINDSSSMRRNDVCLFLSICYHAKFCTIIGSMWIIFAAVSATVDSLIQRFALGYKQQSPAVAFALVIVLSWVLQDAIATAERSLGDSIRIFKRSRSQPDRSERGPPQPSSPDRQSRRSSSGKKRSSSDRYDDMPLPPPPPLPATRHEAEPAKAPGSSSKSKASVFSRISFPGDGANPSDAKRSRRASDKPPARSSSSSKKSAAAEGGDGRGHRHHREPAAAEEEKPRPAASGGDYYGGTDGEESEDEEQHFKRRPSSSSRREREQDAPEEQPRHSRRSRDHRRR

SEQ ID NO: 162080 - protein, 150 aa, Zea Mays
MFGSTNDNDPIRFGGGPPSVGDGPNDFCFKPLDLKSSHYTAEAMKVCSCGGYTLIINLILRQVVLGTVLAALVPVVGFNAVMTSEHFASFLVEVKRMLARAQDKLMTQLTLARHSADKKRVVAQLKKNCVAARTTKQAEHQEIWPGATFV

SEQ ID NO: 162081 - protein, 135 aa, Zea Mays
MGAGARLRTMARARVMLSVMAGASCARERIGGAGEDARARTRLRPTQERAVDSARGLSSGRCAGVVQRAVHSGCATTIAKSGWGTRALAVPYFYLILRRLPVYMLQNQEAHAAEGPTEITNGYSDLQLSYAAFTR

SEQ ID NO: 162082 - protein, 378 aa, Zea Mays
MQMMMLSDLSSDDHEATGSSSYGGDMASYALSPLFLAPAASATAPLPPPPQPPAEELTNKQAAGGGKRKRSQPGNPDPGAEVIALSPRTLVATNRFVCEICNKGFQRDQNLQLHRRGHNLPWKLRQRSSLVVPSSSAAAGSGGRQQQQQGEAAPTPPRKRVYVCPEPTCVHHDPARKDSLLTHRAFCDALAEESARLLAAAANNGSTITTTSSSNNNDLLNASNNITPLFLPFASSPPPVVVAAAQNPNNTLFFLHQELSPFLQPRVTMQQQPSPYLDLHMHVDASIVTTTGGLADGTPVSFGLALDGSVATVGHRRLTRDFLGVDGGGRQVEELQLPLCATAAAAGASRTASCATDLTRQCLGGRLPPVNETWSHNF

SEQ ID NO: 162083 - protein, 211 aa, Zea Mays
MEERLRVAEQKQVQMMGFLARAMRNPEFFQQLAQQQDKRKELEDTISKKRRRPIDNTPFYSDGESEQLDSQLKMFESGVLNGLNEPELENLAVNIQELGKGSIDDGNLTQVSDQSELNDDFWAELLVEDFGDKAGQPELEGRTEDVNDLAQQLGNDDGSGRQVDWWWRGVHTEGVLWRGHCLDVEGLALYSAVGVTCGVLAKCLFRRLLAK

SEQ ID NO: 162084 - protein, 218 aa, Zea Mays
MSELARCSAARLLLLLPVVFLVLALLGGARHAGGASVCDTANCGKGNCSETPAPALLPPGYECNCDPGWSHVLELIPFSPCIVPNCSFDSACLKLNLSQTPAPPTDVCAVVSCGAGGACKAGAAPFSYSCECRPGYANLLNLTALPCVNCFLGSECYDLGLGPPPPAPAPLPAPAPSGDHGPAGPSPPPSGTKGSVSTPSPVQLLLLLLVSVATVQVV

SEQ ID NO: 162085 - protein, 182 aa, Zea Mays
MEHTTTQHTAAAGEQESPPTALALRSLADYTVGAIPTLFYVPDFISHSEQSQLLHHIYQAPAPKWKTLKNRRLQNWGGVVHEKGLLPQASCTAAVPSWLTRITDRICQWTGLFPSAINHVLINEYHPNQGIMVCNRQTSIVCSSVYILSITLTNNDFVPSSHTKMVLPTTLSLLSYLLLHLS

SEQ ID NO: 162086 - protein, 833 aa, Zea Mays
MQIEAALLMTEGLHSQLQEKMQMLTQDFDGSTKKLSELENNKLDLESTLKELNNTILGLNSEKDAALLQQQQSLQKVSNLELELSMMQLEMDKSEQKILLLEQEIARKNGSVDSLEISLKDECEKRLQAQKMYSQSQEDVSRLYIEIEKQNGKLNELENLISELNNTILLINTEKDATLHENQQSSVRISDLESELMALKTELENVEGKVHAVEQELIYKKEEADNLQISLQDEIQKRVEGEESLLMMTNLHSGSQNEVRGLALELEKLNGNLRQVENSKVDLENIVTKHTEEIHILRERNLSTDLMIKDLHLELDALKDLNVKLQTEMGLHIGEKEALQREFTSQREEKKNLEGIHHTLVDEMSTLKTTATMNQKLIEELQITNSKLKELLMKEISSRDANIEELQKRLAGIQDEHAELKAELNTHLALIASLVDHVSVLEEDVRSLSKPCSTEGKEETARVHHVQEGDDGLESHCLVNGTPKLQGLIARIEALQVVVLNAKDRQDRKSAESAAKLAAASAEIQELKTRGGSRMEAKEICSDNEKQDVEVSKGKQVQIMKDIELDQISTCPPYGAGAALYPHGTGANAELDDDMLQLWEAAERSCKNQTAKSSSSEHDIQAVEDLESECPSSELARGRDLGTNKLEVPKGAVEPHEAWSKNVLERLTSDAQRLLSIQASIEELKKKMEGSSKGTNSEYGSVSAQVHETEGLVLEQINSNNKLSRKAENYPALSDNTSTERGGYSSRRKISEQVQRGSENVARLELELQKIQYVLLKLEEEHEYTRLKVSDKRTRVLLRDYLYGRKDRGGGQKGKKKRVPFCGCVRSKSRTEP

SEQ ID NO: 162087 - protein, 593 aa, Zea Mays
MATLVRHDSRQYSWWISHISPKNSKWLQENVSDMDSKVKAMIKLINEDADSFAKRAEMYYKKRPELMNLVEEFYRAYRALAERYDQSTGALRQAHRTISEAFPNQMPSMSDESPSAFSQEMEPHTPDTSTLTRVAFDYDDLQKDGVGVSPQSFTSKRNGTHPEETSALSSSVENAPRAGFDGKVWKGLTFEGPNVKGKDDISNEMANLQQEVARLLAESQDLKQQMFSESERANKAENEMQMLKATVLQLNAEKDTSLMQYNNSSERISTLESELSKAQSDLEKLTDEMAADVQKLINAETLNIAIQSEAEGLDQKMKMQQQALEQKLKELESFRSSFQEEHEKRMQAESALLSQRKELAQSHEEVQRLAIEIKTANEKLNEFKQTKEVLEYTVCELKKDVERLTEQNQSSEVLVQKLGDQINTLKDSNNELQSEIQSLKSIISQLNTEKNAAVLQHQQFVELVSVLESQLSKLQSELDETEQKVQMLTHDLEKKKEEADNVHLKLQDECHRRMQIEATLLMTEGLHSQLQEEMQMLTQDFDGSTKKLSELEKNKLDLESILKELNNTILGLNSEKDASLLQQQQSLQKVSDL

SEQ ID NO: 162088 - protein, 81 aa, Zea Mays
MQQILFSSLLFFIHPTMVRFLPRCLTVNKKDRLQRVDKKKVILHTSAQLRCQTSPEKQPPVAGELTLLVTEKTHAHTHEHK

SEQ ID NO: 162089 - protein, 91 aa, Zea Mays
MLQVLHLLDINNRCWTVDRLAKIDLRHPAACPPFVIKRMRQLSTSSSHVVFQGRFGQSSSRGWVYLIRHINLLYLFSLVDGAMLSRDCLKF

SEQ ID NO: 162090 - protein, 54 aa, Zea Mays
MSSQREQYRSTVHLFIGTGRSPCKITLMPFTFANDSTVIHRGLNSLFPFKSVSF

SEQ ID NO: 162091 - protein, 256 aa, Zea Mays
MGNNRPMLVTNTLFRVGGAAILLSNRRADRRRAKYQLIHTVRTHRGAHDQSFGCVTQEEDDAGCVGVSLAKELMVVAGEALRTNITTLGPLVLPMSEQLRFLATVVLNRVFRARVRAYLPDFKLAFDHFCIHAGGRGVLDELERSLNLSAWHMEPSRMTLCRFGNTSSSSLWYELAYCEAKGRIRKGDRVWQIAFGSGFKCNSAVWKALRTVDGGEEGNPWTPEIDVLPIHVPKVSPIDETTYKFADGATYKISLG

SEQ ID NO: 162092 - protein, 208 aa, Zea Mays
MEPNLQSALEEQTEILRALSARLAAQEARWHDRESIAFGVDPRPGDSSGHCAFLGVEGGARCSGVTKKISLLEHHPNRMFDACDRFWHCVFALCDFGFMQGLQRKLERLCLAGSAPNLEVLAVLSGLRARSLPTSAPPTIPARPRKASPRRPPGSYFVLCTERLRRERVSDGHDFQHQVTELDLLRVRALLHTDPQPEGLQPLIRCPQ

SEQ ID NO: 162093 - protein, 58 aa, Zea Mays
MDLPQPRGLNLGPLRPSPSTSHALNHHVSRRRRERERGRSEGRPGHHCSHGVTSPFQP

SEQ ID NO: 162094 - protein, 539 aa, Zea Mays
MSTTQASEAAADKGLPLAVDATMIDEYASQSKLLQEFVKIPTIGKAWIFNSKDDDMSKAVVSIGKSDLLANKRRQFLLNTHISKSPSKSVDFQWSPFPTEISGVSAIVPSPSGEKLLLVRNSEDDSPTKLEIWGPCQLENEIHIAKSVHGSLYTDEWFEGISWNQEETFIAYVAEEPPQPKPVFNDYGFKKEGLSEKDCKSWKGQGDWEETWGETYSKKRIPALFVINISSGEVRPVKQIPRSLSVGQVIWAPSSSYSLVFVAWSSDNGFQGTPRKLGIKYCYNRPCALYAAPDPFGQEAEKSLTEGNKGETTTMIKLTANLSSAFFPRFSPDGKYLVFISAKSAVDSGAHNATNSLHRIEWCTDGKLDGSLGVADVVPIVLCPKDNCFPGLYCFGLLRDPWLTDGQTMIISSVWGSREVILSVNVVSCELSRVSPQDSDYSWNVLAVDKNNILAVSSSLITLPQMYYGIKVSQTESNWEWQGVSTPFPKPSDKISSVLAEHKFSILKIPISNPSDELANGAKLPFEAIFVSHKDSARI

SEQ ID NO: 162095 - protein, 587 aa, Zea Mays
MVVLVRVLVACAKFRCPAANLLLSASTSRVRAQPGGPLLRQRTSKVSLRSIAMSTTQASEAAADKGLPLAVDATMIDEYASQSKLLQEFVKIPTIGKAWIFNSKDDDMSKAVVSIGKSDLLANKRRQFLLNTHISKSPSKSVDFQWSPFPTEISGVSAIVPSPSGEKLLLVRNSEDDSPTKLEIWGPCQLENEIHIAKSVHGSLYTDEWFEGISWNQEETFIAYVAEEPPQPKPVFNDYGFKKEGLSEKDCKSWKGQGDWEETWGETYSKKRIPALFVINISSGEVRPVKQIPRSLSVGQVIWAPSSSYSLVFVAWSSDNGFQGTPRKLGIKYCYNRPCALYAAPDPFGQEAEKSLTEGNKGETTTMIKLTANLSSAFFPRFSPDGKYLVFISAKSAVDSGAHNATNSLHRIEWCTDGKLDGSLGVADVVPIVLCPKDNCFPGLYCFGLLRDPWLTDGQTMIISSVWGSREVILSVNVVSCELSRVSPQDSDYSWNVLAVDKNNILAVSSSLITLPQMYYGIKVSQTESNWEWQGVSTPFPKPSDKISSVLAEHKFSILKIPISNPSDELANGSRHICCSSCSKPSM

SEQ ID NO: 162096 - protein, 437 aa, Zea Mays
MIKLTANLSSAFFPRFSPDGKYLVFISAKSAVDSGAHNATNSLHRIEWCTDGKLDGSLGVADVVPIVLCPKDNCFPGLYCFGLLRDPWLTDGQTMIISSVWGSREVILSVNVVSCELSRVSPQDSDYSWNVLAVDKNNILAVSSSLITLPQMYYGIKVSQTESNWEWQGVSTPFPKPSDKISSVLAEHKFSILKIPISNPSDELANGAKLPFEAIFVSHKDSASNPTIVVLHGGPHSVYPSSYSKSLAFLFSQGYNLLVVNYRGSLGFGEEALQSLPGNIGSQDVNDVLTALDLVIKRGLIDPSRVAVVGGSHGGFLTTHLIGQAPDTFVAAAARNPVCNLSLMVGTSDIPDWCFVEIYGKEGKKYFSESPSVDDLCQFHQKSPISHIAKYARALKERGIETKTIVFPEDIHGIDKPQSDFESFLNIGVWFKKHMGK

SEQ ID NO: 162097 - protein, 826 aa, Zea Mays
MVVLVRVLVACAKFRCPAANLLLSASTSRVRAQPGGPLLRQRTSKVSLRSIAMSTTQASEAAADKGLPLAVDATMIDEYASQSKLLQEFVKIPTIGKAWIFNSKDDDMSKAVVSIGKSDLLANKRRQFLLNTHISKSPSKSVDFQWSPFPTEISGVSAIVPSPSGEKLLLVRNSEDDSPTKLEIWGPCQLENEIHIAKSVHGSLYTDEWFEGISWNQEETFIAYVAEEPPQPKPVFNDYGFKKEGLSEKDCKSWKGQGDWEETWGETYSKKRIPALFVINISSGEVRPVKQIPRSLSVGQVIWAPSSSYSLVFVAWSSDNGFQGTPRKLGIKYCYNRPCALYAAPDPFGQEAEKSLTEGNKGETTTMIKLTANLSSAFFPRFSPDGKYLVFISAKSAVDSGAHNATNSLHRIEWCTDGKLDGSLGVADVVPIVLCPKDNCFPGLYCFGLLRDPWLTDGQTMIISSVWGSREVILSVNVVSCELSRVSPQDSDYSWNVLAVDKNNILAVSSSLITLPQMYYGIKVSQTESNWEWQGVSTPFPKPSDKISSVLAEHKFSILKIPISNPSDELANGAKLPFEAIFVSHKDSASNPTIVVLHGGPHSVYPSSYSKSLAFLFSQGYNLLVVNYRGSLGFGEEALQSLPGNIGSQDVNDVLTALDLVIKRGLIDPSRVAVVGGSHGGFLTTHLIGQAPDTFVAAAARNPVCNLSLMVGTSDIPDWCFVEIYGKEGKKYFSESPSVDDLCQFHQKSPISHIAKVKTPTLFLLGAQDLRVPVSNGLQYARALKERGIETKTIVFPEDIHGIDKPQSDFESFLNIGVWFKKHMGK

SEQ ID NO: 162098 - protein, 734 aa, Zea Mays
MVVLVRVLVACAKFRCPAANLLLSASTSRVRAQPGGPLLRQRTSKVSLRSIAMSTTQASEAAADKGLPLAVDATMIDEYASQSKLLQEFVKIPTIGKAWIFNSKDDDMSKAVVSIGKSDLLANKRRQFLLNTHISKSPSKSVDFQWSPFPTEISGVSAIVPSPSGEKLLLVRNSEDDSPTKLEIWGPCQLENEIHIAKSVHGSLYTDEWFEGISWNQEETFIAYVAEEPPQPKPVFNDYGFKKEGLSEKDCKSWKGQGDWEETWGETYSKKRIPALFVINISSGEVRPVKQIPRSLSVGQVIWAPSSSYSLVFVAWSSDNGFQGTPRKLGIKYCYNRPCALYAAPDPFGQEAEKSLTEGNKGETTTMIKLTANLSSAFFPRFSPDGKYLVFISAKSAVDSGAHNATNSLHRIEWCTDGKLDGSLGVADVVPIVLCPKDNCFPGLYCFGLLRDPWLTDGQTMIISSVWGSREVILSVNVVSCELSRVSPQDSDYSWNVLAVDKNNILAVSSSLITLPQMYYGIKVSQTESNWEWQGVSTPFPKPSDKISSVLAEHKFSILKIPISNPSDELANGAKLPFEAIFVSHKDSASNPTIVVLHGGPHSVYPSSYSKSLAFLFSQGYNLLVVNYRGSLGFGEEALQSLPGNIGSQDVNDVLTALDLVIKRGLIDPSRVAVVGGSHGGFLTTHLIGQAPDTFVAAAARNPVCNLSLMVKTPTLFLLGAQDLRVPVSNGLQA

SEQ ID NO: 162099 - protein, 534 aa, Zea Mays
MSTTQASEAAADKGLPLAVDATMIDEYASQSKLLQEFVKIPTIGKAWIFNSKDDDMSKAVVSIGKSDLLANKRRQFLLNTHISKSPSKSVDFQWSPFPTEISGVSAIVPSPSGEKLLLVRNSEDDSPTKLEIWGPCQLENEIHIAKSVHGSLYTDEWFEGISWNQEETFIAYVAEEPPQPKPVFNDYGFKKEGLSEKDCKSWKGQGDWEETWGETYSKKRIPALFVINISSGEVRPVKQIPRSLSVGQVIWAPSSSYSLVFVAWSSDNGFQGTPRKLGIKYCYNRPCALYAAPDPFGQEAEKSLTEGNKGETTTMIKLTANLSSAFFPRFSPDGKYLVFISAKSAVDSGAHNATNSLHRIEWCTDGKLDGSLGVADVVPIVLCPKDNCFPGLYCFGLLRDPWLTDGQTMIISSVWGSREVILSVNVVSCELSRVSPQDSDYSWNVLAVDKNNILAVSSSLITLPQMYYGIKVSQTESNWEWQGVSTPFPKPSDKISSVLAEHKFSILKIPISNPSDELANGYVTFLEASTLPTL

SEQ ID NO: 162100 - protein, 480 aa, Zea Mays
MVVLVRVLVACAKFRCPAANLLLSASTSRVRAQPGGPLLRQRTSKVSLRSIAMSTTQASEAAADKGLPLAVDATMIDEYASQSKLLQEFVKIPTIGKAWIFNSKDDDMSKAVVSIGKSDLLANKRRQFLLNTHISKSPSKSVDFQWSPFPTEISGVSAIVPSPSGEKLLLVRNSEDDSPTKLEIWGPCQLENEIHIAKSVHGSLYTDEWFEGISWNQEETFIAYVAEEPPQPKPVFNDYGFKKEGLSEKDCKSWKGQGDWEETWGETYSKKRIPALFVINISSGEVRPVKQIPRSLSVGQVIWAPSSSYSLVFVAWSSDNGFQGTPRKLGIKYCYNRPCALYAAPDPFGQEAEKSLTEGNKGETTTMIKLTANLSSAFFPRFSPDGKYLVFISAKSAVDSGAHNATNSLHRIEWCTDGKLDGSLGVADVVPIVLCPKDNCFPGLYCFGLLRDPWLTDGQTMIISSVWGSREVILSVNVVR

SEQ ID NO: 162101 - protein, 159 aa, Zea Mays
MRRFFQPLSRGSDTSANNNVNNTPTVGGTFNPDEIVADPTLRRQIYEYDKDVQDQVRRAYVLNGPCQPKGLDFPRRQYGQSSRPFKEEWYDKYDWLEYSESKDVVYCFYCFLFEQAVKGDKYEAFTKIGYNNWKDAVERLKSHVGGVNNIHNNARLHLF

SEQ ID NO: 162102 - protein, 103 aa, Zea Mays
MQELFINSSADGSLAMEATTCMNETHPGDDSDFNDDVCSDFSNYPQPVHDLGDDSDTLQSPNHHPSQSVDHSSSSSGLKRPQGEGVPAKRNVEPKSRTTKECI

SEQ ID NO: 162103 - protein, 267 aa, Zea Mays
MIFEKIKKTLEGEPPDHNVGMESRMVREGNQQGIKDGLMLSKQLKNKGGLKIAAGTDKNRGSLGQQSEVTEVSFDKGVDEDGLESLTDWDSDFSMGDVEQRWNIAASKKLKKKKSKRKYPVMRASSRIPRDGISILEKATKRAQEKDAPQGTTITNPFTVLNQEKNENLALVMKNLGIVLDQYDQIDAFKAEEKLRVAIAEGADVPYCGFLQKSVWAECNCHMKLSDNFWDNRPSLIMRIWISCLNLLKKRRLSKLLTVCLMILHLV

SEQ ID NO: 162104 - protein, 331 aa, Zea Mays
MAAPGAHTPFLISSRDLSSSATPLVAFPSRRDMNFCRHLLLAAVFALLLAVCASAASRGAGSFDPSRVVQLSWRPRAFLHKGFLSDAECDHLIALAKDKLEKSMVADNESGKSVQSEVRTSSGMFLERKQDEVVTRIEERISAWTFLPPENGESIQILHYQNGEKYEPHYDYFHDKKNQALGGHRIATVLMYLSNVEKGGETIFPNAEGKLLQPKDNTWSDCARNGYAVKPVKGDALLFFSLHPDATTDSDSLHGSCPVIEGQKWSATKWIHVRSFDLPVKQPGSSDGCEDDNILCPQWAAVGECAKNPNYMVGTKEAPGFCRKSCKVCAE

SEQ ID NO: 162105 - protein, 428 aa, Zea Mays
MATTCTSTTTAGSTARASSHSSIGEGKDVNLEEHCPRFKLHKQCIKYLGPKERETYEVVVEDKRLMYKLSRQIVDTTRSVKGTKWIFVLSTCKTLYIGQKQKGVFQHSSFLAGGATSAAGRLVVEDGILKAVWPHSGHYRPTEQNFQEFMNFLKERNVDLNNVVLSPSEGEEDGDFSLASSYSQLDLTQLCQQEDSQEQEAQSARRHGQVEAEAEARTCSLEPSLPSTETCSTPATIRKSSSDNRLQGKRPPRLLISSNNIAPLPPTTHSNAGPSPGGKDDLDPDSAMMGECLDFCKRNLFAEDGYEDRYLDDLAELPEALILNRINSKRAMHSYQLGKQLSFHWSTGAGPRIGCVRDYPSELQFRALEDVSLSPRGGGRSVRFPSPRPGALTPNSIPAAKCGSLTADGDGVHASLKPRQRSATWTAF

SEQ ID NO: 162106 - protein, 224 aa, Zea Mays
MGDYVDRGYYSVETVTLLVALKVRYPQRITILRGNHESRQVYGFYDECLRKYGSANVWKIFTDLFDYFPLTALVESEIFCLHGGLSPSIENLDNVRSLDRVQEVPHEGPMCDLLWSDPDDRCGWGISPRGAGYTFGQDISEQFNHTNNLKLVARAHQLVMEGYNWAHEQKVVTIFSAPNYCYRCGNMASILEVDDCRNHTFIQFEPAPRRGEPDVTRRTPDYFL

SEQ ID NO: 162107 - protein, 291 aa, Zea Mays
MEDLASSRGGGGCGGLDAQIEQLMECRPLPETEVKTLCEKAKEILMEESNVQPVKSPVTICGDIHGQFHDLLELFRIGGKCPDTNYLFMGDYVDRGYYSVETVTITQVYGFYDECLRKYGSANVWKIFTDLFDYFPLTALVESEIFCLHGGLSPSIENLDNVRSLDRVQEVPHEGPMCDLLWSDPDDRCGWGISPRGAGYTFGQDISEQFNHTNNLKLVARAHQLVMEGYNWAHEQKVVTIFSAPNYCYRCGNMASILEVDDCRNHTFIQFEPAPRRGEPDVTRRTPDYFL

SEQ ID NO: 162108 - protein, 178 aa, Zea Mays
MKVGRYGSANVWKIFTDLFDYFPLTALVESEIFCLHGGLSPSIENLDNVRSLDRVQEVPHEGPMCDLLWSDPDDRCGWGISPRGAGYTFGQDISEQFNHTNNLKLVARAHQLVMEGYNWAHEQKVVTIFSAPNYCYRCGNMASILEVDDCRNHTFIQFEPAPRRGEPDVTRRTPDYFL

SEQ ID NO: 162109 - protein, 180 aa, Zea Mays
MEDLASSRGGGGCGGLDAQIEQLMECRPLPETEVKTLCEKAKEILMEESNVQPVKSPVTICGDIHGQFHDLLELFRIGGKCPDTNYLFMGDYVDRGYYSVETVTLLVALKVRYPQRITILRGNHESRQITQVYGFYDECLRKYGSANVWKIFTDLFDYFPLTALVRSLSFRQPFLFFLNP

SEQ ID NO: 162110 - protein, 56 aa, Zea Mays
MEDLASSRGGGGCGGLDAQIEQLMECRPLPETEVKTLCEKAKEILMEESNVQVAPL

SEQ ID NO: 162111 - protein, 427 aa, Zea Mays
MAAWAVPALAAAAWALRAAVWACLAASAMLVAEAAYMGLASLASAAAMLWRRPDARYRWEPMPGGCDVEAATGADFPMVLVQIPMYNEREELVELECQDWATKKINIKYEVRNNRKGYKAVNYDVCLMTRIQKMSLDYHFKVEQESGSFVYSFFGFNGTAGVWRVSAINQSGGWKDRTTVEDMDLAVRASLKGWEFLYVGDIRVKSELPSTFKAYRHQQHRWTCGAANLFRKMAWEIITNKEVSIWKKHHLLYSFFFVRRVIAPLVTFLFYCVVIPLSAMVPGVSIPVWGLVYIPTAITCMNAIRNPWSLHLMPFWILFENVMSMHRMRAAVTGLLETARANDWVVTEKVGDLVKDDLDVPLLEPVKPTECVERIYFPELLLALHLLICASYDFVLGSHKYYLYIYLQAFAYVVMGFGFVGTKTPCS

SEQ ID NO: 162112 - protein, 300 aa, Zea Mays
MTRIQKMSLDYHFKVEQESGSFVYSFFGFNGTAGVWRVSAINQSGGWKDRTTVEDMDLAVRASLKGWEFLYVGDIRVKSELPSTFKAYRHQQHRWTCGAANLFRKMAWEIITNKEVSIWKKHHLLYSFFFVRRVIAPLVTFLFYCVVIPLSAMVPGVSIPVWGLVYIPTAITCMNAIRNPWSLHLMPFWILFENVMSMHRMRAAVTGLLETARANDWVVTEKVGDLVKDDLDVPLLEPVKPTECVERIYFPELLLALHLLICASYDFVLGSHKYYLYIYLQAFAYVVMGFGFVGTKTPCS

SEQ ID NO: 162113 - protein, 312 aa, Zea Mays
MGNCMDKAVPVDNTSYQSKAGSKSISSSNPSTVKTGSTRSTWTVASYKDSRELPTPRTEGEILSSPNLKAFSFGDLRTASRNFRSDSLLGEGGFGYVFKGWIDEQTLAPSKPGSGMVVAIKKLKPEGFQGHKEWLTEVDYLGQLHHQNLVKLIGYCTDGDHRLLVYEYMPKGSLENHLFRRGADPLSWGTRLKVAIGAAKGLSFLHDAENQVIYRDFKASNILLDSEFNAKLSDFGLAKAGPTGDRTHVSTQVMGTRGYAAPEYVATGSVWFRSQLGWSGSEPRSVSIRKILGSQMVKHLSIIFFLEPLYLT

SEQ ID NO: 162114 - protein, 342 aa, Zea Mays
MGNCMDKAVPVDNTSYQSKAGSKSISSSNPSTVKTGSTRSTWTVASYKDSRELPTPRTEGEILSSPNLKAFSFGDLRTASRNFRSDSLLGEGGFGYVFKGWIDEQTLAPSKPGSGMVVAIKKLKPEGFQGHKEWLTEVDYLGQLHHQNLVKLIGYCTDGDHRLLVYEYMPKGSLENHLFRRGADPLSWGTRLKVAIGAAKGLSFLHDAENQVIYRDFKASNILLDSEFNAKLSDFGLAKAGPTGDRTHVSTQVMGTRGYAAPEYVATAELISYCKGYHRSALSEGRCLQLRRGATGAADGTAGARQVETINRAEPGGVGETLLERQAPSVPHHGLQVGRAVP

SEQ ID NO: 162115 - protein, 85 aa, Zea Mays
MRVCSRLVTRAIGSDLVILYVCRNHVINGQKGLNGKKKFRQCFGSCSVLRLSQISCSLHESRLEFGIAGLEWLSEKFGLYWSVFS

SEQ ID NO: 162116 - protein, 638 aa, Zea Mays
MVLPNPEFQIMSLSKLEILVSCLGSKSATGWEEDHAEKVAALKVKAFLRGDSPPYSAGDLEGMTFIANMHVKVARRLHSNSLRYWLLEYLRRQPKGRKYRALILKFVKDRMGALLLVEVGMQVTTTISRGKVGDQVSVTVEIAHPRDDILSVGEQRVERMEPYDTQLGLMASGAFSGNFAIQIKEEGSSVRSTAGNHMYTDIAQALEANGIEANPKDYLTFFCLGNREVKQEGEYEPEEHPEPDIDYIRAQEARRCANRETLGKHAMHFLAGYISMFSRQGPFSDRYNTEARGLAAGPILVQRLSGFGDHRSADNVARVAEEELAHASVGLYWFLKECQVMGREPSNTFQDLIKEYDIVLKGPFNYTAMASPDLLFNLRNLFYLGAYQAAINNIDLEKKTRRASKRRPMEISTKVRPPKLREVIQVPKKVGRDPRFEPVYGSVDKEGLYGLSRVAHVAPSAATRHDVDYLSLLKQIVEFKALLFIPPKAPHDLYERYYNSNKSNLKLYVRSVFISDEFDDLLPNYLSFLKGIVDSDTLYLSNKDKTNEEKSEMEEKKGQYVKFWNKFCKSIKLRQKDIFYITGSSKEQLGKSPFLERLTKKNYEDEPMMLLLCDRDLIYRTTVVSKADMTKFNYRGIF

SEQ ID NO: 162117 - protein, 196 aa, Zea Mays
MPTKPSDCIPFSNSTMGRELCIASVRTGEITKLILATTHLESPCPAPPKWDQMYSKERVAQAKQSLEILGGFPNAILCGDMNWDDKGDGPFPLQDGWTDAWVELKPGEDGWTYDTKANGMLSGNRKLQKRLDRFVCKLADFKMDSIEMIGKEAIPGVSYFKEKKIRKENQRIELPVFPSDHFGLVLTITQQKDDNV

SEQ ID NO: 162118 - protein, 354 aa, Zea Mays
MPSPSRSPTTPPVASEWSCVRCTLLNPDHSDSCVACEASRPVEVDIDSPVVVGAALALASPKRSRRKNERSASPPPQRFGRKREHDASPEVVELCDIAGKGPATKKGNLEICLDKKTFKIMTYNVWFREDLELRSRMDALGDLIKQHCPDFICFQLSKMPTKPSDCIPFSNSTMGRELCIASVRTGEITKLILATTHLESPCPAPPKWDQMYSKERVAQAKQSLEILGGFPNAILCGDMNWDDKGDGPFPLQDGWTDAWVELKPGEDGWTYDTKANGMLSGNRKLQKRLDRFVCKLADFKMDSIEMIGKEAIPGVSYFKEKKIRKENQRIELPVFPSDHFGLVLTITQQKDDNV

SEQ ID NO: 162119 - protein, 192 aa, Zea Mays
MPSPSRSPTTPPVASEWSCVRCTLLNPDHSDSCVACEASRPVEVDIDSPVVVGAALALASPKRSRRKNERSASPPPQRFGRKREHDASPEVVELCDIAGKGPATKKGNLEICLDKKTFKIMTYNVWFREDLELRSRMDALGDLIKQHCPDFICFQEVTPYIYMLMQKSDWWQQYTCLLSHENAIQMPYYCMQ

SEQ ID NO: 162120 - protein, 484 aa, Zea Mays
MSLNLYRFYRDAVVQQCTLPTYSSRIAVSAVDNIIMVHQIDAKVVMLYDVSLDSYAPVSAPLPLLLRGLPINSRQVSQTADSQSSAYGGTIYGEGWNFLIPDLICDAENGLLWKLHLDLAAIAASSSDAPSILEFLQRRKSDPSMVKTLCLAIVRTIILERRSVPTVAKAMDVVLDSYTRLMKMGGAFPGVRRIHEQNQQSGSQPIDGSHVVSQESSPGTTVSPAVNPDHGSEAVDIYVQSNPGVEHTIDRGLLNINISSDSVDNTSDAVDKRQQAVGEASRPLSSGTMTQHGQHAGTVAISPIEMFQSVFTLVEDEMMGDPAYLIAVIIEFLRSVSKAGLKAPHNLYVMTATLLARSNRYAEIALFVSNKILEPCKELAMQLMELGLQHPPTRKLGMDMLRERGLHHDYVTAMLQDGYYLEALRYARKYKVITVQPALFLEKALAKNSAHNLAAVLSFFCEFTPSFKATSDFVRYRHILSEMV

SEQ ID NO: 162121 - protein, 117 aa, Zea Mays
MSTRPRVSQDQNRFTRPESTVLHRPAIGLVGTRYSHHGARHVSESTAPHLPAVGLVGTRYSRHGARHVSESTAPHLPVSCHGGYKLLSPSLHSQCVRAVLVLVRPRLSLPMMRHVAS

SEQ ID NO: 162122 - protein, 97 aa, Zea Mays
MIVPTVKFVLYSSLACRKVCGGDYLFGAKRQAYHTGKTPKLPLTYLPINLFSSSLLLVISVFDYEPEIRSTNRKRGDEALASWSRRCSRLPRKMNGR

SEQ ID NO: 162123 - protein, 223 aa, Zea Mays
MSCPHISGVAALMKAAHPDWSPSAIKSALMTTAYTVDNTNSSLRDAADGSVANAFAYGAGHVDPQRALSPGLVYDISTHDYAAFLCSLNYSAPHVQVITKASNVSCGAPNKSRPGDLNYPSFSVVFGQKRKTKPAAALRFRRELTNVGPAASVYDVKVVGPESVAVTVTPARLTFRQAGQKLRYYVTFASRARQGHAKPDFGWISWVNDEHVVRSPVAYTWKM

SEQ ID NO: 162124 - protein, 119 aa, Zea Mays
MDSWRLWICDGAVQFSVGTGPDEEAWRGHHNHEAITVMVNDQENEEDVTIWDVVGAGRNDAEILNTRNSFFDIEDDGIASTSPSWCRWGVGASSPPGCARTEAQRAPPPAGILLVKVRL

SEQ ID NO: 162125 - protein, 74 aa, Zea Mays
MSSMICSSVVCCNVVTVPLQIIYKSFFSNLLSVTRERKIPNLHESSAYSFVLHLILQLARFLMPTALNKARVNV

SEQ ID NO: 162126 - protein, 198 aa, Zea Mays
MPPSCASSTPRSTGSTPSSWSGRRTSSYGTGHVHVLTSLLSYELKETAEDARKAIVDLHGEMVLLLNYSAINYTGLAKILKKYDKRTGRLLRLPFIGKVLRQPFFATELISRLVRDCEATMEAVFEASTGHARSSAGTAPVASARQGIFRNTVAALVTMGELRSGSSTYGHFSLPPMAPPESDLLRRVCVQVAGQVSI

SEQ ID NO: 162127 - protein, 52 aa, Zea Mays
MSDLRHRRPPTVVVPSFGETGGSWVRGWRIWLSMFMCLFHIGSLIRERCRVL

SEQ ID NO: 162128 - protein, 120 aa, Zea Mays
MYGTGGAGASVSLSLALAWAGACYYSREARVAFVCLCVASGRAREHVKCEAMLVEGRRERGRTLARATATGVQQRTHCSISVVPSFAPWVILHAFTSLTSLSSNFVPVNLMCCVIFRAKS

SEQ ID NO: 162129 - protein, 998 aa, Zea Mays
MPCAPISKLGCSLLLVPNISVLWNFDALACRLGPSPGHGHSSEIYGPGDGVGGCHLSCCSYGGHRGKYHACHNHSSEWARHNISPEPGPIRSYWITKRTSSDHVSHCAKGSDRQIRPAGGYRKNYSANQGSGSQNRPYHDDRYLPTKFLDDRFPEIDAAKHQSYLCDFQSSSKHIPVHPSHGQSCQRDEVAKAHPKRPVNRFRPIHHKQLERCPNEDFHDCFDSSQKFRNAYNDKVVKRKFIKQDFLGNTYNGACVGKYDRNSCRKRNADHFGGEKTRKNDANKDRSKRLRCPLEQDQRQQVECNEMRNDSREGNVEMTRLVCQDGAKRNFNQKKNATAPASSDSTKCDGKNILSPKCSKTIASSHTPNLSEGSNDMDPKSDNYVDGCTERGILQHIPVTHTERNIQLKISDNFTQSEAFRRDCLILWRERQLRKDSAAKADNIVKTDQQQTAQRSKMSTGRRVGSGGSAASSCSKSDNKDDSAPECSDQFSGATSSDKLQKFGEGRANKKLEQTIKFPSNSKCNKRPQDATAEKVLKCSLKLLSEADPLEIAQPKGKEKLVDRRQVSTEHQDAKTHSSLNGCSDTCKVDQAAISHCHNSAHQNIFQQEKNSAVSDARREEKPGVKCEKKAAGHGAKLAEQSTGLYSDPISLDKETVVSCSKHGTSKVNALKVPDHEIESTSLDGSMLPRGTVVDMCLRKSINRSSESYCIDFKDCLDGNDCRDSQQETTHDNVLRKKQECSLLPETKDELNGKARKEDCEPQARRVEIESNQRITTEDCASDTILSGSAKQDDRIRCSSIPDLNCLPSMSSDEDFMAPPEEPVCQVSVDSFKPQSISKSLSASLTGHTPKRELFKQVEGKQCDRAEETNQIAREVCKDGTSEAATQLQISESNTGPPQLRTAEESSTPMNALKSALYEFVKGCVRPLWEDGLLSREVHKFVVKKAVDKVLDVWAHSTEINVPRILSDEAEGIRTLVKDYLKIYVGSEALRKSIPTSS

SEQ ID NO: 162130 - protein, 1003 aa, Zea Mays
MLVAWWLWKQRNKCVFEGDAPSGNQIIQNIKDDVQRLGPSPGHGHSSEIYGPGDGVGGCHLSCCSYGGHRGKYHACHNHSSEWARHNISPEPGPIRSYWITKRTSSDHVSHCAKGSDRQIRPAGGYRKNYSANQGSGSQNRPYHDDRYLPTKFLDDRFPEIDAAKHQSYLCDFQSSSKHIPVHPSHGQSCQRDEVAKAHPKRPVNRFRPIHHKQLERCPNEDFHDCFDSSQKFRNAYNDKVVKRKFIKQDFLGNTYNGACVGKYDRNSCRKRNADHFGGEKTRKNDANKDRSKRLRCPLEQDQRQQVECNEMRNDSREGNVEMTRLVCQDGAKRNFNQKKNATAPASSDSTKCDGKNILSPKCSKTIASSHTPNLSEGSNDMDPKSDNYVDGCTERGILQHIPVTHTERNIQLKISDNFTQSEAFRRDCLILWRERQLRKDSAAKADNIVKTDQQQTAQRSKMSTGRRVGSGGSAASSCSKSDNKDDSAPECSDQFSGATSSDKLQKFGEGRANKKLEQTIKFPSNSKCNKRPQDATAEKVLKCSLKLLSEADPLEIAQPKGKEKLVDRRQVSTEHQDAKTHSSLNGCSDTCKVDQAAISHCHNSAHQNIFQQEKNSAVSDARREEKPGVKCEKKAAGHGAKLAEQSTGLYSDPISLDKETVVSCSKHGTSKVNALKVPDHEIESTSLDGSMLPRGTVVDMCLRKSINRSSESYCIDFKDCLDGNDCRDSQQETTHDNVLRKKQECSLLPETKDELNGKARKEDCEPQARRVEIESNQRITTEDCASDTILSGSAKQDDRIRCSSIPDLNCLPSMSSDEDFMAPPEEPVCQVSVDSFKPQSISKSLSASLTGHTPKRELFKQVEGKQCDRAEETNQIAREVCKDGTSEAATQLQISESNTGPPQLRTAEESSTPMNALKSALYEFVKGCVRPLWEDGLLSREVHKFVVKKAVDKVLDVWAHSTEINVPRILSDEAEGIRTLVKDYLKIYVGSEALRKSIPTSS

SEQ ID NO: 162131 - protein, 404 aa, Zea Mays
MGSAVETLCGQAYGAHKYEMLGIYLQRSAVLLCVTGVPLAVIYAFSEPILVFLGQSPEIARAASVFVYGLIPQIFAYAINFPIQKFMQAQSIVLPSAYISTVTLVLHVVLSWVVVYKVGLGLLGASLLLSLSWWVIVAAQFAYIVMSPRCRHTWTGFTWQAFSGLWGFFKLSAASAVMLCLETWYYQVLVLIAGLLPNPELALDALSVCMTVNAWVFMIAVGFNAAASVRVSNELGAGHPKSAYFSVWVVTGVSTLISLVLAIVILCLRNYISYIFTEGEVVSNAVADLCPLLAITLVLNGIQPVLSGVAVGCGWQEFVAYVNVGCYYIVGVPLGAILGFVFKLGVKGIWSGMIGGTFMQTAILVWATLRTDWNKEVEEAQKRLNKWADSKTTEPLLVGFGDGN

SEQ ID NO: 162132 - protein, 284 aa, Zea Mays
MMSSTGGESKLESPLLGLPAPGSSAGSGHSHGEAVSGQLESILSDASLPWRRRMLSASMVEMRLLVRLAAPAVLVYMINYLMSMSTQIFSGHLGTLELAAASLGNTGIQVFAYGLMHVNYRVGVHDISWVQCSSQRKSEQRAWRRQPKVRGVLCGGSDAALLRPVGHNLHRHPAVPGLHQLHLHRGRRRVAGGRPAQPAAGGHPHPQRHPARPLWGSCGVWMASVSRIRQCRLLLHRRHPPWVPPGILLRPGSSGYLERYDRGHPDADHDPGVGYIQDQLEQGG

SEQ ID NO: 162133 - protein, 553 aa, Zea Mays
MKELLETNKAVKVSLFLITMLATAMVISDAILTPAISVLSAVGGLKEKATFLTTDEIVWITVGILVALFAIQRFGTDKVGYLFAPIILLWLLLIAAVGFYNLVKYDTGALRAFNMKYIIDYFRRNKKKGWASLGGILLCFTGTEALFADLGYFSIRSIQLSFGFGLVPSVLLAYIGQAAYLRVHPEDVANTFYRSTPISLFWPTFILALAASIIGSQAMISCAFATISHSQTLGCFPRVKILHTSRQYSGQLYIPEVNYLLCLGACLVTVGFRTTVIIGEAHGICVVLVMIVTTLLLTIVMLLVWKISVWWIVAFFLVFMSSESIYLSAILSRFAHGAYVPVAMSAVLMVVMVVWHYVHVNKYRFELEHSIPRDKVKELLERSDIQRVPGIGLFYTELVQGIPPVFRHLIEKIPSIHSVLIFVSMKHLPIPSVDMSERFLFRQVDREDYKVFQCVARYGYRDPFEEAKDFVDKLVEHLQYYIRDVNLYGLGCEPMMKQSFSYCSSRAESFGSHEKTKVKAVYAEEMLTPAESFSEHARQASGKNKLFTQFQTR

SEQ ID NO: 162134 - protein, 817 aa, Zea Mays
MAAHQHGTAGRGGGGGSMEIFPYSYSSGRDLELVDLPAEPVDVKRQDSLYRDATMPAHHGHNGQESWVRTLRLAFQCVGILYADLGTSPLYVYANTFKYGVHHEDDVLGVLSIIIYSFVLFTMIKIVFIALYANDDGDGGTFALYSLISRYAKVCLIPNQQAEDELVSRYKHRSKPSATLRRAQWMKDLLETSKTAKVSLFFLTILATALAISDCMLTPPISAVNGLKLRAPHLTTDETVWITVGILVVFFAVQRLGTDKIGYTFAPVVFVWLLLISGIGLYNTVKYDVSTLKAFNAKYIVDYFRRNKKKGWVSLGEILLCFTGTEALFADLGYFSIRSIQLSFTFGLLPSVMLTYIGQAAYMRKHIDTLDISNVFFQSIPRSLFWPTFVLALITSVIGSQAMVSCAFATMSHLQALNCFPRVKILHTSRRYSGQLYSPEVNVFLCIAACVVTVSFRTTGFIAKAHEICVVLVMVITTLLMTIVMLLVWKVNIWWIAVFFAVFMSTECVYTAAVLYKFTHGPYVPLAMSAVLMFVMAVWHYVHVKRYRHELERTVSRDAARDLLERGDLKRVPGLGLFYTELVQGIPPIFPHLVGKIPTIHSVVVFITVKSLPVPHVHVTDRFLFRQVEPKEFMVFRCVARYGYRDALETAADFVSVLVEYLQYYVRDLNLYGVVGDEPFKIVFHSARVDSFSWEKHSSGHAVYAEEMLTPAQSFSELTMHPVSMSSRLAHFQTGKMNLEEMLKIEEDQKIIQREVDNGVVYIIGESEVVAKPHSNLFKKIIVNYVYSFLRKNSRNGEKMLSIPRGQLLKVGITYEI

SEQ ID NO: 162135 - protein, 500 aa, Zea Mays
MAAHQHGTAGRGGGGGSMEIFPYSYSSGRDLELVDLPAEPVDVKRQDSLYRDATMPAHHGHNGQESWVRTLRLAFQCVGILYADLGTSPLYVYANTFKYGVHHEDDVLGVLSIIIYSFVLFTMIKIVFIALYANDDGDGGTFALYSLISRYAKVCLIPNQQAEDELVSRYKHRSKPSATLRRAQWMKDLLETSKTAKVSLFFLTILATALAISDCMLTPPISDETVWITVGILVVFFAVQRLGTDKIGYTFAPVVFVWLLLISGIGLYNTVKYDVSTLKAFNAKYIVDYFRRNKKKGWVSLGEILLCFTGTEALFADLGYFSIRSIQLSFTFGLLPSVMLTYIGQAAYMRKHIDTLDISNVFFQSIPRSLFWPTFVLALITSVIGSQAMVSCAFATMSHLQALNCFPRVKILHTSRRYSGQLYSPEVNVFLCIAACVVTVSFRTTGFIAKAHGNNNTSAKHLCSTVPYRNLSRLYINTIRVSATACACMHAFEQRSAWSS

SEQ ID NO: 162136 - protein, 55 aa, Zea Mays
MFCLFFKFRILKHIRETKSRPFHSPPTTARVNLPHLFAVPHPGRLLPRIYARSLR

SEQ ID NO: 162137 - protein, 83 aa, Zea Mays
MMYCNSVLVPFAIGCAELLVVGFILVEMLYCILVSASITNNSGYVALLLASSLVVEYYSKAMMALINLTTVNCVLLSVWGSSM

SEQ ID NO: 162138 - protein, 129 aa, Zea Mays
MQIMQRAQCNLCHKLGLLANDGTPNFDNAFQDFQAWFQKPLSKEVGATLEALFNIHMPDTEHVDKALMGIAGEAIEEIHDEMDNLQAEARSNAAARLVAVWFLASLSGCILVLDDVLQLSFSPFCNRLR

SEQ ID NO: 162139 - protein, 235 aa, Zea Mays
MDTNKDMKTREKELLAKEAELNRREKEIKRREDAAARAGIVLEEKNWPPFFPIIHNDIGNEIPVHLQRTLYVAFASLLGLVLCLFWNIICITAAWAKGSGPKIWFLAIIYFILGCPGAYYLWYRPLYRAMRNESALKFGWFFLFYLIHIAFCAYAAVSPSILFVGKSLTGILPAISLIGDSVIVGIFYFIGFALFCLEALLSVWVIQRVYLYFRGSGKEAEMRREAARGAARAAF

SEQ ID NO: 162140 - protein, 310 aa, Zea Mays
MAGRSRYDNPFEEGGADEVNPFADQAKRGGSTAQSGYSGGAFYTTQSQRPAPPSTRLSPLPPEPADFYNDFATPVDIPMDTNKTREKELLAKEAELNRREKEIKRREDAAARAGIVLEEKNWPPFFPIIHNDIGNEIPVHLQRTLYVAFASLLGLVLCLFWNIICITAAWAKGSGPKIWFLAIIYFILGCPGAYYLWYRPLYRAMRNESALKFGWFFLFYLIHIAFCAYAAVSPSILFVGKSLTGILPAISLIGDSVIVGIFYFIGFALFCLEALLSVWVIQRVYLYFRGSGKEAEMRREAARGAARAAF

SEQ ID NO: 162141 - protein, 303 aa, Zea Mays
MAGRSRYDNPFEEGGADEVNPFADQAKRGGSTAQSGYSGGAFYTTQSQRPAPPSTRLSPLPPEPADFYNDFATPVDIPMDTNKDMKTREKELLAKEAELNRREKEIKRREDAAARAGIVLEEKNWPPFFPIIHNDIGNEIPVHLQRTLYVAFASLLGLVLCLFWNIICITAAWAKGSGPKIWFLAIIYFILGCPGAYYLWYRPLYRAMRNESALKFGWFFLFYLIHIAFCAYAAVSPSILFVGKSLTGILPAISLIGDSVIVGVNLLLHWLCIVLPGGFAKRVGHSARLPVLPRERERSGDEA

SEQ ID NO: 162142 - protein, 84 aa, Zea Mays
MVSRNHILHPRMPRCILPLVPATIPRNEERERSQVRMVFPLLLDSYRLLRVRSCFSFNSLRGKIVNRDFASNQLDRRQRHCWGE

SEQ ID NO: 162143 - protein, 579 aa, Zea Mays
MAAWCSAESTKPVFVGIYGAVLGGFAVSALFFLLSSFSSLSAPTLPLPAAAIAGANLSAPTLAQAETMYNRPIWKPPPRRARMPSPRAFRLTRDMVAARARDGVIVVTFGNYAFLDFILTWVRHLTDLGVDNLLVGAMDTKLLRELYFRGVPVFDMGSRMVTEDAGWGSPTFHKMGREKVLLINALLPFGYELLMCDTDMVWLKNPLPYLARYPDADLLTSSDQVIPTVTDDSLENWREVTGAFNIGIFHWRPTEPAKRLAKDWKDLVISDDKLWDQNAFNDLVRKKFGQPVQGDDLVYSYDGKLKLGVLPASIFCSGHTYFVQGMYKQLHLEPYAVHTTFQYAGTEGKRHRLREAMLFFDQPSYYDSPGGFLSFKPNIPKSLLLDGAHTVESHFELVNYQLKQIRTALAVASLLKRTLVMPPLWCRLDRMWFGHPGILEGTMTRQPFLCPLDHVFEVHVMLKDLPKEEFGQHIDFREYSFLENPSLPKEVKDSLLEVELCDEHSSRCSAIDEIDKHGTFLLPRNSTEEKLLDLLSSYKDVKIIQFSSMVDAFGGFADAAVEKKFRNRVNRVEATPSRD

SEQ ID NO: 162144 - protein, 440 aa, Zea Mays
MAAWCSAESTKPVFVGIYGAVLGGFAVSALFFLLSSFSSLSAPTLPLPAAAIAGANLSAPTLAQAETMYNRPIWKPPPRRARMPSPRAFRLTRDMVAARARDGVIVVTFGNYAFLDFILTWVRHLTDLGVDNLLVGAMDTKLLRELYFRGVPVFDMGSRMVTEDAGWGSPTFHKMGREKVLLINALLPFGYELLMCDTDMVIPTVTDDSLENWREVTGAFNIGIFHWRPTEPAKRLAKDWKDLVISDDKLWDQNAFNDLVRKKFGQPVQGDDLVYSYDGKLKLGVLPASIFCSGHTYFVQGMYKQLHLEPYAVHTTFQYAGTEGKRHRLREAMLFFDQPSYYDSPGGFLSFKPNIPKSLLLDGAHTVESHFELVNYQLKQIRTALAVASLLKRTLVMPPLWCRLDRMWFGHPGILEGTMTRQPFLCPLDHVFEVILFMLC

SEQ ID NO: 162145 - protein, 396 aa, Zea Mays
MAAWCSAESTKPVFVGIYGAVLGGFAVSALFFLLSSFSSLSAPTLPLPAAAIAGANLSAPTLAQAETMYNRPIWKPPPRRARMPSPRAFRLTRDMVAARARDGVIVVTFGNYAFLDFILTWVRHLTDLGVDNLLVGAMDTKLLRELYFRGVPVFDMGSRMVTEDAGWGSPTFHKMGREKVLLINALLPFGYELLMCDTDMVIPTVTDDSLENWREVTGAFNIGIFHWRPTEPAKRLAKDWKDLVISDDKLWDQNAFNDLVRKKFGQPVQGDDLVYSYDGKLKLGVLPASIFCSGHTYFVQGMYKQLHLEPYAVHTTFQYAGTEGKRHRLREAMLFFDQPSYYDSPGGFLSFKPNIPKSLLLDGAHTVESHFELVNYQLKQIRTALAVASLLKRTLA

SEQ ID NO: 162146 - protein, 339 aa, Zea Mays
MAAWCSAESTKPVFVGIYGAVLGGFAVSALFFLLSSFSSLSAPTLPLPAAAIAGANLSAPTLAQAETMYNRPIWKPPPRRARMPSPRAFRLTRDMVAARARDGVIVVTFGNYAFLDFILTWVRHLTDLGVDNLLVGAMDTKLLRELYFRGVPVFDMGSRMVTEDAGWGSPTFHKMGREKVLLINALLPFGYELLMCDTDMVWLKNPLPYLARYPDADLLTSSDQVIPTVTDDSLENWREVTGAFNIGIFHWRPTEPAKRLAKDWKDLVISDDKLWDQNAFNDLVRKKFGQPVQGDDLVYSYDGKLKLGVLPASIFCSGHTYFVQEVSCHLNLTFQKVCY

SEQ ID NO: 162147 - protein, 72 aa, Zea Mays
MLHVSHDDKLDRHLCGSRLLLLPPSLGLRWSSFIIPRNQTRGGRSRRRRWPAGRTCRSWGPCIRSRCPACTD

SEQ ID NO: 162148 - protein, 866 aa, Zea Mays
MCIRLLRRDPMGALGYSSSKPPLTKIVESANGRPQDMDVVAAMRNGEVLGRLTVLKSDHCPGSHSLNLPERVEGAPNFREIPGFPVYGVANPTVDGIRAVIQCISTSKGGRPVLWHNMREEPVIYINGKPYVLREVERPCKNMLEYTGIDRDRVERMEARLKEDILREAERYGGAIMVIHETDDGEIFDTWENVDNEAVLTPLEVYKNLVSEGLPIKYARVPITDGKAPKSSDFDTIAFNVTAASKGTAFVFNCQMGRGRTTTGTVIACLLKLRIDHGRPIRIPVCQYDHEDDAIYSTGGDATDHNGHLNSESWKPRTLTKLNSGFGINDILLLRKITRLFDNGIECRQTLDTVIDRCSALQNIRQAVLNYTRVINQQHVEPRVRRVALNRGAEYLERYLKLIAFSAYLGSEAFDGFCGQGQTKISFKGWLQQRPEIQTMKWSIRLRPGRFFTVPHEQKATYPPPQGDVTMETIVKARSGSVLGKGSILKMYFFPGQKRSSSVNFRGAPHVIKVDGYPVYSMATPTIDGASDVLSYLGSKDTTGRNIAQKVVVTDLREEVVVYIKGSPFVLRELDQPVDTLKHVGISGPMVENIETRLKEDILSEVKQLGGRLLLHQEEFNAATNQCSVVGYWEHIDLEDVMTPAEVYSTLRDKGYCIEYKRIPLTREREALAADVDAIQSSIDESARYYLFISHTGYGGVAYAMAITCLGLSADAKFVMEETAETHFVSTSLAKNVSIKTKTDIALKQGDYRDILNLTRVLVHGPKSKEEVDTVIDRCSGAGHLREDIMHYRKALQDCSHDDDDDCDEEHSYLTDMGTKALRRYFFLITFRSYLYSTTSCKTTFTSWMKARPELGHLCDNLKLDK

SEQ ID NO: 162149 - protein, 95 aa, Zea Mays
MDTLGALALATEPPTNHLMERPPVGRREPLIINIMWRNLIIMALFQVSFLLTLNFKGISLLQLKNDDPAHADKVKNTFIFNTFVFCQVLRFSFCL

SEQ ID NO: 162150 - protein, 174 aa, Zea Mays
MSTQDVKFIQFQLTVNVAALIINVVAAVSSGNVPLNDVQLLWVNLIMDTLGALALATEPPTNHLMERPPVGRREPLIINIMWRNLIIMALFQVSFLLTLNFKGISLLQLKNDDPAHADKVKNTFIFNTFVFCQVFNEFNSCKPDELNVFKGISENHLFIGIIAITVVLQVESLE

SEQ ID NO: 162151 - protein, 428 aa, Zea Mays
MPARALASAALATLRPPPRCPRPPSAARSPPFPQTLSCTSCLRLHSRCSCPPHRRDNRLRIRRQIPALPPNPAPIVSADPAFARVSLPRRGPTAMVEEHGGRGEAGTSGGGDVEYDDDDSMRPTAEPAKEEDIEGAVCSAPCRRAVRNTTPSPSRDMVDARASTGGEDPTAVDVVVTQLALHRLRPPLDFLASPIALLEDCKYSEHHRCQNQRSDVKGNCCRGLGSRTGGRARGCGPPSTCPSRRRSCRSKQSRGEQSRAAQIETSSRPSRAPHLHLGHPLARVEDELLLCLRQLCAPCSAACLPRPQGGCVGVASDNAKAPSRPSRALCLHQVAHPSKWRTSSSSTASRPSSSPRTHPQPRSIARSEPARHELHRGTDPISAPGRGLNLKHGKATSPLGPIRNWQGIPTQICKYSNRFARSFSSLPA

SEQ ID NO: 162152 - protein, 429 aa, Zea Mays
MPARALASAALATLRPPPRCPRPPSAARSPPFPQTLSCTSCLRLHSRCSCPPHRRDNRLRIRRQIPALPPNPAPIVSADPAFARVSLPRRGPTAMVEEHGGRGEAGTSGGGDVEYDDDDSMRPTAEPAKEEDIEGAVCSAPCRRAVRNTTPSPSRDMVDARASTGGEDPTAVDVVVTQLALHRLRPPLDFLASPIALLEDCKYSEHHRCQNQRSDVKGNCCRGLGSRTGGRARGCGPPSTCPSRRRSCRSKQSRGEQSRAAQIETSSRPSRAPHLHLGHPLARVEDELLLCLRQLCAPCSAACLPRPQGGCVGVASDNAKAPSRPSRALCLHQVAHPSKWRTSSSSTASRPSSSPRTHPQPRSIARSEPARHELHRGTDPISAPGRGLNLKHGKATSPLGPIRNWQGIPTQISGDDLMSDRYHLRPLTR

SEQ ID NO: 162153 - protein, 144 aa, Zea Mays
MPASSPLADVLWPAPFDGPATARLRQVRTPPFPSSSFWKDSANFSRHPHHPPAQVPRGEHHHFLQPIVSAPRCSPQCPQTVRHNVQEKRHVNDSVAEPHSCPRETICKVLNHLEQMIVVLFLSTKHHKREGGAEGIVTYHLNVL

SEQ ID NO: 162154 - protein, 428 aa, Zea Mays
MPARALASAALATLRPPPRCPRPPSAARSPPFPQTLSCTSCLRLHSRCSCPPHRRDNRLRIRRQIPALPPNPAPIVSADPAFARVSLPRRGPTAMVEEHGGRGEAGTSGGGGEARHPQHAHGARIPQGGVPQEEEGRCRAAARATTEGDVEYDDDDSMRPTAEPAKEEDIEGAVCSAPCRRAVRNTTPSPSRDMVDARASTGGEDPTAVDVVVTQLALHRLRPPLDFLASPIALLEDCKYSEHHRCQNQRSDVKGNCCRGLGSRTGGRARGCGPPSTCPSRRRSCRSKQSRGEQSRAAQIETSSRPSRAPHLHLGHPLARVEDELLLCLRQLCAPCSAACLPRPQGGCVGVASDNAKAPSRPSRALCLHQVAHPSKWRTSSSSTASRPSSSPRTHPQPRSIARSEPARHELHRGTDPISAPCLQGGGA

SEQ ID NO: 162155 - protein, 51 aa, Zea Mays
MALDETFCTALEYGLAPTGGWGLGIDRLTMLLTDSQNIKEVLLFPAMKPQE

SEQ ID NO: 162156 - protein, 1071 aa, Zea Mays
MEMVRRNLKRQASRSLSAFAGAASPHAVDQENLHPNLASTPPASPAKGTSSPRPKHPAAAAAAAAQPAATAEEDHSTAPTTAPADDERFVKVVVRVRPTVSRPVNGKDLWFVRKTAPDSVAVGDRSFPVDGVLDDRASQADAFDLVGLPMIENAMAGFNTSLVCYGQSGTGKTYTMWGPLGAMVDSGSDHADRGVVPRVFQNLFSRIQRMGESSPEKQTSYQCRCSFLEVHNEQINDLLEPSQRDLQIRENASNGIHVENLTDEYVSTADDISQILMKGLSNRKVGTTSMNLKSSRSHVIFTCVIEAWSKGSSNGFSSSRTSRITFVDLAGPDTDELGAAKHSTKEERHLKKSLSRLGKLVNVLSETPESHKVDLPYEQSRLTHVLKDTLGGNSRVIFLCSISSEHRSGTLSTLRFGERAKLMPNKPVINEISEDDVNGLSDQIRQLKDELIRTKSGDTTTCKARYFSAQSARESLHTLRVSLNRSLIFPHIEVDSEEEMDVDEEDVQELRDQISKIHSSSEDTLDDFMDAESGDESTPCSVGRSEDDQVIIDDFEGPQQEEQKEVSNNTNANEDLGSDRKSNLSIIASTRLSPIQDPTLCSSPKIHNKARMSITSLGLSPSKIRISDSPGDRNVEMCTNSAFRSSLQSSKLSPTDSLAASLQRGLHIIEYHQQNPAPRKSFIGLSFDHFARQSVAKISSAVQALPEDQGNNLCSFCKKPMNTNDNQTENDGNITKEIASKRETELEALCEEQRAKIQELSSLIDQYKNRSEELTSEGKVSVSLSVNEREVLLAEIQSLREQLKNQTTVSTTGSLLDQLRNGSTDQEYELDKERQKWMESESKWISLTEELRVDLESNRMHAEKTEMELCNEKKCTAELDDALQRAMYGHARMVEHYVELQELYNDLLEKHRRVMEAISEVKRAAARAGRKGCGTAFAAALAAELSTVRIDREKERAQLKEQNRRLRIQLRDTAEAVHAAGELLVRLRETEEASTLEKERTAALLQENEKLKKQLEKLRKKHEMELETMKVHLAESRLPESALGAFYHHENERTPDDDLSWRAAFASAYSD

SEQ ID NO: 162157 - protein, 792 aa, Zea Mays
MNLKSSRSHVIFTCVIEAWSKGSSNGFSSSRTSRITFVDLAGPDTDELGAAKHSTKEERHLKKSLSRLGKLVNVLSETPESHKVDLPYEQSRLTHVLKDTLGGNSRVIFLCSISSEHRCRSGTLSTLRFGERAKLMPNKPVINEISEDDVNGLSDQIRQLKDELIRTKSGDTTTCKARYFSAQSARESLHTLRVSLNRSLIFPHIEVDSEEEMDVDEEDVQELRDQISKIHSSSEDTLDDFMDAESGDESTPCSVGRSEDDQVIIDDFEGPQQEEQKEVSNNTNANEDLGSDRKSNLSIIASTRLSPIQDPTLCSSPKIHNKARMSITSLGLSPSKIRISDSPGDRNVEMCTNSAFRSSLQSSKLSPTDSLAASLQRGLHIIEYHQQNPAPRKSFIGLSFDHFARQSVAKISSAVQALPEDQGNNLCSFCKKPMNTNDNQTENVNLDKQIKDGNITKEIASKRETELEALCEEQRAKIQELSSLIDQYKNRSEELTSEGKVSVSLSVNEREVLLAEIQSLREQLKNQTTVSTTGSLLDQLRNGSTDQEYELDKERQKWMESESKWISLTEELRVDLESNRMHAEKTEMELCNEKKCTAELDDALQRAMYGHARMVEHYVELQELYNDLLEKHRRVMEAISEVKRAAARAGRKGCGTAFAAALAAELSTVRIDREKERAQLKEQNRRLRIQLRDTAEAVHAAGELLVRLRETEEASTLEKERTAALLQENEKLKKQLEKLRKKHEMELETMKVHLAESRLPESALGAFYHHENERTPDDDLSWRAAFASAYSD

SEQ ID NO: 162158 - protein, 64 aa, Zea Mays
MQSLQGRILMEMNYMLAYGSTEASLRLLWRFVHLEHLLPFQVIALDINLPMKQSFHILHEQSLQ

SEQ ID NO: 162159 - protein, 108 aa, Zea Mays
MLSLKAKKEVQTLFEENQNLKNHNLMLSACQSVERDNLKALHHNLDIECYQLKATIEETKAKIESLTTENYLAERKLQQLRVKIDGLKIETTKTMDNLDKEHSIAAEL

SEQ ID NO: 162160 - protein, 79 aa, Zea Mays
MRNRLRDYVAEYNLLGNYSIVSVGPFHFSLSTAKKIYIKKLLVKKWKACSDLLFVNKSIAGVHDIGFHCNRCISKFRMA

SEQ ID NO: 162161 - protein, 92 aa, Zea Mays
MSDANDPQGSKPATASTQNDKLYTAEGILDPRKRKAEKKRRKANRFSVLNDMDADYDFKVDYQMEDAADGEDEDAGDEAKEDNEPMTGVDDS

SEQ ID NO: 162162 - protein, 360 aa, Zea Mays
MVKRSKKSKSKRVTLRQKHKVLRKVKEHHRKKRKEAKKEGKAGQRKKVEKDPGIPNEWPFKEQELKALEARRAQALQELELKKEARKERARKRKLGLLEDEEIANLASAASAQGSEFAAKDAAKDKAPLTVAKSNDHSERSFYKELVKVIEASDVILEVLDARDPLGTRCIDMEKMVRKADPSKRIVLLLNKIDLVPKEAVEKWLTYLREEMPTVAFKCNTQEQRTKLGWKSSKLDKTNIIPQSSDCLGAENLIRLLKNYSRSHELKLAITVGIVGLPNVGKSSLINSLKRSRVVNVGSTPGVTRSMQEVQLDKKVKLLDCPGVVMLKSSNSGVSVALRNCKRVEKMEDPVTPGSKLQFS

SEQ ID NO: 162163 - protein, 420 aa, Zea Mays
MEKMVRKADPSKRIVLLLNKIDLVPKEAVEKWLTYLREEMPTVAFKCNTQEQRTKLGWKSSKLDKTNIIPQSSDCLGAENLIRLLKNYSRSHELKLAITVGIVGLPNVGKSSLINSLKRSRVVNVGSTPGVTRSMQEVQLDKKVKLLDCPGVVMLKSSNSGVSVALRNCKRVEKMEDPVTPVKEILGICPHEKLLSMYKVPSFSSVDDFLQKVSTVRGKLKKGGVVDVEAAARIVLHDWNEGKIPYFTLPPKRDAVEDSDVVIISEDGKEFNIDEIYKAESSYIGGLKSIEEFHHIEIPPNAPPAIDEEMLEDGSKPSEPAQENREEQMSDANDPQGSKPATASTQNDKLYTAEGILDPRKRKAEKKRRKANRFSVLNDMDADYDFKVDYQMEDAADGEDEDAGDEAKEDNEPMTGVDDS

SEQ ID NO: 162164 - protein, 568 aa, Zea Mays
MVKRSKKSKSKRVTLRQKHKVLRKVKEHHRKKRKEAKKEGKAGQRKKVEKDPGIPNEWPFKEQELKALEARRAQALQELELKKEARKERGSEFAAKDAAKDKAPLTVAKSNDHSERSFYKELVKVIEASDVILEVLDARDPLGTRCIDMEKMVRKADPSKRIVLLLNKIDLVPKEAVEKWLTYLREEMPTVAFKCNTQEQRTKLGWKSSKLDKTNIIPQSSDCLGAENLIRLLKNYSRSHELKLAITVGIVGLPNVGKSSLINSLKRSRVVNVGSTPGVTRSMQEVQLDKKVKLLDCPGVVMLKSSNSGVSVALRNCKRVEKMEDPVTPVKEILGICPHEKLLSMYKVPSFSSVDDFLQKVSTVRGKLKKGGVVDVEAAARIVLHDWNEGKIPYFTLPPKRDAVEDSDVVIISEDGKEFNIDEIYKAESSYIGGLKSIEEFHHIEIPPNAPPAIDEEMLEDGSKPSEPAQENREEQMSDANDPQGSKPATASTQNDKLYTAEGILDPRKRKAEKKRRKANRFSVLNDMDADYDFKVDYQMEDAADGEDEDAGDEAKEDNEPMTGVDDS

SEQ ID NO: 162165 - protein, 66 aa, Zea Mays
MDWALSALSTVNKQINSLSALSRSRTGHWRRLWALGAVGGGKREEGGRGAGDRRHTWRLWSLWTTV

SEQ ID NO: 162166 - protein, 157 aa, Zea Mays
MGFSPSLSPAVCQYLHASHHPTHPSHSQAATRRGEIHTACLLFWLLFLGDELPLACRLQLSVSCVRGSVYLGQSCLLFQKLKKHDWRRRRKTRTELRCYPGALADDGATAEQTGASGAFPRRWLLRCDGSAAAGGEERRSCLGHGWVGVHHSRMHVT

SEQ ID NO: 162167 - protein, 83 aa, Zea Mays
MTVMTCSVTRDSEIVSEYKQMYSSEFRGIVVSFVRGFSFGLVIHGCTLCKSRYVLLLNVSNLRTCFLTVMPMMSVASSEALSF

SEQ ID NO: 162168 - protein, 156 aa, Zea Mays
MYRGGLDRFKKAQTLEPFSVKSESGTKKAPAAAGTAKAPPAPLTLPQNSNFVLGQNNQSLQGTNTRVAGQDGVAPGHVGTQAGGGQSTWQPPDWAIEPRPGIYYLDVVKDGEVIDRINLDNRRHLFGRQVPACDFVLDHQSVSRQHAAVVPHRNGR

SEQ ID NO: 162169 - protein, 313 aa, Zea Mays
MSPMPTAPYTSATSLLLGSRRLPRFQFQSLRTPTKPPFRRPASSSSTPLPRCRASATPRPLAPVCASALALPVSVAAAPPPQVDGGWVGGTAAAVRRVAVAVACGALAAAWCRRAMAVGAAAAAGAGAGAPGTVEAAAGIGWMALRGGWPRVLQILQLLREHGLILAALLSLSAFFSMAETSITTLWPWKVRELAEKEPENGVFKMLRSDVTRFLTTILIGTTVVNIGATAIVTEAATAMFGEAGVSAATGVMTVAILLLTEITPKSVAVHNATEVARFVTGRMAFTDPLSSWADCYFSVNGDAKDSRPEREK

SEQ ID NO: 162170 - protein, 643 aa, Zea Mays
MEEKAMANGAATADVAAPDNKDNTKEEASESKEPAANQDADDQNKGLENGAEGQSGGDVNMADAEVTEEGDGDPGVAKQVDSEDIKTDADTKEDGNAKAEEVEDVKMTEADTGSTEVKDKEEKGDEVVDTTVDKQDESKEQEEGVSAEQDEKQGEEAEEKGKEMDADEKQEEEAEEKGSADEKDEDEGDQKMEENKEETPKNKKARSARDRSQGNDNKHDGSKSREAKSLLNTPSPYGTDRPQRERKIVERLVEVIEKEPNRNFVVEKGRGTPLKDIPSVAHRISRKKPSDLKFLHSILFGRKGKAVDFKGHILQFSGFVWHESDEKHRVKAKEKLDKCVKETLLDLCWTLGIPTPKANIRKEDIVSKLLDFIAEPHSAADSGLSDDQGSNSKKRKRGGESARKTPDSTPSRSRKKFINDSTSSKRQKKALEYDTDEDESMKSDSEENRDEDSDEAGDKQEGDYVSGKEKAGKFSEVKESSGKKKANTGSGHQSGPPKKIIRSPVKKVSSKIHEEKESPNNSAKVFSRKKKPTAEKEIKEKKSSGKKVTKGKGESVEAVLPSKDDLRKTITEILKKVDFNTATFSDILKKLDNHYKMDLAPKKEAIKVMIQDELTKLSEEDEGEGAGDTEKKQQQPQAKEIEA

SEQ ID NO: 162171 - protein, 332 aa, Zea Mays
MEEKAMANGAATADVAAPDNKDNTKEEASESKEPAANQDADDQNKGLENGAEGQSGGDVNMADAEVTEEGDGDPGVAKQVDSEDIKTDADTKEDGNAKAEEVEDVKMTEADTGSTEVKDKEEKGDEVVDTTVDKQDESKEQEEGVSAEQDEKQGEEAEEKGKEMDADEKQEEEAEEKGSADEKDEDEGDQKMEENKEETPKNKKARSARDRSQGNDNKHDGSKSREAKSLLNTPSPYGTDRPQRERKIVERLVEVIEKEPNRNFVVEKGRGTPLKDIPSVAHRISRKKPSDLKFLHSILFGRKGKAVDFKGHILQFSGFVWHESDSQGKRKA
